United States Patent Application Publication US 2022/0096574 A1 - sequence listing, part 16

SEQ ID NO: 72894 - protein, 365 aa, Synergistales bacterium
  misc_feature (1)..(365): tr|A0A117M7T2|A0A117M7T2_9BACT S-adenosylmethionine:tRN A ribosyltransferase-isomerase OS=Synergistales bacteri um 58_81 OX=1635274 GN=queA PE=3 SV=1
MEGPFRTDLPGREGDMEGSGSMFDINSYDYYLPESMIAQEPAEPRDSSKLLVLDRFSGTIRHRVFHEIMSLLREKDLLVINDTRVARARLRGVKIGGGASIEVFLLRPLHGDRCALWEVLVRPGRRVRPGQRLVLDGGIEVVIGEMTVHGSRTCSFPEGTDVWKLMEETGEIPFPPYIHNPFIDPERYQTVYGVNRGSVAAPTAGLHFSPELLRNIEGAGIRTARITLNVGLGTFRPVKEEDIRMHRMHSEECTVPEATALAVKETKDFGGRVVAVGTTVVRALESRAAEDGTVTPGSFSTEAFFYPGYRFRTIDAMITNFHLPRSTLLMLVCAFAGNELIMKAYSEAIESGYRFYSFGDAMFIQ

SEQ ID NO: 72895 - protein, 352 aa, Synergistales bacterium
  misc_feature (1)..(352): tr|A0A117MFK6|A0A117MFK6_9BACT S-adenosylmethionine:tRN A ribosyltransferase-isomerase OS=Synergistales bacteri um 54_9 OX=1641385 GN=queA PE=3 SV=1
MDHMHNNDYFDINAYGYYLPQELIAQNPAEPRDSSRLMVVDRENGRITHSIFSNLHSFLKSGDLLVLNDTKVFRARLKGVKKGGQTEAEILLLRPLDRLEKEWEALVRPGKRLSPGAVVILKDKTEIVIGESAEAGTRRVGFPGGCNVRALMERIGEVPLPPYIKKTSAPSERYQTVYADKSGSAAAPTAGLHFTERVFRRLHESGVEKAFLTLHVGLGTFRPVKENDIRNHKMHEEYCSIDKETAEKINRTKRGGNRVIAVGTTVVRTLESLADERTGEVNPGSLWTKAYIYPGYAFKAVDAMVTNFHLPKSTLLMLVAAFAGRNLILEAYEEAVRMRYRFFSFGDAMLII

SEQ ID NO: 72896 - protein, 354 aa, Synergistes jonesii
  misc_feature (1)..(354): tr|A0A073J4B5|A0A073J4B5_9BACT S-adenosylmethionine:tRN A ribosyltransferase-isomerase OS=Synergistes jonesii O X=2754 GN=queA PE=3 SV=1
MSEKTPDLSKTAAYDYFLPKELIAQDPAEPRDSSRLLVLRRATGESEDTIFHNIVNYLREGDLLVMNDTRVLPARVEGRKINESGEGAKVEIFFLNPGARHNEWTALVRPGRKLSEGTKVALSDDFRVAVGARLEDGLRTIIFGESDEPLALIHKFGRTPLPHYITETHADPERYQTVYAKREKENSVAAPTAGLHFTPELLKKLEERGVPHKFVTLQVGLGTFRPVKAENIAEHIMHTEFCEVPGDTADAIKETKERGGRVVAVGTTVVRTLEAFAQRFGEVRGGALSTKLFINPGYSFKAIDALITNFHLPMSTLLMLVSAFGGYETTMRAYREAVEKRYRFFSFGDSMFIE

SEQ ID NO: 72897 - protein, 348 aa, Synergistes sp.
  misc_feature (1)..(348): tr|G9PX54|G9PX54_9BACT S-adenosylmethionine:tRNA ribosy ltransferase-isomerase OS=Synergistes sp. 3_1_syn1 OX=4 57415 GN=queA PE=3 SV=1
MERDLTKTAAYDYDLPKELIAQDPAEPRDSSRLLVVHRKDGLTEDRIFRDITEYLRPGDLLVMNDTRVLPARVEGVKINGGAKVEIFFLHPGARRDEWTALVRPGRKLPEGTKVALDAGVEITVGARLEDGLRTVAFADGDDPFTLIHRYGQTPLPHYITDTHAEPERYQTVYAKREKENSVAAPTAGLHFTPGLLRKLTDMGVPHAFVTLQVGLGTFRPVKAENIAEHVMHTEFCEIPPAAAAAINETKEKGGRVVAVGTTVVRTLESFAREYGRIVPGALSTRLFISPGYRFRVIDALITNFHLPMSTLLMLVSAFGGYETMMRVYNEAVEKRYRFFSFGDSMFIE

SEQ ID NO: 72898 - protein, 349 aa, Synergistetes bacterium
  misc_feature (1)..(349): tr|A0A2N1QX53|A0A2N1QX53_9BACT S-adenosylmethionine:tRN A ribosyltransferase-isomerase OS=Synergistetes bacteri um HGW-Synergistetes-1 OX=2013842 GN=queA PE=3 SV=1
MTVPDFSKTSTFDYYLPKELIAQDPVEPRDSSRLLVLHKDSGTREHKIFRDIKDHLRKGDLLVLNDTRVIPARVPGIKKNSKAEVEIFFLSPAAEPNMWTALVRPGRKLKEGTHVQLGEDVEIVVGERLEDGVRNVYFAPSADPFAIIHKYGTTPLPHYITETHAEPERYQTVYSKPEKENSVASPTAGLHFTKELLKEIRTMGVDEAFVTLQVGLGTFRPVKTENLSEHIMHSELCEISNITARKIAETKMSGGRVIAVGTTVVRTLESFAMHYGEIRPGILDTRLFITPGFNFRVIDALITNYHLPKSTLLMLVSAFGGYDRIMEAYNEAVDLKYRFFSFGDSMFIC

SEQ ID NO: 72899 - protein, 322 aa, Synergistetes bacterium
  misc_feature (1)..(322): tr|A0A2N1QL51|A0A2N1QL51_9BACT S-adenosylmethionine:tRN A ribosyltransferase-isomerase (Fragment) OS=Synergiste tes bacterium HGW-Synergistetes-2 OX=2013843 GN=CVV55_0 7785 PE=3 SV=1
MQTVDLFDIESYNYMLPEELIAQNPATPRDSSRMLVLDRCSGKIAHRRFFDLRELLKPSDLLVLNDTRVIPARLRGSKLPGGGKAEVLLLKALNPEWSEWEALVKPGRRLRSGTGIMLSDGTVITVGERFEGTEGVRRVSFPQGVKVLSLLTEIGETPLPPYITRSTAPRSAYQTVFAARDGSAAAPTASLHFTEELLEELRREFGLSVAWVTFHVGLGTFRPVQCSDIRKHVIHEEYCVLPLETKKLVEETKRRGGRVIAAGTTVARTLESMAAKDGEMRWGEMNTQLFIYPGFEYKVVDALVTNFHLPKSSLLMLVAAFA

SEQ ID NO: 72900 - protein, 345 aa, Syntrophaceae bacterium
  misc_feature (1)..(345): tr|A0A1J5IAY1|A0A1J5IAY1_9DELT S-adenosylmethionine:tRN A ribosyltransferase-isomerase OS=Syntrophaceae bacteri um CG2_30_58_14 OX=1805378 GN=queA PE=3 SV=1
MRLEEFAYDLPDVLIAQEPAAVRDRSRMMVVHRKTGEIEIRTFRDLPGYFGEGDVFVVNDSRVFPARLIGRKETGGLIEILLLTRQPGDPPGETWEVLLRPAKRVVVGTTVTFAAGCRATIVRRLSEKRWLLEFRTEIPFDDFLARFGRAPLPPYIKRKRDRARSLQDLERYQTVYARVKGSVAAPTAGLHFTQEVLELLRGRAVGIAPVTLHVGYGTFLPIAAENVEDHVMEEEHFTIDGGTAQLINGAKRVIAVGTTSTRVLESVADDEGKIRPVSGSTRLYIYPGSRFRRVDALLTNFHLPKSSLFLLVCAFAGTERMQEAYRIAIENRFRFYSYGDCMLIL

SEQ ID NO: 72901 - protein, 345 aa, Syntrophaceae bacterium
  misc_feature (1)..(345): tr|A0A1J5I2A5|A0A1J5I2A5_9DELT S-adenosylmethionine:tRN A ribosyltransferase-isomerase OS=Syntrophaceae bacteri um CG2_30_49_12 OX=1805377 GN=queA PE=3 SV=1
MRLEEFDYHLPEELIAQEPCEVRDQARMMVVSRKTGGIENKVFHDLPEFLNKGDVLVINDSKVISARLIGEKASGGRIEILLLKKHDDASPGETWEVLLRPAKRTRVGTKIFFHDGSQARVEERIGDRKWLITFSTDIAFDQFLHQYGKAPLPPYIKRRGDCVTDRNDIERYQTVYASTPGSVAAPTAGLHFSRNILNTLEGQGVQIASVTLHIGYGTFLSLKSGIVEDQVMEEEFFEIGEEAAKMINDGERVIAVGTTSTRVLETASDEEDRIRAKAAFTRLFIYPGYRFKRVGALLTNFHLPRSSLFLLVCAFAGKNLIQKAYQRAIEDCYRFYSYGDCTLIL

SEQ ID NO: 72902 - protein, 344 aa, Syntrophaceticus schinkii
  misc_feature (1)..(344): tr|A0A0B7MPF4|A0A0B7MPF4_9FIRM S-adenosylmethionine:tRN A ribosyltransferase-isomerase OS=Syntrophaceticus schi nkii OX=499207 GN=queA PE=3 SV=1
MLVSDFDYDLPTELIAQYPAAQRDASRMMVLNRKSGEINHTHFKNILDYLEEGDLLVFNETKVFPARLFGRRVKTGGKLEVLLLDEKEPCTWEALVRPGRHAREGEEIIFGEALRAVIGERTDSGGRIINFLVEDKQEFWDQLFKIGKMPLPPYIKRPAEEMDRERYQTVYARSLGSAAAPTAGLHFTEEILGQLKDKGVQFAFVVLHVGLGTFRPVHVPKVEDHRMHAEFWRLDAHNASLINEARQNGRRVIAVGTTTVRLLESVAGDDGTVGAGEGWTSIFIYPGFRFRVIDGLVTNFHLPCSTLLMLVCAFAGYNKVLPAYREAVEKSYRFFSYGDAMLIL

SEQ ID NO: 72903 - protein, 357 aa, Syntrophobacter fumaroxidans
  misc_feature (1)..(357): tr|A0LFR1|A0LFR1_SYNFM S-adenosylmethionine:tRNA ribosy ltransferase-isomerase OS=Syntrophobacter fumaroxidans (strain DSM 10017 / MPOB) OX=335543 GN=queA PE=3 SV=1
MADERISYRLREYDYDLPPSLIAQSPLSRREESRLLVLDRGRGAMDHVRFRDLPDHLHAEDLLVVNDTRVVPARLIGFKDSGGRIELLVTEPYKSEAEGRRDGYWCLAAAAKRTRPGCLISLPDGTVAEVLEAGDGGRIRVRFPDDRPLMTILSEIGAVPLPPYINRSGTGDFPGDAEAYQTVYARNPGAVAAPTAGLHFSSALLEAVARAGVEVVRITLHVGYGTFAPIRVDDIRDHEMHPEYVRVDEDSTERIRSAIDRKRRIVAVGTTVVRSLEWIAHRRGEIMPAAGACAHYIYPGYRFKVVDAMITNFHLPRSSLLLLVSAFAGRRRILEAYREAIRREYRFFSYGDAMLIL

SEQ ID NO: 72904 - protein, 194 aa, Syntrophobacter sp.
  misc_feature (1)..(194): tr|A0A0S7XVA8|A0A0S7XVA8_9DELT S-adenosylmethionine:tRN A ribosyltransferase-isomerase (Fragment) OS=Syntrophob acter sp. DG_60 OX=1703361 GN=AMJ45_03950 PE=3 SV=1
YIKRDVIPEDASNYQTIYAEKPGAIAAPTAGLHFSPEIIDTLKKKGIGIVHITIHIGYGTFIPVKVSDIRKHKMESESFEVSEEAAKFINDGINGIKGGKEIIAVGSTTTRALEYLATKYGKVIAKKGICDLFIYPGYRFKVIKGLITNFHLPKSTLIMLVCAFASRELILKAYQEAINMQYRFYSYGDAMLIV

SEQ ID NO: 72905 - protein, 347 aa, Syntrophobacter sp.
  misc_feature (1)..(347): tr|A0A2U3L3U7|A0A2U3L3U7_9DELT S-adenosylmethionine:tRN A ribosyltransferase-isomerase OS=Syntrophobacter sp. S bD1 OX=2043167 GN=queA PE=3 SV=1
MNSPAAEQLRLSDFDYDLPEALIAQEPASERDHSRLMVLDRSSSVIEHKIFADLEKYLLPGDLLVLNDTRVFPCRLPSTKQGGGRSEIFLLSELDCNLWIALVKGGVGVGKRLIISTGVEAEIVQEHADGTRTVRFHSLADIHGILNEIGRVPLPPYIRRDPSRKDCERYQTVYASREGAVAAPTAGLHFSRELLATLAAKGVELVTITLHVGPGTFQPVRSDRIVEHRMLPERYSISAAAAAAINKAKAEDRRVIAVGTTSVRTIETASRVFGSVIAGEGTSELFIYPGYEFKVTGGIITNFHLPKSTLLMLVSAFAGRERMLAAYRTAIADQYRFYSYGDAMLIA

SEQ ID NO: 72906 - protein, 306 aa, Syntrophobacteraceae bacterium
  misc_feature (1)..(306): tr|A0A3D0H820|A0A3D0H820_9DELT S-adenosylmethionine:tRN A ribosyltransferase-isomerase (Fragment) OS=Syntrophob acteraceae bacterium OX=2052185 GN=DEO88_15230 PE=3 SV= 1
DVSRYFGPYDVLVINDTQVVRARLSGTKDSGGRVELLILDPYKDSQLAQQEGYTCLIKASKKPRPGSLIHLMDGVEALVLSPVINGQARIRIIGNASMGEIFEQIGEIPLPPYIERRDAKPATNDSISYQTVYARIPGAVAAPTAGLHFSLELLRQLATQGVNIVKITLHVGYGTFSPIRTQDIRYHTMHPEYAEVSVETADRLERARRNGDRIVAVGTTVVRTLEWVAQERGCIEPYSGLCHHYIYPGYEFRVVQAMLTNFHLPKSSLLLLVMAFAGRDRIVAAYQEAIRNGYRFFSYGDAMLIL

SEQ ID NO: 72907 - protein, 356 aa, Syntrophobacteraceae bacterium
  misc_feature (1)..(356): tr|A0A1J5IFH3|A0A1J5IFH3_9DELT S-adenosylmethionine:tRN A ribosyltransferase-isomerase OS=Syntrophobacteraceae bacterium CG2_30_61_12 OX=1805379 GN=queA PE=3 SV=1
MTTDFLLDAYDYPLPPALIAQAPVPNRCGSRLLVLDRSRNGGLEHRIFSELGRYLDRGDVLVLNDTRVVPSRLRGVKASGGKVELLVLEPCRSEALNAAAGHPCLIKASKPPRAGTRLILNGGVTARVEAPLGEGRYRVRFDDQRPLAALLDAVGEVPLPPYISRTGSDPAPVNDRDSYQTVYADHPGAVAAPTAGLHFTRQLLDQLERQGVELVRITLHVGYGTFAPIRCRDIRDHRMHAEAVEISAAAAAAVNAARRDGRRIVAVGTTAVRTLEWSASDSGTVTAGAGLCDHYIYPGYRFRVVDAMITNFHLPKSTLLLLVSALAGREAILAAYREAITRGYRFYSYGDAMLIR

SEQ ID NO: 72908 - protein, 345 aa, Syntrophobacterales bacterium; identical to SEQ ID NO: 72900
  misc_feature (1)..(345): tr|A0A2M7BJJ6|A0A2M7BJJ6_9DELT S-adenosylmethionine:tRN A ribosyltransferase-isomerase OS=Syntrophobacterales b acterium CG03_land_8_20_14_0_80_58_14 OX=1974100 GN=que A PE=3 SV=1

SEQ ID NO: 72909 - protein, 345 aa, Syntrophobacterales bacterium; identical to SEQ ID NO: 72901
  misc_feature (1)..(345): tr|A0A2M8GCY9|A0A2M8GCY9_9DELT S-adenosylmethionine:tRN A ribosyltransferase-isomerase OS=Syntrophobacterales b acterium CG_4_8_14_3_um_filter_49_14 OX=1974097 GN=queA PE=3 SV=1

SEQ ID NO: 72910 - protein, 340 aa, Syntrophobotulus glycolicus
  misc_feature (1)..(340): tr|F0T265|F0T265_SYNGF S-adenosylmethionine:tRNA ribosy ltransferase-isomerase OS=Syntrophobotulus glycolicus ( strain DSM 8271 / FlGlyR) OX=645991 GN=queA PE=3 SV=1
MRVKDFDYDLPAELIAQHPVEPRDHSRLMVVNKEKGELFHALFKEIVDFFQPGDVLVVNKTKVIPARLFGVKEGTGAKIEILLLNRKETDTWEVLVKPGKRLKIGQRVIFGEGRLIGELLEILPDGNRIIKFLYQGLFENILDQLGQVPLPPYITEKLENQERYQTVYAKESGSAAAPTAGLHFTERLMDQIKAKGADIQEIVLHVGLGTFRPVKAENIEDHLMHTEYYQIGLQAAETINAAKARGSRIIAVGTTVSRSLEAAAVNGKVEAGASWTDIFIYPGYTFQIVDALITNFHFPRSTLLMLVSALAGQELMLKAYETAVREKYRFYSFGDAMFIC

SEQ ID NO: 72911 - protein, 236 aa, Syntrophomonas sp.
  misc_feature (1)..(236): tr|A0A356UEI5|A0A356UEI5_9FIRM S-adenosylmethionine:tRN A ribosyltransferase-isomerase (Fragment) OS=Syntrophom onas sp. OX=2053627 GN=queA PE=3 SV=1
MHKNQEKSIYNLQSYQFNLPPELIAQYPVEPRHQSRLLVLERQTGLIKNHIFADIIDYLESGDTLVLNDTRVIPARLYGYKDSGAKVEILLLNQRGRQWEALVRPAKRLKPGSIVRFDDQNGVEVEIMAELNLAGGRLIEFKNCVDQMSFIDQMGQMPLPPYINRPAENSDKQNYQTIYAREKGSAAAPTAGLHFSQELLQHIQDKGVNLATILLHVGLGTFRPVSSNDIREHQMH

SEQ ID NO: 72912 - protein, 353 aa, Syntrophomonas sp.
  misc_feature (1)..(353): tr|A0A356ZCC2|A0A356ZCC2_9FIRM S-adenosylmethionine:tRN A ribosyltransferase-isomerase OS=Syntrophomonas sp. OX =2053627 GN=queA PE=3 SV=1
MQQENDQESLYQLQSYMFDLPSRLIAQYPAEPRDSARMLVVNRETGELQDRVFTNLLDYLEEGDTLVLNDTRVIPARLFARKDTGARIEVFLLKPGEDGWEALVKPARRMKPGTIIEFENSDQVQARVMEELDFAGGRLIKFLNCPDINAFINQSGAMPLPPYINRPAREHDKEDYQTVYARYAGSVAAPTAGLHFTDALLDTIKNKGINIAYVLLHVGLGTFRPVSTDDIRRHEMHYEYYQINEKTADLLNQTRQSGHKIIAVGTTVVRTLETVYNVEHGFSAMTGQTNKFIYPGYQFKAIDSLITNFHLPGSSLVMLVAALAGFDFTMKAYRYAVENEYRFFSYGDAMLIV

SEQ ID NO: 72913 - protein, 352 aa, Syntrophomonas wolfei
  misc_feature (1)..(352): sp|Q0AX18|QUEA_SYNWW S-adenosylmethionine:tRNA ribosylt ransferase-isomerase OS=Syntrophomonas wolfei subsp. wo lfei (strain DSM 2245B / Goettingen) OX=335541 GN=queA PE=3 SV=1
MQHDKNEDIYRLSTYYYDLPPELIAQYPAEYRDSSRLLVLDRKSGDLNDRAFKDISLYLKKGDALVLNETRVIPARFFAYKESGARVEILLLKKLGDDWEALVKPARRLKAGSRVFLSPDKPLVIEIVEELDFAGGRRVRFQDSVDEDTLLQEQGHIPLPPYINRPDEELDRERYQTVYACKSGSVAAPTAGLHFTPDLLKEITLQGINIVRIVLHVGMGTFRPVKNEDIRQHNMHLEYYEVAEDAAALLNLTRESGGQIVAVGTTVVRTLESVYNKDCGFLAGKGETNKYIFPGYQFRAIDKLLTNFHLPGSSLLMLVAGFAGTESTLAAYRHAVENRYRFFSYGDAMLVI

SEQ ID NO: 72914 - protein, 352 aa, Syntrophomonas wolfei
  misc_feature (1)..(352): tr|A0A354Z0S0|A0A354Z0S0_9FIRM S-adenosylmethionine:tRN A ribosyltransferase-isomerase OS=Syntrophomonas wolfei OX=863 GN=queA PE=3 SV=1
MLHDKNDDIYRLSTYHYDLPPELIAQYPAEYRDSSRLLVLDRKSGDLKDRVFKDIGQYLKKGDALVLNETRVIPARFFAYKESGARVEILLLKKLGDDWEALVKPARRLKVGSRVFLSPDQPLLIEIVEELEFAGGRRVRFLNGINEDTLLQEQGHIPLPPYINRPDEELDRERYQTVYASKSGSVAAPTAGLHFTPDLLKDIALQGINIVRIVLHVGMGTFRPVKNKDIRQHTMHLEYFEVAEEAAALLNLTRESGGQIVAVGTTVVRTLESVYNEDCGFVAGKGETNKYIFPGYQFWAIDKLLTNFHLPASSLLMLVAAFAGTESTLAAYRHAVENRYRFFSYGDAMLVI

SEQ ID NO: 72915 - protein, 349 aa, Syntrophomonas zehnderi
  misc_feature (1)..(349): tr|A0A0E4GD03|A0A0E4GD03_9FIRM S-adenosylmethionine:tRN A ribosyltransferase-isomerase OS=Syntrophomonas zehnde ri OL-4 OX=690567 GN=queA PE=3 SV=1
MKDLNPYLLQSYQFDLPPHLIAQFPAEPRDEARLLVMDRQTGEFEDRIFKDIIEYLEPGDTLVLNNTRVIPARLFARKKTGARIEILLLNQENGHWKALVKPARRMPLGTRVFFETSPQVEAEVVAELEDGARLLTFHNCPNEMEFINGVGQMPLPPYINRPAEEDDKIRYQTVYAQSAGSAAAPTAGLHFTEELLERIAAQGINIAPVLLHVGLGTFRPVSSKDIRNHQMHYEYYQIDAKTAYLLNNTKQNGKNIIAVGTTVVRTLETVYNENHGFTAQSGETNRFIYPGYRYRAVDKIITNFHLPGSSLIMLVAAFAGLDNTLKAYRHAVEKEYRFFSYGDAMLVSK

SEQ ID NO: 72916 - protein, 340 aa, Syntrophorhabdaceae bacterium
  misc_feature (1)..(340): tr|A0A1V5CEL0|A0A1V5CEL0_9DELT S-adenosylmethionine:tRN A ribosyltransferase-isomerase OS=Syntrophorhabdaceae b acterium PtaU1.Bin034 OX=1811715 GN=queA PE=3 SV=1
MRTEEFDYSLPRHLIAQQPVQDRTSSRLLVLNRSDGVREHRYFRDIKEYLREKDLIVVNDTKVIPARLIGKKKTGGNVGILLTEKLDERKYYCLVNGVKRGIGKAEVHVGETVVQLEAGLPFWTIEFPEDRDAARLMADSGRMPLPHYIKRDKDREEPEDYNHYQTVYARHEGSIAAPTAGLHFSEALLNDIQEMGVKVAKVTLHIGVGTFFLIKSEEVEGHEMHREYYSMPPDSLKAVRETRAAGGRIIAVGTSAVRTLETACACNNGASLSGYSELFIYPGYRFRVVDALITNFHLPRSTPLMLVCAFAGKDAIQTAYKEAIERSYRFYSYGDAMLIS

SEQ ID NO: 72917 - protein, 340 aa, Syntrophorhabdus aromaticivorans
  misc_feature (1)..(340): tr|A0A351U7U0|A0A351U7U0_9DELT S-adenosylmethionine:tRN A ribosyltransferase-isomerase OS=Syntrophorhabdus arom aticivorans OX=328301 GN=queA PE=3 SV=1
MGPNIEDFDYDLPKALIAQYPEKDREASRLLVFDRGEETIAHRSFRDITQYLSKGDVLVLNDSKVLPARLRARKDTGGAVDILLVERISDTRWLCLAKGIKAGNKEQKVSVGPMEARLTKGEDYWVIDFHNDGDTFDVMRRYGTMPLPPYIKRNDGNGAIDDERYQTVYAEMSGSIAAPTAGFHFSVGLLETIKRMGVHVVTITLHIGVGTFFLIKKRNVQDHHMHGEYYHITPEAKAFIGKAKGDGRRIIACGTSAVRTLETVYSESGKPLAGKTDLFVYPGYRFKMVDAMITNFHLPRSTPLLLVSAFAGPERIRRCYKEAMERGYRFYSYGDAMLIL

SEQ ID NO: 72918 - protein, 340 aa, Syntrophorhabdus sp.
  misc_feature (1)..(340): tr|A0A1V5BUD2|A0A1V5BUD2_9DELT S-adenosylmethionine:tRN A ribosyltransferase-isomerase OS=Syntrophorhabdus sp. PtaU1.Bin002 OX=1811702 GN=queA PE=3 SV=1
MELNIEDFNYDLPKALIAQYPEKDREDSRLLVFDREDETIAHRSFRDITQYLNKGDVLVLNDSKVLPARLRARKATGGAVDILLVERINDTRWLCLAKGIKAGSREQKVSVGPIEAQLTKSEDYWVVDFHNDNDVFDIMRHYGKMPLPPYIKRSDGNGTIDDERYQTVYAEMSGSIAAPTAGFHFSEGLLEAIKRMGVQVVKITLHIGVGTFFLIKKRNVQDHHMHGEYYHITPDAKMFIRKAKDEGHRIIACGTSVVRTLETIYSENGKPLAGKTDLFVYPGYRFKMVDAMITNFHLPRSTPLLLVSAFAGLDRIRKCYKEAMERSYRFYSYGDAMLIL

SEQ ID NO: 72919 - protein, 386 aa, Syntrophorhabdus sp.
  misc_feature (1)..(386): tr|A0A1V4WXF5|A0A1V4WXF5_9DELT S-adenosylmethionine:tRN A ribosyltransferase-isomerase OS=Syntrophorhabdus sp. PtaB.Bin184 OX=1811701 GN=queA PE=3 SV=1
MGIICYKINLFGEGRAASRGFFALTARVAATKWPDTTHVTTDGAYGIMRVEEFDYDLPRDMIAQHPSAEREASRLLVCDREKGAMEHRRFSDIADYLRQGDVLVINDSKVFPARLKAQKRTGGMLDVLLVRPVEGGTWECLVRGMRRTGEATPVTVGGHGAFLARGDDSWTISFASREEGDEVIRTLGRMPLPPYIKRNGEDGTADYERYQTVYAEKTGSIAAPTAGFHFSGELLGRVAAKGVEIVRITLHVGIGTFSLIHAGSVEDHRMHGERYEIDEMSKDRIRSARQEGRRVVACGTSSVRTLETVFGMNGNGTLSGETELFIYPGYRFRCVDALITNFHLPRSTPLMLVAAFMGAGPLRKAYAEAIQGGYRFYSYGDAMFIS

SEQ ID NO: 72920 - protein, 344 aa, Syntrophothermus lipocalidus
  misc_feature (1)..(344): tr|D7CLE3|D7CLE3_SYNLT S-adenosylmethionine:tRNA ribosy ltransferase-isomerase OS=Syntrophothermus lipocalidus (strain DSM 12680 / TGB-C1) OX=643648 GN=queA PE=3 SV=1
MDIYSLETYQYQLPPELVAQYPVQPRDHSRLLVVERETKKFRDRYFFALAEYLGEKHVLVLNETRVIPVRLRGIKETGAHVEILLLRKVGEDWQALVRPARRLKPGAVIQFTCGAKAEIIQELGFAGGRVIRFQGVSDWYGFLENEGEVPLPPYISRPPTEQDKETYQTVYAARPGSAAAPTAGLHFTEQLLTRLTQQGVEVVKLLLHVGLGTFRPVESPDIRQHRMHQEYYELGEQEAERLNDARAAGKRIVAVGTTVVRTLESAYEEKRGYVPRQGFTDCYIYPGYRFRAVDQLITNFHLPKSSLLMLVCAFAGIDLTLAAYRHAVENRYRFFSYGDAMYVI

SEQ ID NO: 72921 - protein, 362 aa, Syntrophus aciditrophicus
  misc_feature (1)..(362): sp|Q2LVG6|QUEA_SYNAS S-adenosylmethionine:tRNA ribosylt ransferase-isomerase OS=Syntrophus aciditrophicus (stra in SB) OX=56780 GN=queA PE=3 SV=1
MMKLQDFDYQLPQSRIAQSPCAKRDHARMMVLDRRIGSLEHRHFYDFPDFVRKGDVLVINDSKVIPARLSGRKETGSRIELLLLSRYSDSPAVPETDSTEWPFFRVGVEETWEALLKPGKRIRIGTSIFFDDHSRATVIERINEKKWLLTFNTALPFDLFLQRYGKAPLPPYIKREKKNAQMPEDRDRYQTIYARSPGSIAAPTAGFHFSEALFKTLRELEIVIAPVTLHVGFGTFTPIETEDVEDHVMEVESFSISPESSDKINSAERVIAVGTTSTRVLESAADEQGRVHPMSGQSRLFIYPGYRFKRVQALLTNFHLPKSSLFLLACAFAGKDRIQQAYATAIQEEYRFYSYGDCMLII

SEQ ID NO: 72922 - protein, 361 aa, Syntrophus gentianae
  misc_feature (1)..(361): tr|A0A1H7WE19|A0A1H7WE19_9DELT S-adenosylmethionine:tRN A ribosyltransferase-isomerase OS=Syntrophus gentianae OX=43775 GN=queA PE=3 SV=1
MKLSDFHYDLPQSRIAQQPCAQRDHARMMVLDRRGQHLEHRHFYDFPDFLQKGDVLVINDSKVIPARLSGAKETGSRIELLLLSRHPDPLSIRNAEGAESSPLQTGADETWDVLLKPGKRVRIGTKINFDDSNQATVIERISEKKWRVAFSTALPFDLFLQQFGKAPLPPYIKRKREELSRPQDRERYQTIYARHPGSVAAPTAGFHFSEAQFKALQEREVAIAPVTLHVGFGTFTPIETEEVEDHVMDAESFSLSPESAERINSARRVIAVGTTSTRVLESAADDQGRVQPMSASSRLFIYPGYRFKRVDALLTNFHLPQSSLFLLACALAGKDLIFQAYSAAIQEEYRFYSYGDCMLIL

SEQ ID NO: 72923 - protein, 346 aa, Syntrophus sp.
  misc_feature (1)..(346): tr|A0A349A350|A0A349A350_9DELT S-adenosylmethionine:tRN A ribosyltransferase-isomerase OS=Syntrophus sp. (in: B acteria) OX=48412 GN=queA PE=3 SV=1
MDLTDFTYELPNTLIAQRPCPVRDASRMMVLHRQERRIEHRQFFELPDYLEKGDVLVVNDSRVIPARLYALKETGGTVEVLLLKKLQGAVPDAQTWEVLLRPARRAAAGQVLSLPGGARAVIRERVSDKKWTVEFSTGTDFAAYLRRNGEAPLPPYIKRRPGDASHFPDRDRYQTVYARADGSVAAPTAGLHFTPRTFDALRSRGVSIAAVTLHVGYGTFLPVTASRIEDHVMEEESFEIDAEAAEAINAAKRVVAVGTTATRVLESATDERGRIRPTAGATRLFIYPGYRFKRVNRLLTNFHLPASSLLLLVSAFAGRECILDAYRQAVEACYRFYSYGDCMLIL

SEQ ID NO: 72924 - protein, 361 aa, Syntrophus sp.
  misc_feature (1)..(361): tr|A0A1V4XNV1|A0A1V4XNV1_9DELT S-adenosylmethionine:tRN A ribosyltransferase-isomerase OS=Syntrophus sp. PtaB.B in138 OX=1811711 GN=queA_2 PE=3 SV=1
MKLKDFHYDLPQSRIAQHPCAQRDHARMMVLDRREARLQHRHFFDFPEFLQEGDCLVINDSKVIPARLIGTKETGSRIEVLLLSRRPDPRRPSEDVTAASPPAEPGAEETWEVLLKPGKRVSIGTKIFFGDSNWASVRERVSEKKWRVAFFTALPFDLFLQQFGKAPLPPYIKRKREDGPAPQDRERYQTIYARHPGSVAAPTAGFHFSETQFRALQDLGVAIAPVTLHVGFGTFTPIEAENVEDHVMEKESFSLSPESADRINSARRVIAVGTTSTRVLESASDGHGRVRPMASSSSLFIYPGYRFRRVDALLTNFHLPQSSLFLLVCAFAGRDLIFKAYAEAVQEEYRFYSYGDCMLIL

SEQ ID NO: 72925 - protein, 347 aa, Tabrizicola sp.
  misc_feature (1)..(347): tr|A0A3S8UAZ0|A0A3S8UAZ0_9RHOB S-adenosylmethionine:tRN A ribosyltransferase-isomerase OS=Tabrizicola sp. K13M1 8 OX=2494374 GN=queA PE=3 SV=1
MKLADFDFDLPETLIATRPARPRTHARLLLAEGDRISDRHVFDLQDILRPGDRLVLNNTKVIPARLFGTRQRGDAVAKVEITLLEPQPLGWRALAKPLRKVNLGEVIRFSDRLSASVAAKTETDLTLAFDLTGDDFDAALAEAGVMPLPPYIAAKRAADDQDRTDYQTVFARHAGAVAAPTASLHFDEPLLRALAAKGVDFTEVTLHVGAGTFLPVKVEDVTTHKMHAEWGRVSAAAADEINATKRAGGRIIPVGTTALRLIESAASPDGTLHPWEGETDIFIYPGYRFRITDALMTNFHLPKSTLVMLVAALMGETTIRKVYDHAINQGYRFFSYGDSSLLIPAKA

SEQ ID NO: 72926 - protein, 343 aa, Tabrizicola sp.
  misc_feature (1)..(343): tr|A0A411YZ22|A0A411YZ22_9RHOB S-adenosylmethionine:tRN A ribosyltransferase-isomerase OS=Tabrizicola sp. DJC O X=2305252 GN=queA PE=3 SV=1
MKLSDFDFDLPETLIATRPARPRTAARLLLAEGEAISDLQVSDLLGLLRAGDRLVLNNTRVIPARLTGQRRRGDAVAKIEITLMEPAATGWRAMAKPLRKVMVGEEIVFSPDLSATVAEKSDTDLRLLFNLAGEDFDAALAQAGAMPLPPYIAAKRAPDAQDDDDYQTVFARHKGAVAAPTASLHFDAELLEALRAKGVQFTEVTLHVGAGTFLPVKVEDVATHKMHAEWGQVTPEAAAQINATKAAGGRVIPVGTTALRLIETAARTGRVEPWEGPTDIFIYPGFTFHATDALMTNFHLPKSTLLMLVSALMGKDRMDRIYAHAVAREYRFFSYGDASLLIP

SEQ ID NO: 72927 - protein, 356 aa, Tahibacter aquaticus
  misc_feature (1)..(356): tr|A0A4R6YYL4|A0A4R6YYL4_9GAMM S-adenosylmethionine:tRN A ribosyltransferase-isomerase OS=Tahibacter aquaticus OX=520092 GN=queA PE=3 SV=1
MVGPPDRESGVKAEKVKKSDFHFDLPPGLIAQQPLPQRSASRLLVLDAAADTLADRRFTDLADYFRAGDLLIFNDTRVLPARLFGRKETGGAVEILIERVSGNHEARAQLGVSKKPRPGGLILLADGTPVRVLGRDGPFFDLRFETDEALEKLLLRLGRMPLPPYIDRAADTADDERYQTVFAREPGAVAAPTAGLHFDEALLDALRARGVEFGHVTLHVGAGTFQPIRSEDVREHNMHREWLNVGAELVEKIRRTRAAGNRVIAVGTTVVRALESATRDGEVFPLAGETQIFIFPGYRITSVDALVTNFHLPESTLLMLVSAFAGREKVLAAYRHAVERGYRFFSYGDAMLVFPG

SEQ ID NO: 72928 - protein, 349 aa, Taibaiella chishuiensis
  misc_feature (1)..(349): tr|A0A2P8DDB3|A0A2P8DDB3_9BACT S-adenosylmethionine:tRN A ribosyltransferase-isomerase OS=Taibaiella chishuiens is OX=1434707 GN=queA PE=3 SV=1
MKLSQFKFDLPINLIAQHPSKQRDESRLMVVHRDTGKIEHKVFKDIMSYFDDKDVMVVNNTKVFPARLYGRKEKTGARIEVFLLRELSRQNRLWDVIVDPARKIRVGNKLYFGDNDELVAEVIDNTTSRGRTIRFLFDGTETEFKAVLDSMGETPLPKYIKRKPDEEDKERYQTVYAKYEGAVAAPTAGMHFSRELIKRMEIKGVKFAEVTLHTGLGTFRPIEVEDLSKHKMDAEFFEVGEYACDIVNKGIEEKRRICSVGTTTIRALESSVTARGLLKPKDGWTNLFIHPPHNFSIANSLVTNFHLPKTSLLIMVAAFAGYDLTMEAYQVAIKEKYNFFSYGDAMLVI

SEQ ID NO: 72929 - protein, 409 aa, Taibaiella chishuiensis
  misc_feature (1)..(409): tr|A0A2P8CY26|A0A2P8CY26_9BACT S-adenosylmethionine:tRN A ribosyltransferase-isomerase OS=Taibaiella chishuiens is OX=1434707 GN=queA PE=3 SV=1
MHPSALQIRDFTYDLPEEKIARYPLEQRDQSRLLLYRNQAFTEDTYRNIDRFLPEGALMVFNQTRVIHARLLFRKPTGGRIEVFCLEPDNRYPDVQTAMLQQGEVYWKCMVGGAAKWKEGQVLELEQEHADAPKVFAALHERAEGVYILHLYWPASDTTFAEVLHQAGKVPLPPYLNRDAEQADEHRYQTIFAREEGSVAAPTAALHFTDEVMQSLAEKAIDAAFVTLHVGAGTFKPVKSETMEGHDMHAEWIEVTAPLLETVMNRLALDKPVVAVGTTSCRTLESLYWIGVRLIRKENIDFAGIAMPQWYPYENPSDIPATTAFRALLDYLQSTPLSKLVTRTQIIIAPGYSFRVIAGMVTNFHQPQSTLLLLVAALVGPSWRDIYTYALEHGFRFLSYGDGCLLWKK

SEQ ID NO: 72930 - protein, 408 aa, Taibaiella soli
  misc_feature (1)..(408): tr|A0A2W2BAD6|A0A2W2BAD6_9BACT S-adenosylmethionine:tRN A ribosyltransferase-isomerase OS=Taibaiella soli OX=16 49169 GN=DN068_10670 PE=3 SV=1
MHPQDIRIESFTYDLPNDRIAKYPLAQRDASKLLVYENGGVTEDTYRNIAMHIPEETLLVFNQTKVVHARLLFQKETGGVIEVFCLEPDAQYHGIQNAMLQKGKVYWHCMIGGASKWKHGMVLSIKHEHPDFILSASITDRQPGYFTLELFWDDKDLTFAEVLHYAGKVPLPPYLHREAELSDDSRYQTIYAKNEGSVAAPTAGLHFTDAVMNDLAAKKIDTAFVTLHVGAGTFKPVKSETMAGHEMHAEWIDVDRHCIEKLLAHLDKGIVAVGTTSMRTLESLYWIGAKLLSGIEIDFEGIAISQWDPYEMNINYSADECLNAIIRWMQENEKDRIMTRTQILIAPGYDTKIIKGLVTNFHQPQSTLLLLVSALIGDEWKRLYDYAMQHDFRFLSYGDGNLIWKNQK

SEQ ID NO: 72931 - protein, 349 aa, Taibaiella soli
  misc_feature (1)..(349): tr|A0A2W2B0J8|A0A2W2B0J8_9BACT S-adenosylmethionine:tRN A ribosyltransferase-isomerase OS=Taibaiella soli OX=16 49169 GN=queA PE=3 SV=1
MKLSQFKFDLPLNLIAQHPAKTREESRLMVVHRDTGKIEHKVFKDILTYFDDKDVMVVNNTKVFPARLYGRKEKTGAKIEVFLLRELNKPNRLWDVIVDPARKIRVGNKLYFGDNDELVAEVIDNTTSRGRTIRFLFDGDEAAFKAVLESLGETPLPKYIKRKPEEEDKERYQTVYAKYEGAVAAPTAGLHFSRELIKRLEIVGVKFAEVTLHTGLGTFRPIEVEDLSKHKMDAEYFHVDEYAAQIVNKAKKEQRKICSIGTTTMRALESSVTAQGLLKPEEGWTNLFIHPPYDFNIANSLVTNFHLPKTSLLIMVCAFAGYDLTMEAYQTAIKEKYRFFSYGDAMIVI

SEQ ID NO: 72932 - protein, 408 aa, Taibaiella sp.
  misc_feature (1)..(408): tr|A0A3N7A0K9|A0A3N7A0K9_9BACT S-adenosylmethionine:tRN A ribosyltransferase-isomerase OS=Taibaiella sp. KBW10 OX=2153357 GN=DBR32_01380 PE=3 SV=1
MHPKALSIAAYRYNLPDARIAKYPLAQRDTSKLLIYKDHTITEDHFGRLAEHLPAQSMMVFNQTKVVHARLPFQKPTGGKIEVFCLEPDGRYADVQTAMTEKGEVYWTCFLGGAGKWKEGQILLLEVNETLTVHAALIHKNTGSYTLRIFWNMPELSFAEILHLAGKVPLPPYLNREAEQEDETSYQTIFAKEEGSVAAPTAALHFTEAILDQLAAKSIATGFVTLHVGAGTFKPVKSDTMEGHEMHAEWIDVSLAFIKGLILQIQTGKPLVAVGTTSCRTLESLYWIGVQLQEGRPVLGQDIAVSQWVPYETNTSLSATEALHILMQYLSDQGLDRLVTKTQIIIAPGYQFKLVDALVTNFHQPESTLLLLVSALIGGDWQKVYDHALDHDFRFLSYGDSSLLWKTS

SEQ ID NO: 72933 - protein, 349 aa, Taibaiella sp.
  misc_feature (1)..(349): tr|A0A3N7CTD1|A0A3N7CTD1_9BACT S-adenosylmethionine:tRN A ribosyltransferase-isomerase OS=Taibaiella sp. KBW10 OX=2153357 GN=queA PE=3 SV=1
MKLSQFKFDMPIELIAQNPAKERDESRLMVIHRDTGKIEHKIFKDVLNYFEDKDVMVVNNTKVFPARLYGKKEKTGAKIEVFLLRELHKANRLWDVIVDPARKIRVGNKLYFGDNDELVAEVIDNTTSRGRTIRFLFDGDDAAFKQVLDSMGETPLPKLFKRKPEEEDKERYQTVYAKYEGAVAAPTAGLHFSRELIKRLEIEGVKFAEITLHTGLGTFRPIEVEDLSKHKMDAEYFRVDEYACGIVNKALEQKKRICAIGTTTMRALESSVTAQGLLKPEEGWTNLFIHPPHEFSIANSLITNFHLPKTSLLIMACAFGGYDLAMEAYNTAIKEKYNFFSYGDAMLIL

SEQ ID NO: 72934 - protein, 357 aa, Tamilnaduibacter salinus
  misc_feature (1)..(357): tr|A0A2U1CYW8|A0A2U1CYW8_9ALTE S-adenosylmethionine:tRN A ribosyltransferase-isomerase OS=Tamilnaduibacter sali nus OX=1484056 GN=queA PE=3 SV=1
MKISDFHFELPDELIARYPLAQRSASRLLSLDGPSGSVTHRHFVDLPELLAPGDLLVFNNTRVIPARLYGHKESGGRVEVLVERLLDDDELLAHVGASRPPKPDQTVVLEDGTALRMVDRNGPLFRFSRTTDEPLLSLLERVGHMPLPPYVDRPDEDTDRERYQTVYARESGAVAAPTAGLHFDDTIFQALHDKGVETAEVTLHVGAGTFQPVRVERVEDHEMHSEIAEVPEATADAVARTRQRGGRVVAVGTTSVRSLESATVDGELRPFRGETDIFIYPGYAFRCVDAMVTNFHLPESTLIMLVSAFAGREAVLGAYEEAVRERYRFFSYGDAMFVTGQVPSLGAGKQTEEGSAS

SEQ ID NO: 72935 - protein, 357 aa, Tamilnaduibacter salinus
  misc_feature (1)..(357): tr|A0A2A2I4M0|A0A2A2I4M0_9ALTE S-adenosylmethionine:tRN A ribosyltransferase-isomerase OS=Tamilnaduibacter sali nus OX=1484056 GN=queA PE=3 SV=1
MKISDFHFELPDELIARYPLAQRSASRLLSLDGPSGSVTHRHFVDLPELLAPGDLLVFNNTRVIPARLYGHKESGGRVEVLVERLLDDDELLAHVGASRPPKPDQMVVLEDGTALRMVDRDGPLFRFRRTTDEPLLSLLERVGHMPLPPYVDRPDEDTDRERYQTVYARESGAVAAPTAGLHFDDTIFQALRDKGVETAEVTLHVGAGTFQPVRVERVEDHEMHSEIAEVPEATVDAVARTRQRGGRVVAVGTTSVRSLESATVDGELRPFRGETDIFIYPGYAFRCVDAMVTNFHLPESTLIMLVSAFAGREAVLGAYEEAVRERYRFFSYGDAMFVTGQVPSLGAGKQTEEGSAS

SEQ ID NO: 72936 - protein, 349 aa, Tamlana nanhaiensis
  misc_feature (1)..(349): tr|A0A0D7W088|A0A0D7W088_9FLAO S-adenosylmethionine:tRN A ribosyltransferase-isomerase OS=Tamlana nanhaiensis O X=1382798 GN=queA PE=3 SV=1
MKLSNFGFDLPNELLAEYPAENRDESRLMVLNRKEQTIEHKMFKDLIDYFNEDDVLILNNTKVFPARLYGNKEKTGARIEVFLLRELNEEQRLWDVLVDPARKIRIGNKLYFGDDDTLVAEVIDNTTSRGRTLRFLYDGSYREFRLKLNELGETPLPKYIKRDVEPDDEDRYQTIYAKKEGAVAAPTAGLHFSKHLLKRLEIKGVNFAEVTLHVGLGTFNPVEVEDLSKHKMDSEEISIDKAAVDVVNRGIAEKRRVCAVGTTVMRAVESSVSSSGMLNEMEGWTNKFIFPPYDFSIANCMVTNFHTPKSTLLMMVSAFAGHDFVKRAYEEAVKEKYKFYSYGDAMLIL

SEQ ID NO: 72937 - protein, 349 aa, Tamlana sedimentorum
  misc_feature (1)..(349): tr|A0A0D7W9S3|A0A0D7W9S3_9FLAO S-adenosylmethionine:tRN A ribosyltransferase-isomerase OS=Tamlana sedimentorum OX=1435349 GN=queA PE=3 SV=1
MKLSNFGFDLPSELLAEYPAENRDESRLMVLNRKDQTIEHKMFKDLIDYFNEDDVLILNNTKVFPARLYGNKEKTGARIEVFLLRELNEEQRLWDVLVDPARKIRIGNKLYFGDDDTLVAEVIDNTTSRGRTLRFLYDGSYREFRLKLNELGETPLPKYIKRGVEPDDEDRYQTIYAKKEGAVAAPTAGLHFSKHLLKRLEIKGVNFAEVTLHVGLGTFNPVEVEDLSKHKMDSEEITIDSQAVNIVNKGINEKRRVCAVGTTVMRAVESSVSSSGMLNEMEGWTNKFIFPPYDFSIANCMVTNFHTPKSTLLMMVSAFAGHDFVKRAYEEAVKEKYKFYSYGDAMLIL

SEQ ID NO: 72938 - protein, 349 aa, Tamlana sp.
  misc_feature (1)..(349): tr|A0A5C4SQ85|A0A5C4SQ85_9FLAO S-adenosylmethionine:tRN A ribosyltransferase-isomerase OS=Tamlana sp. CW2-9 OX= 2583814 GN=queA PE=3 SV=1
MKLSNFGFNLPNELLAEYPAENRDESRLMVLNRKDQTIEHKMFKDLIDYFNEDDVLILNNTKVFPARLYGNKEKTGARIEVFLLRELNEEQRLWDVLVDPARKIRIGNKLYFGDDDTLVAEVIDNTTSRGRTLRFLYDGSYREFRLKLRELGETPLPKYIKRDVEPEDEDRYQTIFAKNEGAVAAPTAGLHFSKHLLKRLEIKGVNFAEVTLHVGLGTFNPVEVEDLSKHKMDSEEIKIDEKAVEIVNKGIQEKRRVCAVGTTAMRAIESSVSSSGLLNEMEGWTNKFIFPPYDFSIANCMITNFHTPKSTLLMMVSAFAGHDFIKRAYDEAVKEGYKFYSYGDAMLIL

SEQ ID NO: 72939 - protein, 349 aa, Tamlana sp.
  misc_feature (1)..(349): tr|A0A2I7SIM2|A0A2I7SIM2_9FLAO S-adenosylmethionine:tRN A ribosyltransferase-isomerase OS=Tamlana sp. UJ94 OX=2 069432 GN=queA PE=3 SV=1
MKLSNFGFNLPDELLAEFPAENRDESRLMVLNRKEQTIEHRMFKDLIDYFNEDDVLILNNTKVFPARLYGNKEKTGARIEVFLLRELNEEQRLWDVLVDPARKIRIGNKLYFGDDDTLVAEVIDNTTSRGRTLRFLYDGSYREFRLKLNELGETPLPKYIKREVQPEDEERYQTIFAKNEGAVAAPTAGLHFSKHLLKRLEIKGVNFAEVTLHVGLGTFNPVEVEDLSKHKMDSEELKIDEKAVSIVNKGIDEKRRVCAVGTTAMRAIESAVSSNGRLNEIEGWTNKFIFPPYDFSIANSMITNFHTPKSTLLMMVSAFAGHDFMKRAYDEAVKEGYKFYSYGDAMLII

SEQ ID NO: 72940 - protein, 403 aa, Tangfeifania diversioriginum
  misc_feature (1)..(403): tr|A0A1M6I4U9|A0A1M6I4U9_9BACT S-adenosylmethionine:tRN A ribosyltransferase-isomerase OS=Tangfeifania diversio riginum OX=1168035 GN=queA PE=3 SV=1
MHKFQKIKISDFTYQLPEERIAKYPLKERDNSKLLFWQNGKTEQTVFRNITSYLPENSLLVFNNTRVIHARLFFRKATGAKIEIFCLEPVSPSDYQIAFQEKEKVTWKCMVGNSKKWKSEELQREFEINGKPVHLKARKKGQQGNSFLIEFSWEGEFTFAEIIEHAGVLPIPPYLNRETEPEDELTYQTVYAKNDGSVAAPTAGLHFTKNVLKNLAEKNIETAEITLHVGAGTFQPVKSETIDGHTMHHEQVLISKSFIEKLLSHAGKIIAVGTTSVRSLESLYWLGLKLEKAHHPGDIPEVLQWEPYENEATIGVEKALQNILDFLEKTQQKTVRFSTQIIIVPGYEFKIIEGMITNFHQPQSTLLLLISAFLGDDWKKVYDYALKNDFRFLSYGDSNLYLR

SEQ ID NO: 72941 - protein, 349 aa, Tangfeifania diversioriginum
  misc_feature (1)..(349): tr|A0A1M6A6X6|A0A1M6A6X6_9BACT S-adenosylmethionine:tRN A ribosyltransferase-isomerase OS=Tangfeifania diversio riginum OX=1168035 GN=queA PE=3 SV=1
MKLSKFKYNLDEKKIALHPAYNRDESRLMVLNRAKRTIEHKSFKDILDYFDDKDVFVFNDTKVFPARLYGNKEKTGAEIEVFLLRELNREMRLWDVLVDPARKIRIGNKLYFGENDALVAEVIDNTTSRGRTLRFLFDGPYDEFKQTLYSLGETPLPKFINRPVVPEDKERYQTIFAKHEGAVAAPTAGLHFSRELLKRLEIKGAEFAFVTLHVGLGNFRSVDVEDLTKHKMDSEQIWIKEEACETVNHAKENRKNVCAVGTTVMRTLESSVSTQGFLKPFEGWTNKFIFPPYEFSVANSMITNFHLPYSTLLMMVAAFGGYDFVMEAYDVAMKENYRFGTYGDAMLII

SEQ ID NO: 72942 - protein, 422 aa, Tannerella forsythia
  misc_feature (1)..(422): tr|A0A0E4BH23|A0A0E4BH23_TANFO S-adenosylmethionine:tRN A ribosyltransferase-isomerase OS=Tannerella forsythia KS16 OX=1307833 GN=TFKS16_0935 PE=3 SV=1
MSFLSFAMNFVLLPPEMMAPQHIHIDDYAYPLPDDRIARYPLPQRDRSKLLVYRGGQIGETVFNRLPDELPSDALLVFNNTRVIRARLLFHKTTGAQIELFCLEPAEPADYAQIFQQTEQCSWHCLIGNLKKWKDGTLTRTVYLGEESVRLTAEREETHGTSHLVTFRWDDSRYTFAEVLEAAGILPIPPYLRRETEPTDLQTYQTVYSRIKGSVAAPTAGLHFTPEVLAELDARGIGREEVTLHVGAGTFKPVKSPTIGSHEMHTEHFAVSRRTIERLITASGPVIAVGTTSVRTLESLYYLGARLSMTRLTDHADLPTVEQWTPYTDEVPCISAREALQHLLDHLDHQGVDRLVAATRIILAPGYEFKIVRGMITNFHQPQSTLLLLVSAFVKGDWKAIYDYALDHDFRFLSYGDSSLLL

SEQ ID NO: 72943 - protein, 349 aa, Tannerella forsythia
  misc_feature (1)..(349): tr|A0A3P1Z344|A0A3P1Z344_TANFO S-adenosylmethionine:tRN A ribosyltransferase-isomerase OS=Tannerella forsythia OX=28112 GN=queA PE=3 SV=1
MKLSNFKFNLPTELIAAYPAPHRDESRLMVLHRDTGKIEHKVFKDLIKYFGAGDVFVMNNTRVFPARLYGNKEKTGAKIEVFLLRELNESMRLWDVLVDPARKIRIGNKLYFGKNDSMVAEVIDNTTSRGRTLRFLYDGTHEEFIKALFALGETPLPKYMNRPAEPDDVERYQTIYATEEGAVVAPAAGLHFSRELMKRLEIKDCSFVYLTVHSGLGTYRDIDVEDLSKHKVDSEQMIINSEVVQAVNKAKGDGRKVCAVGTSVMRAIETAVGTDRNLKEYDGWTNKFIFLPYEFSIANAMITNFHMPLSTLLMMTASFGGYDLTMEAYQTAIKEKYRFCAYGDAMLIL

SEQ ID NO: 72944 - protein, 407 aa, Tannerella sp.
  misc_feature (1)..(407): tr|R7DGR0|R7DGR0_9BACT S-adenosylmethionine:tRNA ribosy ltransferase-isomerase OS=Tannerella sp. CAG:51 OX=1262 979 GN=queA PE=3 SV=1
MQKTRDIRIEEFNYPLPDERIAKFPLSQRDRSKLLLYRSGSVSESEFFHLPDLLPENSLLVFNNTKVIQARLHFRKETGALIEIFCLEPLSPNDYLLSFQSNRECVWTCMVGNLKKWKSGTLSRTVIIEGKSVTLNADRLNAYGNSFEIRFSWDNPQISFAALLDAVGELPIPPYLNRETEESDKETYQTVYSKVEGSVAAPTAGLHFTEDVLAALKEKCIPCLELTLHVGAGTFKPVKSETIEGHEMHTEFISVERSLIVSLAETDRRIIAVGTTSVRTLESLYYIGRTLEYNPDAVPEELKVGQWQPYDDTVAEIDYRKALRNIVDYLDRKGLSRLVTATQIIIAPGYTFKIVRGMITNFHQPQSTLLLLVSAFVDGRWREIYDYALSHDFRFLSYGDSSLLLPD

SEQ ID NO: 72945 - protein, 352 aa, Tannerella sp.
  misc_feature (1)..(352): tr|A0A2N8NFV7|A0A2N8NFV7_9BACT S-adenosylmethionine:tRN A ribosyltransferase-isomerase OS=Tannerella sp. oral t axon 808 OX=712711 GN=queA PE=3 SV=1
MKLSRYKFTLPPELIATHPITYRDEARMMVVHRDTGKIEHRVFKDLTKYFGEGDVFVMNNTRVFPARLYGQKEKTGARIEVFLLRELNESLRLWDVLVDPARKIRIGNKLFFGKEANPEELVAEVIDNTTSRGRTLRFLCEGDHDVFKKKLYELGNTPLPRYMNREAEPEDRERYQTIYATEEGAVVAPAAGLHFSRELMRRLEIKDCRFVYLTVHSGLGIYRDIDVEDLSKHKIDSEQMIIGREVIDAVNTAIDTEHRVCAVGTSVMRAIETAVGTDGHLKEFDGWTNKFIFIPYEFTIANSMITNFHLPFSTLLLMTAAFAGYDLTMEAYNVAVKEKYRFCAYGDAMLIL

SEQ ID NO: 72946 - protein, 347 aa, Tanticharoenia sakaeratensis
  misc_feature (1)..(347): tr|A0A0D6MPG1|A0A0D6MPG1_9PROT S-adenosylmethionine:tRN A ribosyltransferase-isomerase OS=Tanticharoenia sakaer atensis NBRC 103193 OX=1231623 GN=queA PE=3 SV=1
MTDPIADFDFDLPKDRIATEPARPRDSARLLHVRPGVPPALHIVRDLPTLLRPGDLLVTNDTEVIPAQLTGKRGEAAIGITLDRILPDGSWHALARNARKLKPGDIVTFPRSDVTAEIVVNEGDGAVALRFSVAGDAFDAFLKDVGALALPPYIARPEGPTPQDALDYRTIFSAHPGAVAAPTAGLHFTPELLAALEQAGIGRCALTLHVGAGTFLPVRTDIAHHKMHAESGIVTAETADRINETRARGGRIVAVGTTSLRLLESAAGEDGIVRPWSGETSIFITPGYRFRAVDLLMTNFHLPRSTLFMLVAAFAGTQTMRDAYAFAIAERLRFYSYGDACLLERAA

SEQ ID NO: 72947 - protein, 360 aa, Tardiphaga robiniae
  misc_feature (1)..(360): tr|A0A161R5I8|A0A161R5I8_9BRAD S-adenosylmethionine:tRN A ribosyltransferase-isomerase OS=Tardiphaga robiniae O X=943830 GN=queA PE=3 SV=1
MRTDIFDFELPVENIALRPASPRDAARLLVVQPGIGVQDHVVSDLPAWLKPGDQLVVNDTRVISAQLSGRRIGRDTEPKIDATLIKRLDGSRWQALVRPARKLVEGDTVRFGNEGRVCLLGHLDAQVEHKGDAGEIIFSFSFHGPALDQAIAELGAPPLPPYIAGKRAPDERDAADYQTMFAANDGAVAAPTAGLHFTPALEAALKARGVGLHRITLHVGAGTFLPVKVDDTAEHKMHSEWGMISRETADALNAAHAAGGRVVAVGTTSMRLLESATSEDGVTHPFADETAIFITPGYRFRAVDIMLTNFHLPRSTLFMLVSAFAGMETMKQAYAHAIATGYRFYSYGDASLLFRDTSNQ

SEQ ID NO: 72948 - protein, 360 aa, Tardiphaga sp.
  misc_feature (1)..(360): tr|A0A420APG7|A0A420APG7_9BRAD S-adenosylmethionine:tRN A ribosyltransferase-isomerase OS=Tardiphaga sp. YR296 OX=2135488 GN=queA PE=3 SV=1
MRTDIFDFELPAENIALRPASPRDAARLLVVQPGIGVQDHVVSDLPTWLKPGDQLVVNDTRVISAQLSGRRIGRDTEPKIDATLIKRLDGSRWQALVRPAKKLTEGDTVRFGNEGRVCLLGHLDAQVEHKGDAGEIIFSFSFHGPALDQAIAELGAPPLPPYIAGKRAPDERDTADYQTMFAANDGAVAAPTAGLHFTPALEAALKARGVGLHRITLHVGAGTFLPVKVDDTAEHKMHAEWGTISRATADALNAAHAAGGRVVAVGTTSMRLLESATSEDGVIHPFADETAIFITPGYRFRAVDIMLTNFHLPRSTLFMLVSAFAGMDTMKQAYAHAIATGYRFYSYGDASLLFRDTRNQ

SEQ ID NO: 72949 - protein, 360 aa, Tardiphaga sp.
  misc_feature (1)..(360): tr|A0A5A7VVB3|A0A5A7VVB3_9BRAD S-adenosylmethionine:tRN A ribosyltransferase-isomerase OS=Tardiphaga sp. P9-11 OX=2024614 GN=queA PE=3 SV=1
MRTDIFDFELPAENIALRPASPRDAARLLVVQPGIGVQDHVVSDLPTWLKPGDQLVVNDTRVISAQLSGRRIGRETEPKIDATLIKRLDGSRWQALVRPAKKLAEGDTVRFGNEGRVCLLGHLDAQVEHKGDAGEIIFSFSLHGPALDQAIAELGAPPLPPYIAGKRAPDERDTADYQTMFAANDGAVAAPTAGLHFTPALEAALKARGVGLHRITLHVGAGTFLPVKVDDTAEHKMHSEWGTISRATADELNAAHAAGGRVVAVGTTSMRLLESATSEDGVIHPFADETAIFITPGYRFRAVDIMLTNFHLPRSTLFMLVSAFAGMDTMKQAYAHAIATGYRFYSYGDASLLFRDTSNS

SEQ ID NO: 72950 - protein, 350 aa, Tateyamaria omphalii
  misc_feature (1)..(350): tr|A0A1P8MT13|A0A1P8MT13_9RHOB S-adenosylmethionine:tRN A ribosyltransferase-isomerase OS=Tateyamaria omphalii OX=299262 GN=queA PE=3 SV=1
MKLDDFDFDLPEGLIATRPAAPRSSARLLVADGDAIHDQHVTDLVSWLRPGDLLVLNDTRVIPARLFGTRARESAQGLTEARIEVTLLEPRADGNWAALVKPLKKVKPGEVVRFSNDLSATLTGSADGQGHLQFNLTGDDFDAALAEAGAMPLPPYIAAKRPADDKDKTDYQTIWAKKSGAVAAPTASLHFDDALMAALAARGVETTYVTLHVGAGTFLPVKVDDVTQHKMHAEWGQVSERAAGDIAAAKARGNRVIPVGTTALRLIETMARDGGIAPWEGDTDIFIYPGFTFGVADGLMTNFHLPKSTLMMLVSALMGQERIAAIYDHAVRSEYRFFSYGDASLLLPQT

SEQ ID NO: 72951 - protein, 350 aa, Tateyamaria sp.
  misc_feature (1)..(350): tr|A0A0B4BJZ6|A0A0B4BJZ6_9RHOB S-adenosylmethionine:tRN A ribosyltransferase-isomerase OS=Tateyamaria sp. ANG-S 1 OX=1577905 GN=queA PE=3 SV=1
MKLDDFDFDLPEALIATRPASPRSSARLLVADGDAIHDQRVTDLVTWLRPGDLLVLNDTRVIPARLFGTRARESAQGLTEARIEVTLLEPRADGAWSALVKPLKKVKPGEVVRFSDDLSATLEGSADGQGHLRFNLTGDDFDAALAEAGAMPLPPYIAAKRAADDKDKTDYQTIWARNSGAVAAPTASLHFDEALMAALAERGVQTTYVTLHVGAGTFLPVKVDDVTQHKMHAEWGQVSEQAATHIAEAKARGNRVIPVGTTALRLIETMARDGGIAPWEGETDIFIYPGFTFRVADGLMTNFHLPKSTLMMLVSALMGQDRIKAIYDHAVRSQYRFFSYGDASLLLPQT

SEQ ID NO: 72952 - protein, 337 aa, Tatlockia micdadei
  misc_feature (1)..(337): tr|A0A098GGI3|A0A098GGI3_TATMI S-adenosylmethionine:tRN A ribosyltransferase-isomerase OS=Tatlockia micdadei OX =451 GN=queA PE=3 SV=1
MNKQDFYFDLPEELIAQYPLPNRTDSRLLAFDRETGQCTHRQFKDIGEFLQPGDLLVMNNSKVIPARLYGHKASGGKVELLVERLLSEDAFLAHIKASKAPKAGTPIHLDNNWQLKVISKLDDLYHCKVLGNVEIMLEEIGHIPLPLYITRPDESADAERYQTVYARHKGSVAAPTAGLHFDAELIQSLSSRGVNIAYSTLHVGAGTFRPVRCDAIKDHKMHSEYFTVSEELCQTVNETRARGKRVIAVGTTSMRSLESAAENGILKPCSRDTDIFIYPGYQFQICDGLITNFHLPESTLLMLVAAFIGHAQTMMLYKEAIAQGYRFFSYGDASLLL

SEQ ID NO: 72953 - protein, 356 aa, Tatumella citrea
  misc_feature (1)..(356): tr|A0A1Y0LGN9|A0A1Y0LGN9_TATCI S-adenosylmethionine:tRN A ribosyltransferase-isomerase OS=Tatumella citrea OX=5 3336 GN=queA PE=3 SV=1
MRVADFNFDLPESLIAHYPQPDRSGCRLLSLDGPTGEISHGIFTEVLDKLNAGDLLVFNNTRVIPARVFGRKASGGKIEVLVERMLDEHRVLAHVRASKSPKPGSELLLGDDESVKATMVARHDTLFEIEFADERAVLDILNQVGHMPLPPYIDRPDEESDRELYQTVYSARPGAVAAPTAGLHFDEPLLQALRDKGVEMAFVTLHVGAGTFQPVRVDSIEDHKMHSEYAEVPQEVVDAVLACKARGNKVVAVGTTSVRSLESAAQAAKEQLIAPFFDDTQIFIYPGYQYQVIDALITNFHLPESTLIMLVSAFAGYRQTMEAYRQAVNEQYRFFSYGDAMFIHKNPAAAEQTIGE

SEQ ID NO: 72954 - protein, 356 aa, Tatumella morbirosei
  misc_feature (1)..(356): tr|A0A095TE30|A0A095TE30_9GAMM S-adenosylmethionine:tRN A ribosyltransferase-isomerase OS=Tatumella morbirosei OX=642227 GN=queA PE=3 SV=1
MRVADFNFDLPESLIAHYPQPDRSSCRLLSLDGPTGEISHGVFTDVLDKLNPGDLLVFNNTRVIPARVFGRKASGGKIEVLVERMLDEHRVLAHVRASKSPKPGSELLLGDDESVKATMVARHDTLFEIEFADQRAVLDILNQVGHMPLPPYIDRPDEESDRELYQTVYSARPGAVAAPTAGLHFDEPLLQALRDKGVEMAFVTLHVGAGTFQPVRVDSIEDHKMHSEYAEVPQDVVDAVLACKARGNRVVAVGTTSVRSLESAAQAAKEHLIAPFFDDTQIFIYPGYQYQVIDALITNFHLPESTLIMLVSAFAGYRQTMEAYRQAVKEQYRFFSYGDAMFIRKNPAAAEQTIRE

SEQ ID NO: 72955 - protein, 356 aa, Tatumella ptyseos
  misc_feature (1)..(356): tr|A0A2X5NHM6|A0A2X5NHM6_9GAMM S-adenosylmethionine:tRN A ribosyltransferase-isomerase OS=Tatumella ptyseos OX= 82987 GN=queA PE=3 SV=1
MRVADFNFELPESLIAHYPRAERSSCRLLSLDGPTGELTHGVFTDVLEKLHAGDLLVFNNTRVIPARVFGRKASGGKIEMLVERVLDEHRVLAHVRASKAPKPGSDLLLGDDESVKATMVARHDTLFEIAFDDERTVLEILNQVGHMPLPPYIDRPDEESDRELYQTVYSARPGAVAAPTAGLHFDGGLLEALRAKGVEMAFVTLHVGAGTFQPVRVDSIEDHIMHSEYAEVPQDVVDAVLACKARGNKVVAVGTTSVRSLESAAQAAGESLIAPFFDDTQIFIYPGYQYQVIDALITNFHLPESTLIMLVSAFAGYRNTMQAYQQAVAEQYRFFSYGDAMFITKNPQAAEQQVGE

SEQ ID NO: 72956 - protein, 356 aa, Tatumella ptyseos; identical to SEQ ID NO: 72955
  misc_feature (1)..(356): tr|A0A085JAV4|A0A085JAV4_9GAMM S-adenosylmethionine:tRN A ribosyltransferase-isomerase OS=Tatumella ptyseos ATC C 33301 OX=1005995 GN=queA PE=3 SV=1

SEQ ID NO: 72957 - protein, 356 aa, Tatumella sp.
  misc_feature (1)..(356): tr|A0A2G8C0P4|A0A2G8C0P4_9GAMM S-adenosylmethionine:tRN A ribosyltransferase-isomerase OS=Tatumella sp. OPLPL6 OX=1928657 GN=queA PE=3 SV=1
MRVADFNFALPESLIAHYPQPERSACRLLSLDGPSGELQHGVFTDVLDKLQPGDLLVFNNTRVIPARVYGQKASGGKLEMLVERMLDDKRVLAHVRASKAPKPGAELLLGDALDVRATMVARHDTLFEIEFHDSREVLDILNHIGHMPLPPYIDRPDEEADRELYQTVYSAKPGAVAAPTAGLHFDQPLLDALRQKGIETAFVTLHVGAGTFQPVRVESIEDHIMHAEYAEVPQEVVDAVLACKARGNKVVAVGTTSVRSLESAAKAAENALIAPFFDDTQIFIYPGYQYQVIDALITNFHLPESTLIMLVSAFAGYKNTMNAYQQAVEQQYRFFSYGDAMFITQNPQAVNEVMSA

SEQ ID NO: 72958 - protein, 350 aa, Taylorella asinigenitalis
  misc_feature (1)..(350): tr|G4QCB1|G4QCB1_TAYAM S-adenosylmethionine:tRNA ribosy ltransferase-isomerase OS=Taylorella asinigenitalis (st rain MCE3) OX=1008459 GN=queA PE=3 SV=1
MYKNVYKKEDFFYELPPERIAQRPTKHRTESRLLHVKPDGTWADLAFPQIKSLLRINDLLIFNNTRVIKARLFGQKSTGGKIECLIERVVSPNRAVVHLRFSKRPQNGSNLLFGEGVQALVVEQDSDEFTLEFSEPVMEVLERIGQLPLPPYIKHNPDEFDYERYQTVYASREGAIAAPTAGLHFDDKLLEEIKSLGVQETMVTLHVGSGTFKPVITSDLNDHVMHSEWFEVTSETCDAIAECRKSGGRVIAVGTTSVRAIESAAALAGMTEEGAPKPFTGDTKLFITPGYEPLVIDGMITNFHLPESTLLMLVASWMGFETMHKVYKHAVEAEYRFFSYGDAMYIEPNF

SEQ ID NO: 72959 - protein, 350 aa, Taylorella asinigenitalis
  misc_feature (1)..(350): tr|I7IC29|I7IC29_9BURK S-adenosylmethionine:tRNA ribosy ltransferase-isomerase OS=Taylorella asinigenitalis 14/ 45 OX=1091495 GN=queA PE=3 SV=1
MYKNVYKKEDFFYELPPERIAQRPTKHRTESRLLHVKPDGTWADLAFPQIKSLLRINDLLIFNNTRVIKARLFGQKSTGGKIECLIERVVSPNRAVVHLRFSKRPQNGSNLLFGEGVQALVVEQDSDEFTLEFSEPVMEVLERIGQLPLPPYIKHNPDEFDYQRYQTVYASREGAIAAPTAGLHFDDKILEEIKSLGVQETMVTLHVGSGTFKPVITSDLKDHVMHSEWFEVTSETCDAIAECRKSGGRVIAVGTTSVRAIESAAALAGMTEEGAPKPFTGDTKLFITPGYEPLVIDGMITNFHLPESTLLMLVASWMGFETMHKVYKHAVEAEYRFFSYGDAMYIEPNF

SEQ ID NO: 72960 - protein, 350 aa, Taylorella equigenitalis
  misc_feature (1)..(350): tr|I7JNM8|I7JNM8_9BURK S-adenosylmethionine:tRNA ribosy ltransferase-isomerase OS=Taylorella equigenitalis 14/5 6 OX=1091497 GN=queA PE=3 SV=1
MTTKELTKEDFFYELPADRIAQRPTEKRTESKLLHVGADGSWDDLTFPQIKNLLKKDDLLIFNDTRVIKARLFGQKSTGGKIECLIERVIAPKCAIVHLRFSKRPQSGSQLFFNEGITATVIDQSVDEFTLEFSEPVMDVLDHIGQLPLPPYIKHNPDDFDYERYQTVYAKSEGAIAAPTAGLHFDNNLINELTDMGIQKSMVTLHVGSGTFKPVVTSNLKDHIMHSEWFEVTEETCESISRCRRNGGRVIAVGTTSVRAIESAATLAGLSEKGVPLPYTGDTKLFITPGYKPLVIDGMITNFHLPESTLLMLVASWMGFETMHKIYKHAVEANYRFFSYGDAMYIEPKS

SEQ ID NO: 72961 - protein, 347 aa, Telmatospirillum siberiense
  misc_feature (1)..(347): tr|A0A2N3PPD5|A0A2N3PPD5_9PROT S-adenosylmethionine:tRN A ribosyltransferase-isomerase OS=Telmatospirillum sibe riense OX=382514 GN=queA PE=3 SV=1
MKVDDFDFELPREAIADRPARPRDAARLLRVEPDRLADLIVRDLPTLLEPGDLMVFNDTKVIPARLKGRRGTAGISVTLHQPVEGDSWLAFARPAKKLAAGDRLRFAEDFSAEVAEKGEAGEVLLRFDRGGADLMTALALHGEMPLPPYIKRPNGADDRDRDDYQTVYAREPGAVAAPTAGLHFTPDLLAALDRRGIGRETLTLHVGAGTFLPVKVDDTRDHKMHSERGHISAEAAERINRVRQAGGRVVAVGTTALRLLESASSEEGRLSPFDGSTDIFITPGYRFRMVDLLMTNFHLPRSTLFMLVSAFAGLDRMRSAYAHAIQTGYRFYSYGDTSLLTRQETRR

SEQ ID NO: 72962 - protein, 349 aa, Tenacibaculum caenipelagi
  misc_feature (1)..(349): tr|A0A4R6TMF9|A0A4R6TMF9_9FLAO S-adenosylmethionine:tRN A ribosyltransferase-isomerase OS=Tenacibaculum caenipe lagi OX=1325435 GN=queA PE=3 SV=1
MKLSNFDFELPKELLAEYPSEHRDEARLMVLHRDTQKIEHKLFKDLIDYFDEGDVMMLNNTKVFPARMYGNKEKTGARIEVFLLRELNAENRLWDVLVDPARKIRIGNKLFFGDDDSLVAEVIDNTTSRGRTLRFLFDGSYEEFRKKLIELGETPLPKYIKREVEPEDEERYQTIFAKNEGAVAAPTAGLHFSKHLMKRLEIKGVDFAETTLHVGLGTFNPVEVEDLSKHKMDSEQIVIPQVSADIVNNAIEKRKRVCAVGTTVMRTVESSVSSSKQLNAYEGWTNKFIFPPYDFSIANCMVTNFHTPKSTLLMMVSAFAGHDFMMEAYHEAIKEKYKFYSYGDAMLIL

SEQ ID NO: 72963 - protein, 349 aa, Tenacibaculum dicentrarchi
  misc_feature (1)..(349): tr|A0A0U3K0E7|A0A0U3K0E7_9FLAO S-adenosylmethionine:tRN A ribosyltransferase-isomerase OS=Tenacibaculum dicentr archi OX=669041 GN=queA PE=3 SV=1
MKLSNFSFELPEELLAEYPSEHRDEARLMVLHRDTQKIEHKLFKDLINYFDEGDVLMLNNTKVFPARMYGNKEKTGARIEVFLLRELNAENRLWDVLVDPARKIRIGNKLFFGEDESLVAEVIDNTTSRGRTLRFLYDGPYQEFREKLVKLGETPLPKYIKRDVESSDEDRYQTIYAKHEGAVAAPAAGLHFSKHLMKRLEIKGVDFAETTLHVGLGTFNPVEVEDLSKHKMDSEKIKVTKETAEMVNNAIAKKKRVCAVGTTVMRTVESAITSKRKLKEFDGWTNKFIFPPFDFSVANCMVTNFHSPKSTLMMTVSAFAGHDFMMEAYEEAIKEKYKFHSYGDAMLIL

SEQ ID NO: 72964 - protein, 349 aa, Tenacibaculum dicentrarchi
  misc_feature (1)..(349): tr|A0A2H1XNR8|A0A2H1XNR8_9FLAO S-adenosylmethionine:tRN A ribosyltransferase-isomerase OS=Tenacibaculum dicentr archi OX=669041 GN=queA PE=3 SV=1
MKLSNFSFELPEELLAEYPSEHRDEARLMVLHRDTQKIEHKLFKDLINYFDEGDVLMLNNTKVFPARMYGNKEKTGARIEVFLLRELNAENRLWDVLVDPARKIRIGNKLFFGEDESLVAEVIDNTTSRGRTLRFLYDGPYEEFREKLVKLGETPLPKYIKRDVEISDEDRYQTIYAKHEGAVAAPAAGLHFSKHLMKRLEIKGVDFAETTLHVGLGTFNPVEVEDLSKHKMDSEKIKVTKETAEMVNNAIANKKRVCAVGTTVMRTVESAITSKQKLKEFDGWTNKFIFPPFDFSVANCMVTNFHSPKSTLMMTVSAFAGHDFMMEAYEEAIKEKYKFHSYGDAMLIL

SEQ ID NO: 72965 - protein, 349 aa, Tenacibaculum discolor
  misc_feature (1)..(349): tr|A0A497ZED5|A0A497ZED5_9FLAO S-adenosylmethionine:tRN A ribosyltransferase-isomerase OS=Tenacibaculum discolo r OX=361581 GN=queA PE=3 SV=1
MKLSNFNFELPKELLAEYPSEHRDEARLMVLHRDTQKIEHKLFKDLIDYFDEGDVMMLNNTKVFPARMYGNKEKTGARIEVFLLRELNAENRLWDVLVDPARKIRIGNKLFFGEDESLVAEVIDNTTSRGRTLRFLFDGPYEEFRKKLIELGETPLPKYIKREVEPEDEDRYQTIFAKHEGAVAAPTAGLHFSKHLMKRLEIKGVDFAETTLHVGLGTFNPVEVEDLSKHKMDSEQIVIPQASADMVNNAIANKKRVCAVGTTVMRTIESSVSSSNQLNAFEGWTNKFIFPPYDFSIANCMVTNFHTPKSTLLMMVSAFAGHDFVMEAYQEAIKEKYKFYSYGDAMLIL

SEQ ID NO: 72966 - protein, 349 aa, Tenacibaculum finnmarkense; identical to SEQ ID NO: 72963
  misc_feature (1)..(349): tr|A0A2I2M8G2|A0A2I2M8G2_9FLAO S-adenosylmethionine:tRN A ribosyltransferase-isomerase OS=Tenacibaculum finnmar kense OX=1680763 GN=queA PE=3 SV=1

SEQ ID NO: 72967 - protein, 349 aa, Tenacibaculum finnmarkense
  misc_feature (1)..(349): tr|A0A2H1XX31|A0A2H1XX31_9FLAO S-adenosylmethionine:tRN A ribosyltransferase-isomerase OS=Tenacibaculum finnmar kense OX=1680763 GN=queA PE=3 SV=1
MKLSNFSFELPEELLAEYPSEHRDEARLMVLHRDTQKIEHKLFKDLINYFDEGDVLMLNNTKVFPARMYGNKEKTGARIEVFLLRELNAENRLWDVLVDPARKIRIGNKLFFGEDESLVAEVIDNTTSRGRTLRFLYDGPYEEFREKLVKLGETPLPKYIKRDVESSDEDRYQTIYAKHEGAVAAPAAGLHFSKHLMKRLEIKGVDFAETTLHVGLGTFNPVEVEDLSKHKMDSEKIKVTQETADMVNNAIAKKKRVCAVGTTVMRTVESAITSKRKLKEFEGWTNKFIFPPFDFSVANCMVTNFHSPKSTLMMTVSAFAGHDFMMEAYEEAIKEKYKFHSYGDAMLIL

SEQ ID NO: 72968 - protein, 349 aa, Tenacibaculum gallaicum
  misc_feature (1)..(349): tr|A0A3E0I6Z8|A0A3E0I6Z8_9FLAO S-adenosylmethionine:tRN A ribosyltransferase-isomerase OS=Tenacibaculum gallaic um OX=561505 GN=queA PE=3 SV=1
MKLSNFSFELPPELLAEYPSEHRDEARLMVLHRDTQKIEHKLFKDLINYFDEGDVMMLNNTKVFPARMFGNKEKTGARIEVFLLRELNAENRLWDVLVDPARKIRIGNKLFFGEDESLVAEVIDNTTSRGRTLRFLFDGPYEEFRKKLIELGETPLPKYIKREVEPEDEDRYQTIFAKHEGAVAAPTAGLHFSKHLMKRLEIKGVDFAETTLHVGLGTFNPVEVEDLSKHKMDSEQIVIPQVSADMVNNAITKKKRVCAVGTTVMRTIESSVSSSNELNAYEGWTNKFIFPPYDFSIANCMVTNFHTPKSTLLMMVSAFAGHDFMMEAYQEAIKEKYKFYSYGDAMLIL

SEQ ID NO: 72969 - protein, 349 aa, Tenacibaculum holothuriorum
  misc_feature (1)..(349): tr|A0A1Y2PCE8|A0A1Y2PCE8_9FLAO S-adenosylmethionine:tRN A ribosyltransferase-isomerase OS=Tenacibaculum holothu riorum OX=1635173 GN=queA PE=3 SV=1
MKLSNFNFDLPQELLAEYPSEHRDEARLMVLHRDTQKIEHKLFKDLINYFDEGDVMMLNNTKVFPARMFGNKEKTGARIEVFLLRELNAENRLWDVLVDPARKIRIGNKLFFGEDESLVAEVIDNTTSRGRTLRFLFDGPYEEFRRKLIELGETPLPKYIKRDVEPSDEERYQTIFAKNEGAVAAPTAGLHFSKHLMKRLEIKGIDFAEMTLHVGLGTFNPVEVEDLSKHKMDSEQIIIPQNSCDIVNNAIETKRKICAVGTTVMRTVESSVSASKRLNAYNGWTNKFIFPPYDFSIANCMVTNFHTPKSTLLMMVSAFAGHDFMMEAYEEAVKEKYKFYSYGDAMLIL

SEQ ID NO: 72970 - protein, 349 aa, Tenacibaculum jejuense
  misc_feature (1)..(349): tr|A0A238UFT0|A0A238UFT0_9FLAO S-adenosylmethionine:tRN A ribosyltransferase-isomerase OS=Tenacibaculum jejuens e OX=584609 GN=queA PE=3 SV=1
MKLSQFNFDLPSELLAEYPSEHRDEARLMVLNRKEQTIEHKLFKDLINYFDEGDVMMLNNTKVFPARMFGNKEKTGARIEVFLLRELNAEHRLWDVLVDPARKIRIGNKLFFGDDESLVAEVIDNTTSRGRTLRFLFDGSYDEFRRKLIELGQTPLPKYIKRDVEPEDEERYQTIFAKHEGAVAAPTAGLHFSKHLMKRLEIKGVDFAEMTLHVGLGTFNPVEVEDLSKHKMDSEKIIIPQEACDVVNNAIEKKRRVCAVGTTVMRTVESSVSASQRLNAYEGWTNKFIFPPYDFSIANCMVTNFHTPKSTLLMMISAFAGHDFVMEAYQEAIKEKYKFYSYGDAMLII

SEQ ID NO: 72971 - protein, 349 aa, Tenacibaculum litoreum
  misc_feature (1)..(349): tr|A0A427SJB0|A0A427SJB0_9FLAO S-adenosylmethionine:tRN A ribosyltransferase-isomerase OS=Tenacibaculum litoreu m OX=321269 GN=queA PE=3 SV=1
MKLSNFNFELPKELLAEYPSEHRDEARLMVLHRDTQKIEHKLFKDLIDYFDEGDVMMLNNTKVFPARMYGNKEKTGARIEVFLLRELNAENRLWDVLVDPARKIRIGNKLFFGDDESLVAEVIDNTTSRGRTLRFLFDGPYDEFRKKLIELGETPLPKYIKREVEPEDEDRYQTIFAKHEGAVAAPTAGLHFSKHLMKRLEIKGVDFAETTLHVGLGTFNPVEVEDLSKHKMDSEQIIIPQVSADMVNNAIANKKKVCAVGTTVMRTIESSVSSSKQLNAYEGWTNKFIFPPYDFSIANCMVTNFHTPKSTLLMMVSAFAGHDFMMEAYQEAIKEKYKFYSYGDAMLIL

SEQ ID NO: 72972 - protein, 349 aa, Tenacibaculum lutimaris
  misc_feature (1)..(349): tr|A0A420E2W3|A0A420E2W3_9FLAO S-adenosylmethionine:tRN A ribosyltransferase-isomerase OS=Tenacibaculum lutimar is OX=285258 GN=queA PE=3 SV=1
MKLSNFDFDLPKELLAEYPSEHRDEARLMVLHRDTQKIEHKLFRDLIDYFDEGDVMMLNNTKVFPARMYGNKEKTGARIEVFLLRELNAENRLWDVLVDPARKIRIGNKLFFGDDDSLVAEVIDNTTSRGRTLRFLFDGSYEEFRQKLIDLGETPLPKYIKREVEPEDEERYQTIFAKNEGAVAAPTAGLHFSKHLMKRLEIKGVDFAETTLHVGLGTFNPVEVEDLSKHKMDSEQIIIPQASADVVNKAIGEKRRVCAVGTTVMRTVESSVSSSKQLNAYEGWTNKFIFPPYDFSIANCMVTNFHTPKSTLLMMVSAFAGHDFMMEAYQEAIKEKYKFYSYGDAMLIL

SEQ ID NO: 72973 - protein, 349 aa, Tenacibaculum maritimum
  misc_feature (1)..(349): tr|A0A2H1E742|A0A2H1E742_9FLAO S-adenosylmethionine:tRN A ribosyltransferase-isomerase OS=Tenacibaculum maritim um NCIMB 2154 OX=1349785 GN=queA PE=3 SV=1
MKLSHFDFELPNELLAEYPSEHRDESRLMVVHRDTQKIEHKQFKDLIEYFDEGDVMMLNNTKVFPARMYGNKEKTGARIEVFLLRELNAENRLWDVLVDPARKIRIGNKLFFGEDETLVAEVIDNTTSRGRTLRFLFDGSYEEFRQKLLELGETPLPKYINREVEPEDDERYQTIFAKNEGAVAAPTAGLHFSKHLMKRLEIKGVDFAEMTLHVGLGTFNPVEVEDLSKHKMDSEQIIIPKESAGRVNLAKQQRKKVCAVGTTVMRTVESSVSANQELNDFEGWTNKFIFPPYDFSIANCMITNFHTPKSTLLMMTAAFGGYDLIMEAYKEAVKEGYRFYSYGDAMLIL

SEQ ID NO: 72974 - protein, 349 aa, Tenacibaculum mesophilum
  misc_feature (1)..(349): tr|A0A1M5CS66|A0A1M5CS66_9FLAO S-adenosylmethionine:tRN A ribosyltransferase-isomerase OS=Tenacibaculum mesophi lum OX=104268 GN=queA PE=3 SV=1
MKLSNFNFELPKELLAEYPSEHRDEARLMVLHRDTQKIEHKLFKDLIDYFDEGDVMMLNNTKVFPARMYGNKEKTGARIEVFLLRELNAENRLWDVLVDPARKIRIGNKLFFGDDESLVAEVIDNTTSRGRTLRFLFDGPYDEFRKKLIELGETPLPKYIKREVEPEDEDRYQTIFAKHEGAVAAPTAGLHFSKHLMKRLEIKGVDFAETTLHVGLGTFNPVEVEDLSKHKMDSEQIIIPQASADIVNNAIANKKRVCAIGTTVMRTIESSVSSSNQLNAFEGWTNKFIFPPYDFSIANSMVTNFHTPKSTLLMMVSAFAGHDFIMEAYHEAIKEKYKFYSYGDAMLIL

SEQ ID NO: 72975 - protein, 349 aa, Tenacibaculum skagerrakense
  misc_feature (1)..(349): tr|A0A4V2SMT8|A0A4V2SMT8_9FLAO S-adenosylmethionine:tRN A ribosyltransferase-isomerase OS=Tenacibaculum skagerr akense OX=186571 GN=queA PE=3 SV=1
MKLSQFNFDLPKELLAEYPSEHRDEARLMVLNRKEQTIEHKLFKDLINYFDEGDVMMLNNTKVFPARMYGNKEKTGARIEVFLLRELNAEHRLWDVLVDPARKIRIGNKLFFGDDDSLVAEVIDNTTSRGRTLRFLFDGSYEEFRRKLIELGETPLPKYIKREVEPEDEERYQTIYAKHEGAVAAPTAGLHFSKHLMKRLEIKGVEFAEMTLHVGLGTFNPVEVEDLSKHKMDSEQIIIPEEACNVVNNALDRKKRVCAVGTTVMRTVESSVSANHRLNAYDGWTNKFIFPPYDFSIANCMVTNFHTPKSTLLMMIAAFAGYDFVMEAYEQAVKEKYKFYSYGDAMLII

SEQ ID NO: 72976 - protein, 349 aa, Tenacibaculum soleae
  misc_feature (1)..(349): tr|A0A1B9Y2Q7|A0A1B9Y2Q7_9FLAO S-adenosylmethionine:tRN A ribosyltransferase-isomerase OS=Tenacibaculum soleae OX=447689 GN=queA PE=3 SV=1
MKLSNFNFELPEELLAEYPSEHRDEARLMVLHRDTQKIEHKMFKDLIDYFDEGDVMMLNNTKVFPARMYGNKEKTGARIEVFLLRELNAENRLWDVLVDPARKIRIGNKLFFGDDESLVAEVIDNTTSRGRTLRFLFDGPYEEFREKLVKLGETPLPKYIKREVEETDEERYQTIYAKHEGAVAAPAAGLHFSKHLMKRLEIKGVDFAEMTLHVGLGTFNPVEVEDLSKHKMDSEKINVPLSSADMVNNALTNKKRVCAVGTTVMRTAESAITSKHKLKEFDGWTNKFIFPPFDFSVANAMITNFHTPKSTLMMMVSAFAGHDFMMEAYQEAIKEKYKFHSYGDAMLIL

SEQ ID NO: 72977 - protein, 349 aa, Tenacibaculum sp.
  misc_feature (1)..(349): tr|A0A2H1YIM8|A0A2H1YIM8_9FLAO S-adenosylmethionine:tRN A ribosyltransferase-isomerase OS=Tenacibaculum sp. TNO 020 OX=1458515 GN=queA PE=3 SV=1
MKLSNFSFELPEELLAEYPSEHRDEARLMVLHRDTQKIEHKLFKDVINYFDEGDVLMLNNTKVFPARMYGNKEKTGALIEVFLLRELNAENRLWDVLVDPARKIRIGNKLFFGDDESLVAEVIDNTTSRGRTLRFLYDGPYEEFREKLLKLGETPLPKYIKREVEDSDEDRYQTIYAKEEGAVAAPAAGLHFSKHLMKRLEIKGVDFAETTLHVGLGTFNPVEVEDLSKHKMDSEKIKVTKETAEMVNNAIAKKKRVCAVGTTVMRTVESAITSKRKLKEFDGWTNKFIFPPFDFSVANCMVTNFHSPKSTLMMTVSAFAGHDFMMEAYEEAIKEKYKFHSYGDAMLIL

SEQ ID NO: 72978 - protein, 349 aa, Tenacibaculum sp.
  misc_feature (1)..(349): tr|A0A354GG36|A0A354GG36_9FLAO S-adenosylmethionine:tRN A ribosyltransferase-isomerase OS=Tenacibaculum sp. OX= 1906242 GN=queA PE=3 SV=1
MKLSNFDFDLPKELLAEYPSEHRDEARLMVLNREKQTIEHKLFKDLINYFDEGDVMMLNNTKVFPARMFGNKEKTGARIEVFLLRELNAENRLWDVLVDPARKIRIGNKLFFGNDDSLVAEVIDNTTSRGRTLRFLFDGSYEEFRHKLIELGETPLPKYIKRDVEPEDEERYQTIFAKHEGAVAAPTAGLHFSKHLMKRLEIKGVDFAEMTLHVGLGTFNPVEVEDLSKHKMDSEQIIIPDESVNIVNNALDKKRRVCAVGTTVMRTVESSVSASKRLNPYNGWTNKFIFPPYDFSIANCMVTNFHTPKSTLLMMISAFAGHDFVMDAYNEAIKEKYKFYSYGDAMLIL

SEQ ID NO: 72979 - protein, 349 aa, Tenacibaculum todarodis
  misc_feature (1)..(349): tr|A0A1L3JJN7|A0A1L3JJN7_9FLAO S-adenosylmethionine:tRN A ribosyltransferase-isomerase OS=Tenacibaculum todarod is OX=1850252 GN=queA PE=3 SV=1
MKLSHFGFELPEELLAEYPTEHRDESRLMVLHRDTQKIEHKLFKDVIDYFDEGDVMMLNNTKVFPARMFGNKEKTGARIEVFLLRELNAENRLWDVLVDPARKIRIGNKLFFGEDDSLVAEVIDNTTSRGRTLRFLFDGDYDEFRVKLQELGQTPLPKTINRELEPEDEERYQTIFAKHEGAVAAPTAGLHFSKHLMKRLEIKGVDFAELTLHVGLGTFNSVEVEDLSKHKMDSEKIIIPQKTSDMINNALKTKKRICAVGTTVMRTVESSVSSSGELNAFEGWTNKFIFPPHDFSIANSMITNLHTPKSTLLMQAAAFGGYDFVMEAYQVAIKEKYRFSTYGDAMLII

SEQ ID NO: 72980 - protein, 338 aa, Tenericutes bacterium
  misc_feature (1)..(338): tr|A0A2K9AJJ4|A0A2K9AJJ4_9BACT S-adenosylmethionine:tRN A ribosyltransferase-isomerase OS=Tenericutes bacterium MZ-XQ OX=1911683 GN=queA PE=3 SV=1
MRVSDFDFHLPKELIAQHPSEKRDHSRLMVLNRETESIDHKHFYDIVDLLDKNDVLVINDTKVIPARLLGSKAETQAVIEVLLLEELEKDVWQALTKPAKRVKIGTKIHFGDQLTLECVGIHDEGLRDYKLHYEGILIEVLEKLGTMPLPPYITEKLLEQDRYQTVYATNPGSAAAPTAGLHFTKELMEKIEDKGIEIIRVTLNVGLGTFRPVAVDKVENHIMHHETYTITKKSAERLNEVKKQGKKLVCVGTTSLRTVEANYKDGFHEGTYATDIFIYPGYRFKACDKLITNFHLPKSTLIMLVSALAGNDFVKHAYLEAIKEKYRFFSFGDAMFIK

SEQ ID NO: 72981 - protein, 338 aa, Tenericutes bacterium
  misc_feature (1)..(338): tr|A0A2N1PX93|A0A2N1PX93_9BACT S-adenosylmethionine:tRN A ribosyltransferase-isomerase OS=Tenericutes bacterium HGW-Tenericutes-6 OX=2013849 GN=queA PE=3 SV=1
MKVNDFDFILPKELIAQHPVDQRDHSRLMVIDKHTEEITHKHFYDIKDELHQGDVLVINDTKVMPARLLGLKEKTDATIEVLLLKEIEKDTWEAMTKPARRVKVGTKIRFSDLLIAECTGILEEGMRVFKMHYEGLFIEILERLGTMPLPPYITERLNEKDRYQTVYAKDLGSAAAPTAGLHFTKELLATLEDKGVKICPITLHVGLGTFKPVQVDDVTKHHMHEETYTIRKESAQILNDAVKNNQRIICVGTTSLRTLESNFKDQFIPGTFETDIFIYPGYSFKVVKHLITNFHLPKSTLIMLVSALSSLSLMKKAYLNAVEERYRFFSFGDAMFIK

SEQ ID NO: 72982 - protein, 363 aa, Tengunoibacter tsumagoiensis
  misc_feature (1)..(363): tr|A0A401ZUI7|A0A401ZUI7_9CHLR S-adenosylmethionine:tRN A ribosyltransferase-isomerase OS=Tengunoibacter tsumag oiensis OX=2014871 GN=queA PE=3 SV=1
MNEIRISDFDYELPSEYIAQTPLEPRDSSRLLVTHRSTGQMEHRHFRDIGSYLRPGDLLIANQSRVIPARLLGQKAETGGAVEVLLLAERPDLGQDRWETLVRPGRRLRDGARIVFGEDPEQPRLLAEVGERTEAGGRIVHFTVPEGLNEDDPYSVMAVRHRIDEIGNMPLPPYIHERLADPERYQTVYARIRGSAAAPTAGLHFTPQLLDQLRQQGVRTGFVTLHVGLDTFRPVEVDNVSEHKMHSEEIELDAQTAELINETKRAGGRVIAVGTTSVRVLESVASLHEGEIQPYKGSTSLFITPGYTFKAVDVMITNFHLPRSTLLLLVSAFMSKGLMEEAYQTAIKEHYRFFSFGDAMLIL

SEQ ID NO: 72983 - protein, 340 aa, Tenuibacillus multivorans
  misc_feature (1)..(340): tr|A0A1H0B7D3|A0A1H0B7D3_9BACI S-adenosylmethionine:tRN A ribosyltransferase-isomerase OS=Tenuibacillus multivo rans OX=237069 GN=SAMN05216498_2240 PE=3 SV=1
MALKTFEIPKDLNASLPAEYRNGSRDQVKMMVTEAGETTFTSFKNLSDYVQPGDVLIFNNTRTIPASLKVEWKDKIIEIRLSQQIDNLIWEGIVLKENVNIGDRLIVSSNLTFAVMGQGSEAPLLQLESGLNTQETIMEILSVGEPIRYDYIYQPFPINTYQTVYGSVPGSMEMPSAGRAFTWQIINTLKEKGAKVGFVQLFTGLSYYEKDRWPNPSNHPERFCVSKEVADLVNQAKRKGNRVIAVGTTVVRALESAGKLGDVVEKNNEYTDLYVNERYERKVVDSLLTGLHEPEASHLDMLTSWLSKDEITALYHEAIERQFLWHEFGDLHLILGDDPS

SEQ ID NO: 72984 - protein, 342 aa, Tenuibacillus multivorans
  misc_feature (1)..(342): tr|A0A1G9ZKE5|A0A1G9ZKE5_9BACI S-adenosylmethionine:tRN A ribosyltransferase-isomerase OS=Tenuibacillus multivo rans OX=237069 GN=queA PE=3 SV=1
MNVNDFDFDLPEEQIAQTPLANRSDSRLMVLNRENQKIDHKYFYHIIDYLQPGDCLVLNNTKVLPARLFGQKEDTGGKVEVLLLTQQEGDDWEVLVKPAKKVKIGTRLSFGDGRLKAVCIGIKEHGGREIRFEYDGIFLEVLDQLGEMPLPPYIKEQLDDRDRYQTVYAEEAGSAAAPTAGLHFTEELLEQIKAKGVHIANITLHVGLGTFRPVQVDNIEEHDMHAEFYQMNQETADLLNQVKSDGHKIVAVGTTSVRTLETIARDENGVFKEKSGWTDIFIYPPYKFKAIDAMITNFHLPKSTLIMLVSAFSTKDFILKAYQEAVVEKYRFFSFGDAMLIL

SEQ ID NO: 72985 - protein, 362 aa, Tepidamorphus gemmatus
  misc_feature (1)..(362): tr|A0A4R3MDP4|A0A4R3MDP4_9RHIZ S-adenosylmethionine:tRN A ribosyltransferase-isomerase OS=Tepidamorphus gemmatu s OX=747076 GN=queA PE=3 SV=1
MRVDLFDFELPQERIALRPAEPRDAARLLAVRPGAIPELEDCGVLDLPRLLASGDLLVFNDTRVIPARLHGRRIGRGGTKPKIEATLHMRLDGSRWQAFVKPARKLQPGDVVRFGGEGRVCLLGMLDAVVEAKGEGGEVTLSFSFHGPALDQAIAELGELPLPPYIAARRPVDERDAVDYQTIFARVEGSVAAPTAGLHFTDRLLAALDQRGIGRVGVTLHVGAGTFLPVKADDTAAHRMHAEIGSVTPAAAELINRMRAAGGRIVAVGTTSLRLLESAASEDGRVRPFSGPTDIFITPGYRFRAVDVLLTNFHLPRSTLFMLVSAFSGLETMRRAYAHAIESGYRFYSYGDACLLFPGPTE

SEQ ID NO: 72986 - protein, 341 aa, Tepidanaerobacter acetatoxydans
  misc_feature (1)..(341): tr|F4LTJ2|F4LTJ2_TEPAE S-adenosylmethionine:tRNA ribosy ltransferase-isomerase OS=Tepidanaerobacter acetatoxyda ns (strain DSM 21804 / JCM 16047 / Re1) OX=1209989 GN=q ueA PE=3 SV=1
MKLEDFDFDLPEKLIAQEPIKDRSKSRLLVLNKTTGEIEHKIFEDVVNYFEQGDCLVLNNTKVIPARLIGYRKKTNGKIEVVLLKSIGSDIWEVLVKPGHKARIGDEVIFGDGRLIAKIIDDTDFGGRIVKFLYSDSFEEILNELGQMPTPPYIKKKLQDKNRYQTVYAQVPGSAAAPTAGLHFTEELLKKIKEKGISIAFITLHVGLGTFRPVKVENIEEHKMHAEYYEISKKTAEVINSTRQAGRKVFAVGTTSTRTLETVADVNGQIKPGSGWSDIFIYPGYNFKAIDGLITNFHLPKSTLIMLVSAFAGREKILNAYKEAVSERYKFFSFGDAMLIM

SEQ ID NO: 72987 - protein, 341 aa, Tepidanaerobacter syntrophicus
  misc_feature (1)..(341): tr|A0A0U9HK50|A0A0U9HK50_9THEO S-adenosylmethionine:tRN A ribosyltransferase-isomerase OS=Tepidanaerobacter syn trophicus OX=224999 GN=queA PE=3 SV=1
MKLEEFDFDLPEELIAQEPIENRSKSRLLVLNKSTGEIEHKIFEDVIDYLQKGDCLVLNNTKVIPARLIGRRQRTGGRIEVVLLKPIENDVWEALVKPGSKARKGEEIVFGNGQLTAKVLDNTDYGGRLMQFFYEGSFEEILDKLGQMPTPPYIKKKLEDKDRYQTVYAQIPGSAAAPTAGLHFTEELLNKLRAKGVSIVFITLHVGLGTFRPVKVENVEEHKMHSEYYEVSPEAAETICRTKETGKRVIAVGTTSTRTLETIGDENGMVKPGNGWSDIFIYPGYKFKVVDALITNFHLPKSTLIMLVSAFAGKEKVFKAYEEAIREKYRFFSFGDAMLII

SEQ ID NO: 72988 - protein, 342 aa, Tepidibacillus decaturensis
  misc_feature (1)..(342): tr|A0A135L2A1|A0A135L2A1_9BACI S-adenosylmethionine:tRN A ribosyltransferase-isomerase OS=Tepidibacillus decatu rensis OX=1413211 GN=queA PE=3 SV=1
MNIELFDFYLPEELIAQTPLKNRAESKMLTLNRKTGEIRHHHFKDIVDYLQPGDTLVLNDTKVLPARLFGIKKETGAKIEVLLLKQLENDRWETLVKPGKKLRVGHQIIFGDGLLTGIVEDMTEVGGRIIRFQYQGVFNEILDQLGQMPLPPYIKEQLEDKDRYQTVYAKNLGSAAAPTAGLHFTKELLEQIKEKGIEILYITLHVGLGTFRPVQAQNIEEHHMHSEFYSLSEEVAEKLNQAKSDGRRIIAVGTTSVRTLETVIDQESRRFIAKQGWTDIFIYPGYQFKAIDAMITNFHLPKSSLIMLVSALAGREQVMKAYREAIQHHYRFFSFGDAMFIY

SEQ ID NO: 72989 - protein, 343 aa, Tepidibacillus fermentans
  misc_feature (1)..(343): tr|A0A4R3KJX7|A0A4R3KJX7_9BACI S-adenosylmethionine:tRN A ribosyltransferase-isomerase OS=Tepidibacillus fermen tans OX=1281767 GN=queA PE=3 SV=1
MMNIELFDFDLPEELIAQTPLKNRSDSKLLTLNRRTGEIQHHRFRGIIDFLHKGDTLVLNDTKVLPARLIGQKKETEAKVEVLLLKQLDDNRWETLVKPGKRLRQGHEVVFGDGLLTGVIEDTTEVGGRIIRFHYQGIFNEILDQLGQMPLPPYIKEQLEDKDRYQTVYAKHLGSAAAPTAGLHFTKELLQQIEEKGVQIVYITLHVGLGTFRPVQTENIEEHHMHSEYYQLNEEAAKKLNEAKEEGRRIIAVGTTSVRTLETVVNKETERFEAKDGWTDIFIYPGYEFKAIDAMITNFHLPKSSLVMLVSAFAGRDTIMKAYQEAIDQHYRFFSFGDAMFIY

SEQ ID NO: 72990 - protein, 340 aa, Tepidibacter formicigenes
  misc_feature (1)..(340): tr|A0A1M6MWC7|A0A1M6MWC7_9FIRM S-adenosylmethionine:tRN A ribosyltransferase-isomerase OS=Tepidibacter formicig enes DSM 15518 OX=1123349 GN=queA PE=3 SV=1
MKTSDFYFNLPEELIAQKPLEKRDESRLMVLDKNTGEIEHKIFKDVLDYLKEGDCLVLNNTRVLPARLIGEKLETKGKMEFLLLKRIDIDTWEVLVKPGKRAKIGAKFSFGNKLIAQVIDIGEEGARIVKFSYDGVFEEILDELGSMPLPPYITEKLEDKERYQTVYSKHEGSAAAPTAGLHFTKELLEKIKQKGVEIAFVTLHVGLGTFRPVKVENILEHKMHSEFYTIEKEEADKINNCKKQGGRIIPVGTTSCRTLESVANEDGVLQAKSGWTDIFIYPGYEFKVVDALITNFHLPESTLIMLVGALTGKENILNAYNTAVDEKYRFFSFGDAMFIK

SEQ ID NO: 72991 - protein, 341 aa, Tepidibacter thalassicus
  misc_feature (1)..(341): tr|A0A1M5QK40|A0A1M5QK40_9FIRM S-adenosylmethionine:tRN A ribosyltransferase-isomerase OS=Tepidibacter thalassi cus DSM 15285 OX=1123350 GN=queA PE=3 SV=1
MKTRDFYFNLPEELIAQRPLEKRDESRLMVLDKNTGEIEHKIFKDILDYLKEGDCLVLNNTRVLPARLIGEKLDTKGKMEFLLLKRIDIDTWEVLVKPGKRAKVGTKFSFGNGKLISEVIDIGEEGSRIVKFSYDGIFEEILDELGSMPLPPYITEKLEDKERYQTVYSRHEGSAAAPTAGLHFTNELLEKIKQKGVEIAFITLHVGLGTFRPVKVENILEHKMHSEFYMIEKSEADKINRCKKQGGRIIPVGTTSCRTLESAVDENGILEAKSGWTDIFIYPGYEFKIVDALITNFHLPESTLIMLVSALTGKENILNAYNVAVNEKYRFFSFGDAMFIK

SEQ ID NO: 72992 - protein, 353 aa, Tepidicaulis marinus
  misc_feature (1)..(353): tr|A0A081B7F2|A0A081B7F2_9RHIZ S-adenosylmethionine:tRN A ribosyltransferase-isomerase OS=Tepidicaulis marinus OX=1333998 GN=queA PE=3 SV=1
MRVDIFDFELPEERIALRPARPRDAARMLVVGPDKGRLEDAGVRDLPQILKPGDVLVFNDTKVIPARLRGTRKREEAEAQVEIMLHLRLGPDRWKAFARPAKRLRPGDRVDFTAGFHALTESRDGAETVLQFSASGPALDAAIAAAGELPLPPYIASKRKTDEEDKEDYQTLFADRPGAVAAPTAGLHFTPALLDALAGRGVESARVTLHVGAGTFLPVTAEDTDAHKMHAEWGEVSAETAAKLNEARARGGRIVSVGTTSLRLLESAASEDGHLAAWSGETDIFITPGYRFKAVDILMTNFHLPKSTLFMLVSAFRETEEMKAAYAHAIGAQYRFYSYGDACLLMPKEQDDE

SEQ ID NO: 72993 - protein, 393 aa, Tepidicella xavieri
  misc_feature (1)..(393): tr|A0A4V3D5Q4|A0A4V3D5Q4_9BURK S-adenosylmethionine:tRN A ribosyltransferase-isomerase OS=Tepidicella xavieri O X=360241 GN=queA PE=3 SV=1
MFHLERARPALKPMTLTAANAPRVFTLSDFDFSLPPELIAQHPAPERSASRLLDGRRAPPADRIFRDLPALLQPGDLLVFNDTQVIKARLFGEKATGGKLELLVERVLPGPGHEVVAHMKVSKKPPIGATLRMHAGGSTEVAFTATLLGRWPHEDGPLFRLAFSDEPHALMAAHGHVPLPPYIEHADTEEDERRYQTVFAKNPGAVAAPTAALHFDEGVLAALDARGVQRASVTLHVGAGTFQPCKTENIAEHVMHSEWYQVPEATQQAIAATRARGGRIVAVGTTTVRTLESWARTGQATGDTDIFITPGFDFRVVDLLITNFHLPKSTLMMLVSAFAGYEPIMALYRHAIEQRYRFFSYGDAMLLAHAACVSSEDGDRCGEREPGTKGDQR

SEQ ID NO: 72994 - protein, 341 aa, Tepidimicrobium xylanilyticum
  misc_feature (1)..(341): tr|A0A1H3DVN8|A0A1H3DVN8_9FIRM S-adenosylmethionine:tRN A ribosyltransferase-isomerase OS=Tepidimicrobium xylan ilyticum OX=1123352 GN=queA PE=3 SV=1
MKTEDFYYDLPEELIAQYPIEDREESRLLVLDKKTGKLEDRIFKDIIDYFYPGDCLVLNDTRVIPARLFGSREGKKEKIEFLLLKRVERDTWETLVRPGKKVKPNNRIIFRDGLLIADVLSINEDGTRNVKFIYDGIFEEILDKLGEMPLPPYIKGELKDKERYQTVYSKHEGSAAAPTAGLHFTMELLKRIEEKRVNIAYLTLHVGLGTFRPVKVENIEEHHMHSEYYEVSKEAADIINRTKSEGGRIIAVGTTSTRTLETVANQKGEIIPSKGWTDIFIYPGYEFKIIDGLITNFHLPESTLLMLVCAFAGKDNIFNAYKYAIENKFRFFSFGDAMFIK

SEQ ID NO: 72995 - protein, 368 aa, Tepidimonas alkaliphilus
  misc_feature (1)..(368): tr|A0A554W4C6|A0A554W4C6_9BURK S-adenosylmethionine:tRN A ribosyltransferase-isomerase OS=Tepidimonas alkaliphi lus OX=2588942 GN=queA PE=3 SV=1
MNNVPPSPAATGAARVWTTSDFDFHLPPELIAQHPAPQRSAARLLDGRGWPPEDRIFRELPGLLEPGDLLVFNDTQVIKARLYGEKPTGGRLELLVERVLADGEVVAHMKVSKKPAPGTVLRMAPQADGQPAFTATLLGRWPDADGPLFRLRFSDDPYALMERHGHVPLPPYIDHPDTAEDEQRYQTIFARNPGAVAAPTAALHFDAAVLAALEARGVRRASVTLHVGAGTFQPVKGEDIRAHRMHREWYRIPPETLAALERTRRAGGRVLAVGTTTVRTLESWARSGATEGDTDLFITPGFDFRVVDLLITNFHLPRSTLLMLVSAFAGYEHIMALYRHAIERRYRFFSYGDAMLLARAGPRGAPVA

SEQ ID NO: 72996 - protein, 354 aa, Tepidimonas aquatica
  misc_feature (1)..(354): tr|A0A554WRP6|A0A554WRP6_9BURK S-adenosylmethionine:tRN A ribosyltransferase-isomerase OS=Tepidimonas aquatica OX=247482 GN=queA PE=3 SV=1
MSISTPHTWRTTDFDFELPPELIAQHPAPERSASRLLDGRRWPPIDLIFRQLPELLQPGDLMVFNDTQVIKARLFGVKPTGGRLEVLVERVLPDGEVVAHMKVSKKPAVGTELRMAPDAHGTPAFTATLLGRWPEADGPLFRLRFSGDPYTLMQRYGHVPLPPYIQHPDSADDEQRYQTVFAKHPGAVAAPTAALHFDEAVLAALDARGVRRAAVTLHVGAGTFQPVKVDDIAQHRMHSEWYRIPPETLAALEQTRRQGGRIVAVGTTTVRTLESWAATGQTEGDTDIFITPGFSFRVVDGLITNFHLPRSTLMMLVSAFAGYERIMALYRHAVQQRYRFFSYGDAMLLRREGG

SEQ ID NO: 72997 - protein, 365 aa, Tepidimonas fonticaldi
  misc_feature (1)..(365): tr|A0A1A6DWB9|A0A1A6DWB9_9BURK S-adenosylmethionine:tRN A ribosyltransferase-isomerase OS=Tepidimonas fonticald i OX=1101373 GN=queA PE=3 SV=1
MTTLPPAAAPARTWTTSDFDFHLPPELIAQHPAPERSASRLLDGRGWPPADRIFRELPALLAPGDLLVFNDTQVIKARLYGEKPTGGRLELLVERMLADGEVVAHMKVSKKPAPGTVLRMAPQADGQPAFTATLLGRWPEADGPLFRLRFSDDPYAMMERHGHVPLPPYIEHPDTAEDEQRYQTVFAKNPGAVAAPTAALHFDEAVLAALAARGVQRASVTLHVGAGTFQPVKGEDIRAHRMHSEWYRIPPQTLAALERTRRAGGRVLAVGTTTVRTLESWARSGATEGDTDIFITPGFDFRVVDLLITNFHLPRSTLMMLVSAFAGYEHVMALYRHAIGRRYRFFSYGDAMLLARAGSAAAAAD

SEQ ID NO: 72998 - protein, 365 aa, Tepidimonas fonticaldi
  misc_feature (1)..(365): tr|A0A554XKE7|A0A554XKE7_9BURK S-adenosylmethionine:tRN A ribosyltransferase-isomerase OS=Tepidimonas fonticald i OX=1101373 GN=queA PE=3 SV=1
MTTLPPAATPARAWTTSDFDFDLPPELIAQHPAPERSASRLLDGRGWPPADRIFRELPALLAPGDLLVFNDTQVIKARLYGEKPTGGRLELLVERVLADGEVVAHMKVSKKPAPGTVLRMAPQADGQPAFTATLLGRWPDADGPLFRLRFSDDPYAVMERHGHVPLPPYIEHPDTAEDEQRYQTVFAKNPGAVAAPTAALHFDEAVLAALAARGVQRASVTLHVGAGTFQPVKGEDIRAHRMHSEWYRIPPQTLAALERTRRAGGRVLAVGTTTVRTLESWARSGATEGDTDIFITPGFDFRVVDLLITNFHLPRSTLMMLVSAFAGYEHVMALYRHAIGRRYRFFSYGDAMLLARAGSAAAAAD

SEQ ID NO: 72999 - protein, 354 aa, Tepidimonas ignava
  misc_feature (1)..(354): tr|A0A4R3LHZ2|A0A4R3LHZ2_9BURK S-adenosylmethionine:tRN A ribosyltransferase-isomerase OS=Tepidimonas ignava OX =114249 GN=queA PE=3 SV=1
MTNPTPPTWRTADFDFELPAELIAQHPAPERSASRLLDGRGWPPADRIFRQLPELLQPGDLLVFNDTQVIKARLFGAKPTGGRLEVLVERVLPDGEVVAHMKVSKKPAVGTVLRMAPQPDGQPAFTATLLGRWPEADGPLFRLRFSDDPYTLMQRHGHVPLPPYIDHPDTADDEQRYQTVFAKHPGAVAAPTAALHFDEAVLAALEARGVRRAAVTLHVGAGTFQPVKVDDITQHRMHSEWYRIPPETLAALEQTRRQGGRIVAVGTTTVRTLESWAATGQTEGDTDIFITPGFSFRVVDLLITNFHLPRSTLMMLVSAFAGYERIMALYRHAVQQRYRFFSYGDAMLLQRAQR

SEQ ID NO: 73000 - protein, 365 aa, Tepidimonas sediminis
  misc_feature (1)..(365): tr|A0A554WQT5|A0A554WQT5_9BURK S-adenosylmethionine:tRN A ribosyltransferase-isomerase OS=Tepidimonas sediminis OX=2588941 GN=queA PE=3 SV=1
MTTPPPAAAPGRTWTTSDFDFHLPPELIAQHPAPERSAARLLDGRGWPPADRIFRELPGLLEPGDLLVFNDTRVIKARLYGEKPTGGRLELLVERVLADGEVVAHMKVSKKPAPGTVLRMAPQADGQPAFTATLLGRWPEADGPLFRLRFSDDPYALMERHGHVPLPPYIEHPDTAEDEQRYQTVFARNPGAVAAPTAALHFDEAVLAALEARGVRRASVTLHVGAGTFQPVKGEDIRAHRMHREWYRIPPETLAALERTRRAGGRVLAVGTTTVRTLESWARSGATEGDTDLFITPGFDFRVVDLMVTNFHLPRSTLLMLVSAFAGYEHVMALYRHAVERRYRFFSYGDAMLLARAGCCGTPAA

SEQ ID NO: 73001 - protein, 365 aa, Tepidimonas sp.
  misc_feature (1)..(365): tr|A0A554XIE1|A0A554XIE1_9BURK S-adenosylmethionine:tRN A ribosyltransferase-isomerase OS=Tepidimonas sp. SPSP- 6 OX=2267262 GN=queA PE=3 SV=1
MTASSSHPSAPAPAQTRRSYTVDDFDFALPPELIAQHPAPERSASRLLDGRQCPPTDRVFRELPNLLQAGDLLVFNDTQVIKARLFGVKPSGGRLELLVERVLADGEVVAHMKVSKKPAAGTVLHMALDDGGQPAFTATLLGRWPDADGPLFRLRFSDDPYALMARHGHVPLPPYIAHADTAEDERRYQTVFAKHPGAVAAPTAALHFDEGILAALQARGVHRASVTLHVGAGTFQPVKVRDLHAHRMHSEWYRIPPETLAAVERTRRSGGRIVAVGTTTVRTLESWATSGRTEGDTTLFITPGFAFRVVDLLITNFHLPRSTLLMLVSAFAGYDHIRALYQHAIAQRYRFFSYGDAMLLQRAAR

SEQ ID NO: 73002 - protein, 360 aa, Tepidimonas taiwanensis
  misc_feature (1)..(360): tr|A0A554X7H8|A0A554X7H8_9BURK S-adenosylmethionine:tRN A ribosyltransferase-isomerase OS=Tepidimonas taiwanens is OX=307486 GN=queA PE=3 SV=1
MTTSPPPAPARTWTTGDFDFPLPPELIAQHPAPERSASRLLDGRTWPPVDRVFRELPGLLEPGDLLVFNDTQVIKARLFGEKPTGGRLELLVERVLADGEVVAHMKVSKKPTPGTVLRMAIGADGQPGFTATLLGRWPDVDGPLFRLRFSDDPYTLMARHGHVPLPPYIEHADTAEDERRYQTIFAKNPGAVAAPTAALHFDESVLAALDARGVQRASVTLHVGAGTFQPVKVDDIRQHRMHSEWYRIPPETLAALERTRRAGGRVLAVGTTTVRTLESWARTGATEGDTDIFITPGFDFRVVDGMITNFHLPRSTLMMLVSAFAGYDHIMALYRHAIAQRYRFFSYGDAMLLQRSTGSP

SEQ ID NO: 73003 - protein, 359 aa, Tepidimonas thermarum
  misc_feature (1)..(359): tr|A0A554X3Q1|A0A554X3Q1_9BURK S-adenosylmethionine:tRN A ribosyltransferase-isomerase OS=Tepidimonas thermarum OX=335431 GN=queA PE=3 SV=1
MTHPAPTGAPTRTWTTSDFDFALPPELIAQHPAPERSAARLLDGRTWPPADRIFRDLPALLQPGDLLVFNDTQVIKARLYGEKPTGGRLELLVERVLGNHEVVAHMKVSKKPSAGTVLRMAPGPDGQPAFSATLLGRWPDADGPLFHLRFSDDPYVLMARHGHVPLPPYIEHGDTEEDERRYQTVFAQTPGAVAAPTAALHFDAAVLAALQARGVPRANVTLHVGAGTFAPVKGEDIRAHRMHSEWYRIPPQTLAALERTRRAGGRIVAVGTTTVRTLESWARTGQTEGDTDIFITPGFDFRVVDLLITNFHLPRSTLLMLVSAFAGYEHIMALYRHAIAQHYRFFSYGDAMLLQRGQP

SEQ ID NO: 73004 - protein, 353 aa, Tepidiphilus thermophilus
  misc_feature (1)..(353): tr|A0A0K6IWA5|A0A0K6IWA5_9PROT S-adenosylmethionine:tRN A ribosyltransferase-isomerase OS=Tepidiphilus thermoph ilus OX=876478 GN=queA PE=3 SV=1
MQEPSLRKAPSLTVHDFDFSLPPELIAQAPLPERSASRLLVLEGEALHDRLFRDLPGFLEEGDLLVFNDSRVIHARLFGRKESGGAVEVLVERLVGTQEALAQVRASKPPRPGMRLRLEEAFDVEVVGRDGEFYHLRLVGEGDLPQLVERHGRLPLPPYIARPAEPEDEARYQTVYARTPGSVAAPTAGLHFDESLLRQLAEHGVDTAWVTLHVGAGTFQPVRVERLDEHRMHRERYWIPEETVARVARAKARGRRVIAVGTTSLRALEGAAQGGALRPGSGETELFITPGYDFRVVDALVTNFHLPRSTLLMLVSALAGLDRIRRAYAHAIERRYRFFSYGDAMFIPRRFAR

SEQ ID NO: 73005 - protein, 358 aa, Terasakiispira papahanaumokuakeensis
  misc_feature (1)..(358): tr|A0A1E2V6Q5|A0A1E2V6Q5_9GAMM S-adenosylmethionine:tRN A ribosyltransferase-isomerase OS=Terasakiispira papaha naumokuakeensis OX=197479 GN=queA PE=3 SV=1
MQRSDFDFDLPDELIARQPAPERTGSRLLVVEGSSGELAHQQFPDILDHLQPGDLMVFNDTRVIPARLFGQKASGGKVEILIERPLDEHRALAHVRASKAPKAGARLYLEGGIEATCEGREETLFLLRFESPTPLIELLEQHGHMPLPPYIDRPDAGSDRERYQTVYNRTPGAVAAPTAGLHFDEALLNQIRAKGVNTAFVTLHVGAGTFQPVRVDNIQEHQMHKEWLQVSAETAELVRSTRASGGRVIAVGTTSVRSLETAASSGQVQPFSGDTSIFIYPGYQWQVVDALITNFHLPESTLLMLVSSFAGYDTVMKAYHEAVAQRYRFFSYGDAMFLTRRPSSADDMAPETRDHHAF

SEQ ID NO: 73006 - protein, 353 aa, Teredinibacter sp.
  misc_feature (1)..(353): tr|A0A509E4W7|A0A509E4W7_9GAMM S-adenosylmethionine:tRN A ribosyltransferase-isomerase OS=Teredinibacter sp. IS S155 OX=2584524 GN=queA PE=3 SV=1
MHRQDFFYDLPEDLIAHYPMPQRSGSRLLVLDGVTGECQHHQFAQLIDHLEPGDLMVFNDTRVIPARLFGQKETGGKLEILVERVLSASQVLAHVRASKSPKAGSLIQLDQGITVRVTGRQDSLFELQFLGELTAIEVMEKIGHMPLPPYIEREDEINDRERYQTVYGKHQGAVAAPTAGLHFDDALLQAIKDKGVNQAFVTLHVGAGTFQPVRVDDIREHQMHSEVMAVSQDVCDLVAATKGAGKRVIAVGTTSVRCLETAAQSDAGDGIIHPYQGETNIFIYPSYQYKVVDALVTNFHLPESTLLMLVSAFAGYQHTMKAYSEAVKRRYRFFSYGDAMFISHKNTIEKHEV

SEQ ID NO: 73007 - protein, 359 aa, Teredinibacter turnerae
  misc_feature (1)..(359): tr|C5BLY2|C5BLY2_TERTT S-adenosylmethionine:tRNA ribosy ltransferase-isomerase OS=Teredinibacter turnerae (stra in ATCC 39867 / T7901) OX=377629 GN=queA PE=3 SV=1
MRRQDFFYSLPDELIARYPTQDRTASRLLVLDGASGEVEHSQFASLLERVNSGDLLVFNDTRVIPARLFGKKSTGGQIEILVERVLDSHRVYAHVRSSKSPKAGAILVLEDGTEVTMTAREGALFTLEFPRHASALEVMERIGHMPLPPYIDRADEAQDKERYQTVYGKNKGAVAAPTAGLHFDDALLEALKAKGVEVAFVTLHVGAGTFQPVRADNIRDHEMHSEVMWVDQAVCDSVAATKVRGGRVIAVGTTSVRCLESAAASGHLQPYQGDTNIFIYPSYEFRVVDALVTNFHLPESTLLMLISAFAGYTNTMNAYAQAVQEKYRFFSYGDAMFVTRNPAASQEKIRPLTEENPHG

SEQ ID NO: 73008 - protein, 364 aa, Terrabacter sp.
  misc_feature (1)..(364): tr|A0A543LG92|A0A543LG92_9MICO S-adenosylmethionine:tRN A ribosyltransferase-isomerase OS=Terrabacter sp. 3211 OX=2587050 GN=FHW49_2161 PE=3 SV=1
MSASLAHAPHTLFRVTDDLTADAPPEARGLGRDGVRLLVASEPSSGEVRIEHTTFAAIGEHLAPGDLLLVNNSATVAGEVDGRVSGRGAVVVHVGTGLDDGTWVLELRTAPDAAHPLLDALEGDVVELVSGGPRLRLESPYPGPDSSPTGRGNRLWRATPLDDRSLAEHLGTHGRPIAYGYLRSRFSLDAYQTVFARVPGSAEMASAARPFTADLVTRLVSSGVLVAPVTLHTGLSSQEAGEAPQAERFAVPRETADLVNLTRSRGGRAVAVGTTATRAIESATRPDGRVQAAAGWTDVVISPDRPARVVDGLVTGWHDPDASHLLLVEAVAGADLTQQAYDAAVAHRYAWHEFGDAGLFLPHR

SEQ ID NO: 73009 - protein, 364 aa, Terrabacter sp.
  misc_feature (1)..(364): tr|A0A0Q8Y8P8|A0A0Q8Y8P8_9MICO S-adenosylmethionine:tRN A ribosyltransferase-isomerase OS=Terrabacter sp. Root8 5 OX=1736603 GN=ASE25_09925 PE=3 SV=1
MTAALAHVPHTVFRATDDLTADAPPERRGLDRDGVRLLVASEPSSGTVRVEHTTFAAIGDHLSPGDLLLVNNSATVAGEIDGRVAGRGAVVVHVASELDDCTWVVELRTAPDAGHPVLDALEGDVVDLAAGGPRLRLEAPYPRPDSSPTGHGNRLWRATQLDDCTLAEHLATHGRPVAYGYLRSRFPLEDYQTVFARLPGSAEMASAARPFTADLVTGLVSSGVLVAPVTLHTGLSSQEAGEAPQPERFAVSGETAALVNLVRERGRRVVAVGTTATRAIESATGPDGRVRAAAGWTEVVISPDRPARVVDGLVTGWHNPDASHLLLVESVAGADLAQQAYDEAVACRYAWHEFGDAGLFLPHR

SEQ ID NO: 73010 - protein, 332 aa, Terrabacteria group
  misc_feature (1)..(332): tr|A0A537LH86|A0A537LH86_9BACT S-adenosylmethionine:tRN A ribosyltransferase-isomerase (Fragment) OS=Terrabacte ria group bacterium ANGP1 OX=2569760 GN=queA PE=3 SV=1
RLLVVDRSTGRLEHRVFRDLPEYLQPADVMVVNNTRVIPARLRARKPTGGAVEVLLLRPAREQESATARPFGSQPLAQGRPRDGQIWEVLLRPGRRVRIGTRLHLSPRLSGEVIAAQDEGIHLVAFAGDRPVLEAAREIGEMPVPPYIHEPLRRPEDYQTVYASAEGAVAAPTAGLHFTPELLDRIRAAGVRIITLTLHIGLGTFRPVGAADVRSHRMDAEWYEVGEDAATALTQRRGRRVVVGTSAVRTLETVTAGDGAVRPGRGWSELFIYPGFRFKATDALITNFHLPKTTLLMLVCAFAGRELILRAYQEAIAHSYRFYSFGDAMLIL

SEQ ID NO: 73011 - protein, 341 aa, Terrabacteria group
  misc_feature (1)..(341): tr|A0A537LXJ5|A0A537LXJ5_9BACT S-adenosylmethionine:tRN A ribosyltransferase-isomerase OS=Terrabacteria group b acterium ANGP1 OX=2569760 GN=E6G98_02275 PE=3 SV=1
MSPASTTTIDFTLPPKLEAHEPPEARGLTRDAVRLLVSSLSSDRIVHARFTDLPSFLRRDDLLVVNISATVPAALAARRGDGTEVMMHVSTRLPAGLVVVEFRKVDVSAGEVIALPGGGSAVALVPYPGSARLWVARLDLPEPMLSYLERWGRPIAYPYVRGGWPIEMYQNVYASVPGSAEMPSAGRPFTPQIIDQLTLDGVRLASVILHAGVASLERDEPPYEEYFEVPHETAVAVQRAKEAAGRLVAVGTTVVRALESSVDAAGRPVASRGWTDLIITAQRGVKVVDGLLTGFHEPKATHLVLLEAIAGRAHVERVYRAALDAGYLWHEFGDLHLILPD

SEQ ID NO: 73012 - protein, 342 aa, Terribacillus aidingensis
  misc_feature (1)..(342): tr|A0A285NTR6|A0A285NTR6_9BACI S-adenosylmethionine:tRN A ribosyltransferase-isomerase OS=Terribacillus aidinge nsis OX=586416 GN=queA PE=3 SV=1
MDIQDYDFHLPEELIAQTPLQDRTSSRLLVLNKEAQSMEHRHFANIGDYLHPGDCLVLNDTRVLPARLYGIKSDTGAKCEILLLKQVEGDCWEVLVKPAKKVKVGTELSFGDGKLTAVCKELLEHGGRIVEFHYEGIFYEVLDQLGEMPLPPYIKEQLPDQERYQTVYAKEQGSAAAPTAGLHFTKELLASLQEKGVEIAFITLHVGLGTFRPVSVESIEEHEMHAEFYQMSQETADQLTRIRENGGRIISVGTTSTRTLETIARDNEGKFAAASGWTDIFIYPGFTYRAIDGLITNFHLPKSTLIMLVSAFAGRDFVLDAYRTAVEERYRFFSFGDAMLLV

SEQ ID NO: 73013 - protein, 342 aa, Terribacillus goriensis
  misc_feature (1)..(342): tr|A0A075LR12|A0A075LR12_9BACI S-adenosylmethionine:tRN A ribosyltransferase-isomerase OS=Terribacillus goriens is OX=386490 GN=queA PE=3 SV=1
MDIQEYDFHLPEELIAQTPLLDRTASRLLVLNKEEKTMEHRHFADIGDYLKSGDCLVLNDTRVLPARLYGIKKDTQAKVEILLLKQVEGDSWEVLVKPAKKVKVGTELSFGDGKLTAVCKELLEHGGRIVEFQYDGIFYEVLEQLGEMPLPPYIKEQLPDQERYQTVYAKEQGSAAAPTAGLHFTKELLASLQEKGVEIAFITLHVGLGTFRPVSVDSIEEHEMHAEFYQMSQETADQLTRIRENGGRIISVGTTSTRTLETITRDHDGKFVAASGWTDIFIYPGFTYRAIDGLITNFHLPKSTLIMLVSAFAGRDFILDAYRTAVEERYRFFSFGDAMLLV

SEQ ID NO: 73014 - protein, 342 aa, Terribacillus halophilus
  misc_feature (1)..(342): tr|A0A1G6SID9|A0A1G6SID9_9BACI S-adenosylmethionine:tRN A ribosyltransferase-isomerase OS=Terribacillus halophi lus OX=361279 GN=queA PE=3 SV=1
MDIQDYDFHLPEELIAQTPLQDRTASRLLVLNKEAGTMEHRHFADIGDYLNAGDCLVLNDTRVLPARLYGIKKDTQAKVEILLLKQVEGDSWEVLVKPAKKVKVGTELSFGDGKLTAVCKELLEHGGRIIEFHYDGIFYEVLEQLGEMPLPPYIKEQLPDQERYQTVYAKEKGSAAAPTAGLHFTKELLADLQEKGVEIAFITLHVGLGTFRPVSVESIEEHEMHSEFYQMSQETADQLTRIREAGGRIISVGTTSTRTLETIARDHNGKFVAASGWTDIFIYPGFTYRAIDGLITNFHLPKSTLIMLVSAFAGRDFILDAYRTAVKERYRFFSFGDAMLLV

SEQ ID NO: 73015 - protein, 342 aa, Terribacillus saccharophilus
  misc_feature (1)..(342): tr|A0A268ACS6|A0A268ACS6_9BACI S-adenosylmethionine:tRN A ribosyltransferase-isomerase OS=Terribacillus sacchar ophilus OX=361277 GN=queA PE=3 SV=1
MDIQDYDFHLPEELIAQTPLQDRTASRLLVLNKEEKTMEHRHFADIGDYFKSGDCLVLNDTRVLPARLYGIKKDTQAKVEILLLKQVDGDSWEVLVKPAKKVKVGTELSFGDGKLTAVCKELLEHGGRIVEFRYNGIFYEVLDQLGEMPLPPYIKEQLPDQERYQTVYAKEQGSAAAPTAGLHFTKELLASLQEKGVEIAFITLHVGLGTFRPVSVDSIEEHEMHAEFYQMSQDTADQLTRIRENGGRIISVGTTSTRTLETITRDHDGKFVAASGWTDIFIYPGFTYRAIDGLITNFHLPKSTLIMLVSAFAGRDFILDAYRTAVEERYRFFSFGDAMLLV

SEQ ID NO: 73016 - protein, 342 aa, Terribacillus saccharophilus
  misc_feature (1)..(342): tr|A0A268HG59|A0A268HG59_9BACI S-adenosylmethionine:tRN A ribosyltransferase-isomerase OS=Terribacillus sacchar ophilus OX=361277 GN=queA PE=3 SV=1
MDIQDYDFHLPEELIAQTPLQDRTASRLLVLNKEEKTMEHRHFADIGDYFKSGDCLVLNDTRVLPARLYGIKKDTQAKVEILLLKQVEGDSWEVLVKPAKKVKVGTELSFGDGKLTAVCKELLEHGGRIVEFRYDGIFYEVLEQLGEMPLPPYIKEQLPDQERYQTVYAKEQGSAAAPTAGLHFTKELLASLQEKGVEIAFITLHVGLGTFRPVSVDSIEEHEMHAEFYQMSQETADQLTRIRENGGRIISVGTTSTRTLETITRDHDGKFVAASGWTDIFIYPGFTYRAIDGLITNFHLPKSTLIMLVSAFAGRDFILDAYRTAVEERYRFFSFGDAMLLV

SEQ ID NO: 73017 - protein, 342 aa, Terribacillus sp.
  misc_feature (1)..(342): tr|A0A268BS51|A0A268BS51_9BACI S-adenosylmethionine:tRN A ribosyltransferase-isomerase OS=Terribacillus sp. 752 0-G OX=2025389 GN=queA PE=3 SV=1
MDIKDYDFHLPEELIAQTPLQDRTASRLLVLNREARTMEHRHFADIGDYLKPGDCLVLNDTRVLPARLYGIKKDTQAKVEILLLKQMEGDSWEVLVKPAKKVKVGTELSFGDGKLTAVCKELLEHGGRIIEFKYDGIFYEVLEELGEMPLPPYIKEQLPDQERYQTVYAKEKGSAAAPTAGLHFTKELLADLQEKGVEIAFITLHVGLGTFRPVSVESIEEHEMHAEFYQMSQETADQLTRIRENGGRIISVGTTSTRTLETIARDHDGKFVAASGWTDIFIYPGFTYRAIDGLITNFHLPKSTLIMLVSAFAGRDFILDAYRTAVEERYRFFSFGDAMLIV

SEQ ID NO: 73018 - protein, 340 aa, Terriglobus albidus
  misc_feature (1)..(340): tr|A0A5B9EC84|A0A5B9EC84_9BACT S-adenosylmethionine:tRN A ribosyltransferase-isomerase OS=Terriglobus albidus O X=1592106 GN=queA PE=3 SV=1
MLVSDFDFHLPEELIAQQPLPERDASRMLVLDRHTGAFRDDSFRSLPSLLRPGDLLVLNNSRVIPARLYATRYGFIGQIEVLLTQQTAPLEWTALVRPGKKVRVGTTLLFADQLQAEVIAAGEFGERTLRFAPVDDFFARLDRIGHIPLPPYMHRPDDEADRERYQTVYNQQPGSAAAPTAGLHFTPRVLDEVKARGVQIATITLHVGLGTFQPVRVERLDEIRLHTEHYTLPEETARAIQSAQREGRRIVAAGTTTVRTLEHCVRTSLEPHSGETNIFLSPGAEFKLVQALLTNFHLPQSTLLMLVSAFAGRENVLRAYNHAVVERYRFFSYGDCMFIA

SEQ ID NO: 73019 - protein, 376 aa, Terriglobus roseus
  misc_feature (1)..(376): tr|A0A1H4T9P9|A0A1H4T9P9_9BACT S-adenosylmethionine:tRN A ribosyltransferase-isomerase OS=Terriglobus roseus OX =392734 GN=queA PE=3 SV=1
MRVTDFDFDLPPELIAQHPPAERGDSRMMTVDRTSGALADRHFRDFPSMLRPGDLLVMNDSRVIPARLFARRAGLRTQHNSPAPTGHVEVLLTQPLGEGRWRALVKPGRKVPVGERLLFEQASESGAPHLASETQDRQPAAHLEADVIEAGDFGERTLQFAPAADFFGTLDRLGHMPLPPYIRRSDDEPEDRDRYQTVYAGADTHGSAAAPTAGLHFTPEILQQIKQRGVETAHVTLHVGLGTFQPVRADTLADIRLHEEHYTLPGVTADAILRAKAEGRRIVSVGTTTTRTLEHVAATNQVHAHSGSTSIFLQPGHRFALVDALLTNFHLPKSTLLMLVSAFAGTGGREKVLAAYEHAVHKHYRFFSYGDCMFLS

SEQ ID NO: 73020 - protein, 375 aa, Terriglobus roseus
  misc_feature (1)..(375): tr|A0A1G7H3H3|A0A1G7H3H3_9BACT S-adenosylmethionine:tRN A ribosyltransferase-isomerase OS=Terriglobus roseus OX =392734 GN=queA PE=3 SV=1
MLTYCPAVSIKNVRVSDFDFHLPPELIAQHPPAERGNSRMLLIDRNTGNYTDAHFRDFPSQLNEGDLLILNNSRVIPARLFARRAGLRTQHNSPAPTGQVEVLLTQPLGNDRWRALVKPGRKVPTGEHLIFGDNVLEAEVIESGDFGERTLQYAPTQDFFGALEQLGHMPLPPYIHRSEEDEEEDRTRYQTVYAGANTHGSAAAPTAGLHFTPEILEQIKARGVQIEHITLHVGLGTFQPVRVEDLADIRLHEEPYTLPAATADAINKAKSEGRRIIAVGTTTTRTLEHIAAINRIEPHSGTTSIFLQPGHRFQLVNALLTNFHLPKSTLLMLVSALAETEDQTITGREKILRAYAHAVGGKYRFFSYGDCMFLS

SEQ ID NO: 73021 - protein, 356 aa, Terriglobus saanensis
  misc_feature (1)..(356): tr|E8UZ76|E8UZ76_TERSS S-adenosylmethionine:tRNA ribosy ltransferase-isomerase OS=Terriglobus saanensis (strain ATCC BAA-1853 / DSM 23119 / SP1PR4) OX=401053 GN=queA PE=3 SV=1
MRVSDFHFDLPPELIAQKPPVERDAARMLTVDRSTGHLEDKNFLDLPDLLRKGDLLVLNNSRVIPARLFARRAGLRTQSSSPAPSGQIEVLLTQPFGGGRWRALVKPGRKVQVGERLVFGEDELQAEVMETGEFGERTLRFAPNPDFFATLERIGHMPLPPYIHRADSAEDRSRYQTVFSDLELKGSAAAPTAGLHFTPETLNKIQSKGVQVQQITLHVGLGTFQPLRVEDLSEIRLHEEPYTLPESTAEAINRAKAEGRRVVAVGTTTVRTLEHCASQDPGQPLAPHSGTTSIFLSPGYEFRVVDALLTNFHLPQSTLLMLVSAFAGREQVLAAYRHAVESRYRFFSYGDCMFLS

SEQ ID NO: 73022 - protein, 322 aa, Terrimicrobium sacchariphilum
  misc_feature (1)..(322): tr|A0A146GDF3|A0A146GDF3_TERSA S-adenosylmethionine:tRN A ribosyltransferase-isomerase OS=Terrimicrobium saccha riphilum OX=690879 GN=queA PE=3 SV=1
MLVSDFDFDLPPELIASRPLPDRDGSRMMVVDRSTGEITHRSFRDFPSYLAPGDLVVLNDSRVIKARLRTPDQRTELLLLEPVDSSAWKCLGKPGRRLRIGMSMEIAGTVATVRDILPDGERVVEFASPPDLQTHGAMPIPPYFRREADAEDDVRYQTVFADEPGSVAAPTAGLHFTPELLSTLPHAFLTLHVGIGTFLPVKVDRVADHVMHEERYSISPEAAQAINAAKRIVAIGTTASRVLESQPAGPIQPHSGSTAIFIHPGYHFKHVGALLTNFHLPKSTLIMLVSALAGTDLIRRAYEEAVRERYRFFSYGDCMLVV

SEQ ID NO: 73023 - protein, 349 aa, Terrimonas sp.
  misc_feature (1)..(349): tr|A0A2T7QDX5|A0A2T7QDX5_9BACT S-adenosylmethionine:tRN A ribosyltransferase-isomerase OS=Terrimonas sp. NS-102 OX=2171976 GN=queA PE=3 SV=1
MKLSQFRFDLPLNLIAQHPAKKREDARMMVVHRDTGNIENKHFRDVLDYFDDKDVFVVNNTKVFPARMYGRKEKTGAKIEVFLLRELNHQNKLWDVIVDPARKIRVGNKLYFGESEDLVAEVIDNTTSRGRTIRFLFDGTDEEFKTVLNTLGETPLPKYIKRKPDEEDRERYQTVYAKHEGAVAAPTAGLHFSIELIKRLEIKGIRFAEVTLHTGLGTFRPIEVEDLSKHKMDAEYYRIEDKACAIVNKARTSGKRICSVGTTTMRALESSFTAEKLLKPSEGWTNTFIHPPYNFSIADSLITNFHLPKTSLLIMTCAFAGYDLAMEAYKKAIKDKYRFFSYGDAMLVL

SEQ ID NO: 73024 - protein, 408 aa, Terrimonas sp.
  misc_feature (1)..(408): tr|A0A2T7QD87|A0A2T7QD87_9BACT S-adenosylmethionine:tRN A ribosyltransferase-isomerase OS=Terrimonas sp. NS-102 OX=2171976 GN=DC498_05150 PE=3 SV=1
MHPKYLSIQDFTYHLPDNRIAQHPLADRDASKLLVYKDGNIAEDIYRNIAAHIPAGSLLVFNNTKVVEARLKFKKPSGGSIEIFCLSPHSQYHDVTAAMLQKEKVWWNCLIGGASKWKPGMQLEKIISAPAGDIVLKAAIVERNPENFVVELSWQPGDLSFAEILHYTGEIPLPPYMKRGVEKEDEERYQTIYAEHHGSVAAPTAGLHFTDEIFASFTERNINTGFVTLHVGAGTFKPVKAAHMHEHAMHAEFIEVAAATIEQLSEYADNIICVGTTSLRTIESLYWAGVKIIQQPGITEDDIGINQWEVYDALNAMHIPVKDALNALLKWLRQNNLQKLVTQTQILIAPGYDFRMIKGLITNFHQPQSTLLLLVAAIIGDDWRGVYEYALENNFRFLSYGDGCLLFI

SEQ ID NO: 73025 - protein, 341 aa, Terrisporobacter glycolicus
  misc_feature (1)..(341): tr|A0A1I3STS3|A0A1I3STS3_9FIRM S-adenosylmethionine:tRN A ribosyltransferase-isomerase OS=Terrisporobacter glyc olicus OX=36841 GN=queA PE=3 SV=1
MKTSDFYFDLPEELIAQVPILDRSSSKLMVVDKETGEVSHKIFKDIIDYLNPGDCLVLNDTRVIPARLIGSKEGTGGKIEFLLLKRNEDDTWETLVKPGKRAKIGTRFSFGEGKLIAEVVGMGDDGARIVKFEYEGIFEEVLDELGNMPLPPYITERLEERERYQTVYSKHNGSAAAPTAGLHFTDELLQKMKDKGIDLAFVTLHVGLGTFRPVKVDDVLEHDMHSEYYMVTQEAADKINRAKENGKKVITVGTTSTRTIESVADENGKMKAASGWTKIFIYPGYKFKVVDKLITNFHLPESTLIMLVSALAGKENVLNAYNSAVENHYRFFSFGDAMFIK

SEQ ID NO: 73026 - protein, 343 aa, Terrisporobacter glycolicus
  misc_feature (1)..(343): tr|A0A354KMI5|A0A354KMI5_9FIRM S-adenosylmethionine:tRN A ribosyltransferase-isomerase OS=Terrisporobacter glyc olicus OX=36841 GN=queA PE=3 SV=1
  misc_feature (181)..(182): Xaa can be any naturally occurring amino acid
MKTSDFYFDLPEELIAQVPILDRSSSKLMVLDKETGEVSHKIFKDIIDYLNPGDCLVLNDTRVIPARLIGSKEGTGGKIEFLLLKRNEDDTWETLVKPGKRAKIGTRFSFGEGKLIAEVVGMGDDGARIVKFEYEGIFEEVLDELGNMPLPPYITKRLEERERYQTVYSKHNGSAAAPTAXXGLHFTDELLQKMKDKGIDLAFVTLHVGLGTFRPVKVDDVLEHDMHSEYYMVTQEAADKINRAKENGKKVITVGTTSTRTIESVADENGKMKAASGWTKIFIYPGYKFKVVDNLITNFHLPESTLIMLVSALAGKENVLNAYNCAVENHYRFFSFGDAMFIK

SEQ ID NO: 73027 - protein, 341 aa, Terrisporobacter othiniensis
  misc_feature (1)..(341): tr|A0A0B3VXR8|A0A0B3VXR8_9FIRM S-adenosylmethionine:tRN A ribosyltransferase-isomerase OS=Terrisporobacter othi niensis OX=1577792 GN=queA PE=3 SV=1
MKTSDFYFDLPEELIAQVPILDRSSSKLMVLDKETGEVSHKIFKDIIDYLNPGDCLVLNDTRVIPARLIGSKEGTGGKIEFLLLKRNEDDTWETLVKPGKRAKIGTRFSFGEGKLIAEVVGMGDDGARIVKFEYEGIFEEVLDELGNMPLPPYITERLEERERYQTVYSKHNGSAAAPTAGLHFTDELLQKIKDKGVDLAFVTLHVGLGTFRPVKVDDVLEHDMHSEYYMVTQEAADKINKAKENGNRVITVGTTSTRTIESVADENGRMKAASGWTKIFIYPGYKFKVVDNLITNFHLPESTLIMLVSALAGKENVLNAYKCAVENHYRFFSFGDAMFIK

SEQ ID NO: 73028 - protein, 362 aa, Testudinibacter aquarius
  misc_feature (1)..(362): tr|A0A4V2W2F4|A0A4V2W2F4_9PAST S-adenosylmethionine:tRN A ribosyltransferase-isomerase OS=Testudinibacter aquar ius OX=1524974 GN=queA PE=3 SV=1
MQVSDFYFELPDELIARYPKAQRSSSRLLCLNGETGELQHRQFADVLDLVNAGDLLVFNNTRVIPARMFGRKSSGGKLEVLVERVLGEKSCLAHVRASKAPQAGSQIILGEDKLGADNGIPFVMKARHDTLFELEVVGDIPLLAVLQQIGHIPLPPYIDRPDEEMDQERYQTVYNQVPGAVAAPTAGLHFDQALLQQLTEKGVNFAFVTLHVGAGTFQPVRVEKVEDHHMHAEYVEVDEQTVQAVLDTKAAGKRVIAVGTTSVRSIESAALAAAETAQPHLLAPYFSDTTIFLYPGKPFRVVDALITNFHLPESTLVMLVSAFAGYRNTMCAYKSAVAEQYRFFSYGDAMFISKNPMVKGLE

SEQ ID NO: 73029 - protein, 343 aa, Tetragenococcus halophilus
  misc_feature (1)..(343): tr|A0A424XR47|A0A424XR47_TETHA S-adenosylmethionine:tRN A ribosyltransferase-isomerase OS=Tetragenococcus halop hilus subsp. halophilus DSM 20339 OX=1123358 GN=queA PE =3 SV=1
MLTTEDFDFDLPEELIAQTPLEDRTSSRLLVLDSKTGKLQDKHFYNIIDELHPGDALVMNDTRVLPARLYGEKEETGAHLEVLLLNNTEGDVWETLVKPAKRAKVGTQITFGDGRIKAVVEEELDHGGRMIRFSYEGIFLENLEALGEMPLPPYIKEKLDDPERYQTVYAKENGSAAAPTAGLHFTQELLDKIQQKGIELVYLTLHVGLGTFRPVSVENIEDHDMHSEFYRLTDNAADRLNQVKAQGGKIVAVGTTSIRTLETIGTKFNGEIKADSGWTDIFITPGYQFKVVDAFSTNFHLPKSTLVMMVSAFAGRDNILNAYQHAVDERYRFFSFGDAMFIK

SEQ ID NO: 73030 - protein, 343 aa, Tetragenococcus halophilus
  misc_feature (1)..(343): tr|A0A3G5FGM4|A0A3G5FGM4_TETHA S-adenosylmethionine:tRN A ribosyltransferase-isomerase OS=Tetragenococcus halop hilus OX=51669 GN=queA PE=3 SV=1
MLTTEDFDFDLPEELIAQTPLEDRTSSRLLVLDSKTGKLQDKHFYDIIDELHPGDALVMNDTRVLPARLYGEKEETGAHLEVLLLNNTEGDVWETLVKPAKRAKVGTQITFGDGRIKAVVEEELDHGGRMIRFSYEGIFLENLEALGEMPLPPYIKEKLDDPERYQTVYAKENGSAAAPTAGLHFTQELLDKIQQKGIELVYLTLHVGLGTFRPVSVENIEDHDMHSEFYRLTDNAADRLNQVKAQGGKIVAVGTTSIRTLETIGTKFNGEIKADSGWTDIFITPGYQFKVVDAFSTNFHLPKSTLVMMVSAFAGRDNILNAYQHAVDERYRFFSFGDAMFIK

SEQ ID NO: 73031 - protein, 343 aa, Tetragenococcus koreensis
  misc_feature (1)..(343): tr|A0A3G5F792|A0A3G5F792_9ENTE S-adenosylmethionine:tRN A ribosyltransferase-isomerase OS=Tetragenococcus koree nsis OX=290335 GN=queA PE=3 SV=1
MLTTEDFDFDLPEELIAQTPLTDRSSSRLLVLDSKTGKMQDKHFYDIIDELHPGDALVMNDTRVLPARLYGQKEDTGGHLEVLLLNNTEGDVWETLVKPAKRAKAGTKISFGDGRLKAVVEEELEHGGRMIRFSYEGIFLENLEALGEMPLPPYIKKKLDDPERYQTVYAKENGSAAAPTAGLHFTEELLNKIQEKGIELVYLTLHVGLGTFRPVSVENIEDHDMHSEFYRLTEDSAERLNQVKNEGGRIVAVGTTSIRTLETIGTKFEGKIKADSGWTDIFITPGYQWKIVDAFSTNFHLPKSTLVMMVSAFAGRDNILTAYQHAVEERYRFFSFGDAMFVK

SEQ ID NO: 73032 - protein, 343 aa, Tetragenococcus muriaticus
  misc_feature (1)..(343): tr|A0A091C7T7|A0A091C7T7_9ENTE S-adenosylmethionine:tRN A ribosyltransferase-isomerase OS=Tetragenococcus muria ticus 3MR10-3 OX=1302648 GN=queA PE=3 SV=1
MLTTEDFDFDLPEELIAQTPLNDRSSSRLLVLDSKTGKTQDKHFYDIIDELSPGDALVMNDTRVLPARLYGEKEDTGGHLEVLLLNNPEGDVWETLVKPAKRAKVGTQISFGDGRLHAVVEEELDHGGRMIRFSYEGIFLENLEALGEMPLPPYIKTKLEDPERYQTVYAKENGSAAAPTAGLHFTEELLNKIQEKGIELVYLTLHVGLGTFRPVSVENIEDHDMHSEFYRLTEESADRLNQVKSNGGKIVAVGTTTIRTLESIGTKFDGQIKADSGWTDIFITPGYQWKIVDAFSTNFHLPKSTLVMMVSAFAGRDNILSAYQHAVEERYRFFSFGDAMFIK

SEQ ID NO: 73033 - protein, 343 aa, Tetragenococcus muriaticus; identical to SEQ ID NO: 73032
  misc_feature (1)..(343): tr|A0A091C975|A0A091C975_9ENTE S-adenosylmethionine:tRN A ribosyltransferase-isomerase OS=Tetragenococcus muria ticus PMC-11-5 OX=1302649 GN=queA PE=3 SV=1

SEQ ID NO: 73034 - protein, 343 aa, Tetragenococcus osmophilus
  misc_feature (1)..(343): tr|A0A3G5FB61|A0A3G5FB61_9ENTE S-adenosylmethionine:tRN A ribosyltransferase-isomerase OS=Tetragenococcus osmop hilus OX=526944 GN=queA PE=3 SV=1
MLTTEDFDFDLPEELIAQTPLTDRASSRLLVLDSKTGNTQDKHFYDIIDELNPGDALVMNDTRVLPARLYGEKEDTGGHLEVLLLNNPEGDTWETLVKPAKRAKVGTQISFGDGRLRAVVEEELDHGGRMIRFSYEGIFLENLEALGEMPLPPYIKTKLDDPERYQTVYAKENGSAAAPTAGLHFTEDLLNKIQEKGIELVYLTLHVGLGTFRPVSVENIEDHDMHSEFYRLTEDSADRLNQVRDNGGKIVAVGTTSIRTLETIGTKFDGQIKADSGWTDIFITPGYQWKVVDTFSTNFHLPKSTLVMMVSAFAGRDNILNAYQHAVEERYRFFSFGDAMFIK

SEQ ID NO: 73035 - protein, 347 aa, Tetzosporium hominis
  misc_feature (1)..(347): tr|A0A264W0K2|A0A264W0K2_9BACL S-adenosylmethionine:tRN A ribosyltransferase-isomerase OS=Tetzosporium hominis OX=2020506 GN=queA PE=3 SV=1
MKVEDFDFHLPEELIAQTPLADRTSSKLLVADYPNNELHHTTFQHILDELREGDCLILNDTKVMPARLMGVKEETGASVEVLLLTQLADDEWETLVKPAKRVKIGTVISFGDGLLTATCTAIKDHGGRVFKMNYDGVFFEVLDQLGEMPLPPYIHEKLEDRDRYQTVYAKEQGSAAAPTAGLHFTSELLEAMEKKGVKIGYVTLHVGLGTFRPVSVDTIESHEMHAEFYRMPQVTADLINETKAAGGRVVAVGTTSTRTLESVAKKFDGEVKEDSDWTSIFIFPGFEFKVIDAMITNFHLPKSTLVMLVSALTSRDFILDAYQEAIDQRYRFFSFGDAMLIKGKDFK

SEQ ID NO: 73036 - protein, 341 aa, Thalassobacillus cyri
  misc_feature (1)..(341): tr|A0A1H4FCG0|A0A1H4FCG0_9BACI S-adenosylmethionine:tRN A ribosyltransferase-isomerase OS=Thalassobacillus cyri OX=571932 GN=queA PE=3 SV=1
MDIKQYDFDLPEELIAQTPLLDRAASRLMVLDKENKTINHRRFSDIREYLRPGDCLVLNDTRVLPARLYGVKEDTGAKVEVLLLHQTEEDEWEVLVKPAKKIKVGTRIIFGEGKLIAQCTAAQEHGGRMLRFEYEGIFLEVLETLGEMPLPPYIKEQLSDSERYQTVYAKEEGSAAAPTAGLHFTKELLKEIEQSGVELAYITLHVGLGTFRPVSVDNIEDHDMHAEFYQVSQETADKLNHVRENGGRIISVGTTSTRTLETIMRDYGKFTEASGWTDIFIYPPYELQAIDGLITNFHLPQSTLIMLVSALAGRAFILDAYQQAVEERYRFFSFGDAMLIL

SEQ ID NO: 73037 - protein, 358 aa, Thalassobacter sp.
  misc_feature (1)..(358): tr|A0A099T7V6|A0A099T7V6_9RHOB S-adenosylmethionine:tRN A ribosyltransferase-isomerase OS=Thalassobacter sp. 16 PALIMAR09 OX=1225651 GN=queA PE=3 SV=1
MQLSDFDFDLPEGRIATRPARPRSSARLLVSHGETLHDQRVTDLPKWLRPGDRLVLNNTKVLPARLNGLRPRNSAQGPVEAKVEITLLEPTPEGHWSALAKPLRKLVDGDRVVFSDALEAQVVSRRESDVVLQFNCTGDDFDAALNAAGAMPLPPYIAAKRPADAQDMDDYQTVFARHSGAVAAPTASLHFDAALLQTLRDHGVTFTEVTLHVGAGTFLPVKVDDVTTHKMHAERGNITPEAADQINETRAAGGRIIPVGTTALRLLESAAAEDGTLSAWEGATDIFIYPGYQWKITDALMTNFHLPKSTLMMLVAALMGHEHIMRIYDHALAEQYRFFSYGDSSLLIPPRTAAKGGA

SEQ ID NO: 73038 - protein, 358 aa, Thalassobacter stenotrophicus
  misc_feature (1)..(358): tr|A0A0P1EZ06|A0A0P1EZ06_9RHOB S-adenosylmethionine:tRN A ribosyltransferase-isomerase OS=Thalassobacter stenot rophicus OX=266809 GN=queA PE=3 SV=1
MQLSDFDFDLPEGRIATRPARPRSSARLLVSHGETLHDQRVTDLPKWLRPGDRLVLNNTKVLPARLNGLRPRNSAQGPVEAKVEITLLEPTPEGHWSALAKPLRKLVDGDRVVFSDALEAEVVSRRESDVVLQFNCAGDDFDAALNAAGAMPLPPYIAAKRPADAQDMDDYQTVFARHSGAVAAPTASLHFDAALLQKLRDHGVTFTEVTLHVGAGTFLPVKVDDVTTHKMHAERGNITPEAAAQINETRAAGGRIIPVGTTALRLLESAAAEDGTLSAWEGATEIFIYPGYQWKITDALMTNFHLPRSTLMMLVAALMGHEHIMRIYDHALAEQYRFFSYGDSSLLIPPRTAAKGGA

SEQ ID NO: 73039 - protein, 345 aa, Thalassobaculum litoreum
  misc_feature (1)..(345): tr|A0A1G7Q292|A0A1G7Q292_9PROT S-adenosylmethionine:tRN A ribosyltransferase-isomerase OS=Thalassobaculum litor eum DSM 18839 OX=1123362 GN=queA PE=3 SV=1
MRVDLFDYTLPEERIARFPARPRESARLLDLTGGRMADRVVRDLPDLLRPGDLLLSNDTRVIPARLKGRRGAAGVEVTLHKRDGDAVWRAFARPAKKLRPGDRIVFAEDLAADVTDKGEAGEVTLAFSCGGPALMAALEAHGSMPLPPYIKRAAGEGAEDSQDYQTVFAARDGAVAAPTAGLHFTPALLQAVEAKGVKRALVTLHVGAGTFLPVKADDTDDHVMHTEWGEVSAETARAIAETRATGGRIVATGTTTLRVLEAAANDDGTVPAWSGDTDLFITPGYRFKAVDMLLTNFHLPKSTLLMLVSAFAGRERILAAYDHAIAQGYRFFSYGDACLLERTTP

SEQ ID NO: 73040 - protein, 348 aa, Thalassobium sp.
  misc_feature (1)..(348): tr|C7D7A1|C7D7A1_9RHOB S-adenosylmethionine:tRNA ribosy ltransferase-isomerase OS=Thalassobium sp. R2A62 OX=633 131 GN=queA PE=3 SV=1
MKLSDFDFDLPDDRIAVRPTQPRSSARLLLARGDDILDRVVTDLIDILQPGDRLVLNDTRVIPARLSGQRHRNSAQGPVSAAIDVTLLTPQADGAWTALIKPLKKVTEGEDIVFSDDLSATLIGKEDGQGRLKFNLTGDDFDAALAAAGAMPLPPYIAAKRAADAQDHTDYQTVWARHQGAVAAPTASLHFDQPLLEALNAKGIQFTYVTLHVGAGTFLPVKVDNIADHKMHSEWGQITHAAADAINSTTGRVIPVGTTALRLIESAAQNGRLAAWEGPTDIFITPGFKFQIADGLMTNFHLPKSTLMMLVSALMGTQNIKDIYAHALRHEYRFFSYGDSSLLLPQGE

SEQ ID NO: 73041 - protein, 352 aa, Thalassobium sp.
  misc_feature (1)..(352): tr|A0A2G2AGR2|A0A2G2AGR2_9RHOB S-adenosylmethionine:tRN A ribosyltransferase-isomerase OS=Thalassobium sp. OX=2 030825 GN=queA PE=3 SV=1
MKTSDFHFDLPDELIARYSMPERSSSRLLVLNPANGQCSDHIFRDLEQMLNPGDLLVFNNTRVIPARLFGEKASGGKLEALIERVLNEHEALAHVRSSRSPKPGQIIILGGVEVEIVGREGALFHLRFLDERPLFEILDAVGHMPLPPYMERADTEEDRERYQTVYAKAPGAVAAPTAGLHFDEPLLERLRNKGVQFAYVTLHVGAGTFQPVKVDNVLEHEMHAEYIEVTQEVVDAVKATRAAGKRVVAVGTTSVRSLESASQNGEIAPYAADSRIFIYPGYRFRSVDAMITNFHLPESTLIMLVSAFAGRDNTMGAYAHAVANKYRFYSYGDAMFLPCSAPVPAEFQQDAQ

SEQ ID NO: 73042 - protein, 348 aa, Thalassobius activus
  misc_feature (1)..(348): tr|A0A0P1IU21|A0A0P1IU21_9RHOB S-adenosylmethionine:tRN A ribosyltransferase-isomerase OS=Thalassobius activus OX=1715691 GN=queA PE=3 SV=1
MQLSDFDFDLPDRLIATRPAKPRTSAKLLVATPDRFIDARVSDIAQFFRPGDRLVLNDTKVIPARLTGYRHRDSAQGAVKAKIEVTLLEPKGEGQWSALLKPLKKINEGEVIHFAQDFTATLESKEDGQAILQFEADGDAFEAALQSAGAMPLPPYIAAKRAADDQDKTDYQTVFARHSGAVAAPTASLHFDEALLASLVEMGVQFSHVTLHVGAGTFLPVKVEDVTTHKMHAEWGRVSAEAAAEIKATKAAGGRVIPVGTTALRLIESAARDGEIAPWEGETDIFIYPGFEFHVADALMTNFHLPKSTLMMLVSALMGQERVREIYAHAVENDYRFFSYGDSSLLLP

SEQ ID NO: 73043 - protein, 350 aa, Thalassobius autumnalis
  misc_feature (1)..(350): tr|A0A0N7LX03|A0A0N7LX03_9RHOB S-adenosylmethionine:tRN A ribosyltransferase-isomerase OS=Thalassobius autumnal is OX=2072972 GN=queA PE=3 SV=1
MKLSDFDFDLPETLIATRPAKPRSSARMLVCDSGAIHDQVAIDLPDWLRPGDRLVLNDTKVIPARLFGERPRLGAEGPTRAKMDVTLLEPRADGTWAALLKPLKKIREGEVIEFSAALSATLEAKEDGQAHLRFNLTGDDFDAALAEAGAMPLPPYIAAKRAADEQDKEDYQTLWAKNAGAVAAPTASLHFDEALMAALEARGVRFTHVTLHVGAGTFLPVKVEDVTTHKMHAEWGQVSEAAAEEMRATKAAGGRVIPVGTTALRLIESAARGGQIAAWEGETDIFIYPGFQFNVTDALMTNFHLPKSTLLMLVSALMGKEVMDQVYAHAVAEGYRFFSYGDASLLIPKG

SEQ ID NO: 73044 - protein, 352 aa, Thalassobius gelatinovorus
  misc_feature (1)..(352): tr|A0A0P1F620|A0A0P1F620_THAGE S-adenosylmethionine:tRN A ribosyltransferase-isomerase OS=Thalassobius gelatino vorus OX=53501 GN=queA PE=3 SV=1
MKLSDFDFELPDHLIATRPAKPRPSARLLVSEGDRISDAHVYDLPDWLRPGDRLVLNDTKVIPARLSGERRRQGAEGETRARIEVTLLEPRADGTWAALLKPLKKVREGEDIHFSAALSARLEAKEDGQGLLRFNLAGDDFDAALTAAGMMPLPPYIAAKRASDEQDKQDYQTVFARHPGAVAAPTASLHFDENLLAAIRAKGVETTHVTLHVGAGTFLPVKVEDVTSHKMHAEWGEVSEAAAAEIAATKAAGGRVIPVGTTALRLIESAARGGHIEAWCGETDIFIYPGFEFHVADALMTNFHLPKSTLMMLVSALIGHDRIKQIYDHAVRERYRFFSYGDASLLVPPNRD

SEQ ID NO: 73045 - protein, 349 aa, Thalassobius mediterraneus
  misc_feature (1)..(349): tr|A0A0N7M284|A0A0N7M284_9RHOB S-adenosylmethionine:tRN A ribosyltransferase-isomerase OS=Thalassobius mediterr aneus OX=340021 GN=queA PE=3 SV=1
MKLSDFDFDLPEDLIATRPAKPRSSARMLVCQGGAISDHQAINLPDFLRPGDRLVLNDTKVIPARLFGERPRMGELGETRAKMDVTLLEPRADGTWAALLKPLKKIREGEVIEFSPALSATLEGKADGQAHLRFNLTGDDFDAALTDAGAMPLPPYIAAKRPADQQDKEDYQTLWAKNTGAVAAPTASLHFDEVLMAALAERGVEFTHVTLHVGAGTFLPVKVEDVTTHKMHAEWGQVTPEAAAEIAATKAAGGRVIPVGTTALRLIESAARSGAIEPWEGETDIFIYPGFQFNVTDALMTNFHLPKSTLLMLVSALMGKAVMDQVYAHAVSNGYRFFSYGDASLLMPK

SEQ ID NO: 73046 - protein, 412 aa, Thalassobius sp.
  misc_feature (1)..(412): tr|A0A2E9G3R9|A0A2E9G3R9_9RHOB S-adenosylmethionine:tRN A ribosyltransferase-isomerase OS=Thalassobius sp. OX=1 979401 GN=queA PE=3 SV=1
MSVKEIDVKLEDYQYELPKEKIAAYPLKERDSAKLLVYKDGEISHDTFKHLGSFLDKNYSLFFNNTKVLPARMHFRKDTGAIIEVFLLHPEQPTRIVQEAMLVKNDAVWACTIGNLKRWKDDQVLSRQLVVDGKAVELQVQIVDREKRWVKFSWNLFNEPNSDLNFVDVVEAAGNTPLPPYLNRAAEDIDETEYQTVYGKKEGAVAAPTAGLHFTDNMLEAFKTEGRLLDELTLHVGAGTFQPVKVNDIKEHEMHCEQIVVYKYNIENLLQSEKILAVGTTSMRTMESIYWYGVQLIKGDTEQQNLFIKKLYPYQYDDAGLPSRKEALQAVLDFMETNQLEEITGETEILIMPGYDFKICDALITNFHLPESTLILLIAAFIGEDWRKVYEVALNENYRFLSYGDGSLLIRN

SEQ ID NO: 73047 - protein, 351 aa, Thalassococcus halodurans
  misc_feature (1)..(351): tr|A0A1H5WDX3|A0A1H5WDX3_9RHOB S-adenosylmethionine:tRN A ribosyltransferase-isomerase OS=Thalassococcus halodu rans OX=373675 GN=queA PE=3 SV=1
MKLDDFDFHLPDDLIATRPANPRSSARLLVSDPDGITDAVVTDICKWLRPGDRLVLNDTKVLPARLFGARHREGPEGATQAKMEVTLLEPQADGTWMALVKPLKKVRDGEDIVFSDDLAATVVSRADGQAALKFNLSGDDFDAALGKAGAMPLPPYIAQKRPADEQDKKDYQTVWARVPGAVAAPTASLHFDDALLARLKEHGVSFTHVTLHVGAGTFLPVKVDDVTKHKMHAEWGEVTEQAAAEIAETKAKGGRVIPVGTTALRLIETAARDTGAIVPWCGETDIFIYPGFTFHVADGLMTNFHLPKSTLMMLVSAFAGTQRIRDIYDHAVAEKYRFFSYGDASLLLPNG

SEQ ID NO: 73048 - protein, 349 aa, Thalassococcus profundi
  misc_feature (1)..(349): tr|A0A369TQB0|A0A369TQB0_9RHOB S-adenosylmethionine:tRN A ribosyltransferase-isomerase OS=Thalassococcus profun di OX=2282382 GN=queA PE=3 SV=1
MKLSDFDFDLPERLIATRPARPRSSARLLVAQGDRIADAVVRDLGDWLRPGDRLVLNDTKVIPARLSGLRRRDGAEGPTEARIEVTLLEPQADGSWSALVKPLKKVRDGEEITFSSDLAAVLETRDDGRARLRFNLAGDDFDAALAKAGAMPLPPYIAAKRPADARDHEDYQTVWARNAGAVAAPTASLHFDTDLLDRLAAQGIGFTHVTLHVGAGTFLPVKVEDVTAHRMHAEWGEVSATAAAEIAATKAAGHRVIPVGTTALRLIETAARDTGAIAPWEGETDIFIYPGFDFRVTDALMTNFHLPKSTLMMLVSALMGQQRVRDIYAHAIAREYRFFSYGDASLLIP

SEQ ID NO: 73049 - protein, 348 aa, Thalassococcus sp.
  misc_feature (1)..(348): tr|A0A4P6MI27|A0A4P6MI27_9RHOB S-adenosylmethionine:tRN A ribosyltransferase-isomerase OS=Thalassococcus sp. S3 OX=2017482 GN=queA PE=3 SV=1
MKLSDFDFHLPEHLIATRPAKPRSSARLLVAQGDQISDARVFELPKWLRPGDRLVLNDTRVIPARLTGQRHRAGAQGATSAKIEATLLEPQPDGTWVALIKPLKKLRVGEDVVFSADLSARLTSVRDGQGMLAFNLSGPDFDAALAEAGAMPLPPYIAAKRPADVQDKTDYQTIWARRAGAVAAPTASLHFDEALMQALADAGVLFSFVTLHVGAGTFLPVKVDDVTTHKMHAEWGHVGPAAAAEIAATKVSGGRIIPVGTTALRLIESAGRSGEIRPWEGETDIFIYPGFRFQITDALMTNFHLPKSTLMMLVSALMGQDRVRRIYDHAIAEEYRFFSYGDSSLLIP

SEQ ID NO: 73050 - protein, 304 aa, Thalassolituus oleivorans
  misc_feature (1)..(304): tr|M5DP62|M5DP62_9GAMM S-adenosylmethionine:tRNA ribosy ltransferase-isomerase OS=Thalassolituus oleivorans MIL -1 OX=1298593 GN=queA PE=3 SV=1
MLNPSDLLVFNNTRVIPARLFGEKVSGGKLEALIERVLNEHEALAHVRSSRSPKPGQIIILGGVKVEIVGREGALFHLRFLDDRPLFEILDAVGHMPLPPYMERADTEEDRERYQTVYAKAPGAVAAPTAGLHFDEPLLERLRNKGVQFAYVTLHVGAGTFQPVKVDNVLEHEMHAEYIEVTQEVVDAVKATRAAGKRVVAVGTTSVRSLESASQNGEIAPYAADSRIFIYPGYRFRSVDAMITNFHLPESTLIMLVSAFAGRDNTMGAYAHAVANKYRFYSYGDAMFLPCSAPVPAEFQQDAQ

SEQ ID NO: 73051 - protein, 352 aa, Thalassolituus oleivorans
  misc_feature (1)..(352): tr|W8G224|W8G224_9GAMM S-adenosylmethionine:tRNA ribosy ltransferase-isomerase OS=Thalassolituus oleivorans R6- 15 OX=1208320 GN=queA PE=3 SV=1
MKTRDFHFDLPDELIARYSMPERSSSRLLVLNPTDGQCSDYIFRDLEQMLNPSDLLVFNNTRVIPARLFGEKVSGGKLEALIERVLNEHEALAHVRSSRSPKPGQIIILGGVKVEIVGREGALFHLRFLDDRPLFEILDAVGHMPLPPYMERADTEEDRERYQTVYAKAPGAVAAPTAGLHFDEPLLERLRNKGVEFAYVTLHVGAGTFQPVKVDNVLEHEMHAEYIEVTQDVVDAVKSTRAAGKRVVAVGTTSVRSLESASQNGEIAPYAADSRIFIYPGYRFRSVDAIITNFHLPESTLIMLVSAFAGRDNTMGAYAHAVANRYRFYSYGDAMFLPCSAPVPAEFQQDAQ

SEQ ID NO: 73052 - protein, 350 aa, Thalassolituus sp.
  misc_feature (1)..(350): tr|A0A558NAH4|A0A558NAH4_9GAMM S-adenosylmethionine:tRN A ribosyltransferase-isomerase OS=Thalassolituus sp. C2 -1 OX=2597518 GN=queA PE=3 SV=1
MKTSDFHFDLPDELIARYPMAERSASRLLCLNGATGERAHHTFKDLASMLEPGDLLVFNNTKVIPARLFGEKLSGGKLEALIERVTGEHEALAHLRSSRSPKPGSRILLGGVEVEVVGREGALFQLRFLDERPLLSILDEVGHMPLPPYMERDDAEEDRERYQTVYAEKPGAVAAPTAGLHFDEPLLQVLKEKGVNFAYVTLHVGAGTFQPVKVDNIHDHEMHAEYIEVSQDVVDAVNATRAAGKRVVAVGTTSVRSLESASQSGEIAPFYDESRIFIYPGYRFRSVDAMITNFHLPESTLIMLVSAFAGRDNTMAAYAEAVAQRYRFYSYGDAMFLSRPQPVLNDAQPE

SEQ ID NO: 73053 - protein, 347 aa, Thalassomonas actiniarum
  misc_feature (1)..(347): tr|A0A0D8CSC5|A0A0D8CSC5_9GAMM S-adenosylmethionine:tRN A ribosyltransferase-isomerase OS=Thalassomonas actinia rum OX=485447 GN=queA PE=3 SV=1
MRVADFSFDLPEELIARYPKTDRSASRLMALDGASGNIQDLVFTDLVDKLESGDLLVFNNTRVIPARMFGQKASGGKVEVLVERLLDERRVLAHIRASKSPKVGTELLLENQVNATMVARHDALFELEFHGDKSVLTVLDEIGHMPLPPYIDRPDEDSDRERYQTVYNEKPGAVAAPTAGLHFDEALMEKIRAKGVNFAFVTLHVGAGTFQPVRVEEISEHVMHAEYVEVPPEVVQQITDTKKAGGRVVAVGTTSVRSLESAARDALDKGTELKAFYGDTDIFITPGFEFQLVDALVTNFHLSESTLLMLVSAFAGYEHIMQAYRQAVEKEYRFFSYGDAMFLTRKD

SEQ ID NO: 73054 - protein, 349 aa, Thalassomonas sp.
  misc_feature (1)..(349): tr|A0A553FJG3|A0A553FJG3_9GAMM S-adenosylmethionine:tRN A ribosyltransferase-isomerase OS=Thalassomonas sp. M14 54 OX=2594477 GN=queA PE=3 SV=1
MLVSDFSFDLPTELIARYPQAERSASRLLSLDGNSGELEHLQFNQIIDKLVPGDLLVFNNTRVIPARVFGVKSTGGKIEVLVERVIDDSRVLAHVKASKALKVGNEVQLEGKVNATMVARHGALFELQFHSEQTVLEVLEEIGHMPLPPYIDRPDENSDRERYQTVYNEKPGAVAAPTAGLHFETQLLEKIKDKGVNLAFVTLHVGAGTFQPVKVDQISEHVMHSEYVEVSDEVVEQIKATKAAGHRVVAVGTTSVRSLESAAKKSAEQGKELSAFYGDTDIFITPGYEFKLIDALVTNFHLSESTLLMLVSAFSGYDHIMHAYKQAIADKYRFFSYGDAMFLTRQTTK

SEQ ID NO: 73055 - protein, 347 aa, Thalassomonas viridans
  misc_feature (1)..(347): tr|A0A0D8DF02|A0A0D8DF02_9GAMM S-adenosylmethionine:tRN A ribosyltransferase-isomerase OS=Thalassomonas viridan s OX=137584 GN=queA PE=3 SV=1
MRVADFSFDLPEELIARYPKTDRSASRLMALDGVSGDIQDLVFTDLVDKLTAGDLLVFNNTRVIPARMFGQKASGGKVEVLVERLLDDRRALAHIRASKAPKEGSELLLENQVKATMVARHDALFELEFHGEKSVLEVLDAIGHMPLPPYIDRPDEDSDRERYQTVYNEKPGAVAAPTAGLHFDEVLMEKLRAKGVNFAFVTLHVGAGTFQPVRVEEISEHVMHAEYVEVPQEVVEQIAETKKAGGRVVAVGTTSVRSLESAARDALDKGTELKAFYGDTDIFITPGFEFQLVDALVTNFHLSESTLLMLVSAFAGYEHIMQAYRQAVEKEYRFFSYGDAMFLTRKA

SEQ ID NO: 73056 - protein, 355 aa, Thalassospira alkalitolerans
  misc_feature (1)..(355): tr|A0A1Y2LEY0|A0A1Y2LEY0_9PROT S-adenosylmethionine:tRN A ribosyltransferase-isomerase OS=Thalassospira alkalit olerans OX=1293890 GN=queA PE=3 SV=1
MKVDLFDFELPRDCIAEHPANPRDSARMLDLTGGETPAGMMDRIVRELPDILRPGDLLISNDTRVIPARLFGKRGDAGIEVTLHKQEGLAQWRAFAKPARKLRIGEIFKVTDDFEAEVIEKKDGGEVLLRFNVAGADLIAGLEKYGVMPLPPYIRRDKGGDNQDRSDYQTIFARHDGAVAAPTAGLHFTPELLANLDARGIKRRTITLHVGAGTFLPVKVDDTNDHKMHAEWGSISPEIATLINETRANGGRVIAVGTTSLRLLESAAREDGVVEPFENDTDIFITPGYKFRAVDMLLTNFHLPRSTLFMLVSAFAGYDRMKTAYGHAIENKYRFYSYGDCSLLECASKIEKADD

SEQ ID NO: 73057 - protein, 350 aa, Thalassospira lohafexi
  misc_feature (1)..(350): tr|A0A2N3LBW4|A0A2N3LBW4_9PROT S-adenosylmethionine:tRN A ribosyltransferase-isomerase OS=Thalassospira lohafex i OX=744227 GN=queA PE=3 SV=1
MKVDLFDFELPRERIAEHPASPRDAARMLDLSSADIQDRIVRELPDILRPGDLLISNDTRVIPARLFGKRGEAKVEVTLHKQEGLGTWVAFAKPAKKLRIGETFWVNDEFEAEVLDKKDGGEVVLRFNKSGADLIAALEKYGVMPLPPYIRRETGGDDQDKSDYQTIFAQKDGAVAAPTAGLHFTPDLLANLDARGIKRRTITLHVGAGTFLPVKVDDTENHKMHAEWGSISPEIANLINETRANGGRVVAVGTTSLRLLESAAREDGVVEPFEAETDIFITPGYKFRAVDMLLTNFHLPRSTLFMLVSAFAGFDRMKAAYAHAIENEYRFYSYGDCSLLECASKIDART

SEQ ID NO: 73058 - protein, 350 aa, Thalassospira lucentensis
  misc_feature (1)..(350): tr|A0A367V481|A0A367V481_9PROT S-adenosylmethionine:tRN A ribosyltransferase-isomerase OS=Thalassospira lucente nsis MCCC 1A00383 = DSM 14000 OX=1123365 GN=queA PE=3 S V=1
MKVDLFDFELPRERIAEHPASPRDAARMLDLSAADIQDRIVRELPDILRPGDLLISNDTRVIPARLFGKRGEAKVEVTLHKQEGLGTWVAFAKPAKKLRIGETFFVNDEFEAEVLDKKDGGEVVLRFNKSGADLIAALEEYGVMPLPPYIRRETGGDDQDKSDYQTIFAQKDGAVAAPTAGLHFTPELLANLDARGIKRRTITLHVGAGTFLPVKVDDTENHKMHAEWGSISPEIANLINETRANGGRVVAVGTTSLRLLESAAREDGVVEPFEAETDIFITPGYKFRAVDMLLTNFHLPRSTLFMLVSAFAGFDRMKAAYAHAIENEYRFYSYGDCSLLECANKIDART

SEQ ID NO: 73059 - protein, 347 aa, Thalassospira lucentensis
  misc_feature (1)..(347): tr|A0A3D5NAF1|A0A3D5NAF1_9PROT S-adenosylmethionine:tRN A ribosyltransferase-isomerase (Fragment) OS=Thalassosp ira lucentensis OX=168935 GN=DHR80_12200 PE=3 SV=1
MKVDLFDFELPRERIAEHPASPRDAARMLDLSAADIQDRIVRELPDILRPGDLLISNDTRVIPARLFGKRGEAKVEVTLHKQEGLGTWVAFAKPAKKLRIGETFWVNDEFEAEVLDKKDGGEVVLRFNKSGADLIAALEKYGVMPLPPYIRRETGGDDQDKSDYQTIFAQKDGAVAAPTAGLHFTPELLANLDARGINRRTITLHVGAGTFLPVKVDDTENHKMHSEWGSISPEIADLINETRANGGRVVAVGTTSLRLLESAAREDGVVEPFEAETDIFITPGYKFRAVDMLLTNFHLPRSTLFMLVSAFAGFERMKAAYAHAIENEYRFYSYGDCSLLECASKID

SEQ ID NO: 73060 - protein, 352 aa, Thalassospira marina
  misc_feature (1)..(352): tr|A0A2N3KWN3|A0A2N3KWN3_9PROT S-adenosylmethionine:tRN A ribosyltransferase-isomerase OS=Thalassospira marina OX=2048283 GN=queA PE=3 SV=1
MKVDLFDFELPRECIAEHPADPRDSARMLDLSAGQMNDRIVRELPDILRPGDLLISNDTRVIPARLFGKRGDAKIEVTLHKQEGLAQWRAFAKPAKKLRVGEIFKVNDSFEAEVMDKKDGGEVLLRFNVAGADLIAALEKYGVMPLPPYIRREAGGDDKDRHDYQTIFAQHDGAVAAPTAGLHFTPELLANLDARGVLRRTITLHVGAGTFLPVKVDDTDDHKMHAEWGSISPEIAALVNETRAKGGRVVAVGTTSLRLLESAANEDGIVQPFENETSIFITPGYKFRGVDLLLTNFHLPRSTLFMLVSAFAGFERMKAAYDHAIAQKYRFYSYGDCSLLECANKVEALKKS

SEQ ID NO: 73061 - protein, 352 aa, Thalassospira mesophila
  misc_feature (1)..(352): tr|A0A1Y2L0L9|A0A1Y2L0L9_9PROT S-adenosylmethionine:tRN A ribosyltransferase-isomerase OS=Thalassospira mesophi la OX=1293891 GN=queA PE=3 SV=1
MKVDLFDFDLPRECIAEHPADPRDSARMLDLTGGQMSDRIVRELPDMLRPGDLLISNDTRVIPARLFGKRGEAKIEVTLHKQEGLGQWRAFAKPAKKLRIGEIFKVNEAFEAEVMDKKDGGEVLLRFNVSGADLIAALEKYGVMPLPPYIRRDAGGDDQDRHDYQTIFARHDGAVAAPTAGLHFTPELLANLDARGIARRTITLHVGAGTFLPVKVDDTDDHKMHAEWGSISPEIAALINETRARGGRIVAVGTTSLRLLESAAREDGIVEPFENETSIFITPGYKFRGVDLLLTNFHLPRSTLFMLVSAFAGYDRMKAAYNHAIAQKYRFYSYGDCSLLECANQVEALKKS

SEQ ID NO: 73062 - protein, 349 aa, Thalassospira permensis
  misc_feature (1)..(349): tr|A0A074J997|A0A074J997_9PROT S-adenosylmethionine:tRN A ribosyltransferase-isomerase OS=Thalassospira permens is NBRC 106175 OX=1353532 GN=queA PE=3 SV=1
MKVDLFDFDLPRECIAEHPANPRDSARMLDLTGGQTHDRIVRELPEILRPGDLLISNDTRVIPARLFGKRGDAGIEVTLHKQEGLAQWRAFAKPAKKLRVGETFKVADDFEAEVMEKKDGGEVLLRFNVAGADLIAALEKYGVMPLPPYIRRDKGGDHQDRSDYQTIFAQHDGAVAAPTAGLHFTPELLAAIDARGIARRTITLHVGAGTFLPVKVDDTEDHKMHAEWGSISPEIASLINETRAKGGRVVAVGTTSLRLLESAAREDGVVEPFENETDIFITPGYKFRAVDMLLTNFHLPRSTLFMLVSAFAGFERMKAAYGHAIENKYRFYSYGDCSLLECASKIEKS

SEQ ID NO: 73063 - protein, 350 aa, Thalassospira povalilytica
  misc_feature (1)..(350): tr|A0A2N3KQ00|A0A2N3KQ00_9PROT S-adenosylmethionine:tRN A ribosyltransferase-isomerase OS=Thalassospira povalil ytica OX=732237 GN=queA PE=3 SV=1
MKVDLFDFELPRERIAEHPANPRDAARMLDLSAGGMTDRIVRELPDILRPGDLLISNDTRVIPARLFGKRGDAKVEVTLHKQEGLAEWVAFAKPAKKLRIGETFKVNDEFEAEVLDKKDGGEVTLKFNRSGADLIAALEKYGVMPLPPYIRREAGGSDQDKSDYQTIFAQKDGAVAAPTAGLHFTPELLANLDARGINRRTITLHVGAGTFLPVKVDDTDDHKMHAEWGSISKEIADLINETRANGGRVVAVGTTSLRLLESAAREDGVVEPFEAETDIFITPGYKFRAVDMLLTNFHLPRSTLFMLVSAFAGFERMKAAYNHAIENEYRFYSYGDCSLLECASKIDART

SEQ ID NO: 73064 - protein, 350 aa, Thalassospira profundimaris
  misc_feature (1)..(350): tr|A0A367VC45|A0A367VC45_9PROT S-adenosylmethionine:tRN A ribosyltransferase-isomerase OS=Thalassospira profund imaris OX=502049 GN=queA PE=3 SV=1
MKVDLFDFELPRERIAEHPANPRDAARMLDLSAGGMTDRIVRELPDILRPGDLLISNDTRVIPARLFGKRGDAKVEVTLHKQEGLAEWVAFAKPAKKLRIGETFKVNDEFEAEVLDKKDGGEVTLKFNRSGADLIAALEKYGVMPLPPYIRREAGGSDQDKSDYQTIFAQKDGAVAAPTAGLHFTPELLANLDARGINRRTITLHVGAGTFLPVKVDDTDDHKMHAEWGSISKEIADLINETRARGGRVVAVGTTSLRLLESAAREDGVVEPFEAETDIFITPGYKFRAVDMLLTNFHLPRSTLFMLVSAFAGFERMKAAYNHAIENEYRFYSYGDCSLLECASKIDART

SEQ ID NO: 73065 - protein, 350 aa, Thalassospira profundimaris
  misc_feature (1)..(350): tr|K2MBM1|K2MBM1_9PROT S-adenosylmethionine:tRNA ribosy ltransferase-isomerase OS=Thalassospira profundimaris W P0211 OX=1177928 GN=queA PE=3 SV=1
MKVDLFDFELPRDRIAEHPANPRDAARMLDLSGDGTQDRIVRELPDVLRPGDLLISNDTRVIPARLFGKRGEAKVEVTLHKQEGLGTWVAFAKPAKKLRIGETFKVNDEFEAEVLAKKDGGEVTLRFNKTGADLIAALEEFGVMPLPPYIRRDAGGDDQDKSDYQTIFAQKDGAVAAPTAGLHFTPELLANLDARGINRRTITLHVGAGTFLPVKVDDTDDHKMHAEWGSISKEIADLINETRANGGRVVAVGTTSLRLLESAAREDGVVEPFEAETDIFITPGYKFRAVDMLLTNFHLPRSTLFMLVSAFAGFERMKAAYQHAIDNEYRFYSYGDCSLLECANKIDART

SEQ ID NO: 73066 - protein, 349 aa, Thalassospira sp.
  misc_feature (1)..(349): tr|A0A2E2SYM3|A0A2E2SYM3_9PROT S-adenosylmethionine:tRN A ribosyltransferase-isomerase OS=Thalassospira sp. OX= 1912094 GN=queA PE=3 SV=1
MKVDLFDFDLPRECIAEHPANPRDSARMLDLTGGETHDRIVRELPDILQPGDLLISNDTRVIPARLFGKRGDAGIEVTLHKQEGLAQWRAFAKPAKKLRVGETFRVADDFEAEVMEKKDGGEVLLRFNVAGADLIAALEKYGVMPLPPYIRRDKGGDDQDRSDYQTIFAQHDGAVAAPTAGLHFTPELLAAIDARGIERRTITLHVGAGTFLPVKVDDTDDHKMHAEWGSISPEIANLINDTRARGGRVIAVGTTSLRLLESAAREDGVVEPFENETDIFITPGYKFRAVDMLLTNFHLPRSTLFMLVSAFAGFDRMKAAYGHAIENRYRFYSYGDCSLLECASKIEKS

SEQ ID NO: 73067 - protein, 350 aa, Thalassospira sp.
  misc_feature (1)..(350): tr|A0A2E4M204|A0A2E4M204_9PROT S-adenosylmethionine:tRN A ribosyltransferase-isomerase OS=Thalassospira sp. OX= 1912094 GN=queA PE=3 SV=1
MKVDLFDFELPRERIAEHPANPRDAARMLDLSGEGMQDRIVRELPDILRSGDLLISNDTRVIPARLFGKRGDAKVEVTLHKQEGLGTWVAFAKPAKKLRIGETFKVNDEFEAEVLAKKDGGEVTLRFNKSGADLIAALEKYGVMPLPPYIRRDAGGDDQDKSDYQTIFAQKDGAVAAPTAGLHFTPELLANLDARGINRRTITLHVGAGTFLPVKVDDTDDHKMHAEWGSISKEIADLINETHANGGRVVAVGTTSLRLLESAAREDGVVEPFEAETDIFITPGYKFRAVDMLLTNFHLPRSTLFMLVSAFAGFERMKAAYQHAIDNEYRFYSYGDCSLLECANKIDART

SEQ ID NO: 73068 - protein, 349 aa, Thalassospira xiamenensis
  misc_feature (1)..(349): tr|A0A367W464|A0A367W464_9PROT S-adenosylmethionine:tRN A ribosyltransferase-isomerase OS=Thalassospira xiamene nsis OX=220697 GN=queA PE=3 SV=1
MKVDLFDFDLPRECIAEHPANPRDSARMLDLTGGKTHDRIVRELPEILRPGDLLISNDTRVIPARLFGKRGEAGIEVTLHKQEGLAQWRAFAKPAKKLRVGETFKVADDFEAEVMEKKDGGEVLLRFNVAGADLIAALEKYGVMPLPPYIRRDKGGDHQDRSDYQTIFAQHDGAVAAPTAGLHFTPELLAAIDARGIARRTITLHVGAGTFLPVKVDDTEDHKMHAEWGSISPEIASLINETRARGGRVVAVGTTSLRLLESAAREDGVVEPFENETDIFITPGYKFRAVDMLLTNFHLPRSTLFMLVSAFAGFERMKAAYGHAIENKYRFYSYGDCSLLECASKIEKS

SEQ ID NO: 73069 - protein, 349 aa, Thalassospira xiamenensis
  misc_feature (1)..(349): tr|A0A0B4Y1X5|A0A0B4Y1X5_9PROT S-adenosylmethionine:tRN A ribosyltransferase-isomerase OS=Thalassospira xiamene nsis M-5 = DSM 17429 OX=1123366 GN=queA PE=3 SV=1
MKVDLFDFDLPRECIAEHPANPRDSARMLDLTGGKTHDRIVRELPEILRPGDLLISNDTRVIPARLFGKRGDAGIEVTLHKQEGLAQWRAFAKPAKKLRVGETFKVADDFEAEVMEKKDGGEVLLRFNVAGADLIAALEKYGVMPLPPYIRRDKGGDDQDRSDYQTIFAQHDGAVAAPTAGLHFTPELLAAIDARGIARRTITLHVGAGTFLPVKVDDTEDHKMHAEWGSISPEIASLINETRAKGGRVVAVGTTSLRLLESAAREDGVVEPFENETDIFITPGYRFRAVDMLLTNFHLPRSTLFMLVSAFAGFERMKAAYGHAIENRYRFYSYGDCSLLECASKIEKS

SEQ ID NO: 73070 - protein, 349 aa, Thalassospira xianhensis
  misc_feature (1)..(349): tr|A0A367U730|A0A367U730_9PROT S-adenosylmethionine:tRN A ribosyltransferase-isomerase OS=Thalassospira xianhen sis MCCC 1A02616 OX=1177929 GN=queA PE=3 SV=1
MKVDLFDFDLPRECIAEHPANPRDSARMLDLTGGETHDRIVRELPDILQPGDLLISNDTRVIPARLFGKRGDAGIEVTLHKQEGLAQWRAFAKPAKKLRVGETFRVADDFEAEVMEKKDGGEVLLRFNVAGADLIAALEKYGVMPLPPYIRRDKGGDDQDRSDYQTIFAQHDGAVAAPTAGLHFTPELLAAIDARGIERRTITLHVGAGTFLPVKVDDTDDHKMHAEWGSISPEIANLINEARAKGGRVIAVGTTSLRLLESAAREDGVVEPFENETDIFITPGYKFRAVDMLLTNFHLPRSTLFMLVSAFAGFDRMKAAYGHAIENRYRFYSYGDCSLLECASKIEKS

SEQ ID NO: 73071 - protein, 349 aa, Thalassotalea agarivorans
  misc_feature (1)..(349): tr|A0A1I0AGZ5|A0A1I0AGZ5_THASX S-adenosylmethionine:tRN A ribosyltransferase-isomerase OS=Thalassotalea agarivo rans OX=349064 GN=queA PE=3 SV=1
MRVSDFAFELPEELIARYPKAERTQSRLMTLDGDSGQRQDLAFTDIINQLNAGDLLVFNNTRVIPARMFGQKESGGKIEVLVERMLDDKRVLAHVRSSKAPKPGAKLILEGTVNATMVARHDALFEIAFDSDKNVLNILEDIGHMPLPPYIDRPDEDSDKERYQTVYNEKPGAVAAPTAGLHFDETLLQQLKDKGVELAFITLHVGAGTFQPVRVDEIADHIMHAEYVEVPQAVVDQINQTKASGGRVVAVGTTSVRSLESAAKVSAEKGQPLTEFYGDTDIFITPGFEFKVVDALVTNFHLSESTLLMLVSAFAGYDNIMSAYQHAVTEKYRFFSYGDAMLLNKKTSK

SEQ ID NO: 73072 - protein, 348 aa, Thalassotalea euphylliae
  misc_feature (1)..(348): tr|A0A3E0UI28|A0A3E0UI28_9GAMM S-adenosylmethionine:tRN A ribosyltransferase-isomerase OS=Thalassotalea euphyll iae OX=1655234 GN=queA PE=3 SV=1
MRVSDFAFDLPEELIARYPKQDRTASRLMTVEGNSGDITDGTFVDVLAQLNDGDLLIFNNTRVIPARMFGKKASGGKLEVLVERVLDEHRVLAHIRCSKSPKPGTEIILEESVSAKMVARHDALFELSFEGEEKVLDILERIGHMPLPPYIDRPDEDSDRERYQTVYNEKPGAVAAPTAGLHFDDDLLAKIQAKGVELAFVTLHVGAGTFQPVKVEEIADHVMHAEYVEVSEDVVAKIEQTKANGGRVVAVGTTSMRSLESAAKAADEQGELIAPFYQDTDIFITPGFNFKVVDALITNFHLSESTLLMLVSAFAGYDNMMRAYQHAVEEKYRFFSYGDAMFLTRQSR

SEQ ID NO: 73073 - protein, 348 aa, Thalassotalea euphylliae
  misc_feature (1)..(348): tr|A0A3E0U7F8|A0A3E0U7F8_9GAMM S-adenosylmethionine:tRN A ribosyltransferase-isomerase OS=Thalassotalea euphyll iae OX=1655234 GN=queA PE=3 SV=1
MRVSDFAFDLPEELIARYPKQDRTASRLMTVEGSSGDITDGTFVDVLAQLNDGDLLIFNNTRVIPARMFGKKASGGKLEVLVERVLDEHRVLAHIRCSKSPKPGTEIILEESVSATMVARHDALFELAFEGEEKVLDILERIGHMPLPPYIDRPDEDSDRERYQTVYNEKPGAVAAPTAGLHFDDDLLAKIQAKGVDLAFVTLHVGAGTFQPVKVEEIADHVMHAEYVEVSEDVVAKIEQTKANGGRVVAVGTTSMRSLESAAKAADEQGKLIAPFYQDTDIFITPGFNFKVVDALITNFHLSESTLLMLVSAFTGYDNMMRAYQHAVEEKYRFFSYGDAMFLTRQSR

SEQ ID NO: 73074 - protein, 351 aa, Thalassotalea sp.
  misc_feature (1)..(351): tr|A0A516HAF2|A0A516HAF2_9GAMM S-adenosylmethionine:tRN A ribosyltransferase-isomerase OS=Thalassotalea sp. PS0 6 OX=2594005 GN=queA PE=3 SV=1
MTRRVSDYAFDLPDELIARYPQPERTASRLMVLDGNSGAIEHNTFTNVIDKLNPGDLLVFNNTRVIPARMFGTKASGGKIEVLVERILDQHRFLAHVRSSKSPKPGAELLLEDKVNATMVGRHDALFELEVQGEQSVLEVLEEIGHMPLPPYIDRPDEDSDKERYQTVYSEKPGAVAAPTAGLHFDEPLLEKIKAKGVQLAFVTLHVGAGTFQPVRVDNVDDHVMHSEYVEVSPEVIEQIRQTKAAGNRVVAVGTTSMRSLESAAKHHSDKKQPLAEFYGDTDIFITPGFNFQIVDCLITNFHLSESTLLMLVSAFSGYEHIMNAYQQAIDEQYRFFSYGDAMFLSKQNKD

SEQ ID NO: 73075 - protein, 348 aa, Thalassotalea sp.
  misc_feature (1)..(348): tr|A0A1Q6CMP0|A0A1Q6CMP0_9GAMM S-adenosylmethionine:tRN A ribosyltransferase-isomerase OS=Thalassotalea sp. PP2 -459 OX=1742724 GN=queA PE=3 SV=1
MRVADFSFDLPEELIARYPKADRTASRLMVLDGCSGALQDAHFVNVIEQLNTGDLLVFNNTRVIPARMFGQKKTGGKLEVLVERILDDKRFLAHVRASKSPKPGTELVLENKVSAIMVARHDALFEIEISHQDNVLTVLEDIGHMPLPPYIDRPDEESDKERYQTVYNEKPGAVAAPTAGLHFDDTLLKRIKEKGVNTAFVTLHVGAGTFQPVRVEQIEDHIMHAEYAEVPQDVVELIQQTKANGGRVIAVGTTSVRSLESAAKAAKEKGQTLTPFYGDTDIFITPGYEFEIIDALITNFHLSESTLLMLVSAFAGYDNIMAAYNHAISERYRFFSYGDAMFLTRRQS

SEQ ID NO: 73076 - protein, 275 aa, Thauera aminoaromatica
  misc_feature (1)..(275): tr|A0A5C7SFU3|A0A5C7SFU3_9RHOO S-adenosylmethionine:tRN A ribosyltransferase-isomerase (Fragment) OS=Thauera am inoaromatica OX=164330 GN=queA PE=3 SV=1
MAWTLDDFDYLLPQELIAQAPLARRTDSRLLQVAPTLADLHFSDLPSLLAPGDLLVFNDTRVIHARLFGTKDTGGQVEVMIERPLGPHEALAQIRASKSPKPGTRLRLEDALDVEVLGRAGEFFHLRFPEGDELIALLERHGRLPLPPYIERAAGDTDESRYQTVYARNPGSVAAPTAGLHFDEPLLARLTEHGVHTAYVTLNVGAGTFQPVRVHDLSEHKMHTEAYFVPQATVDAIAATKAAGKRVVCVGTTSMRALESAARGGNLEAGEAESD

SEQ ID NO: 73077 - protein, 358 aa, Thauera aminoaromatica
  misc_feature (1)..(358): tr|A0A5C7SC24|A0A5C7SC24_9RHOO S-adenosylmethionine:tRN A ribosyltransferase-isomerase OS=Thauera aminoaromatic a OX=164330 GN=queA PE=3 SV=1
MSLTLADFDYTLPPELIAQAPLAERSASRLLVLEPQEGAAPRLTDAVFSALAERVNPGDLLVFNDTRVIHARLHGVKDSGGQVEVLIERPVGPHEALAQVRASKSPKTGSRLRLADAFEVEVLGRVGEFFHLRFPSGENLLALLERHGKLPLPPYIQRAAGEADESRYQTVYARAPGSVAAPTAGLHFDDALLARIAARGAQCAWLTLHVGAGTFQPVRVDDLGEHRMHRERYVIPQETVDAIAATRAAGGRVIAVGTTSMRALEAAAQEGALEAGSGETEIFILPGFRFQVVDALVTNFHLPRSTLMMLVSAFAGMDSIRRAYAHAVEQRYRFFSYGDAMFITRRNESENDKNDDAV

SEQ ID NO: 73078 - protein, 354 aa, Thauera aromatica
  misc_feature (1)..(354): tr|A0A2R4BL21|A0A2R4BL21_THAAR S-adenosylmethionine:tRN A ribosyltransferase-isomerase OS=Thauera aromatica K17 2 OX=44139 GN=queA PE=3 SV=1
MSLTLDDFDYLLPPERIAQAPLPERSASRLLVVTPTPGAEPLLVDASIADLPALVRPGDLLVFNDTRVIHARLHGIKDSGGQVEVLIERAVGPHEALAQVRASKSPKTDSRLRLADAFDVEVLGRVGEFYHLRFPAGENLFALLERHGKLPLPPYIQRAAGDADESRYQTVFARDPGSVAAPTAGLHFDEALLSRLAERGANCAWLTLHVGAGTFQPVRVDDLGEHRMHRERYVIPQETVDAIAATRTAGGRVIAVGTTSLRALEAAAQDGALEAGSSETEIFILPGFRFQVVDALLTNFHLPKSTLLMLVSAFAGMDTIRRAYAHAIARRYRFFSYGDAMFLTRKNEAEDDAL

SEQ ID NO: 73079 - protein, 354 aa, Thauera chlorobenzoica
  misc_feature (1)..(354): tr|A0A1H5U918|A0A1H5U918_9RHOO S-adenosylmethionine:tRN A ribosyltransferase-isomerase OS=Thauera chlorobenzoic a OX=96773 GN=queA PE=3 SV=1
MSLTLDDFDYLLPPELIAQAPLAERSASRLLVVTPACGTSPLLADASIADLPALVRPGDLLVFNDTRVIHARLHGVKDSGGQVEVLIERAVGPHEALAQVRASKSPKTGSRLRLADAFDVEVLGRVGEFYHLHFPAGENLFALLERHGRLPLPPYIQRAAGDADESRYQTVYARDPGSVAAPTAGLHFDEALLARLAERGANCAWLTLHVGAGTFQPVRVDDLGEHRMHRERYVIPQETVDAIAATRAAGGRVIAVGTTSMRALEAAAQDGTLEAGSSETEIFILPGFRFQVVDALITNFHLPKSTLLMLVSAFAGMDTIRHAYAHAIARRYRFFSYGDAMFLTRKKDTEDDAI

SEQ ID NO: 73080 - protein, 354 aa, Thauera humireducens
  misc_feature (1)..(354): tr|A0A127KA37|A0A127KA37_9RHOO S-adenosylmethionine:tRN A ribosyltransferase-isomerase OS=Thauera humireducens OX=1134435 GN=queA PE=3 SV=1
MPLTLNDFDYPLPPDLIAQAPLAERSASRLLVVQPAEGGADALLDRSFADLPEFVGPNDLLVFNDTRVIHARLFGVKASGGQVEVLIERAVGPHEALAQVRASKSPRTGGILRLADAFDVEVLGRVGEFYHLRFPAGQNLFELLERHGKLPLPPYIQRAAGAEDESRYQTVFAREPGSVAAPTAGLHFDEGVLARIAERGAKCAWLTLHVGAGTFQPVRVDDLGEHRMHRERYVIPQETVDAIAATRAAGGRVIAVGTTSMRALEAAAQDGPLEAGSGETEIFILPGFHFQVVDALVTNFHLPKSTLLMLVSAFAGMDSIRGAYAHAIAQRYRFFSYGDAMFLTRRNEAENDAV

SEQ ID NO: 73081 - protein, 353 aa, Thauera linaloolentis
  misc_feature (1)..(353): tr|N6YYV2|N6YYV2_9RHOO S-adenosylmethionine:tRNA ribosy ltransferase-isomerase OS=Thauera linaloolentis 47Lol = DSM 12138 OX=1123367 GN=queA PE=3 SV=1
MHLTLNDFDYPLPPELIAQAPLAERSASRLLIVQAMDGADALLDGHIADLPRLLGPNDLLVFNDTRVIHARLHGTKASGGQIEVLIERAVGPHEALAQVRASKSPGTGSTLRLADAFEVEVLGRVGEFYHLRFPPGENLFGLLERHGKLPLPPYIQRAAGEDDESRYQTVFAREPGSVAAPTAGLHFDEAILARIAERGARCAWLTLHVGAGTFQPVRVDDLGEHRMHRERYVIPRETVDAIAATRAAGGRVIAVGTTSMRALEAAAQDGPLSAGSGETEIFILPGFHFQVVDALVTNFHLPKSTLLMLVSAFAGMDDIRRAYAHAIDRRYRFFSYGDAMFLTRKQDAEHDAV

SEQ ID NO: 73082 - protein, 358 aa, Thauera phenylacetica
  misc_feature (1)..(358): tr|N6YSS9|N6YSS9_9RHOO S-adenosylmethionine:tRNA ribosy ltransferase-isomerase OS=Thauera phenylacetica B4P OX= 1234382 GN=queA PE=3 SV=1
MSLTLADFDYTLPAELIAQAPLPERSASRLLVVEPQQGAAPRLGDSVFNALAERVNPGDLLVFNDTRVIHARLHGVKDSGGQVEVLIERAIGPHEALAQVRASKSPKTGSRLRLADAFEVEVLGRVGEFFHLRFPAGEDLLALLERHGKLPLPPYIQRAAGEADESRYQTVYAREPGSVAAPTAGLHFDQALLERIAERGAKCAWLTLHVGAGTFQPVRVDDLGEHQMHRERYVIPQETVDAIAATRAAGGRVIAVGTTSMRALEAAAQDGPLEAGSGETEIFILPGFRFQVADALVTNFHLPKSTLMMLVSAFAGMDSIRRAYAHAVAQRYRFFSYGDAMFITRKNESENDNNDDAV

SEQ ID NO: 73083 - protein, 358 aa, Thauera propionica
  misc_feature (1)..(358): tr|A0A235EUZ6|A0A235EUZ6_9RHOO S-adenosylmethionine:tRN A ribosyltransferase-isomerase OS=Thauera propionica OX =2019431 GN=queA PE=3 SV=1
MSLTLNDFDYFLPPELIAQAPLPERSASRLLVVQPDEHGVDALLDRRFTDLPDLVGPDDLLVFNDTRVIHARLHGVKDSGGQIEVLIERAVGPHEALAQVRASKSPRTGTTLRLADAFDVEVLGRVGEFYHLRFPAGEDLFALLERHGKLPLPPYIQRAAGDDDESRYQTVFAREPGSVAAPTAGLHFDEGVLARIAARGAKCAWLTLHVGAGTFQPVRVDDLGEHRMHRERYVIPQETVDAIDATRAAGGRVIAVGTTSMRALEAAAQDGPLEAGSGETEIFILPGFRFQVVDALITNFHLPKSTLMMLVSAFAGMDGIRRAYAHAVAQRYRFFSYGDAMFLTRTDNSENDKPSDAI

SEQ ID NO: 73084 - protein, 345 aa, Thauera sp.
  misc_feature (1)..(345): tr|A0A290ZTT2|A0A290ZTT2_9RHOO S-adenosylmethionine:tRN A ribosyltransferase-isomerase OS=Thauera sp. K11 OX=20 05884 GN=queA PE=3 SV=1
MSLTLDDFDYTLPPELIAQAPLPERSASRLLVVDDGRLADRRFADLPEFVRPGDLLVFNDTRVIHARLHGVKESGGQIEVLVERAIGPHEALAQVRASKPPKAGSRLRLADAFDATVLGRVGEFYHLRFPDGDEVHALLERHGKLPLPPYIQRAAGDDDESRYQTVFAREPGSVAAPTAGLHFDDAILARLAGCGARCAWLTLHVGAGTFQPVRVDDLGEHRMHRERYVIPQETADAIAATRAAGGRVIAVGTTSLRALEAAAQDGPLEAGSEETEIFILPGFRFQVADALVTNFHLPRSTLLMLVSAFAGLETIRHAYAHAVAGRYRFFSYGDAMFLIRNDDAV

SEQ ID NO: 73085 - protein, 358 aa, Thauera sp.
  misc_feature (1)..(358): tr|A0A3B9PKN7|A0A3B9PKN7_9RHOO S-adenosylmethionine:tRN A ribosyltransferase-isomerase OS=Thauera sp. OX=190533 4 GN=queA PE=3 SV=1
MPLTLSDFDYTLPAELIAQSPLSERSASRLLVVTPGEHGTPVMADAVFADLPDLVRPGDLFVFNDTRVIHARIHGVKDSGGQVEVLIERAIGPHEALAQVRASKSPRTGSRLHLADAFEVEVLGRVGEFFHLRFPDGEDLLTLLERHGKLPLPPYIQRAAGEADESRYQTVYAREPGSVAAPTAGLHFDEALLARLTAAGAKSAWLTLHVGAGTFQPVRVDDLGEHRMHRERYVIPQETVDAIAATRAAGGRVIAVGTTSMRALEAAAQEGPLEAGSGETEIFILPGFRFQVVDALVTNFHLPKSTLMMLVSAFAGMDSIRRAYAHAVEARYRFFSYGDAMFITRRNEAENDDLNDAI

SEQ ID NO: 73086 - protein, 354 aa, Thauera terpenica
  misc_feature (1)..(354): tr|S9ZNX2|S9ZNX2_9RHOO S-adenosylmethionine:tRNA ribosy ltransferase-isomerase OS=Thauera terpenica 58Eu OX=134 8657 GN=queA PE=3 SV=1
MPLTLNDFDYTLPPDLIAQAPLAQRSASRLLVVHPPMEGAEVLVDRNFADLPALIGPQDLLVFNDTRVIHARVHGSKASGGQIEVLIERAIGPHEALAQVRASKSPRSGSTLRLADAFDVEVLGRVGEFYHLRFPAHENLFELLERHGKLPLPPYIQRAAGDDDESRYQTVFARSPGSVAAPTAGLHFDEATLAQVRARGAQCAWLTLHVGAGTFQPVRVDNLDEHRMHRERYFIPPQTVDAIARTRAAGGRVIAVGTTSLRALEAAAHNGALGAGEGETEIFILPGFKFQVADALLTNFHLPKSTLLMLVSAFAGREPIRRAYAHAIAARYRFFSYGDAMLLTRNQDAQHDAV

SEQ ID NO: 73087 - protein, 264 aa, Thermacetogenium phaeum
  misc_feature (1)..(264): tr|K4LHA8|K4LHA8_THEPS S-adenosylmethionine:tRNA ribosy ltransferase-isomerase OS=Thermacetogenium phaeum (stra in ATCC BAA-254 / DSM 12270 / PB) OX=1089553 GN=queA PE =3 SV=1
MHISDFDYYLPDELIAQYPAARREGSRLLVLPKKGGAIIHTSFSEIGDFLVPGDLLVLNETKVFPARLLGARERTGGQVELLLLEEKASLVWEALVRPGKKARIGETLIFGNGSLSCVIEGKTPDGGRLVRFTGVSEQEFWDEVFKIGKVPLPPYIKRDEEQIDRERYQTVYARIPGSAAAPTAGLHFTEEILRRLQEKGVRIAFVLLHVGLGTFRPVRVADVEKHQMHAEYWKLEPVAADLINRTKQEGGRVVAVGTTTVRVL

SEQ ID NO: 73088 - protein, 353 aa, Thermaerobacter marianensis
  misc_feature (1)..(353): tr|E6SIX2|E6SIX2_THEM7 S-adenosylmethionine:tRNA ribosy ltransferase-isomerase OS=Thermaerobacter marianensis ( strain ATCC 700841 / DSM 12885 / JCM 10246 / 7p75a) OX= 644966 GN=queA PE=3 SV=1
MRVDEFDYELPPELIAQEPLPRRDASRLMVVDRDSGRWIHAHFRDLPRFLRAGDCLVLNDTRVRPARLYGRRTTGGHVEFLLLQPLDDGRWLALARPGRRLRPGTEVVCGEERPLRVRVEEVRDSGERVIRLEPPQGETVDETLHRLGRVPLPPYIRTELKDPERYQTVYAREEGSVAAPTAGLHFTPELLEELQDQGVRIAYLTLHVGVGTFRPVTAQRVEEHRMHAEFFRVEPEAAAAINAARSAGGRVIAVGTTVTRTLETVAADDGTVRPGSGWTDLFIYPGYRFKAIDGLITNFHLPRSTLIMLVAALLGKERTLAAYREAVARRYRFFSFGDAMLILPGAVPAGHAP

SEQ ID NO: 73089 - protein, 354 aa, Thermaerobacter sp.
  misc_feature (1)..(354): tr|A0A4P7GU26|A0A4P7GU26_9FIRM S-adenosylmethionine:tRN A ribosyltransferase-isomerase OS=Thermaerobacter sp. F W80 OX=2546351 GN=queA PE=3 SV=1
MRVDEFDYDLPPELIAQEPLPERDASRLMVVDRDSGRWIHARFRDLPRFLRPGDCLVLNDTRVRPARLFGRRATGGQVEFLLLDPLGDGRWLALGRPGRRLRAGTVAICGDDRPLRVHVEEVRDGGERVIRLEPPSGETVDETLQRLGRVPLPPYIRKELDDPERYQTVYAREEGSVAAPTAGLHFTPELLARLEAQGVRIAYLTLHVGVGTFRPVTVDRVEEHRMHAEFYRVEPATAAAINATRAQGGRVVAVGTTVTRTLETVAADDGTVRPGSGWTDLFIYPGYRFKAIDGLITNFHLPRSTLIMLVAALLGKERTLAAYREAVARRYRFFSFGDAMLILPGVAPHAGEPA

SEQ ID NO: 73090 - protein, 358 aa, Thermaerobacter sp.
  misc_feature (1)..(358): tr|A0A371Z7Z0|A0A371Z7Z0_9FIRM S-adenosylmethionine:tRN A ribosyltransferase-isomerase OS=Thermaerobacter sp. P B12/4term OX=2293838 GN=queA PE=3 SV=1
MRVDEFDYELPPELIAQQPLARRDASRLMVVDRDTGRWLHARFRDLPRFLRAGDCLVLNDTRVRPARLYGRRPTGGQVEFLLLQPLDGDRWLALARPGRRVRPGTEVVCGEERPLRVYVEEARDSGERVICLEPPPGETVDETLHRLGRVPLPPYIRAELEDPERYQTVYAREEGSVAAPTAGLHFTPELLKRLQDQGVRIAYLTLHVGVGTFRPVTAERVEEHQMHAEFYRVEPAAAEAINAARAAGARVIAVGTTVTRTLETVAAAGGTVRPGSGWTDLFIYPGYRFKAIDGLITNFHLPRSTLIMLVAALLGKEQTLAAYREAVAQRYRFFSFGDAMLILPGAVPAGREEPALPE

SEQ ID NO: 73091 - protein, 358 aa, Thermaerobacter subterraneus
  misc_feature (1)..(358): tr|K6NYK9|K6NYK9_9FIRM S-adenosylmethionine:tRNA ribosy ltransferase-isomerase OS=Thermaerobacter subterraneus DSM 13965 OX=867903 GN=queA PE=3 SV=1
MRVDEFDYDLPPELIAQQPLARRDASRLMVVDRDTGRWLHARFRDLPRFLRAGDCLVLNDTRVRPARLYGRRPTGGQVEFLLLQPLDGGRWLALARPGRRVRPGTEVVCGEERPLRVYVEEARDSGERVIRLEPPPGETVDETLHRLGRVPLPPYIRAELEDPERYQTVYAREEGSVAAPTAGLHFTPELLKRLQDQGVRIAYLTLHVGVGTFRPVTAERVEEHQMHAEFYRVEPAAAEAINAARAAGGRVIAVGTTVTRTLETVAAAGGTVRPGSGWTDLFIYPGYRFKAIDGLITNFHLPRSTLIMLVAALLGKEQTLAAYREAVARRYRFFSFGDAMLILPGAVPAGREEPALPE

SEQ ID NO: 73092 - protein, 341 aa, Thermanaeromonas toyohensis
  misc_feature (1)..(341): tr|A0A1W1VZS6|A0A1W1VZS6_9THEO S-adenosylmethionine:tRN A ribosyltransferase-isomerase OS=Thermanaeromonas toyo hensis ToBE OX=698762 GN=queA PE=3 SV=1
MRVEDFDYYLPPELIAQHPVEPRDASRLLVLHRKAGMLEHRRFYELPLYLKPGDILVLNDTRVIPARLLGKKAETGGQVELLLLRPLRRDCWEALVRPGRRIPPGTELLFGQGELRAKVLERTPQGGRLVEFKYEGEWEEILGRLGEVPLPPYIKEKLPDPERYQTVYASRPGSVAAPTAGLHFTPRLLKELKEKGVKIVYILLHVGLGTFRPVKEEVVEKHRMHAEYFCVDPEAARTINEARRQGGRVIAVGTTVVRTLETAATPEGEIKPREGLTELFIYPGYRFKAVDGLITNFHLPRSTLLMLVCAFAGRERVLEAYQVAIKERYRFYSFGDAMLIL

SEQ ID NO: 73093 - protein, 344 aa, Thermanaerothrix daxensis
  misc_feature (1)..(344): tr|A0A0P6XQ67|A0A0P6XQ67_9CHLR S-adenosylmethionine:tRN A ribosyltransferase-isomerase OS=Thermanaerothrix daxe nsis OX=869279 GN=queA PE=3 SV=1
MSKSPLKTSDFDYDLPPERIAQTPVEPRHNARLLVMWRDRPDLEHARFWDIGRYLAPGDLLVVNETRVIPARIWARKPSGGRVELLLLKKMNEEAWEALVGGKRIRPFLSLRVEGGPTAEVVADLGGSRRLIRFSEPIEPYLPHIGLMPLPPYIHEPLRDPERYQTVFARQPGSAAAPTAGLHFTPELIEHLKQQGIRFAGLILHIGLDTFAPVTEEDPTQHHIHTEWCELPPETARLVNETKRAGKRVVAVGTTSVRALETAARHGAPGDWVAPFAGPTDLFILPGFEFRVVDALVTNFHLPRSTLLMLVSAFAGRERILEVYREAIRLNYRFYSFGDAMLIL

SEQ ID NO: 73094 - protein, 348 aa, Thermanaerovibrio acidaminovorans
  misc_feature (1)..(348): tr|D1BA48|D1BA48_THEAS S-adenosylmethionine:tRNA ribosy ltransferase-isomerase OS=Thermanaerovibrio acidaminovo rans (strain ATCC 49978 / DSM 6589 / Su883) OX=525903 G N=queA PE=3 SV=1
MVDLDLDLVDSYDYHLPEESIAQSPVEPRDSSRLMVIRRSDGSVCHRIFRDLVDFLRPGDLLVMNDTRVMRARLLGRKESGGSVEVFLLSPLDESRSAWTGMVRPGRKVRPGTVVRFSEDPGHLAVIQERLPDGLRLVHFPGESGWEIARTLGEVPLPPYIENRQVDGERYQTVYSDPSKELSVASPTAGLHFTRELLSELESRGVGRTFVTLNVGLGTFRPVKAQRASDHVMHLETCLVSADSARMIREVKARGNRVVAVGTTVVRTLESYAINPLEGEPFETDLFIRPGFRFRVVDAMITNFHLPRSTLLMLVAAFGGYDTVMGAYREAVARGYRFFSFGDAMLLI

SEQ ID NO: 73095 - protein, 346 aa, Thermanaerovibrio velox
  misc_feature (1)..(346): tr|H0URV8|H0URV8_9BACT S-adenosylmethionine:tRNA ribosy ltransferase-isomerase OS=Thermanaerovibrio velox DSM 1 2556 OX=926567 GN=queA PE=3 SV=1
MLDLDLMDSYDYQLPEELIAQSPVEPRDSSRLMVLPRTGGSIDHRIFRDVKDYLLPGDLLVLNDTRVMKSRLLGRKPSSGKVEVFLLSPLDEEGTLWQALVKPGRKVPHGTCVLFSDSEADMAIVEDRIGDGLRLVRFPNCNGRDIANRLGDVPLPPYIENDAVDENRYQTIYCDPCKERSVAAPTAGLHFTEELIRSLNDKGVRTSFVTLDVGIGTFRPVKTERASAHIMHQEVCSVPESTAELIAATKSKGGRVIAVGTTVVRTLESFGLNGIKGRSFSTNLFIRPGFQFKVVDGLVTNFHLPRSTLLMLVVAFAGYHNVMNAYKEAVSKRYRFFSFGDAMLIL

SEQ ID NO: 73096 - protein, 341 aa, Thermincola ferriacetica
  misc_feature (1)..(341): tr|A0A0L6W6C2|A0A0L6W6C2_9FIRM S-adenosylmethionine:tRN A ribosyltransferase-isomerase OS=Thermincola ferriacet ica OX=281456 GN=queA PE=3 SV=1
MKVADFDFELPEELIAQEPVEPRDHSRLLVVNRDNGNIEHKRFYNCIDYIEPGDVLVVNNTRVLPARLFGEKKGSGAKIEFVLLKRIDRDKWEVLVKPGKRVKPGTVIFFGGGLLEAFVLQTTESGGRLVEFRYEGIFEELLDRFGQMPLPPYIKKQLDDRERYQTVYARASGSAAAPTAGLHFTEELLKKMHEKGVVIAEVMLHVGLGTFRPVKVDNVEDHRMHAEYYEINEETANLINRQRDRGHKIIAVGTTSCRALETAADSSGNLKPGCGWTDIFIYPGYRFKAVDRLITNFHLPRSTLIMLVSAFAGKDLIMRAYQEAIAEKYRFFSFGDAMMIL

SEQ ID NO: 73097 - protein, 341 aa, Thermincola potens
  misc_feature (1)..(341): tr|D5XEI1|D5XEI1_THEPJ S-adenosylmethionine:tRNA ribosy ltransferase-isomerase OS=Thermincola potens (strain JR ) OX=635013 GN=queA PE=3 SV=1
MKVADFDFELPEELIAQEPVEPRDHSRLLVVNRDNGNIEHKRFYNCIDYIEPGDVLVVNNTRVLPARLFGEKKGSGAKIEFVLLKRIDRDKWEVLVKPGKRVKPGTVILFGGGLLEAFVLQTTESGGRLVEFRYEGIFEELLDRFGQMPLPPYIKKQLDDRERYQTVYAKASGSAAAPTAGLHFTEELLKKMHEKGVVIAEVMLHVGLGTFRPVKVDNVEDHRMHAEYYEINEETANLINRQRDRGHKIIAVGTTSCRALETAADSSGNLKPGCGWTDIFIFPGYRFKAVDRLITNFHLPKSTLVMLVSAFAGKDLIMKAYQEAIAEKYRFFSFGDAMMIL

SEQ ID NO: 73098 - protein, 344 aa, Thermoactinomyces sp.
  misc_feature (1)..(344): tr|A0A151Z1N0|A0A151Z1N0_9BACL S-adenosylmethionine:tRN A ribosyltransferase-isomerase OS=Thermoactinomyces sp. AS95 OX=1811386 GN=queA PE=3 SV=1
MDVSLYDYHLPKELIAQTPAERRDASRLMVVDRKTSQIRHAKFTNILDYLNPGDVLVLNDSRVRPARLIGVKEETGAKIELLLLNPLGNDRWEALVRPAKRVKQGTVIQFGEGRLKAVAQEQTEVAGGRVFALQYEEEDLEKLFEQLGQMPLPPYIHEQLDDPERYQTVFSRVVGSAAAPTAGLHFTEELLAQIREKGVKVVFITLHVGLGTFRPVTSKRIEDHQMHAEYYEISGETAREINAAKQRGNKVVAVGTTCVRTLETVYRKLNGEIKKDQGWTDIFIYPGFQFGVVDGLLTNFHLPQSTLLMLVSAFASRELILSAYEEAVNQRYRFFSFGDAMLIL

SEQ ID NO: 73099 - protein, 344 aa, Thermoactinomyces sp.
  misc_feature (1)..(344): tr|A0A1K1U726|A0A1K1U726_9BACL S-adenosylmethionine:tRN A ribosyltransferase-isomerase OS=Thermoactinomyces sp. DSM 45891 OX=1761907 GN=queA PE=3 SV=1
MNVADFSFELPKELIAQTPLTDRTASRLMIVNRKSGELTHTQFPEVVGYLEAGDVLVLNDSRVRPARLIGTKADTGAKIELLLLQPMGGDRWEALVKPAKRVKQGSVIQFGNGELRAVAEESTEVAGGRVFRLEYQTDDIEALFTQLGEMPLPPYIHEQLDDPERYQTVFSRSIGSAAAPTAGLHFTDEILTAIRQKGVQVAFITLHVGLGTFRPVTVDKIEEHQMHAEYYEMSEETASTIREAKKAGKRVVAVGTTSIRTLETIARRFVSEVQACSGWTDIFIYPGYEFQIVDGLLTNFHLPQSTLLMLGSAFSSRDILLHAYEEAVQERYRFFSFGDAMLLI

SEQ ID NO: 73100 - protein, 344 aa, Thermoactinomyces vulgaris
  misc_feature (1)..(344): tr|A0A0N0YD71|A0A0N0YD71_THEVU S-adenosylmethionine:tRN A ribosyltransferase-isomerase OS=Thermoactinomyces vul garis OX=2026 GN=queA PE=3 SV=1
MDVAQYHFELPQELIAQTPIKDRTGSRLMVVDRKRQTWEHTRFPHLLDYLEAGDVLVLNDSRVRPARLIGVKEETGAKIELLLLKPLGEARWEALVKPAKRVKEGTVVSFGGGRLRAVAEASTEVAGGRVFRLEYEVDDVESLFQELGQMPLPPYIHEQLDDPERYQTVFSRVIGSAAAPTAGLHFTPELLEQAQQKGVKLAFVTLHVGLGTFRPVTVERVEDHHMHAEYYELSQETADLINEAKRQGKRVIAVGTTSVRTLETVASRHGGEVRADSGWTDIFIYPGYVYQVVDGLVTNFHLPQSTLLMLVSAFATRELIMKAYEEAVKERYRFFSFGDAMLII

SEQ ID NO: 73101 - protein, 99 aa, Thermoactinomyces vulgaris
  misc_feature (1)..(99): tr|A0A0N0HG63|A0A0N0HG63_THEVU S-adenosylmethionine:tRN A ribosyltransferase-isomerase (Fragment) OS=Thermoacti nomyces vulgaris OX=2026 GN=ADL26_02685 PE=3 SV=1
LEAVQPAEVRGTARSDVRLLASDKATGEIRHHHFDDLPALVRPGDLLVVNNSATLPAAVPTRQGLRVHFSSTRPDGSWLVELRDRDKPYTGDVPGAVVD

SEQ ID NO: 73102 - protein, 341 aa, Thermoanaerobacter brockii
  misc_feature (1)..(341): tr|E8US89|E8US89_THEBF S-adenosylmethionine:tRNA ribosy ltransferase-isomerase OS=Thermoanaerobacter brockii su bsp. finnii (strain ATCC 43586 / DSM 3389 / AKO-1) OX=5 09193 GN=queA PE=3 SV=1
MKRSEFYFELPEELIAQEPLEDRASSRLMILNKKTGEIEHDIFKNITKYLKPGDCLVLNNTKVIPARLIGRREDSGGKIEFVLLKRISNNEWEILVKPGRRAKIGSKFVFGNGELIAEILDTTDVGGRIVRFYYEGVFEEVLDKLGEMPVPPYIKKKLKNKDRYQTVYAKYEGSAAAPTAGLHFTEELLEKIRQMGVKTVFITLHVGLGTFRPVKEEVIENHKMHEEFYIVTKEAAEEINETRKSGGRIIAVGTTSTRTLETVADEDGYIKEKSGWTDIFIYPGYKFKAIDGMITNFHLPESTLIMMVSAFAGKENIMRAYKIAVEKKYRFFSFGDAMLII

SEQ ID NO: 73103 - protein, 341 aa, Thermoanaerobacter ethanolicus; identical to SEQ ID NO: 73102
  misc_feature (1)..(341): tr|C7IUL8|C7IUL8_THEET S-adenosylmethionine:tRNA ribosy ltransferase-isomerase OS=Thermoanaerobacter ethanolicu s CCSD1 OX=589861 GN=queA PE=3 SV=1

SEQ ID NO: 73104 - protein, 341 aa, Thermoanaerobacter italicus
  misc_feature (1)..(341): tr|D3T8J7|D3T8J7_THEIA S-adenosylmethionine:tRNA ribosy ltransferase-isomerase OS=Thermoanaerobacter italicus ( strain DSM 9252 / Ab9) OX=580331 GN=queA PE=3 SV=1
MKRSEFYFELPKELIAQEPLEDRSSSRLMVLNKKTGEIEHDIFKNITKYLKAGDCLVLNDTKVIPARLIGRREDSGGKIEFVLIKRISSNEWETLVKPGRRAKIGSRFVFGTGELIAEVLDTTEAGGRIVRFYYEGVFEEVLDKLGEMPVPPYIKKKLKNKDRYQTVYAKYEGSAAAPTAGLHFTKELLEKIKQMGVKTVFITLHVGLGTFRPVKEEEIENHKMHEEFYIVTKEAANEINETRKSGGRIIAVGTTSTRTLETVADENGYVKEKSGWTDIFIYPGYKFKAIDGMITNFHLPESTLIMMVSAFAGRENIMRAYQVAIEHKYRFFSFGDAMLII

SEQ ID NO: 73105 - protein, 341 aa, Thermoanaerobacter kivui
  misc_feature (1)..(341): tr|A0A097AR60|A0A097AR60_THEKI S-adenosylmethionine:tRN A ribosyltransferase-isomerase OS=Thermoanaerobacter ki vui OX=2325 GN=queA PE=3 SV=1
MRRSDFYFELPEELIAQEPLEDRSSARLMVLNRKTGEIQHDIFKNITKYLKAGDCLVLNDTKVIPARLIGRRQDSGGKIEFVLLKRISNNEWETLVKPGRRAKIGSKFVFGNGELIAEIFDTTEVGGRIVRFYYEGVFEEVLDKLGEMPVPPYIKKKLKNKDRYQTVYAKYEGSAAAPTAGLHFTEELLKQIRDMGVKTVFITLHVGLGTFRPVKEEIIENHKMHEEFYIVTKEAADEINATKERGGRVIAVGTTSTRTLETVADENGYIKEKSGWTDIFIYPGYKFKAIDGMITNFHLPESTLIMMVSAFAGKENIMKAYKIAIEHRYRFFSFGDAMLII

SEQ ID NO: 73106 - protein, 341 aa, Thermoanaerobacter mathranii
  misc_feature (1)..(341): tr|D7ANM0|D7ANM0_THEM3 S-adenosylmethionine:tRNA ribosy ltransferase-isomerase OS=Thermoanaerobacter mathranii subsp. mathranii (strain DSM 11426 / CIP 108742 / A3) O X=583358 GN=queA PE=3 SV=1
MKRSEFYFELPKELIAQEPLEDRSSSRLMVLNKKTGEIEHDIFKNITKYLKAGDCLVLNDTKVIPARLIGRREDSGGKIEFVLIKRISSNEWETLVKPGRRAKIGSRFVFGTGELIAEVLDATEAGGRIVRFYYEGVFEEVLDKLGEMPVPPYIKKKLKNKDRYQTVYAKYEGSAAAPTAGLHFTKELLEKIKQMGVKTVFITLHVGLGTFRPVKEEEIENHKMHEEFYIVTKEAANEINETRKSGGRIIAVGTTSTRTLETVADENGYVKEKSGWTDIFIYPGYKFKAIDGMITNFHLPESTLIMMVSAFAGRENIMRAYQVAIEHKYRFFSFGDAMLII

SEQ ID NO: 73107 - protein, 341 aa, Thermoanaerobacter pseudethanolicus; identical to SEQ ID NO: 73102
  misc_feature (1)..(341): sp|B0K958|QUEA_THEP3 S-adenosylmethionine:tRNA ribosylt ransferase-isomerase OS=Thermoanaerobacter pseudethanol icus (strain ATCC 33223 / 39E) OX=340099 GN=queA PE=3 S V=1

SEQ ID NO: 73108 - protein, 341 aa, Thermoanaerobacter siderophilus
  misc_feature (1)..(341): tr|I9KWB6|I9KWB6_9THEO S-adenosylmethionine:tRNA ribosy ltransferase-isomerase OS=Thermoanaerobacter siderophil us SR4 OX=880478 GN=queA PE=3 SV=1
MKRSEFYFELPEELIAQEPLEDRSSSRLMVLNRKTGEVQHDIFKNITKYLKAGDCLVLNDTKVIPARLIGRRQDSGGKIEFVLLKRLSVNEWETLVKPGRRAKVGTRVVFGNGELVAEILDNTEVGGRVVRFYYEGLFEEVLDKLGEMPVPPYIKKKLKDKERYQTVYAKYEGSAAAPTAGLHFTEELLEKIRQMGVKTVFITLHVGLGTFRPVKEEIIENHKMHEEFYIVTKEAAEEINATREKGGRVIAVGTTSTRTLETVADENGYIREKSGWTDIFIYPGYKFKAIDGMITNFHLPESTLIMMVSAFAGKENIMRAYQVAIEERYRFFSFGDAMLII

SEQ ID NO: 73109 - protein, 341 aa, Thermoanaerobacter sp.
  misc_feature (1)..(341): tr|A0A0B3BS53|A0A0B3BS53_9THEO S-adenosylmethionine:tRN A ribosyltransferase-isomerase OS=Thermoanaerobacter sp . YS13 OX=1511746 GN=queA PE=3 SV=1
MKRSEFYFELPEELIAQEPLEDRSSSRLMVLNKKTGEIQHDIFKNIIKYLKAGDCLVLNDTKVIPARLIGRREDSGGKIEFVLLKRLSVNEWETLVKPGRRAKVGTRVVFGNGELVAEILDNTEVGGRVVRFYYEGVFEEVLDKLGEMPVPPYIKKKLKNKDRYQTVYAKYEGSAAAPTAGLHFTQELLEKIRQMGVKTVFITLHVGLGTFRPVKEEIIENHKMHEEFYIVTKEAAEEINATREKGGRVIAVGTTSTRTLETVADENGYIREKSGWTNIFIYPGYKFKAIDGMITNFHLPESTLIMMVSAFTGKENIMRAYKIAIEERYRFFSFGDAMLII

SEQ ID NO: 73110 - protein, 341 aa, Thermoanaerobacter sp.; identical to SEQ ID NO: 64589
  misc_feature (1)..(341): sp|B0K0M0|QUEA_THEPX S-adenosylmethionine:tRNA ribosylt ransferase-isomerase OS=Thermoanaerobacter sp. (strain X514) OX=399726 GN=queA PE=3 SV=1

SEQ ID NO: 73111 - protein, 341 aa, Thermoanaerobacter thermocopriae; identical to SEQ ID NO: 64589
  misc_feature (1)..(341): tr|A0A101D7P6|A0A101D7P6_9THEO S-adenosylmethionine:tRN A ribosyltransferase-isomerase OS=Thermoanaerobacter th ermocopriae OX=29350 GN=queA PE=3 SV=1

SEQ ID NO: 73112 - protein, 341 aa, Thermoanaerobacter thermohydrosulfuricus; identical to SEQ ID NO: 73108
  misc_feature (1)..(341): tr|A0A1I1YVT6|A0A1I1YVT6_THETY S-adenosylmethionine:tRN A ribosyltransferase-isomerase OS=Thermoanaerobacter th ermohydrosulfuricus OX=1516 GN=queA PE=3 SV=1

SEQ ID NO: 73113 - protein, 341 aa, Thermoanaerobacter thermohydrosulfuricus; identical to SEQ ID NO: 73108
  misc_feature (1)..(341): tr|M8CW71|M8CW71_THETY S-adenosylmethionine:tRNA ribosy ltransferase-isomerase OS=Thermoanaerobacter thermohydr osulfuricus WC1 OX=1198630 GN=queA PE=3 SV=1

SEQ ID NO: 73114 - protein, 341 aa, Thermoanaerobacter uzonensis
  misc_feature (1)..(341): tr|A0A1M5A1M7|A0A1M5A1M7_9THEO S-adenosylmethionine:tRN A ribosyltransferase-isomerase OS=Thermoanaerobacter uz onensis DSM 18761 OX=1123369 GN=queA PE=3 SV=1
MKRSEFYFELPEELIAQEPLEDRSSSRLMFLNKKTGEIQHDIFKNIIKYLKAGDCLVLNDTKVIPARLIGRRQDSGGKIEFVLLKRLSVNEWETLVKPGRRAKVGTRVVFGNGELVAEILDNTEVGGRVVRFYYEGVFEEVLDKLGEMPVPPYIKKKLKNKDRYQTVYAKYEGSAAAPTAGLHFTQELLEKIRQMGVKTVFITLHVGLGTFRPVKEEIIENHKMHEEFYIVTKEAAEEINATREKGGRVIAVGTTSTRTLETVADENGYIREKSGWTDIFIYPGYKFKAIDGMITNFHLPESTLIMMVSAFAGKENIMRAYKIAIEERYRFFSFGDAMLII

SEQ ID NO: 73115 - protein, 341 aa, Thermoanaerobacter wiegelii
  misc_feature (1)..(341): tr|G2MSZ6|G2MSZ6_9THEO S-adenosylmethionine:tRNA ribosy ltransferase-isomerase OS=Thermoanaerobacter wiegelii R t8.B1 OX=697303 GN=queA PE=3 SV=1
MKRSEFYFELPEELIAQEPLEDRSSSRLMVLNRKTGEVQHDIFKNITKYLKAGDCLVLNDTKVIPARLIGRRQDSGGKIEFVLLKRLSVNEWETLVKPGRRAKVGTRVVFGNGELVAEILDNTEVGGRVVRFYYEGVFEEVLDKLGEMPVPPYIKKKLKDKERYQTVYAKYEGSAAAPTAGLHFTEELLEKIRQMGVKTVFITLHVGLGTFRPVKEEIIENHKMHEEFYIVTKEAAEEINATREKGGRVIAVGTTSTRTLETVADENGYIREKSGWTDIFIYPGYKFKAIDGMITNFHLPESTLIMMVSAFAGKENIMRAYQVAIEERYRFFSFGDAMLII

SEQ ID NO: 73116 - protein, 341 aa, Thermoanaerobacteraceae bacterium
  misc_feature (1)..(341): tr|A0A3A9K246|A0A3A9K246_9THEO S-adenosylmethionine:tRN A ribosyltransferase-isomerase OS=Thermoanaerobacterace ae bacterium SP2 OX=2292448 GN=queA PE=3 SV=1
MDLKEFYYYLPQELIAQEPLKDRAKSRLLVLDRETGHIEHRIFEDIVDYLNPGDCLVLNDTRVIPARLIGSRQDTGGKIEFVLLKKTGINIWEVLVKPGKRAKIGSEFVFGDGRLKAKVLGYTDAGGRVVEFFYEGIFEQVLDELGQMPVPPYIKKKLKDRECYQTVYAREPGSAAAPTAGLHFTKELLEKIRQKRVRIVFITLHVGLGTFRPVKVQKIEEHRMHEEYYEVSPETAEIINNTKENGHRIIAVGTTSTRTLETVGSGDGRVKPQSGWSGIFIYPGYKFKVIDGLITNFHLPESTLIMLVSAFAGKDKVFKAYEEAIKKRYRFYSFGDAMFIK

SEQ ID NO: 73117 - protein, 341 aa, Thermoanaerobacteraceae bacterium
  misc_feature (1)..(341): tr|A0A5D8QH53|A0A5D8QH53_9THEO S-adenosylmethionine:tRN A ribosyltransferase-isomerase OS=Thermoanaerobacterace ae bacterium A05MB OX=2606906 GN=queA PE=3 SV=1
MNVHDFYFELPEELIAQRPLVERDLAKLMVLHKDTGEIEHKIFKDVIEYLESGDCLVLNDTRVIPARLLGRKADTMGKMEFVLLTNKGDNVWEVLVKPGRRAKIGSRFVFGEGELTAKVLDVTKDGTRIVRFYYDGLFEEVLDKLGRMPLPPYIKKQLDDNEMYQTVYSKHEGSAAAPTAGLHFTNELLKDIEAKGVNLVYITLHVGLGTFRPVKVENVEEHEMHSEFFIVNKEAADTVNQAKRRGKKIVSVGTTSTRTLEASCDEDGNVIPQSGWTDIFIYPGYKFKVIDALITNFHLPESTLIMLVSALAGRENILNAYRIAVENRYRFFSFGDAMLIV

SEQ ID NO: 73118 - protein, 345 aa, Thermoanaerobacterales bacterium
  misc_feature (1)..(345): tr|A0A101F8Y9|A0A101F8Y9_9FIRM S-adenosylmethionine:tRN A ribosyltransferase-isomerase OS=Thermoanaerobacterale s bacterium 50_218 OX=1635288 GN=queA PE=3 SV=1
MKVSDFDYHLPPELIAQYPAPRREQSRLLVLHRDSGEIEHRLFPAVVEYLEPGDVLVLNETKVFPARLRGRRKDTGGKIEILLLEEKEPLVWEALVRPGRRFREGARITFGDGELEAEVGQKTREGARILRFRENNVTDFWEKVFRIGEVPLPPYIKRKVEDLDKERYQTVYARCLGSVAAPTAGLHFSSELLEQIQAKGVRIVFLVLHVGLGTFRPVKVDEVEKHKMHPEFWRVGSQAALVINEARKSGKRIIAVGTTVVRALESAADESGYLKPGEGWTRLFIYPGYRFRIIDGLITNFHLPRSTLLMLVCAFAGKETVLRAYQEAVALRYRFFSYGDAMLII

SEQ ID NO: 73119 - protein, 341 aa, Thermoanaerobacterales bacterium; identical to SEQ ID NO: 73116
  misc_feature (1)..(341): tr|A0A3G2R5T3|A0A3G2R5T3_9FIRM S-adenosylmethionine:tRN A ribosyltransferase-isomerase OS=Thermoanaerobacterale s bacterium SK-G1 OX=2316383 GN=queA PE=3 SV=1

SEQ ID NO: 73120 - protein, 341 aa, Thermoanaerobacterium aotearoense
  misc_feature (1)..(341): tr|W9EEX6|W9EEX6_9FIRM S-adenosylmethionine:tRNA ribosy ltransferase-isomerase OS=Thermoanaerobacterium aotearo ense SCUT27 OX=1421016 GN=queA PE=3 SV=1
MNLHEFYYDLPEELIAQEPLQNRDESRLMVLNKATGEIKHDIFKNILNYLRPNDVLVLNDTKVIPARLYGVREDTGGKIEFVLLKRLGINEWEILVKPGRRAKIGSKFIFGNGELKALILSDTDAGGRIVRFSYEGVFEEVLDKLGEMPVPPYIKKKLKDKNMYQTVYAKHEGSAAAPTAGLHFTNELLDKIREFGVKTVFITLHVGLGTFRPVKEEVIENHKMHSEFYIVNEDAADAINAARKSGGRIISVGTTSTRTLETVADDDGIIHAGSGWTDIFIYPGYKYKAIDGIITNFHLPESTLIMMISAFAGKENVMNAYKTAIDNKYRFYSFGDAMLII

SEQ ID NO: 73121 - protein, 341 aa, Thermoanaerobacterium saccharolyticum; identical to SEQ ID NO: 73120
  misc_feature (1)..(341): tr|I3VVZ6|I3VVZ6_THESW S-adenosylmethionine:tRNA ribosy ltransferase-isomerase OS=Thermoanaerobacterium sacchar olyticum (strain DSM 8691 / JW/SL-YS485) OX=1094508 GN= queA PE=3 SV=1

SEQ ID NO: 73122 - protein, 341 aa, Thermoanaerobacterium sp.
  misc_feature (1)..(341): tr|A0A1X2FZX0|A0A1X2FZX0_9FIRM S-adenosylmethionine:tRN A ribosyltransferase-isomerase OS=Thermoanaerobacterium sp. PSU-2 OX=1930849 GN=queA PE=3 SV=1
MNLHEFYYDLPEELIAQEPLQNRDESRLMVLNKATGEIKHDIFKNILTYLKPNDVLVLNDTKVIPARLYGVREDTGGKIEFVLLKRLGIDEWEILVKPGRRAKIGSKFIFGNGELKALILSDTDAGGRIVRFSYEGVFEEVLDKLGEMPIPPYIKKKLKDKNMYQTVYAKHEGSAAAPTAGLHFTNELLDKIREFGVKTVFITLHVGLGTFRPVKEEVIENHKMHSEFYIVNEDAADAINAARKAGGRIISVGTTSTRTLETVADDDGIIHAGSGWTDIYIYPGYKYKAIDGIITNFHLPESTLIMMISAFAGKENVMNAYKTAIENKYRFYSFGDAMLII

SEQ ID NO: 73123 - protein, 341 aa, Thermoanaerobacterium sp.
  misc_feature (1)..(341): tr|A0A285BCI5|A0A285BCI5_9FIRM S-adenosylmethionine:tRN A ribosyltransferase-isomerase OS=Thermoanaerobacterium sp. RBIITD OX=1550240 GN=queA PE=3 SV=1
MNLHEFYYDLPEELIAQEPLLNRDESRIMILNRRTGEIKHDIFKNIINYLNHNDCLVLNDTKVIPARLIGVREDTGGKIEFVLLRRLKNNEWEILVKPGRRAKIGSTFLFGNGELKAEVLSTTEVGGRIVRFSYEGIFEEVLDKLGEMPVPPYIKKKLKDKNMYQTVYAKHEGSAAAPTAGLHFTNELLEKIKEKGVKIVFVTLHVGLGTFRPVKEEIIEEHKMHSEFYVVKEDAAETINNVKKNGGRIISVGTTSTRTLESVADENGVIKPGSGWTDIFIYPGYKYKAIDGLITNFHLPESTLIMMISAFAGRDNVMNAYKVAIENKYRFYSFGDAMLII

SEQ ID NO: 73124 - protein, 341 aa, Thermoanaerobacterium thermosaccharolyticum
  misc_feature (1)..(341): tr|D9TP93|D9TP93_THETC S-adenosylmethionine:tRNA ribosy ltransferase-isomerase OS=Thermoanaerobacterium thermos accharolyticum (strain ATCC 7956 / DSM 571 / NCIB 9385 / NCA 3814) OX=580327 GN=queA PE=3 SV=1
MNLHEFYYDLPEELIAQEPLKNRDESRLMILNRLTGEIKHDIFKNIISYLNPNDVLVLNDTKVIPARLIGVREDTGGKIEFVLLKRLSSDEWEILVKPGRRAKIGSKFIFGNGELKAEVISNTDVGGRIVRFSYEGIFEEVLDKLGEMPVPPYIKKKLEDKNMYQTVYAKHEGSAAAPTAGLHFTNKLLDDIRKYGVKTVFVTLHVGLGTFRPVKEEVIEKHKMHSEFYTVTEEAAQAINTARESGGRIISVGTTSTRTLETVADENGIIHAGSGWTDIFIYPGYKYKAIDGIITNFHLPESTLIMMISAFAGKENVMNAYKTAIDNKYRFYSFGDAMLII

SEQ ID NO: 73125 - protein, 341 aa, Thermoanaerobacterium thermosaccharolyticum
  misc_feature (1)..(341): tr|A0A231VE46|A0A231VE46_THETR S-adenosylmethionine:tRN A ribosyltransferase-isomerase OS=Thermoanaerobacterium thermosaccharolyticum OX=1517 GN=queA PE=3 SV=1
MNLHEFYYDLPEELIAQEPLKNRDESRLMILNRLTGEIKHDIFKNIISYLNPNDVLVLNDTKVIPARLIGVREDTGGKIEFVLLKRLSSDEWEILVKPGRRAKIGSKFIFGNGELKAEVISNTDVGGRIVRFSYEGIFEEVLDKLGEMPVPPYIKKKLEDKNMYQTVYAKHEGSAAAPTAGLHFTNKLLDDIRKYGVKTVFVTLHVGLGTFRPVKEEIIEKHKMHSEFYTVTEEAAQAINTARESGGRIISVGTTSTRTLETVADENGIIHAGSGWTDIFIYPGYKYKAIDGIITNFHLPESTLIMMISAFAGKENVMNAYKTAIDNKYRFYSFGDAMLII

SEQ ID NO: 73126 - protein, 341 aa, Thermoanaerobacterium xylanolyticum
  misc_feature (1)..(341): tr|F6BGK1|F6BGK1_THEXL S-adenosylmethionine:tRNA ribosy ltransferase-isomerase OS=Thermoanaerobacterium xylanol yticum (strain ATCC 49914 / DSM 7097 / LX-11) OX=858215 GN=queA PE=3 SV=1
MNLHEFYYDLPEELIAQEPLQNRDESRLMVLNKDTGEIKHDIFKNILTYLKPNDVLVLNDTKVIPARLYGVREDTGGKIEFVLLKRLGIDEWEILVKPGRRAKIGSKFIFGNGELKALILSDTDAGGRIVRFSYEGVFEEVLDKLGEMPIPPYIKKKLKDKNMYQTVYAKHEGSAAAPTAGLHFTNELLDKIREFGVKTVFITLHVGLGTFRPVKEEVIENHKMHSEFYIVNEDAADAINAARKAGGRIISVGTTSTRTLETVADDDGIIHAGSGWTDIFIYPGYKYKAIDGIITNFHLPESTLIMMISAFAGKENVMNAYKTAIENKYRFYSFGDAMLII

SEQ ID NO: 73127 - protein, 340 aa, Thermoanaerobaculum aquaticum
  misc_feature (1)..(340): tr|A0A062XT77|A0A062XT77_9BACT S-adenosylmethionine:tRN A ribosyltransferase-isomerase OS=Thermoanaerobaculum a quaticum OX=1312852 GN=queA PE=3 SV=1
MRTEDFAYELPPELIAAFPRPRGTSRLLVLPRQGSPWEANIRDIPALLTPGDLLLLNDVRVIPARLFGRRPGGGVCELLLLRPAGEGVWEAMGRPAARLREGTVVSFPWGRGVIQGRQGEGKLLVAFQPPLDASALEALGEVPLPPYIEKKRRAQPEDRRRYQTVFARRGLAVAAPTAGLHLTAELLAACEARGVEVVSLTLHVGPGTFKPVKSEDPRQHRLDPELYEISPETAGALNRALAFGRRIVAVGTTSVRALEDALKRGGGRVLPGVAHADTYILPGFVFRGTGALLTNFHLPRSTLLMLVSALAGRERVLAAYEMAKARGFGFYSYGDAMLIL

SEQ ID NO: 73128 - protein, 353 aa, Thermobacillus composti
  misc_feature (1)..(353): tr|L0EHI3|L0EHI3_THECK S-adenosylmethionine:tRNA ribosy ltransferase-isomerase OS=Thermobacillus composti (stra in DSM 18247 / JCM 13945 / KWC4) OX=717605 GN=queA PE=3 SV=1
MFAHEFDFELPEELIAQTPLPERTASRLLALDRETGRIDHGTFTDLKRYLMPGDTLVLNDTRVLPARLHGIKPETGARVELLLLKQLEGDRWETLAKPAKRMRPGTELVFGEDENGAPLLRAVVLEAGESGFRTVEFRYDGIFQELLDRLGEMPLPPYIRERLDDRERYQTVYARREGSAAAPTAGLHFTPAFLDELRAAGVRTAFLTLHVGLGTFRPMTAERVEDHVMHAEYYEIGAETAALLNETRERGGRIVAVGTTSARTLETAAARFGPGKIEACSGWTDIFIYPGYNFLMVDALLTNFHLPKSTLVMLVSAFAGRDKIMEAYREAIERKYRFFSFGDAMFIYSNGKR

SEQ ID NO: 73129 - protein, 353 aa, Thermobacillus sp.; identical to SEQ ID NO: 73128
  misc_feature (1)..(353): tr|A0A3E0QQT8|A0A3E0QQT8_9BACL S-adenosylmethionine:tRN A ribosyltransferase-isomerase OS=Thermobacillus sp. OX =2108467 GN=queA PE=3 SV=1

SEQ ID NO: 73130 - protein, 364 aa, Thermobacillus sp.
  misc_feature (1)..(364): tr|A0A1Y3QC56|A0A1Y3QC56_9BACL S-adenosylmethionine:tRN A ribosyltransferase-isomerase OS=Thermobacillus sp. ZC TH02-B1 OX=1858795 GN=queA PE=3 SV=1
MSRSKRKDNAVFAHEFDFELPEELIAQTPLPERTASRLLALDRTTGTIEHGTFTDLRRYLKPGDLLVLNDTRVLPARLRGIKPETGARVELLLLRRLEGDRWEVLAKPAKRLKPGTVLAFGEDETGAPLLHAVVQAEGEAGLRTVEFRYRGIFQELLDRLGEMPLPPYIRRRLEDRERYQTVYAKHDGSAAAPTAGLHFTNEFLDELRASGVRTAFLTLHVGLGTFRPMTVERVEDHVMHAEYYEVSAETAAMLNETREKGGRIVAVGTTSARTLETAAARFGPGKIEACSGWTDLFIYPGYRFLLVDALLTNFHLPRSTLVMLVSAFAGRELILKAYREAIERRYRFFSFGDAMFIYGTDGKR

SEQ ID NO: 73131 - protein, 336 aa, Thermobaculum terrenum
  misc_feature (1)..(336): tr|D1CFZ1|D1CFZ1_THET1 S-adenosylmethionine:tRNA ribosy ltransferase-isomerase OS=Thermobaculum terrenum (strai n ATCC BAA-798 / YNP1) OX=525904 GN=queA PE=3 SV=1
MRLQDFDYYLPPELIAQTPAEPRDSSRLLVLNKRTGEIQHAIFRDLPNYLSPGDVLVFNDTRVIPARLHGRRKQTGGNVEFLLVRHVKDTEWEAMGRPARRLKTGERVTIAEDLDAQVLEKLPEGLLLIRLPQEVHENLDKYGEIPLPPYIHDFHGDASRYQTVYARDPGAVAAPTAGLHFTEELISRLRDYGVDLRFITLHVGPGTFQPIKTERIEEHKMHSERYYIPEGLLEYLEEKRSAGNRVVAVGTTSVRALEDAAVRRQAGTWVETDLFIKPGYQFKIVDALITNFHLPKSTLMMLVAATGGYEHIMNAYRIAVENRYRFYSFGDAMLII

SEQ ID NO: 73132 - protein, 341 aa, Thermobrachium celere
  misc_feature (1)..(341): tr|R7RQH1|R7RQH1_9CLOT S-adenosylmethionine:tRNA ribosy ltransferase-isomerase OS=Thermobrachium celere DSM 868 2 OX=941824 GN=queA PE=3 SV=1
MNVKDFYFDLPEELIAQHPIEPRDMSRLMVLDKKTGEIEHRIFRDILEYLNEGDCLVLNNSRVIPARLFGVKEDTGANVEFVLLKRIDKNRWETLVKPGKKAKIGTKFVFGDGELRCTVLENTDSGGRIIEFEYEGVFEEILDRLGNMPLPPYIKEELKDKERYQTVYSKVEGSAAAPTAGLHFTHELLEKIQNKGVKIAYLTLHVGLGTFRPVKVENIEEHKMHSEFYMIDEENAEIINSVKRSGKRIIAVGTTSCRTLETASDENGYVKAQSGWTDIFIYPGYKFKCIDGLITNFHLPESTLIMLVSALAGRENILNAYNTAVKERYRFFSFGDAMFIK

SEQ ID NO: 73133 - protein, 341 aa, Thermoclostridium caenicola
  misc_feature (1)..(341): tr|A0A1M6G8Y2|A0A1M6G8Y2_9FIRM S-adenosylmethionine:tRN A ribosyltransferase-isomerase OS=Thermoclostridium cae nicola OX=659425 GN=queA PE=3 SV=1
MNLKDFWYPLPKELIAQHPLERRDQSRLLVLDREKQTMTHRVFRDIQEYLRKGDCLVINNTRVIPARLLGEKEGTGGKIEFVLLKRLENDVWEVILKPGRRAKPGSRFAFGDGRLMAEILRIADEGNRIVRFYYDGVFEEVLDQVGIMPLPPYIIENLEDRERYQTVYSKVDGSAAAPTAGLHFTEELLELLKARGVEVAEVTLHVGLGTFRPVKVENILEHHMHKEFYSVSEKAAEMINRARESHNRVIAVGTTSVRVLETVADDRGMVSPGQGETDIFIYPGYKFKAVDALITNFHLPESTLMMLVCAFAGRDFIMRAYQEAIEQKYRFFSFGDAMFVY

SEQ ID NO: 73134 - protein, 341 aa, Thermoclostridium stercorarium
  misc_feature (1)..(341): tr|A0A1B1YPE9|A0A1B1YPE9_THEST S-adenosylmethionine:tRN A ribosyltransferase-isomerase OS=Thermoclostridium ste rcorarium subsp. leptospartum DSM 9219 OX=1346611 GN=qu eA PE=3 SV=1
MQLKDFYYELPKELIAQSPLEKRDMSRLLVLDRKTGKTTHLHFRDIKDYLNPGDCLVINNTRVIPARLLGVREDTGGKIEFVLLKKHDKDIWEVMLKPGRRAKVGTRFVFGDNLLKAEVLEIVEGGNRIVKFTYDGIFEEVLDKVGIIPLPPYITQKLKDRERYQTVYSKYNGSAAAPTAGLHFTEELIEELKNKGVRFAEVTLHVGIGTFRPVKTENIEDHKMHSEYFKIDAEACNIINKTRNDKGRVIAVGTTSCRVLESVADENGFVRPTEGETDIFIYPGYKFKAIDGLITNFHLPESTLLMLVSAFAGREKVLNAYKEAIELKYRFYSFGDAMFII

SEQ ID NO: 73135 - protein, 381 aa, Thermoclostridium stercorarium
  misc_feature (1)..(381): tr|L7VRV4|L7VRV4_THES1 S-adenosylmethionine:tRNA ribosy ltransferase-isomerase OS=Thermoclostridium stercorariu m (strain ATCC 35414 / DSM 8532 / NCIMB 11754) OX=11213 35 GN=queA PE=3 SV=1
MLPLVSAEKFLYYSIWHHGERCLRKPHEQVRIFIQKEMINMQLKDFYYELPKELIAQSPLEKRDMSRLLVLDRKTGKTTHLHFRDIKDYLNPGDCLVINNTRVIPARLLGVREDTGGKIEFVLLKKHDKDIWEVMLKPGRRAKVGTRFVFGDNLLKAEVLEIVEGGNRIVKFTYDGIFEEVLDKVGIIPLPPYITQKLKDRERYQTVYSKYNGSAAAPTAGLHFTEELIEELKNKGVRFAEVTLHVGIGTFRPVKTENIEDHKMHSEYFKIDAEACNIINKTRNDKGRVIAVGTTSCRVLESVADENGFVRPTEGETDIFIYPGYKFKAIDGLITNFHLPESTLLMLVSAFAGREKVLNAYKEAIELKYRFYSFGDAMFII

SEQ ID NO: 73136 - protein, 341 aa, Thermocrinis albus
  misc_feature (1)..(341): tr|D3SLS2|D3SLS2_THEAH S-adenosylmethionine:tRNA ribosy ltransferase-isomerase OS=Thermocrinis albus (strain DS M 14484 / JCM 11386 / HI 11/12) OX=638303 GN=queA PE=3 SV=1
MIIFLKDMRTEEFDYYLPKELIAKYPVEPRHAARLMVINRKDGSIKHDIFWNLPLYLQEGDLVIFNNSKVLPARLFGHKPTGGRVEILLTDYVDKHVWRALIGGKNIREGMVIEVGEDLKVEVRRHLEGGKFEVFLISSDPARALDRYGHIPIPPYLEREDEPIDRVYYQTVFAQEEGSVAAPTASLHFSQELLDRLEEFGIKKAFITLHVSYGTFKPVKVSEVEEHRVDPEYIKVPQETIELIKRTKEKGKRVVAVGTTVVRALETAVDKPYEGWTDLYIYPGYQFKVVDALVTNFHLPRSSLLFLVCAFGGKDLIMHAYNVAVKERYRFYSYGDGMLIL

SEQ ID NO: 73137 - protein, 334 aa, Thermocrinis minervae
  misc_feature (1)..(334): tr|A0A1M6TDJ7|A0A1M6TDJ7_9AQUI S-adenosylmethionine:tRN A ribosyltransferase-isomerase OS=Thermocrinis minervae OX=381751 GN=queA PE=3 SV=1
MRVEEFDYYLPLELIAKYPVEPRHAARLMVVRRDTGDITHSTFWNLDEFLEEGDLLVFNNSKVLPARLKAFKSTGGKVEVLLTDYITKDTWQALVGGKNIKEGMTLKVSEDFKVEVLKHIEGPKFLVKLVAEDPLKALDKYGRIPIPPYLEREDEPIDRIYYQTVFAREEGSVAAPTASLHFSEELLQKLQNKGIKMAFITLHVSYGTFKPVKVERVEEHRVDPEYIKVPQETVEAILQTKQKGKRVVAVGTTTVRALETAGFKPYEGWTDLYIYPGYSFRVVDALITNFHLPKSSLLFLVCSFGGKDLIMKAYKIAVENRYRFYSYGDGMLIL

SEQ ID NO: 73138 - protein, 334 aa, Thermocrinis ruber
  misc_feature (1)..(334): tr|W0DBM6|W0DBM6_9AQUI S-adenosylmethionine:tRNA ribosy ltransferase-isomerase OS=Thermocrinis ruber OX=75906 G N=queA PE=3 SV=1
MNLKDFDYYLPPELIAKYPAVPRHSARLMVLNRKDKSIKHDIFWNLPQYLEEGDLLVFNNSKVLPARLYGRKPTGGKVEILLTDYIDKHTWDALIGGKGIREGIKILVAEDFEVEVLEHIEGGKFRVRLLTEDPAKALDKYGKIPIPPYLEREEEEIDRVYYQTVFAQEEGSVAAPTASLHFSEELLQRLKDFGIKMAFITLHVSYGTFKPVKVERIEEHRVDPEYVKVPKETVDLIMETKEKGKRVIAVGTTVVRALETKPFEPFEGWTDLYIYPGFQFKVVDGLITNFHLPRSSLLFLVCAFGGREFILSAYREAVEKRYRFYSYGDGMLIL

SEQ ID NO: 73139 - protein, 350 aa, Thermocrispum agreste
  misc_feature (1)..(350): tr|A0A2W4ITT8|A0A2W4ITT8_9PSEU S-adenosylmethionine:tRN A ribosyltransferase-isomerase OS=Thermocrispum agreste OX=37925 GN=DIU77_18470 PE=3 SV=1
MLPEEAAAAAPPEAEGRPRDDVRLLVIDRAEGRWRHARFTELPALLQAGDLLVFNVSQTLPAALRAERADTGEPVRLHFSNRLDGYDTPTTTLPEHWVVEVRRADGTPSPHGETRPGDSFIIGDVARVEVLEPFARSRRYWVAAVSASAFELMARLGEPVRYGYVSKPWPLAAYQTEVGEVPGSAEMPSAARPFTGRIRWALRQAGVEFTSVLLHTGLSSDEVEGDHVGLDSVYPEWFSVPPAAAAQVNRALREGRRVIAVGTTVVRALESAAIGPREVAPVEGWTNLFVGPDRPPQVVRGLVTGLHAPRSTHLAMLAAFVPPEILRTAYADAQRSGYRWHEFGDLCLIV

SEQ ID NO: 73140 - protein, 145 aa, Thermocrispum agreste
  misc_feature (1)..(145): tr|A0A2W4JAH2|A0A2W4JAH2_9PSEU S-adenosylmethionine:tRN A ribosyltransferase-isomerase (Fragment) OS=Thermocris pum agreste OX=37925 GN=DIU77_12995 PE=3 SV=1
VAAGVLVVPLVLHTGVASPEAHERPYPEWFSVPATTARVVTRARRDGGRVIAVGTTVVRAMESAATPDGAVAPAEGWTDLVVTPEREVRVVDGLLTGLHEPRASHLDMLAAIAGPDLLARCYAEALAGGYLWHEFGDVNLLLPHR

SEQ ID NO: 73141 - protein, 351 aa, Thermodesulfatator autotrophicus
  misc_feature (1)..(351): tr|A0A177E9A3|A0A177E9A3_9BACT S-adenosylmethionine:tRN A ribosyltransferase-isomerase OS=Thermodesulfatator au totrophicus OX=1795632 GN=queA PE=3 SV=1
MSEEVIPSIYDLETYTYPLPQELIAQYPSQKREESRLLVLDRRKQKIVHHEKFSEIEQYFERGDLLVINDTKVFPARIYGHKETGGQVEILLLRLPEKEKPVPALYRGKRIRPGTIIRFDKGLVARVLENLGEGKVLLSFESPDDPLVLIHEIGKVPLPPYIKRSPEIEDLFRYQTVYAKKPGSVAAPTAGFHFTNELLRRLKEKGVKILSITLHVGYGTFAPIKTRDIRKHQIHEEYVEISPEVAEIINLSRKAGHGLFAVGTTTMRALEFAACQTGKVEPVSGWCDLYIYPGFEFKVVDHLITNFHLPKSSLLVLVAAFAGLDLIKKAYNEAISRKYRFFSYGDAMLIW

SEQ ID NO: 73142 - protein, 351 aa, Thermodesulfatator indicus
  misc_feature (1)..(351): tr|F8ADY0|F8ADY0_THEID S-adenosylmethionine:tRNA ribosy ltransferase-isomerase OS=Thermodesulfatator indicus (s train DSM 15286 / JCM 11887 / CIR29812) OX=667014 GN=qu eA PE=3 SV=1
MSEEKIPPIYDLETYTYELPEELIAQYPSQQREESRLLVIDRGKKEIIHHDKFAEIEKYFREGDLLVANDTRVFPARLYGQKETGGKVEVLLLRLPEKGKPVPALHRGKKIKKGSLIKFEKGLVARVLENLGEGKILISLEGVDDVLGVLYEIGNVPLPPYIKREPKKEDFSRYQTVYAKKLGSVAAPTAGLHFSEELLNRLQEKSVKFITITLHVGYGTFEPVKVRDIRKFQIHEEYVEISPEVAELINTSREEGRRLFAIGTTTMRTLEFAARRTGKIEPISGWCDLYIYPGFEFKAVDHLITNFHLPKSSLLVLVAAFAGLELTKKAYQEAVAKRYRFFSYGDATLIL

SEQ ID NO: 73143 - protein, 363 aa, Thermodesulfatator sp.
  misc_feature (1)..(363): tr|A0A432UD62|A0A432UD62_9BACT S-adenosylmethionine:tRN A ribosyltransferase-isomerase OS=Thermodesulfatator sp . OX=1874629 GN=queA PE=3 SV=1
MRKSPEKIENFYANTSSEIPEDFRLEAYSYHLPEELIAYRPVERREASRLLVLHRKSGCLEHRKSFSAIQEYLRPGDLLVLNDTRVFPARLPGRKETGGRVEILLLRLPEPGRPVPALYRGKKLFPGYRVIFSEELAARVLSMSPEGELQLLLEGPADLLSAIRKVGKAPLPPYIKREPEAKDLLRYQTVYARKEGSVAAPTAGFHFSESLLARLEEKGVRRAFITLHVGYGTFAPVKTPDIRRHRLHEEFVEVPEETVKAVEETRQSGGRVVAVGTTTVRALEWAALSGKLRPRRGWCDLYIYPGFVFRVVEALVTNFHLPRSSLLILVSAFAGRRLILSAYQEAIRRRYRFYSYGDAMLIL

SEQ ID NO: 73144 - protein, 341 aa, Thermodesulfitimonas autotrophica
  misc_feature (1)..(341): tr|A0A3N5APQ7|A0A3N5APQ7_9THEO S-adenosylmethionine:tRN A ribosyltransferase-isomerase OS=Thermodesulfitimonas autotrophica OX=1894989 GN=queA PE=3 SV=1
MLKPSDFDYELPPELIAQEPLPQRDASRLLVVHRDREDFEHRVFREIVAYLVPGDLLVVNETKVLPVRLHGVKETGGRVEVLLLRAVGQDLWEALVRPGRRVPPGTRLVFGGGWLTGEVVARTETGGRFIRFHYAGSFEEVLRRVGEVPLPPYIKQKLSAPERYQTVYAREAGSAAAPTAGFHFTPELLATLRAMGVGVVPVVLHIGLDTFRPVREENIAAHRMHREEYFVPEATATAVNQAKAEGRRVIAVGTTVVRCLETVAGEGSRVRAGAGMTDLFIYPGYRFKVVDALITNFHLPRSTLLMLVAAFAGREKILRAYREAVRLRYRFCSFGDAMLIL

SEQ ID NO: 73145 - protein, 350 aa, Thermodesulfobacteria bacterium
  misc_feature (1)..(350): tr|A0A496QKC6|A0A496QKC6_9BACT S-adenosylmethionine:tRN A ribosyltransferase-isomerase OS=Thermodesulfobacteria bacterium OX=2202153 GN=queA PE=3 SV=1
MIADFSLVEYDYHLPPHLIAQYPLDDRSSSRLMVLDRNTGKVSHRTFRDLLDYTEQGDCLVLNDSKVFPARLNCIKSTGGKTEFFLLHFPRESGNGVAFAKALCRSSKPVRPSQKIRCKGLLEIEVLEVSSAGQVDVKLVYQGELLLALESCGDIPLPPYIKRSPVPSDVEQYQTTYAKKIGSVAAPTAGFHFTEEQLRLAEKKNINIAWITLHVGYGTFAPVRISDIREHRIHHEWISVPESTAEKIISTRKTGGRVIAVGTTTARALEATANGTGEINAFQGLCDLYILPGHPFQVVDCLITNFHLPKSSLLILVSAFAGRSKIFSAYKEAMNAGYRFFSYGDAMLIL

SEQ ID NO: 73146 - protein, 335 aa, Thermodesulfobacteriales bacterium
  misc_feature (1)..(335): tr|A0A524JTA1|A0A524JTA1_9BACT S-adenosylmethionine:tRN A ribosyltransferase-isomerase OS=Thermodesulfobacteria les bacterium OX=2528040 GN=queA PE=3 SV=1
MKASDFDYHLAEEQIAYHPKAQRHNSRLLLLNKNSGEIDHRNFYELPTFLNPGDVLVLNNTKVIPARLYGKRKSGKEVEILLVHKLGEKIWECLVKNPKNNDELEFAHGLKGKLSKDEINSWFIEFDEPVDDYIELYGKMPLPPYINREAQESDRVSYQTVYADKKGAIAAPTAGLHFTAELLDEIKNKGVEIEYVTLHVGIGTFKPVKVENIEDHKMHGEFRSISTTTASAINKAKAQGRRVVAVGTTVVRTLESSVNENGEVVPQMGKTDLFIVPGFEFKVVDALITNFHLPRSTLLMLVSAFSDYKYIFNAYDEAREKGYRFLSYGDAMFIN

SEQ ID NO: 73147 - protein, 347 aa, Thermodesulfobacterium commune
  misc_feature (1)..(347): tr|A0A101FHY7|A0A101FHY7_9BACT S-adenosylmethionine:tRN A ribosyltransferase-isomerase OS=Thermodesulfobacteriu m commune OX=1741 GN=queA PE=3 SV=1
MSVIPKEFRLDYYDYPLPEELIAYFPVEDRKSSHLLVIDRKTQKLFFHQTFAEIERYFQKGDLLVLNNTKVFPARLKGIKPTGGEVELLLFQKPQGLSFQTLALIKGKRIRKGTEIMANEITIKVLESLEGGRFLVELKANQPLEILIYKHGKAPLPPYIKREPEELDLLRYQTVYAQKEGSIAAPTAGFHFDSYLLDLLKQKGVSINFITLHVGYGTFAPIKVQDIRKHRVEPEYIEVESEVIEEIKKALKEKRRIFAVGTTTVRTLEFIAQKGFIPYKGLCDLYIYPGFTFQVVSAMITNFHLPKSSLLLLVCAFAGRDLILKAYQEAIAQKYRFYSYGDATLIL

SEQ ID NO: 73148 - protein, 347 aa, Thermodesulfobacterium commune; identical to SEQ ID NO: 73147
  misc_feature (1)..(347): tr|A0A075WRE0|A0A075WRE0_9BACT S-adenosylmethionine:tRN A ribosyltransferase-isomerase OS=Thermodesulfobacteriu m commune DSM 2178 OX=289377 GN=queA PE=3 SV=1

SEQ ID NO: 73149 - protein, 349 aa, Thermodesulfobacterium geofontis
  misc_feature (1)..(349): tr|F8C4G5|F8C4G5_THEGP S-adenosylmethionine:tRNA ribosy ltransferase-isomerase OS=Thermodesulfobacterium geofon tis (strain OPF15) OX=795359 GN=queA PE=3 SV=1
MVLIPKEFDIETYNYKLPEDLIAYYPPKERTESKLLVIDRKKEEFYFHEKFSEIENYLKEGDLLILNNTKVFPARIKGKKATGGEVELLLFQKPEGFIFTTSALIKGKRIKKGQEFKVNDAIKIKVLEKYEGGKFLVELKSKEYKLEELIYKYGKAPLPPYIKREPEDIDLERYQTVYAEKEGSIAAPTAGFHFDEILLTKLKEKGVIIKYITLHIGYGTFAPIKVKDIRKHKIEPEYVEVDEEVISEIKLAQAEKRRIIAVGTTVVRTLEFIARKGFIPYKGFCDLYIYPGFNFQVVSAMITNFHLPKSSLLLLVCAFAGRSLIFKAYEEAIKRKYRFYSYGDATFII

SEQ ID NO: 73150 - protein, 162 aa, Thermodesulfobacterium geofontis
  misc_feature (1)..(162): tr|A0A2N7PN67|A0A2N7PN67_9BACT S-adenosylmethionine:tRN A ribosyltransferase-isomerase (Fragment) OS=Thermodesu lfobacterium geofontis OX=1295609 GN=C0190_04725 PE=3 S V=1
PTAGFHFDKNLLARLEERGVIIKYITLHIGYGTFAPIKVRDIRKHKLDPEYIEVEEDVILEIKSALSEKRRIIAVGTTVVRTLEFVAKKGLIPYKGLCDLYIYPGFKFQIISAMITNFHLPKSSLLLLVCAFAGRDLIFRAYKEAIKRRFKFYSYGDATFII

SEQ ID NO: 73151 - protein, 336 aa, Thermodesulfobium acidiphilum
  misc_feature (1)..(336): tr|A0A2R4VZQ5|A0A2R4VZQ5_9FIRM S-adenosylmethionine:tRN A ribosyltransferase-isomerase OS=Thermodesulfobium aci diphilum OX=1794699 GN=queA PE=3 SV=1
MFLDKELMNDLCYFLPNERIAQSPIEPRDNANLLVVNREKLSFEDCIVRDLPNFLYKGDLIILNNTKVIKARLYAITDTSAKVEILLIKKIDIKTGLFMTKPGKRLKKGKEIIINNKKIGIVKDVDSQGRRIIEFYEEIDTILEEFGMIPIPPYVKKFSKDFNEKYQTKFANVPGSVAAPTAGLHFTDNLLEELREKGVLIKFITLHVGPGTFKSLSNEGEVLLEPEWVDISQDVCDSIKKAKGNNNKILVVGTTTMRTVESTNLEPYSGYIDTIILPGYNFKVPDMFMTNFHLPKTSLLALTMAFGGIELIKKAYSYAIENDYRFYSFGDAMLII

SEQ ID NO: 73152 - protein, 336 aa, Thermodesulfobium narugense; identical to SEQ ID NO: 73151
  misc_feature (1)..(336): tr|A0A2J6XEE1|A0A2J6XEE1_9FIRM S-adenosylmethionine:tRN A ribosyltransferase-isomerase OS=Thermodesulfobium nar ugense OX=184064 GN=queA PE=3 SV=1

SEQ ID NO: 73153 - protein, 335 aa, Thermodesulfobium narugense
  misc_feature (1)..(335): tr|M1E4L8|M1E4L8_9FIRM S-adenosylmethionine:tRNA ribosy ltransferase-isomerase OS=Thermodesulfobium narugense D SM 14796 OX=747365 GN=queA PE=3 SV=1
MILEKKLMNDLNYFLPNEKIAQNPIEPRDNAKLLVVDRKKLSFEDCIVRDLPNFLNEGDLIILNNTKVIKARLYAITDTSAKVEMLLIKKLDNKTGLFMTKPGKRLKKGKEIIINSKKMGIVRDIDLQGRRIIELYDEIDKVIEEFGMIPIPPYVKKFSKDFNEKYQTKFANVPGSVAAPTAGLHFTESLLESLREKGVLIKFITLHVGPGTFKSISNEGEVLLEPEWVDISQDVCDSIKKAKGNNKILVVGTTTMRTVESTNLEPYSGYIDTVILPGYNFKVPDMFMTNFHLPMTSLLALTMAFGGIELIKKAYKYAIENDYRFYSFGDAMLIL

SEQ ID NO: 73154 - protein, 369 aa, Thermodesulforhabdus norvegica
  misc_feature (1)..(369): tr|A0A1I4SAZ1|A0A1I4SAZ1_9DELT S-adenosylmethionine:tRN A ribosyltransferase-isomerase OS=Thermodesulforhabdus norvegica OX=39841 GN=queA PE=3 SV=1
MNTQRTLEERAISYRLDDYDYDLPPELIAQMPADRRDESRLMVLDRRSRTWEHRVFSEIVHLLRPGDVLVLNNTRVVRARLTARKPSGGKVELLILNPFEGRESQKGKEYGCITRSSKPLKPGMILTLENASEDIQIEIAEVPEPGKAHIRLRTDLPLLSVLERFGSVPLPPYIRRNEANRKKLLSLDLSRYQTVYALKPGAVAAPTAGFHFTENLLEELRNKGIFLAYLTLHVGYGTFAPVRSEDIRHHVMHSEWCEIDDSCVNTIEEARRSGGRVIAVGTTCVRALEWVMTNLGKLQPHAGWCDHYIYPGYRFKIVDAMVTNFHLPRSTLLLLVAAFAGKDFILAAYREAVRERYRFFSYGDAMLIT

SEQ ID NO: 73155 - protein, 344 aa, Thermodesulfovibrio aggregans
  misc_feature (1)..(344): tr|A0A0U9HSH3|A0A0U9HSH3_9BACT S-adenosylmethionine:tRN A ribosyltransferase-isomerase OS=Thermodesulfovibrio a ggregans OX=86166 GN=queA PE=3 SV=1
MKITELDYPLPADLIAQEPILERDKARLLVLHKKTGQIEHKIFYEITNYFQEGDMLIINNTKVIPARLVGRKPTGGKIEILLIKQKKALSNEVEWEIMTKGKYEGDVFIDDIKAEIRINCDGKKIIFSMSPQDVKKLLDEKGFMPLPPYIKRQPSQSDRQYYQTVYAKANGSIAAPTAGLHFTDELLKNIANRGVKLREITLHVGVGTFKPIKVKNLEEHKMDSEYFEIEKSLIEEIYLVKKEGKKIFSVGTTTTRALEGYASEEYEDMGTDDFKIRGLTDIFIYPGYEFKIVDALITNFHLPKSTPLALVYAFCDSEKVKKAYMEAVEKRYRFFSYGDAMLIL

SEQ ID NO: 73156 - protein, 344 aa, Thermodesulfovibrio sp.
  misc_feature (1)..(344): tr|A0A1C3FFR1|A0A1C3FFR1_9BACT S-adenosylmethionine:tRN A ribosyltransferase-isomerase OS=Thermodesulfovibrio s p. N1 OX=1871110 GN=queA PE=3 SV=1
MKIIELDYPLPADLIAQKPLEQRDQSRLLVLHKDSGEIEHKIFSEIVEYFHEEDIIIINNTKVIPARLIATKPTGGKIEILLIRQKEASSHYVVWEVIKKGEYEGEIFIDEISAELRKSEGWQIVFKNMNAEDVQNLINEKGFMPLPPYIKRKPDQSDKQHYQTVYAKKSGSIAAPTAGLHFTKELLEKIVNKGVKLLEITLHVGVGTFKPIKVENLKEHKMDSEYFEIEKTVIEEIYSAKKKGKRIFSVGTTTTRALEGYASQIYEDMGSDNEKIKGNTDIFIYPGYKFKIIDALITNFHLPKSTPLALVSALCDIEKVKKAYMEAIEKRYRFFSYGDAMLII

SEQ ID NO: 73157 - protein, 335 aa, Thermodesulfovibrio sp.
  misc_feature (1)..(335): tr|A0A1G3XSL9|A0A1G3XSL9_9BACT S-adenosylmethionine:tRN A ribosyltransferase-isomerase OS=Thermodesulfovibrio s p. RBG_19FT_COMBO_41_18 OX=1802372 GN=queA PE=3 SV=1
MKVADFDFFLPEYLVAKRPLKERSNSRLLVLHKDGIVEHKRFSDLPSYLDKGDLLITNNTRVFPARLTGLKKSGGRLEILLVRKKEGNAWEVLSKGRFTGTLKISEGLQLELHNGDTAYFKYSGDFMDIIWKYGNMPLPPYIKRSPDESDKETYQTIYAKKEGSIAAPTAGLHFTNRLLNKITSKGILLRELTLHVGIGTFSPIRTKNVEEHSMGIEYFEIDNELISEIKEVKASGKRVISVGTTTTRAIEGYMSSNCNVFSQNGRLKGTTDIFIYPGYRFSIVDSLVTNFHLPRSTPLMLASAMYGWENLIKAYKEAIAEGYRFLSYGDAMLIL

SEQ ID NO: 73158 - protein, 345 aa, Thermodesulfovibrio yellowstonii
  misc_feature (1)..(345): sp|B5YKE5|QUEA_THEYD S-adenosylmethionine:tRNA ribosylt ransferase-isomerase OS=Thermodesulfovibrio yellowstoni i (strain ATCC 51303 / DSM 11347 / YP87) OX=289376 GN=q ueA PE=3 SV=1
MKITELNYTLPTDLIAQKPLSERDKSRLLVLHKNTGEIEHRIFYEIVEYLNEGDILIINNTKVIPARLIAEKPSGGKIEILLIKEKKCSSQNVVWEVMTKGSYEGEVFIDEFIAELRNNCDGRYIVFKNMTSPKVRNLINEKGFMPLPPYIKRKPIQSDRQDYQTVYAKMNGSIAAPTAGLHFTKELLETIISKGVKLREITLHVGVGTFKPIKVDKLQEHKMDPEYFEIDKTLIEEIYAIKKAGKRIFSVGTTTTRALEGYASGKYEDRGSDNYKIKGSTDIFIYPEFSFKIVDALITNFHLPKSTPLAMVYAFCEMQKVKKAYREAIEKGYRFFSYGDAMLII

SEQ ID NO: 73159 - protein, 349 aa, Thermoflavifilum aggregans; identical to SEQ ID NO: 65613
  misc_feature (1)..(349): tr|A0A2M9CWU8|A0A2M9CWU8_9BACT S-adenosylmethionine:tRN A ribosyltransferase-isomerase OS=Thermoflavifilum aggr egans OX=454188 GN=queA PE=3 SV=1

SEQ ID NO: 73160 - protein, 345 aa, Thermoflavimicrobium dichotomicum
  misc_feature (1)..(345): tr|A0A1I3MDR5|A0A1I3MDR5_9BACL S-adenosylmethionine:tRN A ribosyltransferase-isomerase OS=Thermoflavimicrobium dichotomicum OX=46223 GN=SAMN05421852_1037 PE=3 SV=1
MSITFHLPTALHASTPPERRGIRRDQVRLMVSDKHTGESIHTSFHQLPQFLRSGDVLVLNASRTIPALLYGKWYRQGQLLSDKVEIRLAHRLDERIWQALVITEGVKKGDFFYFSTKLFAEVIRVRSGFALIEMRFSLSGAFLFEQIYALGQPIRYEYVQNPWQLEYYQTVYGSFPGSVELPSAGRAFTWEMLFRLKQKGISIAFLLLHTGLSYFLGNQVNPEENGEEYMIPDRTATLVNQAKQSGGRVIAVGTTVVRALESAVSPTGQCMSTKGWTRLYIHSHYSLQLVDGLLTGFHEPEASHLDLLTAFVESHQLKQMYDEAIQQQYLWHEFGDLHLILPIST

SEQ ID NO: 73161 - protein, 344 aa, Thermoflavimicrobium dichotomicum
  misc_feature (1)..(344): tr|A0A1I3R7B4|A0A1I3R7B4_9BACL S-adenosylmethionine:tRN A ribosyltransferase-isomerase OS=Thermoflavimicrobium dichotomicum OX=46223 GN=queA PE=3 SV=1
MDVSLFDFDLPKELIAQKPNKDRASSRLMIVNRAAEEITHTQFPEIVHQLKPGDVLVLNDSRVRPARLIGIKEQTGAKIELLLLKPLGEDRWEALVKPAKRVQEGTVITFGNGQLQAIAEEKTEVAGGRIFRLQYEGNDIEALFHELGQMPLPPYIHEQLDDPERYQTVFSRVIGSAAAPTAGLHFTEEILEEIRNKGVHVVFITLHVGLGTFRPVTVERVEEHQMHAEYYEVSEETARTIQEAKQCGGRVIAVGTTSVRTLETVAGRFGGEIRASSGWTDIFIYPGYQFQVIDGLLTNFHLPQSTLLMLVSAFSSRELILHAYQEAIKHRYRFFSFGDCMLIL

SEQ ID NO: 73162 - protein, 344 aa, Thermoflavimicrobium sp.
  misc_feature (1)..(344): tr|A0A364K8S7|A0A364K8S7_9BACL S-adenosylmethionine:tRN A ribosyltransferase-isomerase OS=Thermoflavimicrobium sp. FBKL4.011 OX=2137476 GN=queA PE=3 SV=1
MDVSLFDFELPKELIAQTPNLKRSSSRLLIMDRKTGDMNHTYFPSIVDQLQTGDVLVLNDSRVRPARLIGVKEETGAKIELLLLKPLGNDRWEALVKPAKRVKEGTVISFGDGQLQAVAKESTEVAGERIFQLLYEESDLDQLLIKLGQMPLPPYIHEQLDDPERYQTVYSKVVGSAAAPTAGLHFTEEILDQIRKKGVHVVFITLHVGLGTFRPVTSEQVEEHQMHAEYYEMNQETARIINTAKKQGGRVIAVGTTSIRTLETVASLNKGEAASCNGWTDIFIYPGYQFKMVDGLLTNFHLPQSTLLMLVSAFSSREHILKAYHEAIKQRYRFFSFGDCMLII

SEQ ID NO: 73163 - protein, 314 aa, Thermoflexia bacterium
  misc_feature (1)..(314): tr|A0A3M1DIH6|A0A3M1DIH6_9CHLR S-adenosylmethionine:tRN A ribosyltransferase-isomerase (Fragment) OS=Thermoflex ia bacterium OX=2420334 GN=queA PE=3 SV=1
MFPIRMDDFDYYLPESLIAQEPVEPRDAARLMVLDRATGSISHHHVRDLPDLLRPGDLLVFNESRVLRARLFARKPTGGKVEILLLRPRGEHIWEALTRGRRIQTGLKLEILRRPEGEPTGATAQVIGIGDQGVRILSFDRPVLDLAEGVGQIPLPPYIHRPLQDPERYQTVFARTPGSVAAPTAGLHFTPGLLLRLRERGIAFAFVTLHVGMDTFRPVKEEWAEEHRMHQEYCRLTADVAEQVNRAKLEGRRVIAVGTTSVRVLETAALAAVGGCPEAEACPWRVLAPYEGWTDLYIYPGFRFRVVDGLMTNF

SEQ ID NO: 73164 - protein, 413 aa, Thermoflexibacter ruber
  misc_feature (1)..(413): tr|A0A1I2AB28|A0A1I2AB28_9BACT S-adenosylmethionine:tRN A ribosyltransferase-isomerase OS=Thermoflexibacter rub er OX=1003 GN=queA PE=3 SV=1
MKPDLEAINLADYYYELPEERIAKFPLEKRDESKLLIYNQQAQIVHDQFKNISTYLSQEDTLFFNDTKVTPARLYFQKHTGAVVEIFLLNPITPLEVHSAMLTTDQCTWACAVGNLKRLKNEPVLERIVSINGQEITLKAELEDYEKQIINFEWDSPHISFAELLTYIGEVPLPHYLKREAQESDKTNYQTIYAKNEGAVAAPTAGLHFTENLLEKIQKQGVKLDYLTLHVAGGTFQPIRHEKIIDHPMHAEQMIVSRQNLENLLSSKKIIAVGTTSMRTLESLYWYGVKLMSLPDAPFKIAKLMPYRYEVEILPSRQEAFQEVLSYMKRHKLEKISGETEIMIVPTYPFQVCDALITNFHLPSTTLILLVAAFVGEAWKQIYQAALENNYRFLSFGDSSLLFRQSNINKISV

SEQ ID NO: 73165 - protein, 350 aa, Thermoflexibacter ruber
  misc_feature (1)..(350): tr|A0A1I2A3X0|A0A1I2A3X0_9BACT S-adenosylmethionine:tRN A ribosyltransferase-isomerase OS=Thermoflexibacter rub er OX=1003 GN=queA PE=3 SV=1
MKLSAFKFDLPDDAIALHPTPNRDESRLMVVHRSTGKIEHRMFKDILDYFDEGDVMVINNTKVFPARLYGKKEKTGAKIEVFLLRELSKDARLWDVLVDPARKIRVGNKLYFGDGELVAEVIDNTTSRGRTIRFLFDGNDEEFTKMINELGEPPIPNDIKKLRPADAEDRERYQTIFAQHVGAVAAPTAGLHFTPHLVRRLQLKGVEIEPITLHVGLGTFREVDVEDLTKHKTDSENYNVPLKTAERVNEALDANKRVCAIGTTVMRTLETSVTAGGRLKDSSGWTDKFIFPPYDFKICKALVTNFHKPMSTLLMMVCAFGGYDLTMKAYDIAIKERYRFFTYGDAMLIL

SEQ ID NO: 73166 - protein, 358 aa, Thermoflexus hugenholtzii
  misc_feature (1)..(358): tr|A0A212QS97|A0A212QS97_9CHLR S-adenosylmethionine:tRN A ribosyltransferase-isomerase OS=Thermoflexus hugenhol tzii JAD2 OX=877466 GN=queA PE=3 SV=1
MEPKDLLSLEAYDYELPPDRIAQEPVEPRDASRLMVVDRATGRIEHRIFREIVAYLRPGDLLVFNDTRVIPARLFAMKPTGGRVELLLVRRVAADRWWAMVRGRGVRPGLRLQLLSGNQPIDLHAEVEAEGEGPLRLLRFSVPPEGWLERLGVIPLPPYIRKPLHDPERYQTVYARAPGSVAAPTAGLHFTPELLARLREHGVRFAFVTLHISLDTFRPIETPDVREHKLHREWCILSPETAEQINRTRLEGGRIVAVGTTVVRVLETAARYGLGCSPEDVCPWRTVGPFEGETDLYIYPGFTFRAVDALITNFHLPRSTLLLLVAAFMGYDLMRRAYQTAIAEGYRFYSFGDAMLIL

SEQ ID NO: 73167 - protein, 338 aa, Thermoflexus hugenholtzii
  misc_feature (1)..(338): tr|A0A2A9HGT0|A0A2A9HGT0_9CHLR S-adenosylmethionine:tRN A ribosyltransferase-isomerase OS=Thermoflexus hugenhol tzii OX=1495650 GN=queA PE=3 SV=1
MRTDDFAYDLPDELIAQEPAEPRDSARLMVVDRAAGTIVHRVVRDLPELLRPGDLLVVNDTRVMAARLFGRREDTGGQVEILLVRPLTDTRWEVLMKPARRAAEGRRFVFDSHEGALAAVCAGRSGEAVVLEFERPFDPARVGEVPLPPYIRSFRGDPERYQTVYAREAKSAAAPTAGLHFTPELLERLRERGIERTAVTLEVGPGTFKPVNVDDPREFDLHAEHVTVPEEAAAAIQRARAEGRRVVAIGTTVVRTLEHVARECGEIRAYAGWTSLKILPGDAFLAVDVLMTNFHLPRSTLLMLVCAFAGYDLVMEAYRTAVRERYRFYSFGDAMLIL

SEQ ID NO: 73168 - protein, 391 aa, Thermogemmatispora argillosa
  misc_feature (1)..(391): tr|A0A455T502|A0A455T502_9CHLR S-adenosylmethionine:tRN A ribosyltransferase-isomerase OS=Thermogemmatispora ar gillosa OX=2045280 GN=queA PE=3 SV=1
MENNQQDFQRQKSGEEELQEKEGVSYRISDYDYELPQELIAQQPVEPRDASRLLVVHRATGALEHRHFRDIGDYLREGDLLIANQSRVIPARLLGKREGTGGAVEVLLLAQRADLGADTWEALVRPGRRLREGARILFGEDQAAGLPPRLQGEILGRTEAGGRFVRFTLTPQYLALLAQTKAEPPAVAQVIEEIGRMPLPPYIREPLANPERYQTVYARIAGSAAAPTAGLHFTPELLDRLRAQGVRIGFVTLHVGLDTFRPVDVEDVRDHKMHSEEIDIDEATAELVNETRRAGKRVVAVGTTSVRVLESVANLFNGQVRAYHGHTNLFITPGYRFKVVDALITNFHLPRSTLILLVSAFAGKALIEKAYQEAIRQRYRFYSFGDAMLLL

SEQ ID NO: 73169 - protein, 387 aa, Thermogemmatispora argillosa
  misc_feature (1)..(387): tr|A0A455T4I3|A0A455T4I3_9CHLR S-adenosylmethionine:tRN A ribosyltransferase-isomerase OS=Thermogemmatispora ar gillosa OX=2045280 GN=KTA_29250 PE=3 SV=1
MSILSQNRQDYGADEQEGKRDAYLKTIRTLRTLTDEDKLQPLRFELPDWLEAKGPPEARGLARDEVRLLVSYCHANRLVHTQFRALPTFLRRGDVLVINTSGTMKAALHAERADGELLELHLSTRLPAELWVVEVRQPLPAGSRLFLTMRAGEVLTLPAGGRLELHRPYVQSGRTGEVRLWVATLDLPEPPDLYLEHHGFPIRYSYVEREWPIEYYQSVFVTEIGSAEMPSASRPFTAELVTRLVAEGVQFAPVLLHTGVASLETHEPPYEEYYRVPVESAELVNAARRQGRRVIAVGTTSMRAIETVADQYGVVHAGEGWTDLVITPRRGLRVVNGLLTGFHEPQASHLALLEALAQREHLEAAYAAALQEGYLWHEFGDVHLILP

SEQ ID NO: 73170 - protein, 364 aa, Thermogemmatispora tikiterensis
  misc_feature (1)..(364): tr|A0A328VL42|A0A328VL42_9CHLR S-adenosylmethionine:tRN A ribosyltransferase-isomerase OS=Thermogemmatispora ti kiterensis OX=1825093 GN=queA PE=3 SV=1
MSDYDYELPPELIAQQPIEPRDASRLLVVHRTTGALEHRHFRDIGDYLRAGDLLIANQSRVIPARLLGKREGTGGAVEVLLLAHRADLGADTWEALVRPGRRLREGARILFGEDREAGLPARLQGEILGRTEAGGRFIRFALTPEYLAVHNQAQTRPPAVAQVIEEIGRMPLPPYIREPLANPERYQTVYARIAGSAAAPTAGLHFTPELLDRLRAQGVRVGFVTLHVGLDTFRPVDVEDVRDHKMHSEEIDIDETTAALVNETRRAGGRVVAVGTTSVRVLESVASLFNGQVRAYHGHTNLFITPGYRFKVVDALITNFHLPRSTLILLVSAFAGKALIEKAYQEAIRQRYRFYSFGDAMLLL

SEQ ID NO: 73171 - protein, 352 aa, Thermogemmatispora tikiterensis
  misc_feature (1)..(352): tr|A0A328VPH7|A0A328VPH7_9CHLR S-adenosylmethionine:tRN A ribosyltransferase-isomerase OS=Thermogemmatispora ti kiterensis OX=1825093 GN=A4R35_11170 PE=3 SV=1
MTALSFELPSQLEAGEPPEARGLARDEVRLLVSYRSDNRLVHARFRELPAFLRRGDVLVINTSGTMKAALPAERAGGEPLELHLSTCLPAGLWVVEVRLPLSRGSQPFFGLEPGEVLGLPQGGRAVLHTPYGRNSPPKAAGQLRLWVATLELPAPLETYLEHYGFPIRYGYVRQEWPIDYYRSVFVTEVGSAEMPSASRPFTPELVTRLVAEGVQFAPLLLHTGVASLEAHEPPYEEYYRVPAESAELVNAALRQGRRVIAIGTTPMRALETVADQYGVVHPGEGWTDLVITPQRGLRVVGGLLTGFHEPRASHLALLEALAGREHLERAYAAALQEGYLWHEFGDVHLILP

SEQ ID NO: 73172 - protein, 372 aa, Thermogutta terrifontis
  misc_feature (1)..(372): tr|A0A286RIG3|A0A286RIG3_9PLAN S-adenosylmethionine:tRN A ribosyltransferase-isomerase OS=Thermogutta terrifont is OX=1331910 GN=queA PE=3 SV=1
MNRTRGLLVGAPVATQIATIQGDSMIDINEYDYELPKHLIAQRPLPNRADARLMVVDRRSQTIEHRHVRDLPEILQPGDILVLNNTRVVPARLVGYRTETRGRWEGLFVEADPSGVWQVIGKTRGKLRPGETITLVNREGRDDIKLFVIGKIADGGWLVSPDTSEDTWQTLERLGRVPLPPYIRGGQMMEEDRTRYQTVYAQVPGSVAAPTAGLHFTPQLLNSLRTQGVKIVFVTLHVGLGTFVPIKTSQIEEHKMHSEWGEIAPEVAEEINAARKEGGRVVAVGTTVTRLLETAAASGELKPFAGRTDLYIRPPYQFKIVDALMTNFHLPKTTLLVLVRTFGGDELIKRAYDEAIREEYRFYSYGDAMLIL

SEQ ID NO: 73173 - protein, 342 aa, Thermohalobacter berrensis
  misc_feature (1)..(342): tr|A0A419TB21|A0A419TB21_9CLOT S-adenosylmethionine:tRN A ribosyltransferase-isomerase OS=Thermohalobacter berr ensis OX=99594 GN=queA PE=3 SV=1
MKKQDFYFELPEELIAQHPLKNREESRLMILDKENGEIEHRKFKDIINYLNPGDCLVLNDTRVIPARLFGKRKDTGGKIEFLLLTRLEDDKWEILVKPGKRAKIGTEFVFGDGLLEAKILGINRESGTRIAEFKYDGIFEEILDRLGKMPLPPYIKKELDDKERYQTVYSKNEGSAAAPTAGLHFTHELLEKIEKKGIEIVYITLHVGLGTFRPVKVENIKEHKMHSEYYEVSKKAAETINRIKESGGRIISVGTTTTRTLESVADDNGKVKAQKGWTDIFIYPGYKFKVVDNLITNFHLPESTLIMLVSALTGRKNILNAYNVAVKENYRFFSFGDAMFIK

SEQ ID NO: 73174 - protein, 341 aa, Thermohydrogenium kirishiense
  misc_feature (1)..(341): tr|A0A4V2W9H7|A0A4V2W9H7_9FIRM S-adenosylmethionine:tRN A ribosyltransferase-isomerase OS=Thermohydrogenium kir ishiense OX=937254 GN=queA PE=3 SV=1
MNLHEFYYDLPEELIAQEPLKNRDESRLMILNRLTGEIKHDIFKNIISYLNPNDVLVLNDTKVIPARLIGVREDTGGKIEFVLLKRLSSDEWEILVKPGRRAKIGSKFIFGNGELKAEVISNTDVGGRIVRFSYEGIFEEVLDKLGEMPVPPYIKKKLEDKNMYQTVYAKHEGSAAAPTAGLHFTNKLLDDIRKYGVKTVFVTLHVGLGTFRPVKEEVIEKHKMHSEFYTVTEEAAQAINTARESGGRIISVGTTSTRTLETVADENGIIHAGSGWTDIFIYPGYKYKAIDGIITNFHLPESTLIMMISAFAGKENVMNAYKTAIDHKYRFYSFGDAMLII

SEQ ID NO: 73175 - protein, 333 aa, Thermoleophilia bacterium
  misc_feature (1)..(333): tr|A0A2G4H4L4|A0A2G4H4L4_9ACTN S-adenosylmethionine:tRN A ribosyltransferase-isomerase OS=Thermoleophilia bacte rium OX=2026888 GN=queA PE=3 SV=1
MRLSELDYELPEELIAQAPLEPRDASRLLIVDRATATLEDAVFSDLPGLLRADDLVVLNSTRVRAARLSVTRATGGAAEVLLLEPQGDAWQALVRPARKLKPGARLAGNGLEVEIVEVGEAGEAIVRLHAEGSIDAAIEQAGVMPLPPYIRATVDDAERYQTVYARTIGSAAAPTAGLHFTPALLERVRATCEVVDVDLHVGLDTFRPVTVDSLEQHEMHSEWYSVDPSVRRSIASALTEGRRVVAIGTTTTRVLETIADPLAPDAGRTSILLQPGVSFRTVGALVTNFHLPRSTLLALVMGLAGESLIRDAYAHAVNTRYRFYSFGDAMVIL

SEQ ID NO: 73176 - protein, 343 aa, Thermolongibacillus altinsuensis
  misc_feature (1)..(343): tr|A0A4R1QG66|A0A4R1QG66_9BACI S-adenosylmethionine:tRN A ribosyltransferase-isomerase OS=Thermolongibacillus a ltinsuensis OX=575256 GN=queA PE=3 SV=1
MKVDLFDFHLPEELIAQTPLPNREASRLMVLNKRTGETKHEETFRAILSYLNEGDCLVLNDTRVLPARLYGEKEDTGAHIEVLLLKQLEGDRWETLVKPAKRVKVGTTLSFGDGRLKATCVEALEHGGRVLEFAYDGIFYEVLEALGEMPLPPYIKEQLDDRERYQTVYARELGSAAAPTAGLHFTEQLLDDIRAKGVHIAFITLHVGLGTFRPVSAENVEEHDMHAEFYQMTEGTARLLNEVKQRGGRIIAVGTTSTRTLETIASKHNGTFVAESGWTDIFIYPGYEFKAIDGMVTNFHLPKSTLIMLVSALAGRENVLRAYEEAVKERYRFFSFGDAMLII

SEQ ID NO: 73177 - protein, 353 aa, Thermomicrobium roseum
  misc_feature (1)..(353): tr|B9KZ08|B9KZ08_THERP S-adenosylmethionine:tRNA ribosy ltransferase-isomerase OS=Thermomicrobium roseum (strai n ATCC 27502 / DSM 5159 / P-2) OX=309801 GN=queA PE=3 S V=1
MLEEAALSLHEYDYELPEELIAQEPIEPRDAARLMVVRRATHSIEHRIFRELPSLLDPGDLLIVNDSRVLPARLLGHRLTGGKVEILLVQPLEGTTVWLALARPARKLRPGETITIQPRDPQFAQPAPLRIRERRSGGQVIVELDPGIAERLDAFGHVPLPPYIHRPLSDPERYQTVYARHPGSVAAPTAGLHFTERLLDELRQRGIRIAPLTLHVGIGTFKPIEVTDVRLHKMHAEWYAVPAETVSLIRETRAANRRIVAVGTTAARTLESIADALTGDTEGPITGWTDLYIYPGYHWRVVDALITNFHLPRSTLILLVASFAGRELILEAYREAVQQRYRFYSFGDAMLIL

SEQ ID NO: 73178 - protein, 348 aa, Thermomonas haemolytica
  misc_feature (1)..(348): tr|A0A4R3MYT8|A0A4R3MYT8_9GAMM S-adenosylmethionine:tRN A ribosyltransferase-isomerase OS=Thermomonas haemolyti ca OX=141949 GN=queA PE=3 SV=1
MPLKTSDFHYDLPPELIAQAPLAERSASRLLHVPPGAAPFADLHVRDLPSLLQPGDLLVFNDTRVIPARLFGAKATGGRVEILIERLLPDNAARAQLGVSKPPQVGSRIALDAGGEAEVVARFDDGFWELRFHVDGALADWLQHAGQLPLPPYIERQPNRADAERYQTVFAREAGAVAAPTAGLHFDAPLLEALHTRGIGIGHITLHVGAGTFQPVRVHDVHAHRMHSEWINVGAELVEKVRRTRAAGGRVIAVGTTVVRALETAMVGDALQPFAGDTSIFIFPGYRIRSIDALLTNFHLPESTLLMLVSAFAGKARIFAAYEHAVRQRYRFFSYGDAMLLWPQEAGA

SEQ ID NO: 73179 - protein, 346 aa, Thermomonas hydrothermalis
  misc_feature (1)..(346): tr|A0A1M4UDA7|A0A1M4UDA7_9GAMM S-adenosylmethionine:tRN A ribosyltransferase-isomerase OS=Thermomonas hydrother malis OX=213588 GN=queA PE=3 SV=1
MKTTDFHYHLPPELIAQAPLPERSASRLLHVPPGTAPLQDLHVRDLPALLRPGDLLVFNDTRVIPARLFGTKPTGGRVEILIERLLPGDEARVQLGVSKPPKPGSRILLQAGGEAEVLAREDDGFWQLRFHVEGRLEDWLQRAGQMPLPPYIQRAPEPADHERYQTVFAREAGAVAAPTAGLHFDAPLLAALRAHGIETGQITLHVGAGTFQPVRVEDVRQHHMHSEWINVSAELVAQWQRTRAAGGRVIAVGTTVVRALESAMVAGELRPFSGDTDIFIYPGYHIRSIDALMTNFHLPESTLLMLVSAFAGKARVFAAYEHAVRQRYRFFSYGDAMLLWPQEAGA

SEQ ID NO: 73180 - protein, 385 aa, Thermomonas sp.
  misc_feature (1)..(385): tr|A0A5B7ZSV5|A0A5B7ZSV5_9GAMM S-adenosylmethionine:tRN A ribosyltransferase-isomerase OS=Thermomonas sp. SY21 OX=2202149 GN=queA PE=3 SV=1
MRSARSTGWSAPLPRSSSRPSSSVDAGRYNARPACVSLPLKKSDFHFELPAELIAQAPLPERSASRLLLVPPGDAAFADLGVRDLPTLLQPGDLLVFNDTRVIPARLFGNKATGGRVEILIERLLPGNEARAQLGVSKSPQLGSRIALDAGGVAEVLSRDEAGFWQLRFHVAEPLENWLLHAGRLPLPPYIQREPGADDAERYQTVFAREIGAVAAPTAGLHFDDALLDAFRARGVQFGHVTLHVGAGTFQPMRVDDIREHRMHSEWINVGAELVQQVRRTRAAGGRVVAVGTTVLRALESALVDGELQPFAGETNIFIFPGYRIRSIDALMTNFHLPESTLLMLVSAFAGKERVFAAYEHAVRERYRFFSYGDAMLLFPAQGQA

SEQ ID NO: 73181 - protein, 401 aa, Thermophagus xiamenensis
  misc_feature (1)..(401): tr|A0A1I2AYM9|A0A1I2AYM9_9BACT S-adenosylmethionine:tRN A ribosyltransferase-isomerase OS=Thermophagus xiamenen sis OX=385682 GN=queA PE=3 SV=1
MDISIKNFDYDLPEERIAKYPLPERDQSKLLYYKEGKISDHVFSQLPELLPANTMMIFNNTKVIRARLPFKKSTGARIEIFCLEPIEPFELTSAFAQNKEVVWNCMVGNLKKWKEGPLETIIQNGQAPIHLSAEKVNKTQEGFAIRFKWNNPNFTFSELMDYMGKTPIPPYLNRDSEEIDTVRYQTVYSKEKGSVAAPTAGLHFTDNVINRMKKNGVSIQTLTLHVGAGTFRPVKSENVADHEMHTEHFRISLETLKNIQRHKGIRIAVGTTSLRTLESLYWAGVLCHLNQPFHHIGQWTPYHLKSNLRFEEALENLIESTERSGKTHFEGSTAIIIAPGYQIKSIDAIVTNFHQPKSTLLLLIAALVGDEWKRIYSHALKNNYRFLSYGDSSLLWKSSLL

SEQ ID NO: 73182 - protein, 349 aa, Thermophagus xiamenensis
  misc_feature (1)..(349): tr|A0A1I2D0T3|A0A1I2D0T3_9BACT S-adenosylmethionine:tRN A ribosyltransferase-isomerase OS=Thermophagus xiamenen sis OX=385682 GN=queA PE=3 SV=1
MKLSKFKYKLPEELIALHPAPNRDESRLMVVHKSTGKIEHKIFKDIIDYFDEKDVLIFNDTKVFPARLYGKKEKTGAEIEVFLLRELNKDQRLWDVLVDPARKIRIGNKLYFGDNDALVAEVIDNTTSRGRTLRFLFDGSYDEFKKTLYSLGETPLPKFIKRKVEPEDRERYQTIFAKHEGAVAAPTAGMHFSRELLKRFEIKGIDFAFITLHVGLGSFRSVDVEDLTKHKMDSEQIFISEEAAKIINNAKDQRKRICAVGTTVMRTIESSVSTNGHVNPFEGWTNKFIFPPYDFNVADAMVSNFHLPYSTLLMMVAAFGGYDLVMKAYKTAVKEKYRFGTYGDAMLII

SEQ ID NO: 73183 - protein, 341 aa, Thermosediminibacter oceani
  misc_feature (1)..(341): tr|D9RXQ8|D9RXQ8_THEOJ S-adenosylmethionine:tRNA ribosy ltransferase-isomerase OS=Thermosediminibacter oceani ( strain ATCC BAA-1034 / DSM 16646 / JW/IW-1228P) OX=5550 79 GN=queA PE=3 SV=1
MDVKDFYYELPEELIAQEPLEKRDTSRLMVVKRDTRIFEHRIFENITEYLEEGDCLVLNDTRVMPARLLGVKEDTGGKIEFVLLKRIKENTWEVLVKPGRRARIGSVFVFGDGRLRAKVLDFTDAGGRIVEFYYDGIFEQVLDELGQMPVPPYIKKELKDKERYQTVYARNPGSAAAPTAGLHFTEELLRKIEQNGVKICYITLHVGLGTFRPVKVRNIEEHKMHHEYFEVGSHAAETINRAKESGKRVIAVGTTSTRTLETVADQNGFVKSGSGWTDLFIYPGYRFKVVDGMVTNFHLPESTLLMLVSAFAGRDLIMAAYREAIDKRYRFYSFGDAMLII

SEQ ID NO: 73184 - protein, 339 aa, Thermosinus carboxydivorans
  misc_feature (1)..(339): tr|A1HT79|A1HT79_9FIRM S-adenosylmethionine:tRNA ribosy ltransferase-isomerase OS=Thermosinus carboxydivorans N or1 OX=401526 GN=queA PE=3 SV=1
MLVTDFDYYLPEELIAQQPCEPRDHSRLLVLDRRTGNIEHRRFYNLPDYLQPGDTLVFNNTKVIPARLIGAKAGTGGKIEVFLLNRLTSDEWETLVKPGKRARPGTQVVFGDELSCEILASTDYGGRIVRFNYSGVFEDILDRLGETPLPPYIKTRLADKDRYQTVYAKERGSAAAPTAGLHFTPELLDRIKAKGINLAFITLHVGLGTFRPVTVSNITQHTMHREYYSVSPETAALINQTKQAGGRIIAVGTTAVRTLETVGAGGFVESGSGWTDIFIYPGYRFKIVDALVTNFHLPQSTLLMLVSALAGRENIMNAYHVAVREKYRFFSFGDAMLIL

SEQ ID NO: 73185 - protein, 335 aa, Thermosipho africanus
  misc_feature (1)..(335): tr|A0A3D1PYY9|A0A3D1PYY9_9BACT S-adenosylmethionine:tRN A ribosyltransferase-isomerase OS=Thermosipho africanus OX=2421 GN=queA PE=3 SV=1
MKLSDFDYYLPEELIAQTPADPRDSSRLMVLNRKEKTIEHRIFRDIVEYLSPGDLLVRNITKVIPARLHGVKETGARVEILLLEKISEGVWEALVKPGSKVKKGTKIILSEGIEVICKDYSQQGARILEFNCSDDKLFELGNAPLPPYIKNQKVPFERYQTVYSKETGSVAAPTAGLHFTEELLERLRNKGVEFADLILHVGLGTFRPVKVEDIREHKMHSERYYVPAETVKKIRETRKNKGRIIAVGTTSVRTLETIARLPNQESYHGKTDIFIYPPFEFKLTDAIITNFHLPKSTLLMLVSAFAGKDFILEAYNTAVKMKYRFFSLGDACFIY

SEQ ID NO: 73186 - protein, 335 aa, Thermosipho africanus
  misc_feature (1)..(335): sp|B7IFB4|QUEA_THEAB S-adenosylmethionine:tRNA ribosylt ransferase-isomerase OS=Thermosipho africanus (strain T CF52B) OX=484019 GN=queA PE=3 SV=1
MKLSDFDYYLPEELIAQTPAEPRDSSRLMVLNRKEKTIEHRIFRDIVEYLKPGDLLVRNITKVIPARLYGVKETGARVEILLLEKISEGVWEALVKPGSKVKKGTKIILSEGVEVICKDYSQQGARILEFNCSDDKLFELGNAPLPPYIKNQKVPFERYQTVYSKETGSVAAPTAGLHFTEELLERLRNKGLEFADLILHVGLGTFRPVKVEDIREHKMHSERYYVPAETVKKIRETRKNKGRIIAVGTTSVRTLETIARLPNQESYHGKTDIFIYPPFEFKLTDAIITNFHLPKSTLLMLVAAFAGKDFILEAYNTAVKMKYRFFSLGDACFIY

SEQ ID NO: 73187 - protein, 336 aa, Thermosipho atlanticus
  misc_feature (1)..(336): tr|A0A1M5SDR2|A0A1M5SDR2_9BACT S-adenosylmethionine:tRN A ribosyltransferase-isomerase OS=Thermosipho atlanticu s DSM 15807 OX=1123380 GN=queA PE=3 SV=1
MNIKDFDYLLPEELIAQKPIEPRDSSRLMVLNREKRVIEHKIFRDIINYLGEGDLLIRNVTKVIPARLYGRKITGAKIELLLLEKIDKGIWEALVKPGSKVKKGTKIIFGEDLEAICRGWGEEGSRIIEFNTDNEEDIFKYGKAPFPHYIKNENISFERYQTVYSKEIGSVAAPTAGLHFTKGLLQKLKSKGVVFADVVLHVGLGTFRPVKVENIENHKMHSETYYVPKETVKKIKEFKKNKGRIIAVGTTSVRTLETIARLPEQEHYHGKTDIFIYPPFEFRLTDAIITNFHLPKSTLLMLVSAFAGREFILEAYKIAVQEKYRFFSFGDACFIY

SEQ ID NO: 73188 - protein, 334 aa, Thermosipho melanesiensis
  misc_feature (1)..(334): sp|A6LJ38|QUEA_THEM4 S-adenosylmethionine:tRNA ribosylt ransferase-isomerase OS=Thermosipho melanesiensis (stra in DSM 12029 / CIP 104789 / BI429) OX=391009 GN=queA PE =3 SV=1
MKLSDFDYYLPEELIAQKPVEPRDASRLMVLNRKEKKIEHKIFRNIVEYLHEGDLLVRNVTKVIPARIYGRKETGAKIEVLLLEKISENVWEALVKPGSKVKKGTKIYFDDESYCVCLDWGDEGSRILEFNITEEELFKLGEAPLPPYVKNKVSFERYQTIYSRETGSVAAPTAGLHFTEDLLKKLEEKGVEFADLVLHVGLGTFRPVKVENITEHKMHSESYYVPNETVKKIFETKKNGGRIVAVGTTSVRTLETIVRLERKESYHGKTDIFIYPPFEFKLVDALITNFHLPKSTLLMLVSAFAGREFIMEAYNIAVKMKYRFFSFGNACFIY

SEQ ID NO: 73189 - protein, 334 aa, Thermosipho sp.
  misc_feature (1)..(334): tr|A0A1L7BDI5|A0A1L7BDI5_9BACT S-adenosylmethionine:tRN A ribosyltransferase-isomerase OS=Thermosipho sp. 1063 OX=1462747 GN=queA PE=3 SV=1
MNVSNFDYFLPEELIAQSPVEPRDSSRLMVLNRRTREIEHKIFRDIIEYLKEGDLLVRNVTKVIPARLYGKKATGAKIEILLLEKISEGVWEALVKPGSKVKKGTKIYFDDDRYCICKDWAQEGARILEFNFSDDDLFRLGMAPLPPYIKNQIPFERYQTIYSREKGSVAAPTAGLHFTDELLEKIKENGVEFADLVLHVGLGTFRPVKVEDVREHKMHSERYYVPKETVKKINDTRKNGGRIIAVGTTSVRTLETIARLDKKESYHGKTDIFIYPPFEFKLTDAIITNFHLPKSTLLMLVSAFAGREFILDAYNIAVKMKYRFFSLGDACFIY

SEQ ID NO: 73190 - protein, 368 aa, Thermosporothrix hazakensis
  misc_feature (1)..(368): tr|A0A326U4T8|A0A326U4T8_9CHLR S-adenosylmethionine:tRN A ribosyltransferase-isomerase OS=Thermosporothrix haza kensis OX=644383 GN=queA PE=3 SV=1
MDNNLDLKISDFDYDLPPELIAQTPVEPRDSSRLLVVNRETRALAHRHFRDIGEFLRPGDLLIANQSRVIPARLLGKRAETGGAVEILLLTERPDRGRDVWEALVRPGRRLREGARVLFEDEKQTTRLEAEILERTETGGRIVRLFIPNQTELQSDDPYRLLDVKQAIEALGHMPLPPYIHETLQDPERYQTVYARIRGSAAAPTAGLHFTPQLLERLQAQGVRVGFVTLHVGLDTFRPVETESVKDHKMHSEEIDLDEATAALINETQKAGGRVVAVGTTSVRVLESVAAVGDGKIVPYHGHTNLFITPGYRFKAVDAMITNFHLPRSTLLLLISAFMGKDLMETVYQEAIQERYRFFSFGDAMLIL

SEQ ID NO: 73191 - protein, 357 aa, Thermosporothrix hazakensis
  misc_feature (1)..(357): tr|A0A326UN15|A0A326UN15_9CHLR S-adenosylmethionine:tRN A ribosyltransferase-isomerase OS=Thermosporothrix haza kensis OX=644383 GN=EI42_02342 PE=3 SV=1
MLTSHVRPLDFLLPEELEAGEPPEARGLARDEVRLLVSSYTDNRIEHAQFRQIPQFLAPGDVVVINTSGTMNAALEAIGADGTRYELHLSTHLPADLWVVEVRIPDEHGTKPYYGMREGEVLRLAENGTAALLLPYLPEQRVQDRSQKRLWIATLHLPMSWQEYLKSYGFPIRYRYVRNAWPIEYYQTVYATEVGSAEMPSAGRAFTPELITRLVALGVQVLPLLLHTGVASLEAHEPPYEEYYRVPEETAQGVNAARQAGRRVIAVGTTVVRALETVTTPDGVTHPGEGWTQTIITPERGVRAVHGLLTGLHEPQASHLLMLEAFAPREHLKLVYAEALQKKYLWHEFGDLHLLLP

SEQ ID NO: 73192 - protein, 368 aa, Thermosporothrix sp.; identical to SEQ ID NO: 73190
  misc_feature (1)..(368): tr|A0A455SMT2|A0A455SMT2_9CHLR S-adenosylmethionine:tRN A ribosyltransferase-isomerase OS=Thermosporothrix sp. COM3 OX=2490863 GN=queA PE=3 SV=1

SEQ ID NO: 73193 - protein, 357 aa, Thermosporothrix sp.; identical to SEQ ID NO: 73191
  misc_feature (1)..(357): tr|A0A455SDK8|A0A455SDK8_9CHLR S-adenosylmethionine:tRN A ribosyltransferase-isomerase OS=Thermosporothrix sp. COM3 OX=2490863 GN=KTC_12840 PE=3 SV=1

SEQ ID NO: 73194 - protein, 334 aa, Thermostaphylospora chromogena
  misc_feature (1)..(334): tr|A0A1H1DDD7|A0A1H1DDD7_9ACTN S-adenosylmethionine:tRN A ribosyltransferase-isomerase OS=Thermostaphylospora c hromogena OX=35622 GN=SAMN04489764_1950 PE=3 SV=1
MSIDFALPPTREAHEPPEARGLARDGVRLLVTRGKTGEISHHRFTDLPDLLDPGDLLVVNNSATLPAAIHLDRLAVHFSTAREDGSWLVELRRLTPAGTEPYAGAVAGEWLPLPGRATLRLEGRETPRLWRARLDREVEPYLRRYGRPIRYSYVPREWPLSDYQTVFATVPGSAEMPSAGRPFSAELVTALVARGVGIAPITLHTGVASLENDEPPYSERYVVPAATARQVNLARESGARVVAVGTTVVRALETVATGRGVVPGEGWTSHVVTPETGVRAVTGLLTGLHEPRSSHLSMLAAIIGQEAVSSSYAEALHAGYLWHEFGDVHLLLAS

SEQ ID NO: 73195 - protein, 341 aa, Thermosulfidibacter takaii
  misc_feature (1)..(341): tr|A0A0S3QUD0|A0A0S3QUD0_THET7 S-adenosylmethionine:tRN A ribosyltransferase-isomerase OS=Thermosulfidibacter t akaii (strain DSM 17441 / JCM 13301 / NBRC 103674 / ABI 70S6) OX=1298851 GN=queA PE=3 SV=1
MKVQEFDYPLPEDLIAQYPVEPRDASRMMVLYRNEKRIKHRIFREIVDILDDSYVLILNNTKVIPARLLGQKETGAKIEVFLSKRLENDVWECLARPAKRLKVGTRIDFGQGLFGVVEEVKEEGKRIIRFFPEGLLSERLPKIGQVPLPPYIRRSPTHRDLFRYQTVFAEKNGSIAAPTAGLHFTKEVLEALKSKGVEIVYVTLHVGLGTFRPVKVENVEDHRMDEEYFEISKEAADKINRAKEKGKKILACGTTVVRTLETASDERGLVKATSGWTNLFIYPGYKFKVIDALLTNFHLPRSTLLMLVCAFAGKDFVMEAYNEAIKERYRFYSYGDCMLIL

SEQ ID NO: 73196 - protein, 353 aa, Thermosulfurimonas dismutans
  misc_feature (1)..(353): tr|A0A179D3Q5|A0A179D3Q5_9BACT S-adenosylmethionine:tRN A ribosyltransferase-isomerase OS=Thermosulfurimonas di smutans OX=999894 GN=queA PE=3 SV=1
MKPTSIEEIPEDFRLKAYHYDLPEELIAYYPSPKREESRLLVLHRQSKKIEHRKRFSEIVEYLRPGDLLVLNDTRVFPARLLGRKESGGRVEILLLRLPEAGKPVPALYRGKKLFPGYRVIFSERLSGRVLSKDPDGKIEILLEGPDDLLSALKEVGKVPLPPYIKRDPQAEDLFRYQTVYARKNGSVAAPTAGFHFSEALLAKLEAQGVRLAFITLHVGYGTFSPVKTPDIRDHRIHEEYVEIPEETVIAVEETKKHGRRVIAVGTTTVRALEWGALSGKLEPRSGWCDLYIYPGFEFRVISSMVTNFHLPGSSLLILVSAFAGRKLILSAYQEAIRRRYRFFSYGDAMFIL

SEQ ID NO: 73197 - protein, 354 aa, Thermosynechococcus elongatus
  misc_feature (1)..(354): sp|Q8DKD7|QUEA_THEEB S-adenosylmethionine:tRNA ribosylt ransferase-isomerase OS=Thermosynechococcus elongatus ( strain BP-1) OX=197221 GN=queA PE=3 SV=1
MPHPDDFSLDAYDYQLPPERIAQQPVSPRDRSRLMVVTRDTAADHYFYELPQLLAPGDLLVLNDTRVIPARLIGQKVGAAGRTVEVFLLEELSDRQWLALVKPGRKLRPGAVIQIGPLQATVQTIDEETRGRVIEFDLPPGDRLWSYLDHLGEVPLPPYIDHPLADTEQYQTVYARRPGAVAAPTAGLHFTPELFSKLADRGIDHCFLTLHVGIGTFRPVEAKDIRHHHLHEEWLEVSAATVERIQAAKAAGGRIIAVGTTVIRALETAAHSGTLQPFCGKSDLYIYPGYQPKIVEGFITNFHLPRSSLMMLVSAFIGRERLLQLYQQAIDRQYRFYSFGDAMLILPSACHNTL

SEQ ID NO: 73198 - protein, 354 aa, Thermosynechococcus sp.
  misc_feature (1)..(354): tr|A0A5C2MA36|A0A5C2MA36_9CYAN S-adenosylmethionine:tRN A ribosyltransferase-isomerase OS=Thermosynechococcus s p. CL-1 OX=2583530 GN=queA PE=3 SV=1
MPSSDDFSLDAYDYHLPPERIAQQPVSPRDHSRLMVVARDTATDHYFYELPQLLQPGDLLVLNDTRVIPARLIGQKIGGSGRTVEVFLLEELSDRQWLALVKPGRKLRPGAVIQIGTLQATVQAIDEETRGRVIEFDLPAGDRLWSYLDHLGEVPLPPYIDNPIEDTEQYQTVYARRPGAVAAPTAGLHFTPELLSKLAYHGIDHCFLTLHVGIGTFRPVEASDIRHHHLHEEWIEVPAATVERIQAAKAAGGRIIAVGTTVIRSLETAAQSGTLQPFCGKSDLYIYPGYQPKIVEGFITNFHLPRSSLMMLVSAFIGRKRLLQLYQQAIDRQYRFYSFGDAMLILPSACHNTV

SEQ ID NO: 73199 - protein, 354 aa, Thermosynechococcus sp.
  misc_feature (1)..(354): tr|V5V7Y3|V5V7Y3_9CYAN S-adenosylmethionine:tRNA ribosy ltransferase-isomerase OS=Thermosynechococcus sp. NK55a OX=1394889 GN=queA PE=3 SV=1
MPNPADFSLDAYDYSLPAERIAQQPVSPRDRSRLMVVTRNTAADHYFYELPQLLEPGDLLVLNDTRVIPARLMGQKVGGAGGTVEVFLLEELSDRQWLALVKPGRKLRPGAVIQIGSLQATVQAIDEETRGRVIEFDLPPGDRLWSYLDHLGEVPLPPYIDHPIADTEQYQTVYARRPGAVAAPTAGLHFTPELFSKLAYRGIDHCFLTLHVGIGTFRPVEAKDIRHHHLHEEWIEVPAATVERIQAAKAAGGRIIAVGTTVIRSLETAAQSGTLQPFCGKSDLYIYPGYQPKIVEGFITNFHLPRSSLMMLVSAFIGRERLLQLYQQAIDRQYRFYSFGDAMLILPSACHNTV

SEQ ID NO: 73200 - protein, 351 aa, Thermosyntropha lipolytica
  misc_feature (1)..(351): tr|A0A1M5P9J8|A0A1M5P9J8_9FIRM S-adenosylmethionine:tRN A ribosyltransferase-isomerase OS=Thermosyntropha lipol ytica DSM 11003 OX=1123382 GN=queA PE=3 SV=1
MNDKSYDIYHLKSYDYYLPEDLIAKFPVEPRDASRLLVLDRRTGRVEDKIFRDIIEYLKPGDTLVVNKTRVIPARLHGYKESGGKVEILLLKKRDEGWEALVRPAKRLRPGETVFFGEGVKVTAEIVDVSEVEGGRIIRFNNCPDDYQFIEEMGEMPLPPYIRRSAEESDKRRYQTVYAQETGSAAAPTAGLHFTEKLLYDLQAKGVNIAGIVLHVGIGTFRPVTCENIREHKMHREWYRIDEETARLLNNTRQEGRSIVAVGTTVVRTLETVYNDDYGFRAESGETEKFIYPGYKFKAVDKLITNFHLPGSSLLMLVAAFAGYENTMAAYRYAVENRYRFFSYGDAMFIK

SEQ ID NO: 73201 - protein, 341 aa, Thermotalea metallivorans
  misc_feature (1)..(341): tr|A0A140L8Z0|A0A140L8Z0_9CLOT S-adenosylmethionine:tRN A ribosyltransferase-isomerase OS=Thermotalea metallivo rans OX=520762 GN=queA PE=3 SV=1
MKTKDFYFDLPEELIAQKPLADREQSRLMVVHRKNGGIEHRIFKEIVEYFQEGDCLVLNNTKVIPARLFGVKDHSGGKVEFLLLKRIEGDRWETLVKPGKKARIGDMIVFGDGILKAKIVGYGDEGSRIVDFVYEGVFEQILDQIGMMPLPHYIKERLEDKERYQTVYAKYEGSAAAPTAGLHFTHELLNKLQERGVKIAYITLHVGLGTFRPVKTENISEHKMHAEYFEVSAETADLVNTTKKNGGRVIAVGTTSTRTLESIADDRGMIRPCADWTDIFIYPGYRFKTVDGLITNFHLPESTLVMLVSAFSSREIILHAYEEAVKNRYRFYSFGDAMLIV

SEQ ID NO: 73202 - protein, 335 aa, Thermotoga maritima
  misc_feature (1)..(335): sp|Q9WZ44|QUEA_THEMA S-adenosylmethionine:tRNA ribosylt ransferase-isomerase OS=Thermotoga maritima (strain ATC C 43589 / MSB8 / DSM 3109 / JCM 10099) OX=243274 GN=que A PE=1 SV=1
MKVSEFDYELPPELIAQEPVEPRDASRLMVLHRKTQRIEHRIFREIIEYLEPGDLLVLNVSKVIPARLYARKKTGASIEILLIERLEEGIWKCLVRPGQKVKKGTELVIDEDLSAVCLGRGEDGTRILKFQPQDDRLIFEKGRTPLPPYIKNEVPLERYQTVYAKEEGSVAAPTAGLHFTPELIEKLKKKGVQFAEVVLHVGIGTFRPVKVEEVEKHKMHEEFYQVPKETVRKLRETRERGNRIVAVGTTTVRTLETIARLPEQEEYVGKTDLFIYPPFEFKLVDALVTNFHLPRSTLLMLVAAFAGKDFVMEAYREAVKRRYRFFSFGDAMLIL

SEQ ID NO: 73203 - protein, 335 aa, Thermotoga maritima; identical to SEQ ID NO: 73202
  misc_feature (1)..(335): tr|G4FDP6|G4FDP6_THEMA S-adenosylmethionine:tRNA ribosy ltransferase-isomerase OS=Thermotoga maritima (strain A TCC 43589 / MSB8 / DSM 3109 / JCM 10099) OX=243274 GN=q ueA PE=3 SV=1

SEQ ID NO: 73204 - protein, 335 aa, Thermotoga naphthophila
  misc_feature (1)..(335): tr|A0A117L2N7|A0A117L2N7_9THEM S-adenosylmethionine:tRN A ribosyltransferase-isomerase OS=Thermotoga naphthophi la OX=93930 GN=queA PE=3 SV=1
MKVSEFDYELPSELIAQEPVEPRDASRLMVLHRKTQRIEHRIFREIIEYLEPGDLLVLNVSKVIPARLYARKKTGASIEILLIERLEEGIWKCLVRPGQKVKKGTELVIDEDLSAVCLGRGEDGTRILKFQPQDDRLIFEKGRTPLPPYIKNEVPLERYQTVYAKEEGSVAAPTAGLHFTPELIEKLKKKGVQFAEVVLHVGIGTFRPVKVEEVEKHKMHEEFYQVTKETIKKLRETRERGNRIVAVGTTTVRTLETIARLPEQEEYVGKTDLFIYPPFEFKLVDALITNFHLPRSTLLMLVAAFAGKDFVMEAYREAVKRRYRFFSFGDAMLIL

SEQ ID NO: 73205 - protein, 335 aa, Thermotoga naphthophila
  misc_feature (1)..(335): tr|A0A3B8MYT8|A0A3B8MYT8_9THEM S-adenosylmethionine:tRN A ribosyltransferase-isomerase OS=Thermotoga naphthophi la OX=93930 GN=queA PE=3 SV=1
MKVSEFDYELPPELIAQEPVEPRDASRLMVLHRKTQRIEHRIFREIIEYLEPGDLLVLNVSKVIPARLYARKKTGASIEILLIERLEEGIWKCLVRPGQKVKKGTELVIDEDLSAVCLGRGEDGTRILKFQPQDDRLIFEKGRTPLPPYIKNEVPLERYQTVYAKEEGSVAAPTAGLHFTPELIEKLKKKGVQFAEVVLHVGIGTFRPVKVEEVEKHKMHEEFYQVTKETIKKLRETRERGNRIVAVGTTTVRTLETIARLPEQEEYVGKTDLFIYPPFEFKLVDALITNFHLPRSTLLMLVAAFAGKDFVMEAYREAVKRRYRFFSFGDAMLIL

SEQ ID NO: 73206 - protein, 337 aa, Thermotoga neapolitana
  misc_feature (1)..(337): tr|B9KB71|B9KB71_THENN S-adenosylmethionine:tRNA ribosy ltransferase-isomerase OS=Thermotoga neapolitana (strai n ATCC 49049 / DSM 4359 / NS-E) OX=309803 GN=queA PE=3 SV=1
MIMKVSEFDYELPPELIAQEPVEPRDASRLMVLHRKTKKIEHRIFREIVEYLEPGDLLVLNVSKVIPARLYAKKKTGAHIEILLLDRLEEGIWRCLVKPGQKVKKGTELLIDNNLSAVCLDRSEDGTRILEFRPKNDDLILKKGKAPLPPYIKKEVPLDRYQTVYAKENGSVAAPTAGLHFTPELIEKLKEKGVEFAEIVLHVGIGTFRPVKVEEVEKHRMHEEYYRVPREAVRKIRETKEKGKRVVAVGTTTVRTLETIARLPEQEEYAGKTDLFIYPPFEFKMVDALITNFHLPRSTLLMLVAAFAGKDFIMEAYREAVKRRYRFFSFGDAMLIL

SEQ ID NO: 73207 - protein, 335 aa, Thermotoga petrophila; identical to SEQ ID NO: 73204
  misc_feature (1)..(335): sp|A5IJK0|QUEA_THEP1 S-adenosylmethionine:tRNA ribosylt ransferase-isomerase OS=Thermotoga petrophila (strain R KU-1 / ATCC BAA-488 / DSM 13995) OX=390874 GN=queA PE=3 SV=1

SEQ ID NO: 73208 - protein, 330 aa, Thermotoga sp.; identical to SEQ ID NO: 71131
  misc_feature (1)..(330): tr|A0A101ESK4|A0A101ESK4_9THEM S-adenosylmethionine:tRN A ribosyltransferase-isomerase OS=Thermotoga sp. 50_162 7 OX=1635260 GN=queA PE=3 SV=1

SEQ ID NO: 73209 - protein, 335 aa, Thermotoga sp.; identical to SEQ ID NO: 73204
  misc_feature (1)..(335): sp|B1L8S0|QUEA_THESQ S-adenosylmethionine:tRNA ribosylt ransferase-isomerase OS=Thermotoga sp. (strain RQ2) OX= 126740 GN=queA PE=3 SV=1

SEQ ID NO: 73210 - protein, 334 aa, Thermotogae bacterium
  misc_feature (1)..(334): tr|A0A3D6DAJ7|A0A3D6DAJ7_9BACT S-adenosylmethionine:tRN A ribosyltransferase-isomerase OS=Thermotogae bacterium OX=2053689 GN=queA PE=3 SV=1
MKLEEFDYDLPEELIAQKPVEPRDLSRLMVVHRKTGEIEHRVFRDIVEYLEPGDLLVFNVTRVIPARLFVRKPTGAKIEILLLEKIDARKWKCLVKPGNKVKVGNELLGETFRARCLERAEEGSRILEFDDDVEEIVDREGRTPLPPYIHEEIELERYQTVYAKVEGSVAAPTAGLHFTRELLDKLKTRGVEFAEVVLHVGIGTFRPIKSENVEEHRMHSERYFVDHKNASRIWNARKEGRRIVAVGTTSVRVLETMGIEGEKTEYEGETSLFIHPPFDFKLTDALITNFHLPRSTLLLLVSAFAGRDLVMRAYAEAVKKRYRFFSFGDACFFI

SEQ ID NO: 73211 - protein, 363 aa, Thermotogae bacterium
  misc_feature (1)..(363): tr|A0A1V6H0E6|A0A1V6H0E6_9BACT S-adenosylmethionine:tRN A ribosyltransferase-isomerase OS=Thermotogae bacterium ADurb.Bin062 OX=1852923 GN=queA PE=3 SV=1
MNLSDFDYTLPVEKIAQSPVEPRDHSRLMVINRTTRTLEHRRFYHLLDYLLPSDLLVINNTRVIPARLLGAREGGGKAEVFLLKPLRAENEKEALWNALVKPGKRIRKGTVLSFLNHRLIGQCVEHHPDGSRDILFKKNSTDEETDSGEYGSIPLKDLIFRAGSVPLPPYIHRPLSDKERYQTVYSEEEGAVAAPTAGLHFTESLIADIKGQGIEFCTLTLHVGLGTFRPLEDDGGPFAIEGHVMHAETFYVSGEEARKIERARLEKRRIIGVGTTSVRVLESLPYYEKRADGSYAGDTRLFIYPPFPFVYTDAMITNFHLPKSSLLLMVSAFASRDLMMSAYQEAIESEYRFFSFGDACLIL

SEQ ID NO: 73212 - protein, 341 aa, Thermovenabulum gondwanense
  misc_feature (1)..(341): tr|A0A161PSJ0|A0A161PSJ0_9FIRM S-adenosylmethionine:tRN A ribosyltransferase-isomerase OS=Thermovenabulum gondw anense OX=520767 GN=queA PE=3 SV=1
MDLKEFYYDLPEELIAQEPLKERDKSRLLVLKKETGEMEHKIFYEIINYMNEGDCLVLNNTKVIPARLIGEREDTRGTIEFVLLNRIKGNIWEVLVKPGRRAKLGKNFIFGDGLLKARVIDYTEAGGRIVEFSYEGIFEEILDQLGEMPVPPYIKKKLEEKDRYQTVYAKFPGSAAAPTAGLHFTAELLEKIKEKGVKIAYITLHVGLGTFRPVKVREIEKHKMHAEYYEISQETADIINNTKKEGKRLFAVGTTTTRTLETVSDPKGFVTAKKGFTDLFIYPGYKFKAIDALITNFHLPESTLIMLVCAFAGKEKVMRSYEEAVKNRYRFFSFGDAMLIV

SEQ ID NO: 73213 - protein, 343 aa, Thermovibrio ammonificans
  misc_feature (1)..(343): tr|E8T5V9|E8T5V9_THEA1 S-adenosylmethionine:tRNA ribosy ltransferase-isomerase OS=Thermovibrio ammonificans (st rain DSM 15698 / JCM 12110 / HB-1) OX=648996 GN=queA PE =3 SV=1
MKVSDFDYHLPKELIAKFPAEPRDSARLMVLHRDTGEIEHRIFRDIVDYLVPGDVLVLNDTKVIPARLLGRLSTGAKVELLLLRQVEPDLWEVMAKPAKKLKTGKELVFEGGLRGTVEGYAGEGRRLVRFRVPEGVSFMELLEQVGHVPLPPYIEREERPEDRKLYQTVFASRPGAVAAPTAGLHFTEELLERLRDKGIIIKTVTLHVGPGTFKPVKVEEVEKHQMDYEVYSVPQETALEVNRAKQEGRRIVAVGTTVVRTLESAAGEDGTVKAGEGSTNLFIYPGYRFKVVDALVTNFHLPRSTLIMLVSAFAGREKVLNAYREAVKEGYRFYSYGDAMFIV

SEQ ID NO: 73214 - protein, 343 aa, Thermovibrio guaymasensis
  misc_feature (1)..(343): tr|A0A420W5N9|A0A420W5N9_9BACT S-adenosylmethionine:tRN A ribosyltransferase-isomerase OS=Thermovibrio guaymase nsis OX=240167 GN=queA PE=3 SV=1
MKVSEFDYTLPKELIAKFPAEPRDSSRLMVLNRRTGEIEHRIFRDIKGYLKEGDVLVLNNTKVIPARLYGELPTGGKVEILLIRQVEPSVWEVMSKPARKLRPGRKVIFSPELTAEVVGYLGEGRRLLRFSYPESMDFMEILSRIGHVPLPPYVEREERPEDREKYQTVFAKEEGSVAAPTAGLHFTPELLKELEERGVIIKTVTLHVGPGTFKPVKVERVEEHKMDYETYTVPEETAEEINRAKEEGRRVIAVGTTVVRTLESVASEGGTVKSGEGITNLFIYPGYRFKVIDALITNFHLPRSTLLMLVCAFAGKEKVLNAYREAIKEGYRFYSFGDAMFIY

SEQ ID NO: 73215 - protein, 350 aa, Thermovirga lienii
  misc_feature (1)..(350): tr|G7VA61|G7VA61_THELD S-adenosylmethionine:tRNA ribosy ltransferase-isomerase OS=Thermovirga lienii (strain AT CC BAA-1197 / DSM 17291 / Cas60314) OX=580340 GN=queA P E=3 SV=1
MDISNCNLYDLSKYDYHLPEELIAQSPAEPRDSSRLLVLHRNSGEINHAVFRDLPSYLREGDVIVLNNTKVMAARLFGKKEGGTAEIEVLLLCPLSHDNLAWEALVRPGKRVKPGRKVVFPGGEKIEIAESLPSGTRRVLFEQGTDPFKMMETYGRVPLPPYIRSTDAEPDRYQTIFAERLGSAAAPTAGLHFTPKLLDELERKGVKIAHVTLHVGIGTFKPIAAKDVRQHKMHAEFCSLPDETAKLINETKRKGGKIVAVGTTVVRTLETMVDDMGAAISGSGWTQKFIYPGYTFRIIDALITNFHLPKSTLMLLVSAFAGYENIMNAYQEAIKLRYRFYSFGDAMLII

SEQ ID NO: 73216 - protein, 345 aa, Thermus aquaticus
  misc_feature (1)..(345): tr|A0A0M9AGS3|A0A0M9AGS3_THEAQ S-adenosylmethionine:tRN A ribosyltransferase-isomerase OS=Thermus aquaticus OX= 271 GN=queA PE=3 SV=1
MAGLEAYDYHLPPELIAQEGVEPRDLARMMVVYREGPFRVAHRRVRDLPEFLRPGDLLVFNESKVIPARLLARKPTGGRVEVLLVRERAPGLWEALLGPARRAPVGTELSFLSPRDWRPVPGLKAEVVGVEADGVRLLQIQGDLLAHLEEVGEVPLPPYIKAQIPLERYQTVYAKRPGSVAAPTAGLHFTPELLERLREMGVELHFLTLHVGPGTFRPVKGDPEKHAMHPEPYEIPEAAALAVNRAKAEGRRVIAVGTTVVRALESAYREGKGVAAGAGETRLFIRPPYAFKVIDGLFTNFHLPRSTLLMLVAAFLGYERTMEAYRLAVEEGYRFYSLGDAMLIL

SEQ ID NO: 73217 - protein, 345 aa, Thermus aquaticus
  misc_feature (1)..(345): tr|B7A7I9|B7A7I9_THEAQ S-adenosylmethionine:tRNA ribosy ltransferase-isomerase OS=Thermus aquaticus Y51MC23 OX= 498848 GN=queA PE=3 SV=1
MAGLEAYDYHLPPERIAQEGVEPRDLARMMVVYREGPFRVAHRRVRDLPEFLRPGDLLVFNESKVIPARLLARKPTGGRVEVLLVQERAPGLWEALLGPARRAPVGTELFFLSPRDWRPVPGLKAEVVGVEADGVRLLQIQGDLLAHLEEVGEVPLPPYIKAQIPLERYQTVYAKRPGSVAAPTAGLHFTPELMERLRGMGVELHFLTLHVGPGTFRPVKGDPEKHAMHAEPYEIPEATALAVNRAKAEGRRVIAVGTTVVRALESAYREGEGVAAGAGETRLFIRPPYAFKVIDGLFTNFHLPRSTLLMLVAAFLGYERTMEAYRLAVEEGYRFYSLGDAMLIL

SEQ ID NO: 73218 - protein, 345 aa, Thermus arciformis
  misc_feature (1)..(345): tr|A0A1G7KBT9|A0A1G7KBT9_9DEIN S-adenosylmethionine:tRN A ribosyltransferase-isomerase OS=Thermus arciformis OX =482827 GN=queA PE=3 SV=1
MEGLEAYDYHLPPERIAQEGVEPRDMARLMVVYREGPFRVAHKRVRDLPEFLRRGDVLVFNESKVIPARLLARKPTGGKVEVLLVRERSPGLWEALLGPARKAPPGTRLLLLSPKDLAPVPGLEAEVVGVEEDGVRLLRFQGDLIAHLEEVGEVPLPPYIKAKIPMERYQTVYAKRPGSVAAPTAGLHFTPELLERLRGMGVELRFLTLHVGPGTFRPVKGDPERHAMHAEPYAIPEEVAEAVNRAKAEGRRVVAVGTTVVRALESAYREGEGVVAGEGETRLFIRPPYAFKVVDALFTNFHLPRSTLLMLVAAFLGRERTLKAYRLAVEEGYRFYSLGDAMLIL

SEQ ID NO: 73219 - protein, 349 aa, Thermus brockianus
  misc_feature (1)..(349): tr|A0A1J0LSP6|A0A1J0LSP6_THEBO S-adenosylmethionine:tRN A ribosyltransferase-isomerase OS=Thermus brockianus OX =56956 GN=queA PE=3 SV=1
MTELDLYDYHLPPEQIAQAGAEPRDAARMMVVYREGPFRVEHRQVRDLPEFLRPGDVLVFNESKVIPARLLAQKPTGGRVEVLLVREKAPGLWEALLGPARRAPVGTRLRLLSPKDLRPVEGLEAEVVGVEPDGVRLLRFQGDLSAHLQAVGEVPLPPYIKAQIPLERYQTVYAKRPGSVAAPTAGLHFTPELLARLEAMGVELRFLTLHVGPGTFRPVKGDVEKHEMHAEPFEIPEATALAVNRARAEGRRVVAVGTTVVRALESAFREGEGVVPGEGETRLFIRPPYTFRAIDALFTNFHLPRSTLLMLVAAFLGRERTLAAYRLAVAEGYRFYSLGDAMLILPKAP

SEQ ID NO: 73220 - protein, 342 aa, Thermus filiformis
  misc_feature (1)..(342): tr|A0A0D6XB34|A0A0D6XB34_THEFI S-adenosylmethionine:tRN A ribosyltransferase-isomerase OS=Thermus filiformis OX =276 GN=queA PE=3 SV=1
MAEYHYELPPELIAQEGVEPRDLARMLVVPREGPFRPLHRKVRDLPDFLRPGDVLVFNESKVIPARLLARKPTGGRVEVLLVREKAPGLWEALLGPARKAPVGTRLALLSPKDLSPVPGLSAEVVGVEPDGVRLLRFQGDLLAHLEAVGEVPLPPYIKARVPLERYQTVYARRPGSVAAPTAGLHFTPELLERLRGMGVELHFLTLHVGPGTFRPVKGDPEKHEMHAEPYEVPEGTARAVNRAKEEGRRVIAVGTTVVRALESAYREGEGVLAGAGETRLFIRPPYAFRVIDGLFTNFHLPGSTLLMLVAAFLGRERTLEAYRLAVQERYRFYSLGDAMLIL

SEQ ID NO: 73221 - protein, 344 aa, Thermus oshimai
  misc_feature (1)..(344): tr|K7RHS3|K7RHS3_THEOS S-adenosylmethionine:tRNA ribosy ltransferase-isomerase OS=Thermus oshimai JL-2 OX=75194 5 GN=queA PE=3 SV=1
MSLEAYDYPLPPELIAQEGAEPRDMARMMVLFREGPFRAEHRRVRDLPLYLRPGDVLVFNESKVIPARLLAQKPTGGRVEVLLVRERAPGLWEALLGPARKAPPGTRLRFLSPRDLAPVEGLFAEVVGVEGDGVRLLRFQGDLQAHLEEVGEVPLPPYIKAKVPLERYQTVYAKRPGSVAAPTAGLHFTPGLLERLKGMGVELHFLTLHVGPGTFRPVKGDPERHEMHAEPYEIPEATAEAIHRAKREGRRVVAVGTTVVRALESAWREGEGVVPGAGETRLFIRPPYAFKAIDALFTNFHLPRSTLLMLVAAFLGYERTMAAYRLAVAERYRFYSLGDAMLIL

SEQ ID NO: 73222 - protein, 345 aa, Thermus parvatiensis
  misc_feature (1)..(345): tr|A0A0X8D808|A0A0X8D808_9DEIN S-adenosylmethionine:tRN A ribosyltransferase-isomerase OS=Thermus parvatiensis OX=456163 GN=queA PE=3 SV=1
MEGLEAYDYHLPPEQIAQEGVEPRDMARMMVVYREGPFRVAHKRVRDLPEFLRPGDVLVFNESKVIPARLLARKPTGGKVEILLVRERSPGLWEALLGPARKAPPGTRLLLLSPKDLAPVPGLQAEVVAVEEDGVRLLRFQGDLVAHLEEVGEVPLPPYIKAKIPMERYQTVYARRPGSVAAPTAGLHFTPELLERLREMGVELRFLTLHVGPGTFRPVKGDPEKHEMHAEPYAIPEEVAEAVNRAKAEGRRVVAVGTTVVRALESAYREGVGVVAGEGETRLFIRPPYTFKVVDALFTNFHLPRSTLLMLVAAFLGRERTLEAYRLAVAEGYRFYSLGDAMLIL

SEQ ID NO: 73223 - protein, 344 aa, Thermus scotoductus
  misc_feature (1)..(344): tr|E8PJQ7|E8PJQ7_THESS S-adenosylmethionine:tRNA ribosy ltransferase-isomerase OS=Thermus scotoductus (strain A TCC 700910 / SA-01) OX=743525 GN=queA PE=3 SV=1
MSLEAYDYFLPQELIAQEGVEPRDRARMLVVHRKGPFRAEHRQVRDLPEYLHPGDVLVFNESKVIPARLLAQRPMGGRVEVLLVRERAPGLWEALVGPGRKAKPGTRLRFLSPRDLRVVPDLEAEVVGVEEDGVRLLRFQGDLMAHLEEVGEVPLPPYIKAKIPPERYQTVYARRPGSVAAPTAGLHFTPELLARLRGMGVELRFLTLHVGPGTFRPVKGDPEKHEMHPEPYEIPEETAEAINRAKKEGRRVVAVGTTVVRALESAFREGIGVVPGMGETRLFIRPPYAFQVIDALFTNFHLPRSTLLMLVAAFLGYEKTMEAYRLAVAERYRFYSLGDAMLIL

SEQ ID NO: 73224 - protein, 74 aa, Thermus scotoductus
  misc_feature (1)..(74): tr|A0A430UXM4|A0A430UXM4_THESC S-adenosylmethionine:tRN A ribosyltransferase-isomerase (Fragment) OS=Thermus sc otoductus OX=37636 GN=CSW23_11625 PE=3 SV=1
IGVVPGMGETRLFIRPPYAFQVIDALFTNFHLPRSTLLMLVAAFLGYEKTMEAYRLAVAERYRFYSLGDAMLIL

SEQ ID NO: 73225 - protein, 344 aa, Thermus sp.
  misc_feature (1)..(344): tr|W2U3M1|W2U3M1_9DEIN S-adenosylmethionine:tRNA ribosy ltransferase-isomerase OS=Thermus sp. NMX2.A1 OX=570924 GN=queA PE=3 SV=1
MSLEAYDYFLPEELIAQEGVEPRDRARMLVVHREGPFRAEHRQVRDLPEYLRPGDVLVFNESKVIPARLLAQRPTGGRVEVLLVRERTPGLWEALVGPGRKAKPGTRLRFLSPRDLRVVPDLEAEVVGVEEDGVRLLRFQGDLMAHLEEVGEVPLPPYIKARIPPERYQTVYARRPGSVAAPTAGLHFTPELLARLRGMGVELRFLTLHVGPGTFRPVKGDPEKHEMHPEPYEIPEETAEAINRAKKEGRRVVAVGTTVVRALESAFREGIGVVPGMGETRLFIRPPYAFQVIDALFTNFHLPRSTLLMLVAAFLGYEKTMEAYRLAVAERYRFYSLGDAMLIL

SEQ ID NO: 73226 - protein, 351 aa, Thermus sp.
  misc_feature (1)..(351): tr|A0A0B0SCP8|A0A0B0SCP8_9DEIN S-adenosylmethionine:tRN A ribosyltransferase-isomerase OS=Thermus sp. 2.9 OX=15 77051 GN=queA PE=3 SV=1
MSELDLYDYHLPPEQIAQAGVEPRDAARMMVVYREGPFRVDHRRVRDLPAFLRPGDVLVFNESKVIPARLLAQKPTGGRVEILLVREKAPGLWEALLGPARRAPVGTRLALLSPKDLGPVEGLEAEVVGVEPDGVRLLRFQGDLAAHLEAVGEVPLPPYIKAQIPLERYQTVYAKRPGSVAAPTAGLHFTPELLDRLAAMGVELCFLTLHVGPGTFRPIKGEVEKHEMHAEPFEIPEATAVAVNRARAEGRRVVAVGTTVVRALESAWHEGEGVVPGAGETRLFIRPPYTFRAIDALFTNFHLPRSTLLMLVAAFLGRERTLEAYRLAVAEGYRFYSLGDAMLILPRPEGA

SEQ ID NO: 73227 - protein, 344 aa, Thermus tengchongensis
  misc_feature (1)..(344): tr|A0A4Y9F8P6|A0A4Y9F8P6_9DEIN S-adenosylmethionine:tRN A ribosyltransferase-isomerase OS=Thermus tengchongensi s OX=1214928 GN=queA PE=3 SV=1
MSLEAYDYFLPEELIAQEGVEPRDAARMLVVYREGLFRAEHRQVRDLPEYLRPGDVLVFNESKVIPARLLAQRPTGGRVEVLLVRERTPGLWEALVGPGRKAKPGTRLRFLSPRDLRVVPDLEAEVVGVEEGGVRLLRFQGDLMAHLEEVGEVPLPPYIKTKIPPERYQTVYAKRPGSVAAPTAGLHFTPELLSRLRGMGVELRFLSLHVGPGTFRPVKGDPEEHEMHPEPYEIPEETAEAINRAKEEARRVVAVGTTVVRALESAYREGVGVVAGGGETRLFIRPPYTFRVIDGLFTNFHLPRSTLIMLVAAFLGYERTMEAYRLAVAERYRFYSLGDAMLIL

SEQ ID NO: 73228 - protein, 344 aa, Thermus tengchongensis
  misc_feature (1)..(344): tr|A0A4Y9EYM5|A0A4Y9EYM5_9DEIN S-adenosylmethionine:tRN A ribosyltransferase-isomerase OS=Thermus tengchongensi s OX=1214928 GN=queA PE=3 SV=1
MSLEAYDYFLPEELIAQEGVEPRDAARMLVVYREGLFRAEHRQVRDLPEYLRPGDVLVFNESKVIPARLLAQRPTGGRVEVLLVRERTPGLWEALVGPGRKAKPGTRLRFLSPRDLRVVPHLEAEVVGVEEGGVRVLRFQGDLMAHLEEVGEVPLPPYIKTKIPPERYQTVYAKRPGSVAAPTAGLHFTPELLSRLRGMGVELRFLSLHVGPGTFRPVKGDPEEHEMHPEPYEIPEETAEAINRAKEEGRRVVAVGTTVVRALESAFREGMGVVPGMGETRLFIRPPYAFRVIDGLFTNFHLPRSTLIMLVAAFLGYERTMEAYRLAVAERYRFYSLGDAMLIL

SEQ ID NO: 73229 - protein, 345 aa, Thermus thermophilus
  misc_feature (1)..(345): sp|Q72JS5|QUEA_THET2 S-adenosylmethionine:tRNA ribosylt ransferase-isomerase OS=Thermus thermophilus (strain HB 27 / ATCC BAA-163 / DSM 7039) OX=262724 GN=queA PE=1 SV =1
MEGLEAYDYHLPPEQIAQEGVEPRDMARLMVVYREGPFRVAHKRVRDLPEFLRPGDVLVFNESKVIPARLLARKPTGGKVEILLVRERSPGLWEALLGPARKAPPGTRLLLLSPKDLAPVPGLQAEVVAVEEDGVRLLRFQGDLVAHLEEVGEVPLPPYIKAKIPMERYQTVYARRPGSVAAPTAGLHFTPELLERLREMGVELRFLTLHVGPGTFRPVKGDPEKHEMHAEPYAIPEEVAEAVNRAKAEGRRVVAVGTTVVRALESAYREGVGVVAGEGETRLFIRPPYTFKVVDALFTNFHLPRSTLLMLVAAFLGRERTLEAYRLAVAEGYRFYSLGDAMLIL

SEQ ID NO: 73230 - protein, 345 aa, Thermus thermophilus
  misc_feature (1)..(345): tr|F6DGX0|F6DGX0_THETG S-adenosylmethionine:tRNA ribosy ltransferase-isomerase OS=Thermus thermophilus (strain SG0.5JP17-16) OX=762633 GN=queA PE=3 SV=1
MEGLEAYDYHLPPEQIAQEGVEPRDMARLMVVYREGPFRVAHRRVRDLPEFLRPGDVLVFNESKVIPARLLARKPTGGKVEILLVRERSPGLWEALLGPARKAPPGTRLLLLSPKNLAPVPGLQAEVVAVEEDGVRLLRFQGDLAAHLEEVGEVPLPPYIKAKIPMERYQTVYARRPGSVAAPTAGLHFTPELLERLREMGVELRFLTLHVGPGTFRPVKGDPEKHEMHAEPYAIPEEVAEAVNRAKAEGRRVVAVGTTVVRALESAYREGVGVVAGEGETRLFIRPPYTFKVIDALFTNFHLPRSTLLMLVAAFLGRERTLEAYRLAVAEGYRFYSLGDAMLIL

SEQ ID NO: 73231 - protein, 350 aa, Thioalbus denitrificans
  misc_feature (1)..(350): tr|A0A369CH57|A0A369CH57_9GAMM S-adenosylmethionine:tRN A ribosyltransferase-isomerase OS=Thioalbus denitrifica ns OX=547122 GN=queA PE=3 SV=1
MLSSEFHFELPDDLIARYPADLRSASRLLCLEGETGSLQDRMFTDLVELLHPGDLLVFNDTRVIPARLLGEKSSGGRVEVLVERIIDARHALAHVRASKAPRPGTLLRLEGEVEVEVLGRDGALFLLYFDADRPLLELLEAVGRIPLPPYIDREVEALDRERYQTVFARRHGAVAAPTAGLHFDAALLERLAARGVESTFVTLHVGAGTFQPVRVDRIEEHVMHAEYVEVGEETCERVRAVRAHGGRVVAVGTTSVRSLETAARNGELEPFQGDTDIFIYPGYRFRAVDALITNFHLPGSTLLMLVAAFAGHDNVMTAYRHAVEQRYRFFSYGDAMFLTPQRFDDEPEPD

SEQ ID NO: 73232 - protein, 263 aa, Thioalkalivibrio denitrificans
  misc_feature (1)..(263): tr|A0A1V3NAZ3|A0A1V3NAZ3_9GAMM S-adenosylmethionine:tRN A ribosyltransferase-isomerase (Fragment) OS=Thioalkali vibrio denitrificans OX=108003 GN=B1C78_15375 PE=3 SV=1
ASKAPGEGVVLRLEEAFDARVEGREGDLFRLAFEGDLPVLDLLERHGHMPLPPYIERADGPEDRSRYQTVYASRPGAVAAPTAGLHFDEAMMERLRARGVESAHVTLHVGAGTFQPVRTQDLDAHRMHAEWLEVNARVCEQVDACRARGGRVVAVGTTAVRSLEAAAQSGALRPMTGETRLFIRPGYRFRVVDALITNFHLPESTLLMLVCAFAGYAPVMDAYRHAVAKRYRFFSYGDAMWIGAGASGKELHGNGAGKAWNSI

SEQ ID NO: 73233 - protein, 361 aa, Thioalkalivibrio halophilus
  misc_feature (1)..(361): tr|A0A1V2ZZQ0|A0A1V2ZZQ0_9GAMM S-adenosylmethionine:tRN A ribosyltransferase-isomerase OS=Thioalkalivibrio halo philus OX=252474 GN=queA PE=3 SV=1
MRVADFDYALPSELIAQDPLPERTGSRLLVLEGEEPEDAVFADIGRWLRPGDLLVLNDTRVIPARVFGQKASGGRVEVLFERVLEGGREALAMVRASRAPGIGVRLWLADGAFEVEVTRREGPFFRLSLCGEGKAGEQDLPALLHAHGQVPLPPYIERAPEQEDATRYQTVFARREGAVAAPTAGLHFDDTLLRGLRDSGVETATVTLHVGAGTFQPVKVEDTTDHEMHAEWLEVSPELCAAVARCRERGGRVVAVGTTCVRALESAAAGGELEPFTGDTRLFIQPGYPFRVVDRMITNFHLPQSTLLMLVSAFAGYRRLFAAYAHAVSQRYRFFSYGDAMWLAPGDPDDQPPSAETSDAV

SEQ ID NO: 73234 - protein, 355 aa, Thioalkalivibrio nitratireducens
  misc_feature (1)..(355): tr|L0DZX5|L0DZX5_THIND S-adenosylmethionine:tRNA ribosy ltransferase-isomerase OS=Thioalkalivibrio nitratireduc ens (strain DSM 14787 / UNIQEM 213 / ALEN2) OX=1255043 GN=queA [H] PE=3 SV=1
MRVADFDYSLPPELIAQQPLPERTGARLLVLEGGQPEDAALRDVARWLRVGDLLVLNDTRVIPARLLGFKATGGRVEVLIERIESADTALAMVRASKPPPVGTRLRLEDALDVEVLGREGMFFRLRLSNQGDFLQALQRHGHVPLPPYIQRVDRAEDRERYQTVFAARDGAVAAPTAGLHFDDAMLQNLKQRGVRISTVTLHVGAGTFQPVKVEDTDDHEMHAEYAEVGAEVCAEVAACKARGGRVVAVGTTVLRSLESAAAGGELQPFAGETRLFITPGYRFRAVDRLLTNFHLPQSTLLMLVTAFGGYRRVLDAYRHAVAQRYRFFSYGDAMWLAPGDPGDLPPSVDTNRHEV

SEQ ID NO: 73235 - protein, 355 aa, Thioalkalivibrio paradoxus
  misc_feature (1)..(355): tr|W0DKX4|W0DKX4_9GAMM S-adenosylmethionine:tRNA ribosy ltransferase-isomerase OS=Thioalkalivibrio paradoxus AR h 1 OX=713585 GN=queA PE=3 SV=1
MRVADFDYSLPPELIAQQPLPERTGARLLVLEGGQPEDAQLRDIARWLRAGDLLVLNDTRVIPARLLGFKATGGRVEVLVERIESADTVLAMVRASKSPPVGTRLRLEDALDVEVLGREGMFFRLRLSNQGDFLQALQRHGHVPLPPYIQRADRAEDRERYQTVFAARDGAVAAPTAGLHFDDAMLQDLRQRGVRISTVTLHVGAGTFQPVKVEDTDDHEMHAEYAEVGAEICADVAACKARGGRVAAVGTTVLRSLESAAAGGELQPFAGETRLFITPGYRFRVVDRLLTNFHLPQSTLLMLVTAFGGYRRVLEAYRHAVAQHYRFFSYGDAMWLAPGDPGDLPPSMDANRHEV

SEQ ID NO: 73236 - protein, 355 aa, Thioalkalivibrio sp.
  misc_feature (1)..(355): tr|D3S9V9|D3S9V9_THISK S-adenosylmethionine:tRNA ribosy ltransferase-isomerase OS=Thioalkalivibrio sp. (strain K90mix) OX=396595 GN=queA PE=3 SV=1
MRVSDFDYELPQELIAQYPLPERGSSRLLVLEDKQAEDATFGAIESLLRPGDLLVLNDTRVIPARVFGQKASGGQVEVLVERIESPTQVLAMVRASRAPKPGTRLHLADAFTVEVTDRQGPFFRLRLVDGADMLALLKQHGHIPLPPYIERADEGSDAERYQTVFARKEGAVAAPTAGLHFDDALLGRLRAQGVETATVTLHVGAGTFQPVKVDDTSRHEMHAEWLEVGPEACAAVAACKVRGGRVVAVGTTCVRSLETAAAEGELTPFQGETRLFIQPGYRFRVVDRMVTNFHLPQSTLLMLVAAFAGYRRILDAYAHAVANRYRFFSYGDAMWLAPGDPADLPPSVREEHDGV

SEQ ID NO: 73237 - protein, 361 aa, Thioalkalivibrio sp.
  misc_feature (1)..(361): tr|A0A318VNW7|A0A318VNW7_9GAMM S-adenosylmethionine:tRN A ribosyltransferase-isomerase OS=Thioalkalivibrio sp. ALE21 OX=1158175 GN=queA PE=3 SV=1
MRVADFDYALPSELIAQDPLPERTGSRLLVLEGEEPEDAVFADIGRWLRPGDLLVLNDTRVIPARVFGQKASGGRVEVLFERVLEGGREALAMVRASRAPGIGVRLWLADGAFEVEVTRREGPFFRLSLCGEGKAGEQDLPALLHAHGQVPLPPYIERAPEQEDTTRYQTVFARREGAVAAPTAGLHFDDTLLRGLRDSGVETATVTLHVGAGTFQPVKVEDTTDHEMHAEWLEVSPELCAAVARCRERGGRVVAVGTTCVRALESAAAGGELEPFTGDTRLFIQPGYPFRVVDRMITNFHLPQSTLLMLVSAFAGYRRLFAAYAHAVSQRYRFFSYGDAMWLAPGDPDDQPPSAEASDAV

SEQ ID NO: 73238 - protein, 364 aa, Thioalkalivibrio sulfidiphilus
  misc_feature (1)..(364): sp|B8GTQ5|QUEA_THISH S-adenosylmethionine:tRNA ribosylt ransferase-isomerase OS=Thioalkalivibrio sulfidiphilus (strain HL-EbGR7) OX=396588 GN=queA PE=3 SV=1
MRLSDFHYELPPELIAQRPLAERSASRLLCLDRDTGALADRRFRDLPDLLNPGDLLVFNDTRVIPARLLGVKRDTGGRVEVLVERVLDEHRVLAHVRASKSPGEGVVLWLEEALEAVVEGREGDLFCLWFAGDLPVIELLERHGHMPLPPYIERPDAAEDRDRYQTVFASRPGAVAAPTAGLHFDADIMARMRARGVETAAVTLHVGAGTFQPVRVEDVSRHVMHAEWTEVSTQVCDQVAACRARGGRVVAVGTTAVRSLESAAADGELKPFSGDTRLFITPGYTFRVVDALVTNFHLPESTLLMLVSAFAGYEPVMQAYRHAVAERYRFFSYGDAMFIGPQEASDKMQETSGRGERPRFDHEI

SEQ ID NO: 73239 - protein, 358 aa, Thioalkalivibrio versutus
  misc_feature (1)..(358): tr|A0A0G3G0Y0|A0A0G3G0Y0_9GAMM S-adenosylmethionine:tRN A ribosyltransferase-isomerase OS=Thioalkalivibrio vers utus OX=106634 GN=queA PE=3 SV=1
MRVADFDYELPPELIAQYPLPDRAGSRLLILEEERPRDARFAEIEDLLRPGDLLVLNDTRVIPARVFGCKESGGQVEVLVERIESPGQVLAMVRASRAPKVGARLRLADAFTVEVTGREGPFFRLALVDADDVLALLREHGHIPLPPYIERADEAHDADRYQTVFAAREGAVAAPTAGLHFDDALLGRLRSAGVETATVTLHVGAGTFQPVKVEDTAAHEMHAEWLEVSPEACAAVAACKARGGRVVAVGTTCVRSLETAAAGGELAPFQGETRLFIQPGDRFRVVDRMVTNFHLPQSTLLMLVAAFAGYRRILDAYAHAVAQRYRFFSYGDAMWLAPGQGDDLPPSMTTAAGESDGV

SEQ ID NO: 73240 - protein, 358 aa, Thioalkalivibrio versutus
  misc_feature (1)..(358): tr|A0A1V3BTJ7|A0A1V3BTJ7_9GAMM S-adenosylmethionine:tRN A ribosyltransferase-isomerase OS=Thioalkalivibrio vers utus OX=106634 GN=queA PE=3 SV=1
MRVADFDYELPPELIAQYPLPDRAGSRLLVLEEERPRDARFAEIEDLLRPGDLLVLNDTRVIPARVFGRKESGGQVEVLVERIESPGQVLAMVRASRAPKVGARLRLADAFTVEVTGREGPFFRLALVDADDVLALLREHGHIPLPPYIERADEAHDADRYQTVFAAREGAVAAPTAGLHFDDALLGRLRSAGVETATVTLHVGAGTFQPVKVEDTSAHEMHAEWLEVSPEACAAVAACKARGGRVVAVGTTCVRSLETAAAGGELAPFQGETRLFIQPGDRFRVVDRMVTNFHLPQSTLLMLVAAFAGYRRILDAYAHAVAQRYRFFSYGDAMWLAPGQGDDLPPSMTTAAGESDGV

SEQ ID NO: 73241 - protein, 343 aa, Thiobaca trueperi
  misc_feature (1)..(343): tr|A0A4R3N1M3|A0A4R3N1M3_9GAMM S-adenosylmethionine:tRN A ribosyltransferase-isomerase OS=Thiobaca trueperi OX= 127458 GN=queA PE=3 SV=1
MQRSDFYYDLPPELIAQRPLAERGGARMLVLDGTEDSPRDGIFSDLPRLLRPNDLLVFNNTRVMRARLFGQKATGGRVEILIERLLAPDEALAHVRASKSPRSGSIIQLADGARLMLTGREGDLFRLHAVEATFADIMSRQGHIPLPPYIQRPDDEADDSRYQTLYASREGAVAAPTAGLHFDAPMLQRLAELGVGRAEVTLHVGAGTFQPVRVDDLDRHIMHAEWLEVSEDTCERIRLTRQSGGRIIAVGTTSVRSLETAAADGELKPFRGDSRLFIRPGYRFRIVDVMLTNFHLPESTLLMLVSAFAGHDRIMHAYHHAVAKGYRFFSYGDAMFLVRRPDA

SEQ ID NO: 73242 - protein, 344 aa, Thiobacillus denitrificans
  misc_feature (1)..(344): sp|Q3SH62|QUEA_THIDA S-adenosylmethionine:tRNA ribosylt ransferase-isomerase OS=Thiobacillus denitrificans (str ain ATCC 25259) OX=292415 GN=queA PE=3 SV=1
MRVADFDFELPPDLIAQFPPDVRGASRLLHVTAAGALHDRMFRELPTLLGADDLLVMNDTRVIKARLFGEKDSGGRVELLVERVTGEFEALAFIRASHAPKPGARIRLADDVALDVLDKQHDLTRLHFPAPVLDVLDRCGRLPLPPYIEHAPTEEDEARYQTVYANEPGAVAAPTAGLHFDAAMLGTLQTQGVRTARVTLHVGAGTFQPVRVAEVADHVMHSERYTVPAATVAAIAETRARGGRVVAVGTTSLRALEAASASGSVEAGVGETAIFITPGYRFRTVDALVTNFHLPRSTLLMLVSAFSGIETIRRAYAHAIAERYRFFSYGDAMFLEKASLETPA

SEQ ID NO: 73243 - protein, 346 aa, Thiobacillus denitrificans
  misc_feature (1)..(346): tr|A0A106BW66|A0A106BW66_THIDE S-adenosylmethionine:tRN A ribosyltransferase-isomerase OS=Thiobacillus denitrif icans OX=36861 GN=queA PE=3 SV=1
MQVADFDFDLPDELIAQLPPAVRGGSRLLHVEASGTLHDRWFSKLPTLLRPNDLLVMNDTRVIKARLFGTKDSGGKVELLVERVTGEFDALAFIRASHAPKPGSSIHLSDNVAVEVLARQDDLTQLRFPRPVLEVLQQLGQLPLPPYIAHTPTADDEARYQTVYANEPGAVAAPTAGLHFDDAMLDALREQGIRTAQVTLHVGAGTFQPVRVDDIAEHRMHSERYTIPQATVDAIRETRARGGRVVAVGTTSLRALEAAALEAATQSGDLRAGASETDIFITPGYRFQVVDALITNFHLPKSTLLMLVSAFAGLDTIRAAYAHAIAERYRFFSYGDAMFLEKRPPA

SEQ ID NO: 73244 - protein, 341 aa, Thiobacillus sp.
  misc_feature (1)..(341): tr|A0A1M3HD50|A0A1M3HD50_9PROT S-adenosylmethionine:tRN A ribosyltransferase-isomerase OS=Thiobacillus sp. 65-1 059 OX=1895860 GN=queA PE=3 SV=1
MHVADFDFDLPDELIAQFPPALRGGSRLLHVEASGTLHDRRFCDLPALLRPDDLLVMNDTRVIKARLFGHKESGGKVELLVERVLDERDALAFIRASHAPRPGSRIRLADDVAAEVLARQDDLTRLRFSRPVLDVLDRLGQLPLPPYIEHTPTADDEARYQTVYANAPGAVAAPTAGLHFDAAMLDALRAQGVRTAQVTLHVGAGTFQPVRVDAIADHKMHSERYTIPDAAVAAIAETRARGGRVVAVGTTSLRALEAAAQAGKLHAGSGETDIFITPGYRFRVVDALITNFHLPKSTLLMLVSAFAGLDAIRAAYAHAVREHYRFFSYGDAMFLEKRPSE

SEQ ID NO: 73245 - protein, 341 aa, Thiobacillus sp.
  misc_feature (1)..(341): tr|A0A1E4P231|A0A1E4P231_9PROT S-adenosylmethionine:tRN A ribosyltransferase-isomerase OS=Thiobacillus sp. SCN 63-57 OX=1660145 GN=queA PE=3 SV=1
MRVADFDFDLPADLIAQFPPAVRGGSRLLHVEASGTLHDRWFSELPALLRPDDLLVMNDTRVIKARLFGQKDSGGKVELLVERVTGEFEALAFIRASHAPKPGSHIHLSDDTLLEVLARQDDLTQLRFPRPVLDVLDQFGRLPLPPYIEHTPTADDEARYQTVYANEPGAVAAPTAGLHFDDAMLDTLQQQGIRTARVTLHVGAGTFQPVRVDDVAEHKMHSERYTIPPATVDAIRETHARGGRVVAVGTTSLRALEAAAQSGKLHAGSGETDIFITPGYRFKVVDTLITNFHLPKSTLLMLVSAFAGVDTIRVAYAHAIAERYRFFSYGDAMFLEKSPPA

SEQ ID NO: 73246 - protein, 351 aa, Thiocapsa marina
  misc_feature (1)..(351): tr|F9U8J8|F9U8J8_9GAMM S-adenosylmethionine:tRNA ribosy ltransferase-isomerase OS=Thiocapsa marina 5811 OX=7686 71 GN=queA PE=3 SV=1
MRLRDFHYDLPSDLIAQRPLPDRGASRLLALDPAGDGRRDLCFRDLPSLLRPGDLLVFNNTRVMRARLFGCKDTGGRVEILIERVLEAGEALAQIRASKSLKPGRWIDLDGGSRLVVRQREGDLYRLGLIEGSFPELMSKQGHIPLPPYIQRPDDASDDARYQTVYARHSGAVAAPTAGLHFDEAMLVHLREMGVGFAEVTLHVGAGTFQPVRVDDLDRHEMHAEWIDVNDDVCRRVHSARAAGGRIVAVGTTSVRSLESAAAEGELVPFRGDSRLFIRPGYRFRVVDALITNFHLPESTLLMLVSAFAGHRPVMDAYRHAVDARYRFFSYGDAMFLSRNEDGSPDDSSSR

SEQ ID NO: 73247 - protein, 352 aa, Thiocapsa rosea
  misc_feature (1)..(352): tr|A0A495V515|A0A495V515_9GAMM S-adenosylmethionine:tRN A ribosyltransferase-isomerase OS=Thiocapsa rosea OX=69 360 GN=queA PE=3 SV=1
MHLRDFHYDLPADLIAQRPLPDRGASRLLALDPEGEGCRDLLFSDLPRLLRPGDLLVFNNTRVMRARLFGRKDTGGRVEILIERLVDARAALAQVRASKSPKPGGWIELDGGARLLVVQREGDLYRLGLVEGTFADLMSEQGHIPLPPYIQRPDDVSDEARYQTVYARHSGAVAAPTAGLHFDEAMLVRLRAMGVGLAEVTLHVGAGTFQPVRVDDIDRHEMHAEWIEVNEEVCRAVHSTRASGGRIVAVGTTSVRSLETAAADGALKPFRGDSRLFIRPGYRFRVVNAMITNFHLPESTLLMLVSAFAGYRPVMDAYRHAVDARYRFFSYGDAMFLNRNEEDTALHHSSSR

SEQ ID NO: 73248 - protein, 352 aa, Thiocapsa roseopersicina
  misc_feature (1)..(352): tr|A0A1H2YKC8|A0A1H2YKC8_THIRO S-adenosylmethionine:tRN A ribosyltransferase-isomerase OS=Thiocapsa roseopersic ina OX=1058 GN=queA PE=3 SV=1
MHLRDFHYDLPADLVAQRPLPDRGASRLLALDPTGEGCRDLLFSDLPRLLRPGDLLVFNNTRVMRARLFGRKGTGGRVEILIERVLDARAALAQVRASKSPKPGCSIDLDGGAQLIVGQREGDLYRLGLIEGTFADLMSEQGHIPLPPYIQRPDDASDEARYQTVYARHSGAVAAPTAGLHFDEAMLVRLREMGVGFAEVTLHVGAGTFQPVRVADIDRHEMHAEWIDVNEDVCRAVHSTRARGGRVVAVGTTSVRSLETAAADGELKPFRGDSRLFIRPGYRFRVVDAMITNFHLPESTLLMLVSAFSGYRLVMDAYCHAVDARYRFFSYGDAMFLIRNEEDAALNQASSR

SEQ ID NO: 73249 - protein, 349 aa, Thiocapsa sp.
  misc_feature (1)..(349): tr|A0A0U5IHK7|A0A0U5IHK7_9GAMM S-adenosylmethionine:tRN A ribosyltransferase-isomerase OS=Thiocapsa sp. KS1 OX= 610332 GN=queA PE=3 SV=1
MRLRDFHYDLPAELIAQRPLPDRGASRLLALDAAADQGCRDLRFSDLPQLLRPGDLLVFNNTRVMRARLFGRKDTGGQVEILVERVLDACEALAQVRASKSPKPGRRIELASGVRLLVTGCEAGFYRLRLEGTTFAQVMSTQGHIPLPPYIQRPDDVLDESRYQTLYARHSGAVAAPTAGLHFDDAMLARLPEMGVGRAEVTLHVGAGTFQPVRVQDLDRHEMHAEWIEVNEEVCRQVNSAREQGGRIVAVGTTSVRSLETAAADGDLKPFRGDSRLFIRPGYRFRVVDAMITNFHLPESTLLMLVSAFAGYRAVMDAYRHAVDARYRFFSYGDAMFLSRNEDSPPPST

SEQ ID NO: 73250 - protein, 348 aa, Thioclava arenosa
  misc_feature (1)..(348): tr|A0A2A4CUA4|A0A2A4CUA4_9RHOB S-adenosylmethionine:tRN A ribosyltransferase-isomerase OS=Thioclava arenosa OX= 1795308 GN=queA PE=3 SV=1
MKLDDFDFHLPEGLIATRPARPRDAARLLLAEGDAITDRHVHDLVDILRPGDRLVLNNTKVIPARLAGTRTRQSAQGEVVAKVEVTLLEPAPGGEWSALAKPLRKLREGEEIVFSPALSAEVRAIEAGQMRIAFNLAGEDFDVALAEAGAMPLPPYIAALRAPDEADKSDYQTVFARHSGAVAAPTASLHFTPELLEKLHEKGVTFTEVTLHVGAGTFLPVKVEDVTTHNMHAEWGEVSAAAAAEIAATKAAGGRVIPVGTTALRLIETAARSGQIAPFEGTTDIFIYPGFTFHVADALMTNFHLPKSTLLMLVSALMGQDRIRRIYSHAVANGYRFFSYGDASLLIP

SEQ ID NO: 73251 - protein, 353 aa, Thioclava atlantica
  misc_feature (1)..(353): tr|A0A085TW98|A0A085TW98_9RHOB S-adenosylmethionine:tRN A ribosyltransferase-isomerase OS=Thioclava atlantica O X=1317124 GN=queA PE=3 SV=1
MKLEDFDFDLPEGLIATRPARPRDSARLLLAEGDTITDRHVYDLLEIFRPGDRLVLNNTKVIPARLMGTRTRQSAQGEVVAKIEVTLLEPAPGGEWTALAKPLRKVKEGEEIVFSEALSARVAAIENGQMRVAFNLEGEDFDAALAEAGAMPLPPYIAALRAPDEEDKRDYQTVFARHSGAVAAPTASLHFTRELLEALAAKGVEFTEVTLHVGAGTFLPVKVEDVTQHKMHAEWGEVSEAAAAAINATKAAGGRVIPVGTTALRLIESAARAPGGAKGHIVPYRDATDIFIYPGFEFRITDALMTNFHLPKSTLMMLVSALMGPERIRRIYAHAVENGYRFFSYGDASLLIP

SEQ ID NO: 73252 - protein, 353 aa, Thioclava dalianensis
  misc_feature (1)..(353): tr|A0A074U3W2|A0A074U3W2_9RHOB S-adenosylmethionine:tRN A ribosyltransferase-isomerase OS=Thioclava dalianensis OX=1185766 GN=queA PE=3 SV=1
MKLDDFDFDLPEGLIATRPARPRDSARLLVAQGDAIRDLHVRDLIDLFGPGDRLVLNNTKVIPARLSGLRHRDSAQGAVSAKIEVTLLEPAANGDWSALAKPLRKVKAGEEIIFSDALSAKVTAIEAGQMRIAFNLTGDDFDAALAEAGAMPLPPYIAALRAPDDADKSDYQTVFARHSGAVAAPTASLHFTRELLEGLAAKGVSFTEVTLHVGAGTFLPVKVEDVTTHKMHAEWGEVSAQAAAEINATKEAGGRVIPVGTTALRLIESAARSEGGAPGHIVPFRDATDIFIYPGFEFRITDALMTNFHLPKSTLLMLVSGLMGRERIQNIYDHAVKNDYRFFSYGDASLLIP

SEQ ID NO: 73253 - protein, 353 aa, Thioclava electrotropha
  misc_feature (1)..(353): tr|A0A1W9XUQ1|A0A1W9XUQ1_9RHOB S-adenosylmethionine:tRN A ribosyltransferase-isomerase OS=Thioclava electrotrop ha OX=1549850 GN=queA PE=3 SV=1
MKLDDFDFELPEGLIATRPARPRDAARLLLAEGDAIHDRHVRDLIDIFRPGDRLVLNNTKVIPARLAGTRTRQSAQGEVVAKVEVTLLEPAPGGEWSALAKPLRKVKEGEEIVFSDALSARVEAIEIGQLRLSFNLSGEDFDAALAEAGAMPLPPYIAALRAPDDEDKRDYQTVFARHSGAVAAPTASLHFTRELLEALAAKGVEFTEVTLHVGAGTFLPVKVEDVTTHKMHAEWGEVSEQAAAEINATKQAGGRVIPVGTTALRLIESAARAEGGAKGHIVPFRDATDIFIYPGFEFRITDALMTNFHLPKSTLLMLVSALMGQDRIREIYDHAVKTGYRFFSYGDASLLIP

SEQ ID NO: 73254 - protein, 353 aa, Thioclava indica
  misc_feature (1)..(353): tr|A0A074JUJ9|A0A074JUJ9_9RHOB S-adenosylmethionine:tRN A ribosyltransferase-isomerase OS=Thioclava indica OX=1 353528 GN=queA PE=3 SV=1
MQLADFDFDLPEGLIATRPARPRDSARLLLAQGDAISDRHVFDLVDIFRPGDRLVLNNTKVIPARLSGTRTRQSAQGEVTAKVEVTLLEPLPGGQWEALAKPLRKVKPGERIVFSDALSADVMAIENGQMRLAFNLAGEDFDAALAQAGAMPLPPYIAALRAPDEADKSDYQTVFARHSGAVAAPTASLHFTPELLEKLAAKGVEFTEVTLHVGAGTFLPVKVDDVTTHKMHSEWGEVSAQAAAEINATKAAGGRVIPVGTTALRLIESAARAPGGAAGHIVAFRDATDIFIYPGFAFRITDALMTNFHLPKSTLLMLVSALMGQERIHEIYDHAVKNGYRFFSYGDSSLLIP

SEQ ID NO: 73255 - protein, 353 aa, Thioclava pacifica
  misc_feature (1)..(353): tr|A0A074J3H3|A0A074J3H3_9RHOB S-adenosylmethionine:tRN A ribosyltransferase-isomerase OS=Thioclava pacifica DS M 10166 OX=1353537 GN=queA PE=3 SV=1
MKLEDFDFDLPEGLIATRPARPRDAARLLLAQGDTITDLHVRDLIDIFRPGDRLVLNNTKVIPARLSGMRTRQSAQGEVTAKVEVTLLEPAPGGEWTALAKPLRKVKQGEVIVFSDALSAQVVAIEQGQLRVAFNLTGEDFDAALAEAGAMPLPPYIAALRAPDEDDKRDYQTVFARHSGAVAAPTASLHFTRELLEALAAKGVEFTEVTLHVGAGTFLPVKVEDVTTHKMHAEWGEVSEAAAAEINATKAAGGRVIPVGTTALRLIESAARAPGGAMGQIVPFRDATDIFIYPGFEFRITDALMTNFHLPKSTLLMLVSALMGHERIQKIYAHAVENRYRFFSYGDASLLIP

SEQ ID NO: 73256 - protein, 353 aa, Thioclava sp.
  misc_feature (1)..(353): tr|A0A4R7KL94|A0A4R7KL94_9RHOB S-adenosylmethionine:tRN A ribosyltransferase-isomerase OS=Thioclava sp. ES.032 OX=1798206 GN=queA PE=3 SV=1
MKLDDFDFDLPEGLIATRPARPRDAARLLLAEGDAIHDRHVRDLIDIFRPGDRLVLNNTKVIPARLAGTRTRQSTQGEVVAKVEVTLLEPAPGGEWSALAKPLRKVKEGEEVVFSDALSAKVEAIENGQLRLGFNLSGEDFDAALAEAGAMPLPPYIAALRAPDDADKRDYQTVFARHSGAVAAPTASLHFTRELLEALAAKGVEFTEVTLHVGAGTFLPVKVEDVTTHKMHAEWGEVSEQAAADINATKQAGGRVIPVGTTALRLIESAARAEGGAKGHIVPFRDATDIFIYPGFEFRITDALMTNFHLPKSTLLMLVSALMGQDRIREIYDHAVKTGYRFFSYGDASLLIP

SEQ ID NO: 73257 - protein, 353 aa, Thioclava sp.
  misc_feature (1)..(353): tr|A0A1T2A769|A0A1T2A769_9RHOB S-adenosylmethionine:tRN A ribosyltransferase-isomerase OS=Thioclava sp. F28-4 O X=1915315 GN=queA PE=3 SV=1
MKLDDFDFELPEGLIATRPARPRDAARLLLAEGDAIHDRHVRDLIDIFRPGDRLVLNNTKVIPARLAGTRTRQSAQGEVVAKVEVTLLEPAPGGEWSALAKPLRKVKESEEIVFSDALSARVEAIENGQLRLSFNLSGEDFDAALAEAGAMPLPPYIAALRAPDDEDKRDYQTVFARHSGAVAAPTASLHFTRELLEALAAKGVEFTEVTLHVGAGTFLPVKVEDVTTHKMHAEWGEVSEQAAAEINATKQAGGRVIPVGTTALRLIESAARAEGGAKGHIVPFRDATDIFIYPGFEFRITDALMTNFHLPKSTLLMLVSALMGQDRIREIYDHAVKTGYRFFSYGDASLLIP

SEQ ID NO: 73258 - protein, 364 aa, Thiocystis violascens
  misc_feature (1)..(364): tr|I3Y6W5|I3Y6W5_THIV6 S-adenosylmethionine:tRNA ribosy ltransferase-isomerase OS=Thiocystis violascens (strain ATCC 17096 / DSM 198 / 6111) OX=765911 GN=queA PE=3 SV =1
MGLGESEPKRIPRLPRRALDPMRRSDFHYDLPPDLIAQRPLAERAGARMLMLEEPAFAPRDRMFADLPRLLRPNDLLVFNNTRVMRARLYGRKETGGQVEILVERLLEPDEALAHVRASKSPKPGSRIDLAAGIGLRVMLREGALYRLRALGATFAEIMSTQGHIPLPPYIQRPDEFADEARYQTLYARREGAVAAPTAGLHFDAAMLQRLDDLGVGRAEVTLHVGAGTFQPVRVDDLDRHEMHAEWLDVDAEACARIETARRRGGRIVAVGTTSVRSLETAAADGQLKPYRGDSRLFIRPGYRFRVVDAMVTNFHLPESTLLMLVAAFVGYQPMMNAYRHAVAERYRFFSYGDAMFLARQGRD

SEQ ID NO: 73259 - protein, 341 aa, Thioflavicoccus mobilis
  misc_feature (1)..(341): tr|L0GV44|L0GV44_9GAMM S-adenosylmethionine:tRNA ribosy ltransferase-isomerase OS=Thioflavicoccus mobilis 8321 OX=765912 GN=queA PE=3 SV=1
MYRTDFHYELPPELIAQRPLAERGASRLLNLDGPSGALRDLSFADLPQLLRPGDLLVLNDTSVMRARLLGRKPTGGCVEILIERLLGPDAALAHCRPGRSLRTATEIEIDGGGKVVVAGREGELFRLVAPDGDLSALMARRGHVPLPPYIQRPDDGADTERYQTVYAAREGAIAAPTAGLHFEEAMLARLSALGVGQARVTLHVGAGTFQPVRAERIDAHRMHAEWVEVGDDVCAQVSATRAAGGRVVAVGTTSVRSLETAAADGALRPYCGDSRLFIRPGYRFRVVDALLTNFHLPESTLLMLVSAFAGHAQVMAAYRHAVEARYRFFSYGDAMFLTRWN

SEQ ID NO: 73260 - protein, 345 aa, Thioflexothrix psekupsii
  misc_feature (1)..(345): tr|A0A251X5J5|A0A251X5J5_9GAMM S-adenosylmethionine:tRN A ribosyltransferase-isomerase OS=Thioflexothrix psekup sii OX=1570016 GN=queA PE=3 SV=1
MQRSDFNFTLPDELIAQYPTEQRTASRLLYVPSPSGIALIDLQFSELPDYLTSGDLLIFNNTQVIPARLFARKKTTGGQVELLIERLLENQHALVQLKASKTPAINSELVLENGLIVRIKARQEQFFKVQFETQESLLDLLQSIGHIPLPPYIRRDDTRVDSERYQTVYASRPGAVAAPTAGLHFDQPLLQRLQAQGVAFGYVTLHVGAGTFTPLRVNDLSQHQMHSEWLQVTEEVCQQIQSTKANGGRVIAVGTTSVRALETAAATGKIQPYEGETRLFITPGYRFKSVDGLITNFHLPESTLFMLVCAFGGYDRILSAYHHAVEKRYRFFSYGDAMFIAAKHE

SEQ ID NO: 73261 - protein, 344 aa, Thiogranum longum
  misc_feature (1)..(344): tr|A0A4R1HNG0|A0A4R1HNG0_9GAMM S-adenosylmethionine:tRN A ribosyltransferase-isomerase OS=Thiogranum longum OX= 1537524 GN=queA PE=3 SV=1
MKTRDFHYNLPPERIASHPARPRHSSRLLDLAPDGSINDHTMADFPGLVGADDLLVFNNTRVIPARLYGQKASGGKVEVLIERVLDERRALAHVRCSKSPKAGSRLQLADGKLDVEVTGREGELFSLYFEGDVPLLELLERWGHVPLPPYIERADERVDRDDYQTLFARHPGAVAAPTAGLHFDRELLDALAARNIRTAYVTLHVGAGTFQPVRVENPEQHIMHAEQVTVDAAVCQAVEQTRARGGRVIAVGTTVVRSLESAVQAGVLKPFSGDTRLFITPGYRFTAVDAMLTNFHLPESTLLMLVCAFAGFEPVMAAYRHAVEQNYRFFSYGDAMFLQHSAVE

SEQ ID NO: 73262 - protein, 350 aa, Thiohalobacter thiocyanaticus
  misc_feature (1)..(350): tr|A0A1Z4VQJ1|A0A1Z4VQJ1_9GAMM S-adenosylmethionine:tRN A ribosyltransferase-isomerase OS=Thiohalobacter thiocy anaticus OX=585455 GN=queA PE=3 SV=1
MQRSDFHYLLPSQLIAQSPLAERGGSRLLVLDGASGRCRDAGFAGLPDYLRPGDLLVINDTRVIPARLHGTKASGGRVEVLIERVVDARTALAHVRASKSPKPGGRLQLEAGLEVEVLDREGELFRLRFPTGRTVMEWLEVHGHVPLPPYIQRPDAAEDRERYQTLFARVPGAVAAPTAGLHFDAAMLERLARAGVETARVTLHVGAGTFQPVRVDDLSRHHMHAEYVEVGQEAVDQVRAAHARGARVLAVGTTVVRSLEAAAASGQLQPFAGDTRLFITPGYEFKVVDLLLTNFHLPESTLLMLVCAFAGYEPVMQAYRHAVEQEYRFFSYGDAMLLSREGLALEHSKR

SEQ ID NO: 73263 - protein, 350 aa, Thiohalobacter thiocyanaticus
  misc_feature (1)..(350): tr|A0A426QGL4|A0A426QGL4_9GAMM S-adenosylmethionine:tRN A ribosyltransferase-isomerase OS=Thiohalobacter thiocy anaticus OX=585455 GN=queA PE=3 SV=1
MQRSDFHYLLPEHLIAQMPLARRDASRMLTVDGASGDWRDARFAELPDYLRPGDLLVINDTRVIPARLHGLKASGGRVEVLIERVLDARTALAHVRASKSPKPGARLYLEEVLEVEVAGREGELFRLCFPPERTVTEWLEAHGHVPLPPYIQRPDQAEDRERYQTLFARVPGAVAAPTAGLHFDAAMLERLAGAGVETARVTLHVGAGTFQPVRVDDLNAHRMHAEYVEVGEAAVARIEATRARGGRVLAVGTTVVRSLEAAAADGALRPFAGETRLFITPGYEFRVVDLLLTNFHLPESTLLMLVCAFAGCEPVMQAYRHAVEAEYRFFSYGDAMLLSRAGLALEHFKR

SEQ ID NO: 73264 - protein, 340 aa, Thiohalomonas denitrificans
  misc_feature (1)..(340): tr|A0A1G5Q0J2|A0A1G5Q0J2_9GAMM S-adenosylmethionine:tRN A ribosyltransferase-isomerase OS=Thiohalomonas denitri ficans OX=415747 GN=queA PE=3 SV=1
MQRTDFHFDLPGELIAQRPAEQRTGSRLLLLDGRDGRLEDRYFPDIEALLSPGDLLVFNDTRVIPARLFGRKASGGRVEVLVERVVDDRRVFAHVRSSKSPRPGSMLRLEEAVDVTVTGRDGALFELSFPESALAVLETYGRMPLPPYIEREAGEADAERYQTVFARKKGAVAAPTAGLHFDEPLLERLRSKGIEFAHVTLHVGAGTFQPVRVDNIHEHHMHSEYLEVPESVCRAVARTRERGGRVVAVGTTVVRSLESAARDGLAPFTGETDIFIYPGYRFRVVDALLTNFHLPESTLLMLVSAFAGRDQVLAAYRHAVEERYRFFSYGDAMFILPQRD

SEQ ID NO: 73265 - protein, 345 aa, Thiohalophilus thiocyanatoxydans
  misc_feature (1)..(345): tr|A0A4R8IVI9|A0A4R8IVI9_9GAMM S-adenosylmethionine:tRN A ribosyltransferase-isomerase OS=Thiohalophilus thiocy anatoxydans OX=381308 GN=queA PE=3 SV=1
MRCQDFHFDLPEELIAQVPAAQRRDSRLLCLGVTGEIADRQFVDLPELLQAGDLLVMNDTRVIPARLFGHKASGGQIEVLVERLLDDTDLLAHVRASKSPKAGTTLHLSDSVSATVLGREGELFRLRLTDRDDPERTLLAILDELGHMPLPPYIRRADEQADRERYQTVFARRPGAVAAPTAGLHFDEALLAQLARQGIETAWVTLHVGAGTFQPVRVENIREHHMHAEWVEVNETVCQQVEQTRQRGGRVIAVGTTSVRCLESAVRDGQLQPFTGDTDIFIYPGYEFQIVDGLITNFHLPESTLLMLVCAFAGYDNVMRAYRHAVEQRYRFFSYGDAMYLTRSE

SEQ ID NO: 73266 - protein, 344 aa, Thiohalorhabdus denitrificans
  misc_feature (1)..(344): tr|A0A0P9CXE7|A0A0P9CXE7_9GAMM S-adenosylmethionine:tRN A ribosyltransferase-isomerase OS=Thiohalorhabdus denit rificans OX=381306 GN=queA PE=3 SV=1
MRIDEFDFQLPEDRIAQHPARPADAARLLEVRPDGLGDYGVRDLPRLLRPGDLLVFNDTQVIPARLVGHRDAVRVELTLHKPLGGPRWAAFARPAKRLKPGQTVRIAEDFAAEVAEKRDGGEVVLEFDREGAALMAALDAHGHMPLPPYIRGGEDEAADRADYQTRFAAKPGAVAAPTAALHFTDRLMAELEAAGIEWTTVTLHVGAGTFLPVKVEDTRDHIMHAEYGVVEAATAERVNAVRAAGGRIVPVGTTSLRLLETAAGEDGVLRPWSGETDIFITPGYRFRAADLMVTNFHLPKSTLLMLVAAFSGLERIKAAYAHAVEAEYRFYSYGDACLLHPEKD

SEQ ID NO: 73267 - protein, 351 aa, Thiohalospira halophila
  misc_feature (1)..(351): tr|A0A1I1QPR3|A0A1I1QPR3_9GAMM S-adenosylmethionine:tRN A ribosyltransferase-isomerase OS=Thiohalospira halophi la DSM 15071 OX=1123397 GN=queA PE=3 SV=1
MRRQDFHYDLPTELIAQEPAAERSASRLLDLSGEAPVDRAFRELPDLLRAGDCLVFNDTRVVPARLLGQKASGGRVEVLVERIRDDGRVRALVRASRTPGEGALLELEGGVTARVEGREAGHFLLAFDDPRPPLAILEAHGRVPLPPYIEREPGEPDRERYQTAFARRPGAVAAPTAGLHFDEPLLAALEAAGVTTATVTLHVGAGTFEPVRVDDLAEHRMHSEFAEIDRNTAERLNRVRAAGGRVVAVGTTSLRVLESAGEGGRLHPFCGETDLFITPGYHFRATDALVTNFHLPESSLLMLVCAMGGYQRVMAAYHHAVAECYRFFSYGDAMYLEPTADVAPPTLQGET

SEQ ID NO: 73268 - protein, 338 aa, Thiolapillus brandeum
  misc_feature (1)..(338): tr|W0TLA1|W0TLA1_9GAMM S-adenosylmethionine:tRNA ribosy ltransferase-isomerase OS=Thiolapillus brandeum OX=1076 588 GN=queA PE=3 SV=1
MQTSDFSYELPEELIAQYPARNRTDSRLLVLDPSRGVLDSVFAGFPDLLREGDLLVFNDTRVMAARMYGRKETGGRVELLLERLLAEDRALAQIRASKAPKAGTRIRVGDRWLIVEGREDDMFVLALETGRFTRLMDAHGHMPLPPYIRREDESFDESRYQTVYAQREGSVAAPTAGLHFDKALLDALSRKGVDTARVTLHVGAGTFQPVRVKNLDEHVMHAEWVEVSEQVCRRIEQTRQRGGRVIAVGTTSVRSLETAAADGICRPYRGDTRLFITPGYSFKVVDALLTNFHLPESTLLMLVCAFAGYEPVMSAYRHAVEKGYRFFSYGDAMFLTRA

SEQ ID NO: 73269 - protein, 345 aa, Thiomicrorhabdus sp.
  misc_feature (1)..(345): tr|A0A4P9K5Q8|A0A4P9K5Q8_9GAMM S-adenosylmethionine:tRN A ribosyltransferase-isomerase OS=Thiomicrorhabdus sp. G1 OX=2580412 GN=queA PE=3 SV=1
MKRQDFYFDLPEHLIAQQPAAQRRDSRLLVMAQQGIIDANFPDLLDFLEPNDLLVFNNTRVIPARLFGHKASGGKVELLIERVIDSKTILTHIRSSRSPKPGTILSIENAFDVEVIGRQDALFIVKVVDNNCSALELIESHGHMPLPPYIERQQDQETDKERYQTVYGEKPGAVAAPTAGLHFDEQIMQDIKAKGVDIGFVTLHVGAGTFKPVQVDDISEHVMHSEYLEVSPELVAQVKAARAKGGRVIAVGTTSVRCLESAASFSDDGHVAPYQGETDIFITPGYQFKEVDVLLTNFHLPESTLIMLVSALAGYERTMSAYKHAVEQEYRFFSYGDAMLVFPPK

SEQ ID NO: 73270 - protein, 345 aa, Thiomicrospira aerophila
  misc_feature (1)..(345): tr|W0DRH3|W0DRH3_9GAMM S-adenosylmethionine:tRNA ribosy ltransferase-isomerase OS=Thiomicrospira aerophila AL3 OX=717772 GN=queA PE=3 SV=1
MKRQDFYFELPEELIAQQPTSQRRASRLLVVQGTGLQDKQFVDILDFIEPHDLLVFNNTKVIPARLFGQKATGGQIELLIERIINDSQALCHIRSSKSPKPGAKLWIENAFEVEVLGREGALFSVAFDPAKTPLEWVEAHGHMPLPPYIERADTDNDKNRYQTVYATRPGAVAAPTAGLHFDEAMLAAIKAKGADIGFVTLHVGAGTFKPVQVDDISQHTMHSEWLEVEAGLVEQVKAARAKGGRIIAVGTTSVRCLESASKDGQLRPYTGDTDIFISPGYQFQQVDVLLTNFHLPESTLIMLVSALAGYQETMAAYRHAVEQRYRFFSYGDAMLVFNKALSREE

SEQ ID NO: 73271 - protein, 343 aa, Thiomicrospira cyclica
  misc_feature (1)..(343): tr|F6DD21|F6DD21_THICA S-adenosylmethionine:tRNA ribosy ltransferase-isomerase OS=Thiomicrospira cyclica (strai n DSM 14477 / JCM 11371 / ALM1) OX=717773 GN=queA PE=3 SV=1
MKRQDFYFDLPEALIAQQPTSERRASRLLVLQGTALHDKQFVDILDFIQPNDLLVFNNTKVIPARLFGKKMTGGQVELLIERIISDHQALCHIRSSKSPKPGTKLVIEDAFEVEVTGRQGALFLVTFDPTKTPLEWVEAYGHMPLPPYIERADTDADKNRYQTVYASRPGAVAAPTAGLHFDEDILAAIKAKGTDIGFVTLHVGAGTFKPVQVDDINQHTMHSEWLEVQPGLVEQVKAARAKGGRVIAVGTTSVRCLESASQHGELRPYTGDTDIFITPGYQFQQVDVLLTNFHLPESTLIMLVSALAGYDNTMNAYRHAVEQRYRFFSYGDAMLVFNQASLS

SEQ ID NO: 73272 - protein, 349 aa, Thiomicrospira sp.
  misc_feature (1)..(349): tr|A0A0X3T8M5|A0A0X3T8M5_9GAMM S-adenosylmethionine:tRN A ribosyltransferase-isomerase OS=Thiomicrospira sp. WB 1 OX=1685380 GN=queA PE=3 SV=1
MRRQDFYFDLPQALIAQHPVAERSASRLLVMQGKTLSDASFVDVLDYMTPDDCLIFNNTRVIPARLHGQKATGGQVEVLVERILSDTDVWAHIRASRAPKAGSRLTLEGRIPVTVTGREGALFKLVFAPEETDHATALEVIEAFGHMPLPPYIEREDDQADQERYQTVYASEPGAVAAPTAGLHFDEPLMAKLNDRGVATGFVTLHVGAGTFKPVQVDNIAEHTMHSEVIDVPDETVALIRRTREKGGRVIAVGTTCIRALESAAAASDDGELSAFQGETDIFITPGYHFRVIDGLITNFHLPESTLIMLVSALGGYDNTMRAYRHAVNSEYRFFSYGDAMLVLPDRRP

SEQ ID NO: 73273 - protein, 354 aa, Thiomicrospira sp.
  misc_feature (1)..(354): tr|A0A0X3TK47|A0A0X3TK47_9GAMM S-adenosylmethionine:tRN A ribosyltransferase-isomerase OS=Thiomicrospira sp. XS 5 OX=1775636 GN=queA PE=3 SV=1
MRRQDFYFDLPEELIAQQPTEERTQSRLLVMETDGGVSDKHFPGLLSYLNENDCLIFNDTKVIPARLFGQKSTGGQVELLIERVLDNERVLSHVRSSRAPKAGAVLHIADAFEAEVLGREGALFELKLSQKESDLSALELIEAHGHMPLPPYIEREDELEDKERYQTVYSAKPGAVAAPTAGLHFDEALLERIRDKGVSTGFVTLHVGAGTFKPVQVDDIAEHVMHSEVIEVLPETVALIEETKRKGGRVIAVGTTSVRCLESAARFSGDGPLQPYQGETDIFITPGYEFQVVDVLLTNFHLPESTLIMLVSALAGYERTMQAYAHAVAQGYRFFSYGDAMLVHPAQKTAAKPE

SEQ ID NO: 73274 - protein, 391 aa, Thiomonas arsenitoxydans
  misc_feature (1)..(391): tr|D6CR09|D6CR09_THIA3 S-adenosylmethionine:tRNA ribosy ltransferase-isomerase OS=Thiomonas arsenitoxydans (str ain DSM 22701 / CIP 110005 / 3As) OX=426114 GN=queA PE= 3 SV=1
MSPGLTADDFDFHLPPELIAQHPPARRSDSRLLDAGNPPALIDRGFRDLPGLLRAGDLVVFNDTRVIPARLWGFKAAGEAGAALGGAVEVLVERVRADNRVWAHVRASKSPKPGQVLWLGAARPDAAAGDEPHASAPLFAVTTVGRAGPDGGLFELEFPAEPLALLQQYGAVPLPPYITHAPGGDDVQRYQTVYAQHPGSVAAPTAGLHFDEAILAKIDAMGAQRAAVTLHVGAGTFQPVRVNDLRQHQMHSEWYTVPEATAQAIAKVRMRQAQARAAGQMHAAPRVVAVGTTAMRALESAALAAEAAGAPDGAVLPGARDTALFVTPGYRFRVVDALLTNFHLPKSTLLMLVSAFAGMDTIRAAYAHAIAQRYRFFSYGDAMWLTRQDLR

SEQ ID NO: 73275 - protein, 419 aa, Thiomonas bhubaneswarensis
  misc_feature (1)..(419): tr|A0A0K6HXI5|A0A0K6HXI5_9BURK S-adenosylmethionine:tRN A ribosyltransferase-isomerase OS=Thiomonas bhubaneswar ensis OX=339866 GN=queA PE=3 SV=1
MTSPHSNLPSASVDAPALTADDFDFHLPPELIAQHPAARRSASRLLDASEPQVLHDRVFTDLPGLLRAGDLVVFNDTRVIPARLWGYKAANEGSGARGNHASALGGAVEVLVERVLGEHQVWAHVRASKPPKAGQVLWLGASRPDGAGPTAASPPPGADALFAVQTLGRAGPGDSLFLLQFPSEPLALLQRHGAVPLPPYITHAPGSEDAERYQTVYARHPGSVAAPTAGLHFDDDILARIDALGAQRASVTLHVGAGTFQPVRVADLRQHQMHSEWYTVPEATARAIAAVRQQQVQARAEGRLDAAPRVVAVGTTAMRALESAALAAEAAGQPFGSVLPGARDTALFITPGYRFRVVDALLTNFHLPKSTLLMLVSAFAGMETVRATYAHAIAQKYRFFSYGDAMWLARQERADVNLR

SEQ ID NO: 73276 - protein, 364 aa, Thiomonas delicata
  misc_feature (1)..(364): tr|A0A238D0P6|A0A238D0P6_THIDL S-adenosylmethionine:tRN A ribosyltransferase-isomerase OS=Thiomonas delicata OX =364030 GN=queA PE=3 SV=1
MTFDHTMSDTLSGGGLRLADFDFHLPPELIAQHPAAERSASRLLDARSQPPTDRVFRDLPELLQSGDLLVFNDTQVIKARLFGAKPTGGAVELLVERVLDGNEVLAHLRASKKPAPGTVLDMQGGFHAEVLGRWPDAGGALFRLRLSGDPYALMQAHGHVPLPPYIHHADDADDARRYQTVFARVPGSVAAPTAALHFDEALLAALDARGVTRAHVTLHVGAGTFQPVKVADIARHRMHSERFEVPGETLAAIDRARARGGRVIAVGTTTVRTLETVAQRLDSGAQMGRDWPTLRGETDIFITPGHRFALVDLLITNFHLPRSTLLMLVSAFAGTETIRTAYAHAIAERYRFFSYGDAMLLARM

SEQ ID NO: 73277 - protein, 406 aa, Thiomonas intermedia
  misc_feature (1)..(406): tr|D5X3U3|D5X3U3_THIK1 S-adenosylmethionine:tRNA ribosy ltransferase-isomerase OS=Thiomonas intermedia (strain K12) OX=75379 GN=queA PE=3 SV=1
MTVSLSRGSAVESGAMSPGLTADDFDFHLPPELIAQHPPARRSDSRLLDAGSPPTLIDRGFRDLPGLLRADDLVVFNDTRVIPARLWGFKAAGEAGAALGGAVEVLVERVRADNRVWAHVRASKSPKPGQVLWLGAARPDAAAGDEPHGSAPLFAVTTVGRAGPDGGLFELEFPAEPLALLQQYGAVPLPPYITHAPGSDDVQRYQTVYAQHPGSVAAPTAGLHFDEAILEAIDAIGAQRAAVTLHVGAGTFQPVRVNDLRQHQMHSEWYTVPEATSQAIAKVRMRQAQARAAGQLHAAPRVVAVGTTAMRALESAALAAEAAGAPDGTVIPGARDTALFVTPGYRFRVVDALLTNFHLPKSTLLMLVSAFAGMDTIRAAYAHAIAQRYRFFSYGDAMWLTRQDLR

SEQ ID NO: 73278 - protein, 358 aa, Thiomonas sp.
  misc_feature (1)..(358): tr|A0A259P9B0|A0A259P9B0_9BURK S-adenosylmethionine:tRN A ribosyltransferase-isomerase OS=Thiomonas sp. 15-66-1 1 OX=1970452 GN=queA PE=3 SV=1
MSDTPSGGGLRLADFDFHLPSELIAQHPAAERSASRLLDARSQPPTDRVFRDLPELLQPGDLLVFNDTQVIKARLFGAKPTGGAVELLVERVLDGNEVLAHLRASKKPAPGTVLDMQGGFHAEVLGRWPDAGGALFRLRLSGDPYALMQAHGHVPLPPYIHHADDADDARRYQTVFARVPGSVAAPTAALHFDEALLAALDARGVTRAHVTLHVGAGTFQPVKVADIARHRMHSERFEVPGETLAAIDRARARGGRVIAVGTTTVRTLETVAQRLDSGAQMGRDWPTLRGETDIFITPGHRFALVDLLITNFHLPRSTLLMLVSAFAGTETIRTAYAHAIAERYRFFSYGDAMLLTRA

SEQ ID NO: 73279 - protein, 406 aa, Thiomonas sp.
  misc_feature (1)..(406): tr|A0A078BEM2|A0A078BEM2_9BURK S-adenosylmethionine:tRN A ribosyltransferase-isomerase OS=Thiomonas sp. CB2 OX= 554131 GN=queA PE=3 SV=1
MTVSLSRGSAVESGAMSPGLTADDFDFHLPPELIAQHPPPRRSDSRLLDAGSPPALIDRGFRDLPGLLRAGDLVVFNDTRVIPARLWGFKAAREAGAALGGAVEVLVERVRADNRVWAHVRASKSPKPGQVLSLGAARPDAAAGDEPHASAPLFAVTTVGRAGPDGGLFELEFPAEPLALLQQYGAVPLPPYITHAPGSDDVRRYQTVYAQHPGSVAAPTAGLHFDEAILAKIDAMGAQRAAVTLHVGAGTFQPVRVNDLRQHQMHSEWYTVPEATAQAIAKVRMRQAQARAAGQMHAAPRVVAVGTTAMRALESAALAAEAAGAPDGAVLPGARDTALFVTPGYRFRVVDALLTNFHLPKSTLLMLVSAFAGMETIRAAYAHAIAQRYRFFSYGDAMWLTRQDLR

SEQ ID NO: 73280 - protein, 344 aa, Thioploca ingrica
  misc_feature (1)..(344): tr|A0A090AG69|A0A090AG69_9GAMM S-adenosylmethionine:tRN A ribosyltransferase-isomerase OS=Thioploca ingrica OX= 40754 GN=queA PE=3 SV=1
MQRTDFYFYLPPHLIAQQPNRSRTSSRLLWANSILEPFQDLRFTDLPHLLMPGDLLVFNDTRVIPARLLGRKQSGGKIEILVERILDNNQILAQIRASQPPKPGMWLYLEGGIAIQVLQRIEHFFQLQFDDPRSVDEILHTIGQIPLPPYIRRTPTEVDSIRYQTVYARQPGAVAAPTAGLHFDEGILEQLQTKGIAMAFITLHVGAGTFAPIRVDNIHQHTMHTEYMQVSPQVCEQIQTTRARGGRVIAVGTTCVRALETASAGGNIKPYAGETRLFITPGYRFQSVDALLTNFHLPESTLLMLVCAFAGQDLVLAAYRHAVEQEYRFFSYGDAMLVSHNPNE

SEQ ID NO: 73281 - protein, 347 aa, Thiopseudomonas denitrificans
  misc_feature (1)..(347): tr|A0A4R6TX37|A0A4R6TX37_9GAMM S-adenosylmethionine:tRN A ribosyltransferase-isomerase OS=Thiopseudomonas denit rificans OX=1501432 GN=queA PE=3 SV=1
MRVADFQFDLPDELIARYPLAERSASRLLVLDGADGSLQHEHFATLPDYLRAGDLLVFNNTRVIPARLFAQKESGGKAEVLVERVLDEHRVLAHVRASKAPKPGSRLLLERGSALMLARHDALFELEFDQPVLPLLEQIGHMPLPPYIDRADELSDRERYQTVYAEHAGAVAAPTAGLHFDRSMLEQLAGMGVDTAFVTLHVGAGTFQPVRVEQLEDHQMHREWLEVSQAVVDAVQRCRARGGRVVAVGTTSVRSLETAAKSGELKPYSGDTNIFIYPGCRFNVVDALVTNFHLPESTLLMLVSAFAGYSATMHAYQQAVAGQYRFFSYGDAMFITRNPQPDVPGES

SEQ ID NO: 73282 - protein, 313 aa, Thiorhodococcus drewsii
  misc_feature (1)..(313): tr|G2DZZ6|G2DZZ6_9GAMM S-adenosylmethionine:tRNA ribosy ltransferase-isomerase OS=Thiorhodococcus drewsii AZ1 O X=765913 GN=queA PE=3 SV=1
MLPCDRLFRDLPQLLRPNDLLVFNNTRVMRARLFGHKESGGRVEVLIERLIAPDEALAHVRASKSPREGSRIRLAEGACLQVLGREGALFRLRACDLGYAELMDAYGHLPLPPYIQRPDDTTDDARYQTLFARHEGAVAAPTAGLHFDEAMLARLADMGIERAEVTLHVGAGTFQPVRTDDLDQHQMHAEWLEVSEAVCAQVERTRSRGGRVIAVGTTCVRSLETAAAGGSLVPFRGESRLFIRPGYRFRVVDAMVTNFHLPESTLLMLVAAFSGYASIMNAYRHAIAEGYRFFSYGDAMFLTRAEVEGDLSG

SEQ ID NO: 73283 - protein, 342 aa, Thiorhodospira sibirica
  misc_feature (1)..(342): tr|G4E423|G4E423_9GAMM S-adenosylmethionine:tRNA ribosy ltransferase-isomerase OS=Thiorhodospira sibirica ATCC 700588 OX=765914 GN=queA PE=3 SV=1
MQLTDFSYDLPPELIAQFPLKTRTASRLLCLDGASGALSDRTFTDLPQLLRKHDLLVFNNTRVIPARLHGHKLDSRGQVEVLIERITGLHDALAHVKASKAPRKGQRLWLEDAIEAVVKGREGDLFQLNFVDSKPLLELLESHGHVPLPPYIKRADEAADQRRYQTVYADIPGAVAAPTAGLHFDEGILETLKQQGVAQGFLTLHVGAGTFQPVRTAQIEEHIMHPEWVEVSADLLAQIEHCKAQGGRVIAVGTTVVRALEAASQHGTLQPLSGDTRLFITPGFEFHVVDAMLTNFHLPESTLLMLVCAFGGYTNVMHAYRHAVTQGYRFYSYGDCMLLTPA

SEQ ID NO: 73284 - protein, 378 aa, Thiorhodovibrio sp.
  misc_feature (1)..(378): tr|H8YXY8|H8YXY8_9GAMM S-adenosylmethionine:tRNA ribosy ltransferase-isomerase OS=Thiorhodovibrio sp. 970 OX=63 1362 GN=queA PE=3 SV=1
MSSPLAIEPDAEFGEQPVVAGPWDRPATESETRQRPLQRSDFHFDLPPELIAQRPLPERGASRLLALDGQTGALRDLHFGDLPSLLRAGDLLVFNNTRVIPARLYGQKETGGKVEVLIERLTGVRDAIAQVRASKPPRPGTRIRLADGQTLIVSARQDSFYQLQAEQEDLTTLLARHGHVPLPPYIERADDTSDLERYQTVYASRAGAVAAPTAGLHFDDGMLKQLEAMGVDFAELTLHVGAGTFQPVRVDNLDEHQMHAEWLEVSSEVVDAITRTKAKGGRVVAVGTTSVRSLETAAADGQLKPFCGDSRLFIRPGYRFRVIDAMVTNFHLPESTLLMLVSAFAGYRNILAAYRHAVAERYRFFSYGDAMFLTPTER

SEQ ID NO: 73285 - protein, 344 aa, Thiothrix caldifontis
  misc_feature (1)..(344): tr|A0A1H4GM83|A0A1H4GM83_9GAMM S-adenosylmethionine:tRN A ribosyltransferase-isomerase OS=Thiothrix caldifontis OX=525918 GN=queA PE=3 SV=1
MKLSAFHYDLPPALIASEPLAERTASRLLILNGASGECRDGQFTDVLDLIQPEDLLVFNNTRVIPARLHGEKTTGGKVEVLVERITGEHTALAHIRASKAPKPSTRLRLEQAIDAQVTGRQDDLFEVQFLHTDSALNLLEQYGHIPLPPYIERADTPADRERYQTVFAQRPGAVAAPTAGLHFDQPLLEALRQKGVQTAAVTLHVGAGTFQPVRVQDLSQHVMHAEYADVSQEVCDAVAACRERGGRVVAVGTTSVRSLESAARDGTLKPFQGDTRLFITPGYEFRVVDLMITNFHLPESTLLMLVSAFAGYENIMQAYQHAVHQEYRFFSYGDAMFITYKQNK

SEQ ID NO: 73286 - protein, 355 aa, Thiothrix eikelboomii
  misc_feature (1)..(355): tr|A0A1T4XQQ4|A0A1T4XQQ4_9GAMM S-adenosylmethionine:tRN A ribosyltransferase-isomerase OS=Thiothrix eikelboomii OX=92487 GN=queA PE=3 SV=1
MQCYHTDMKLSDFDYQLPPELIAYQPLAERTESRLLVLDPCSPQPKDQYFYQLTQFLQAGDLLVFNNTKVIPARLYGKKASGGKLEVLIERIQTPQRALAHIRASKSPKAGTVLELEGAFQAIILEREGELFQLQLTEPANFFELLDQYGHIPLPPYIERPDLATDRERYQTVYAEKLGAVAAPTAGLHFDHRLLTQLAEQGIASTTVTLHVGAGTFQPIRTEDLSQHKMHAEYVEVSAATCEAIRACKARGGRVVAVGTTSVRSLETAAQAGSLQPYTGDTRLFIKLGYEFKVVDVLITNFHLPQSSLLILVSAFAGYESIKAAYQHAIKQAYRFFSYGDAMLLFRRENNRSAV

SEQ ID NO: 73287 - protein, 344 aa, Thiothrix lacustris
  misc_feature (1)..(344): tr|A0A1Y1QGZ4|A0A1Y1QGZ4_9GAMM S-adenosylmethionine:tRN A ribosyltransferase-isomerase OS=Thiothrix lacustris O X=525917 GN=queA PE=3 SV=1
MQLSDFYYDLPPELIASEPLSERTASRLLQVGADGACRDGKFTDVLELIQPNDLLVFNNTRVIPARLHGQKASGGKVEVLIERVLDAHTALAHVRASKSPKPGTRLRLESAVDAEVVGRQGELFELRFLHETTVLDLLDQYGHVPLPPYIERQDTAADRERYQTVFAQTPGAVAAPTAGLHFDEALLAALRAKGVATAAVTLHVGAGTFQPVRVQDLSQHIMHAEYADVSLETCEAVAACKARGGRVVAVGTTSVRSLESAAQQGTLQPFQADTRLFITPGYRFKVVDAMITNFHLPESTLLMLVSAFSGYDAIMKAYQHAVCRGYRFFSYGDAMFLVPSCNNC

SEQ ID NO: 73288 - protein, 344 aa, Thiothrix lacustris
  misc_feature (1)..(344): tr|A0A1Y1QXA8|A0A1Y1QXA8_9GAMM S-adenosylmethionine:tRN A ribosyltransferase-isomerase OS=Thiothrix lacustris O X=525917 GN=queA PE=3 SV=1
MKLSDFHYDLPPALIASEPLAERTASRLLILNGDSGECRDGQFTDVLDLIQPEDLLVFNNTRVIPARLHGEKATGGKVEVLVERVTGEHTALAHIRASKAPKPGTRLRLEQAIDAQVTGRQDDLFAVEFLHADSALRLLEQYGHIPLPPYIERADTPADRERYQTVFAQHLGAVAAPTAGLHFDQPLLAALRQKGVQTAAVTLHVGAGTFQPVRAQDLSQHVMHAEYADVSQDVCDAVAACRARGGRVVAVGTTSVRSLESAARDGTLKPFQGDTRLFITPGYQFRAVDVMITNFHLPESTLLMLVSAFAGYENIKHAYQHAVHREYRFFSYGDAMFITYKQNK

SEQ ID NO: 73289 - protein, 348 aa, Thiothrix sp.
  misc_feature (1)..(348): tr|A0A5C7R8M6|A0A5C7R8M6_9GAMM S-adenosylmethionine:tRN A ribosyltransferase-isomerase OS=Thiothrix sp. OX=1032 GN=queA PE=3 SV=1
MKLSDFNYQLPPELIAYQPLTERSSSRLLVVDEANHTFQDQYFYELSQFLTAGDLLVFNNTKVIPARLYGQKASGGKVEVLIERVQNPQQALAHIRASKAPKAGTILELAGAFPAKLLGREGDLFQLEVSGEQTWFELLDQYGHIPLPPYIERPDLASDRERYQTVYAQKLGAVAAPTAGLHFDQNLLNQLAAQGIETTSVTLHVGAGTFQPVRTEDLSKHIMHAEYVEVSAEACAAIRACKARGGRVIAVGTTSVRSLETAAQTGELQPYMGDTRLFIQLGYEFKVVDLLITNFHLPQSTLLILVSAFAGYATIQQAYQHAIKQGYRFFSYGDAMLLTRQKNSRLAL

SEQ ID NO: 73290 - protein, 64 aa, Thiothrix sp.
  misc_feature (1)..(64): tr|A0A432UUS0|A0A432UUS0_9GAMM S-adenosylmethionine:tRN A ribosyltransferase-isomerase (Fragment) OS=Thiothrix sp. OX=1032 GN=DSZ28_07350 PE=3 SV=1
MLTKDFSYDLPANLIAQRPLQQRSASRMLVLDGQGGWQDQKFQDFRQHLSAGDLLVVNNTRVMA

SEQ ID NO: 73291 - protein, 342 aa, Thiotrichaceae bacterium
  misc_feature (1)..(342): tr|A0A2A5G5X1|A0A2A5G5X1_9GAMM S-adenosylmethionine:tRN A ribosyltransferase-isomerase OS=Thiotrichaceae bacter ium OX=2030882 GN=queA PE=3 SV=1
MKTSEFQYHLPERLIAQKPCEVRSQSRLLHYSRFTKNINHLRFSEIVDLIEPGDLLVFNNTRVIPARMYGHKETGGKVEVLVERLTGSQTCLAHIRASKTPKAGGIIVLANNENSYTVTVDGREGDLYTLSANTQHTMAEIIEEIGHMPLPPYIERSDTVEDVTRYQTIYADKPGAVAAPTAGLHFDDALIKKLTDKGINTAYVTLHIGAGTFQPVRSDHIEDHEMHFEYLEVGQATVYKCQQTRHNGGRIIAVGTTTVRSLETASQNGSLEAYAGETDIFIYPGYEFKSIDALITNFHLPESTLLMLISAFAGKDEMMSCYAQAIAEEYRFFSYGDAMFIS

SEQ ID NO: 73292 - protein, 349 aa, Thiotrichaceae bacterium
  misc_feature (1)..(349): tr|A0A2A4WER1|A0A2A4WER1_9GAMM S-adenosylmethionine:tRN A ribosyltransferase-isomerase OS=Thiotrichaceae bacter ium OX=2030882 GN=queA PE=3 SV=1
MQLSDFNFDLPIDLIAQQPLAERTQSRLLCLNGVTGDYQDQQFAQLPSLLNENDLLVLNNTRVIPARLLGKKASGGGIEVMLERVLSDSDMLVQIRASKAPKVGGQLFLGDEAVDATVISRENGFYQLRLNDARSAIDVLQAIGHVPLPPYIERPDDELDQQRYQTVFAEHPGAVAAPTAGLHFDQAILNEISAKGVRQVTVTLHVGAGTFQPVRVDDVAMHEMHYEYVEVSQATCDAIAETRRRGGRVIAVGTTVVRSLETAVQNGVVAPYSGETNIFIYPGYRFSVIDRLITNFHMPESTLLMLVSAFCGRDHMMAAYQHAIEQRYRFYSYGDAMFIAPSIAAKFEE

SEQ ID NO: 73293 - protein, 348 aa, Thiotrichales bacterium
  misc_feature (1)..(348): tr|A0A259DWS3|A0A259DWS3_9GAMM S-adenosylmethionine:tRN A ribosyltransferase-isomerase OS=Thiotrichales bacteri um 17-46-47 OX=1970602 GN=queA PE=3 SV=1
MSGKLVSDYDYHLPESLIAQYPLADRAASRLLGVGCDGSLTDGVFSDVLHALKANDLLVLNNTRVIPARLYGHKASGGRFEMLIERLLPEQQALVHLRVSKKPAMHSILELEGGVQARFLGREGELFKVEWLTDEPVLEMLDRIGHLPLPPYIARPDGEADAERYQTVFAQEAGAVAAPTAGLHFTDELLKAIQAKGVETATLTLHVGAGTFQPVRVERVEDHHMHFERINVSQALVDKIAQTRANGGRVIAVGTTVVRALESAARSGELIAYSGETDIFITPGFEFRVVDALITNFHLPQSTLLMLVSAFAGYQRIMSAYAHAVQQQYRFFSYGDAMLLSRCTQENA

SEQ ID NO: 73294 - protein, 348 aa, Thiotrichales bacterium
  misc_feature (1)..(348): tr|A0A259KB35|A0A259KB35_9GAMM S-adenosylmethionine:tRN A ribosyltransferase-isomerase OS=Thiotrichales bacteri um 34-46-19 OX=1970605 GN=queA PE=3 SV=1
MSGKLVSDYDYHLPESLIAQYPLADRAASRLLGVGCDGSLTDGVFSDVLHALKANDLLVLNNTRVIPARLYGQKASGGRFEMLIERLLPEQQALVHLRVSKKPAMHSILELEGGVQARFLGREGELFKVEWLTDEPVLEMLDRIGHLPLPPYIARPDGEADAERYQTVFAQEAGAVAAPTAGLHFTDELLKAIQAKGVETATLTLHVGAGTFQPVRVERVEDHHMHFERINVSQALVDKIAQTRANGGRVIAVGTTVVRALESAARSGELIAYSGETDIFITPGFEFRVVDALITNFHLPQSTLLMLVSAFAGYQRIMSAYAHAVQQQYRFFSYGDAMLLSRCTQENA

SEQ ID NO: 73295 - protein, 342 aa, Bathymodiolus puteoserpentis
  misc_feature (1)..(342): tr|A0A483AMR0|A0A483AMR0_9BACT S-adenosylmethionine:tRN A ribosyltransferase-isomerase OS=thiotrophic endosymbi ont of Bathymodiolus puteoserpentis (Logatchev) OX=3432 40 GN=queA PE=3 SV=1
MQLSDFDFDLPKSLIAQHPSKNRTDSRLLIGQSNLIDAQFHQIGDFVQSGDLLVMNNTKVIPARLFGHKDSGGKVEIMIERLLNDKQVLAMIRASRAPQIGSKITLENSEKATVLNKQDGFYTLEFATDSLLALLDNVGHIPLPPYIERTDDEQDLSRYQTVYAKHDGAVAAPTAGLHFDDALLNALKDKGINSAFVTLHVGAGTFQPVKTDNIKDHTMHSEYYEISQDTVDKIHQTKKSGGRVIAIGTTAVRSLESAAKSGTLKATREETDIFIYPGYEFKVVDMMVTNFHLPKSSLLMLVSAFIGRDRMMEMYQYAIEQKYRFFSYGDAMLLTGKNSNGR

SEQ ID NO: 73296 - protein, 339 aa, Thiovulum sp.
  misc_feature (1)..(339): tr|J1F8B7|J1F8B7_9HELI S-adenosylmethionine:tRNA ribosy ltransferase-isomerase OS=Thiovulum sp. ES OX=1177931 G N=queA PE=3 SV=1
MNKDFLLSSYDYPFDDSLIAKTPVYPRENARLLIYFKESGEIKHTTFSDLIEHIPKDYSVILNNTKVVRARVFGKKESGGKVEILLNRHMKKNLYSVFIRGKVRVGSEIFVDSLTAKVEELISDGSRIVSFWQNSDEVEFSKLLEVFERVGEMPLPPYINRKATEKDEKDYQPIFAKNLGAVASPTASLHFSENMLKELKGRNRVEYLTLHVGAGTFKPVEVSDIREHKLHKEVFEISESAKEVLNSKSKILAVGTTVTRTIEYFAKTGETFGDADIFLHPNNRPQRVDALLTNFHLPKSTLLMLVSSFIGIDEMQKIYAEAVKEKYRFYSYGDGMLII

SEQ ID NO: 73297 - protein, 380 aa, Thorsellia anophelis
  misc_feature (1)..(380): tr|A0A1I0BZV3|A0A1I0BZV3_9GAMM S-adenosylmethionine:tRN A ribosyltransferase-isomerase OS=Thorsellia anophelis DSM 18579 OX=1123402 GN=queA PE=3 SV=1
MNLSNFSFDLPTELIAKYPSKQRTDCRLLELDGNTGEVNDKTFIDVLQLLCTNDLLIFNNTKVIPARLFGYKQSGGKIEILIERIVDAHTALAHIRSSKSPKNGTKLLVCEQNDSTLEALSTEQNTSIFELQMTSRHDTLFEIQSLSIPIIDILNKIGHMPLPPYIDRADDKEDKDRYQTVYARDEGAVAAPTAGLHFDESLIEQIRNKGIETAFVTLHVGAGTFQPVRVTDIKTHTMHSEFAIVPQETIDAIKLCKQRGGRVIAVGTTSIRSLESAANAVIFPEFQSMALSDAPKVNFDFEKLTAFMGDTNIFIYPGYQFKIVDSLITNFHLPESTLIMLVSAFAGYENTMNAYKHAVDEQYKFFSYGDAMFIHKRNDF

SEQ ID NO: 73298 - protein, 368 aa, Tibeticola sediminis
  misc_feature (1)..(368): tr|A0A3N4UEA8|A0A3N4UEA8_9BURK S-adenosylmethionine:tRN A ribosyltransferase-isomerase OS=Tibeticola sediminis OX=1917811 GN=queA PE=3 SV=1
MTVISASGASPRRYTLSDFDFALPEALIAQHPAPERSASRLLDGTRPTPVDRIFRDLSSLLAPGDLLVFNDTQVVKARLFGEKASGGKLELLIERVLGGHEVVAHMKVSKKPPLGAVLHMAGGIEGGGFTATLLGRWPDAEGALFHLRFSDDPWTLMQRHGHVPLPPYITHADSAEDERRYQTVFARTPGAVAAPTAALHFDEPLLAALEARSVARAAVTLHVGAGTFQPVKTEDLAQHRMHAEWYDVPEATQAAIAACRARGGRVVAVGTTTVRTLESWAASGQARGDTTIFITPGFRFRVVDRLITNFHLPKSTLMMLVSAFAGYEHIRALYRHAIAERYRFFSYGDAMLLERARPPEPAAAHADV

SEQ ID NO: 73299 - protein, 343 aa, Tindallia californiensis
  misc_feature (1)..(343): tr|A0A1H3NE42|A0A1H3NE42_9CLOT S-adenosylmethionine:tRN A ribosyltransferase-isomerase OS=Tindallia californien sis OX=159292 GN=queA PE=3 SV=1
MKTSDFYYKLPEELIAQKPLEIRDQSRLMIVNKSEQSIQHKKFCDVVSKLNPGDGLVINTSRVIPARLTGRKRFTNGKTELLLLKQEVPNTWEVMVKPAKRIRKDTQIIFGKNELKATVLEERNDGLRLVKFQSESDQSVDLLIHKLGEMPLPPYIHEKLEDKERYQTVYSEAPGSAAAPTAGLHFTEEILSTIKRKGIHIIPITLHVGLGTFRPVQSDNLDEHKMHEEFFEISQESAATMNKIKEKGGRIVAVGTTSCRALESSVGLDGQIIAAKKWTNIFIKPGYEFRFIDILVTNFHLPESTLLMLVSALAGKEFMLRAYEEAVNEKYRFFSFGDAMWIE

SEQ ID NO: 73300 - protein, 343 aa, Tindallia magadiensis
  misc_feature (1)..(343): tr|A0A1I3AAB5|A0A1I3AAB5_9CLOT S-adenosylmethionine:tRN A ribosyltransferase-isomerase OS=Tindallia magadiensis OX=69895 GN=queA PE=3 SV=1
MKTSDFYYKLPEDLIAQKPLEKRDESRLMIVNKSEHSIQHKKFCDVVSKLKPGDGLVVNTSRVIPARLTGRKRFTNGKTELLLLKQEFFNTWEVMAKPAKRIRKDTQIIFGNNELKATVLEERNEGLRLVKFQSESDQTVDLLIHKLGEMPLPPYIHEKLEDKERYQTVYSETPGSAAAPTAGLHFTEEILSTIKRKGIHIIPITLHVGLGTFRPVQSDNLDEHKMHEEFFEISQESAATMNKIKEKGGRIVAVGTTSCRALESSVGLDGQIIAAKKWTNIFIKPGYKFRFIDILVTNFHLPESTLLMLVSALAGKDFMLRAYEEAVNEKYRFFSFGDAMWIE

SEQ ID NO: 73301 - protein, 341 aa, Tindallia sp.
  misc_feature (1)..(341): tr|A0A424Y6D1|A0A424Y6D1_9CLOT S-adenosylmethionine:tRN A ribosyltransferase-isomerase OS=Tindallia sp. MSAO_Ba c2 OX=2293856 GN=queA PE=3 SV=1
MKTSDFLYQLPEELIAQKPLEQRDRSRLMALNRENNTIDHLMFTDIISKLNAGDALIINTSRVIPARLKGRKRYTNGKTEFLLLKEEDENLWEVMAKPAKRVRKGTQIIFGNHQLIATVLEERDEGLRLVKLESDEPLDKAIHQLGEMPLPPYIHEKLEDQERYQTVYSQSPGSAAAPTAGLHFTEELMANIKEKGISIIPITLHVGMGTFRPVQAENLDEHEMHEEFFEISQESASKMNEIKKNKGRIVAVGTTSCRAIESAADEKGEIKATKKWTDIFIKPGYQFRFMDALITNFHLPESTLLMLVSAFAGRTFMLNAYEEAVKEKYRFFSFGDAMLIE

SEQ ID NO: 73302 - protein, 340 aa, Tissierella creatinini
  misc_feature (1)..(340): tr|A0A4T9WIG7|A0A4T9WIG7_9FIRM S-adenosylmethionine:tRN A ribosyltransferase-isomerase OS=Tissierella creatinin i OX=43143 GN=queA PE=3 SV=1
MKTKDFYFDLPQELIAQHPIENRTDSRLMVLDKRTGEIEHRHFRDILDYLNNGDTLVLNDTRVIPARLFGNRPGKEEKIEILLLKHQGDTWETLVKPGKKCKVGNTIEFGGGLLKAHILSIGEDGTRIIRFIYNGIFEEILDKLGEMPLPPYITERLDDRERYQTVYSKNPGSAAAPTAGLHFTKDLLKKIENKGVNIAYLTLHVGLGTFRPVKVEDVLDHHMHSEYYELSKESAEIINRTKKNGNRVISVGTTSTRTLETIGDEKGMVRESSGWTDIFIYPGYNFKVVDCIITNFHLPESTLLMLVSALSSREKILNAYEIAVMGKYRFFSFGDAMFIK

SEQ ID NO: 73303 - protein, 341 aa, Tissierella creatinophila
  misc_feature (1)..(341): tr|A0A1U7M2X8|A0A1U7M2X8_TISCR S-adenosylmethionine:tRN A ribosyltransferase-isomerase OS=Tissierella creatinop hila DSM 6911 OX=1123403 GN=queA PE=3 SV=1
METKDFFYNLPEELIAQVPLKDRTTSRLLVLDKESGEVEHKKFKDVIDYLNEGDTLILNNTRVLPARLFGNRQNKEERIEFLLLKRNEEDIWQSLVKPGKKAKIGSIVEFGNGLLKGEVIGIDEEGIRQVKFHYDGIFEEVLDSLGEMPLPPYIKEKLSDKERYQTVYSKHLGSAAAPTAGLHFTNELLEKISKKGINIGFITLHVGLGTFRPVKVDDILKHHMHSEFFTLSKETAELINKTKQNGKKIIAVGTTSVRTLETLGNENGLIEAGSGWTDIFIYPGYKFKLVDSLITNFHLPESTLLMLISAFTSRDMILKTYDIAIDEKYRFFSFGDAMIIK

SEQ ID NO: 73304 - protein, 341 aa, Tissierella praeacuta
  misc_feature (1)..(341): tr|A0A3F3S461|A0A3F3S461_9FIRM S-adenosylmethionine:tRN A ribosyltransferase-isomerase OS=Tissierella praeacuta OX=43131 GN=queA PE=3 SV=1
MKRENFSYFLPEKLIAQHPLKNREESRLLVLDKKTGKIEHKKFKDIIDYLNKGDCLVLNDTKVIPARLFGNRVGKEESIEILLLKRMEDNLWETLVKPGKKARPGHIIEFGGGVLKGEVLSIGEDGTRIIKFEYKGIFEEILDSLGEMPLPPYITEVLEDKDRYQTVYSKHKGSAAAPTAGLHFTNELLNEIRDKGVNIAYITLHVGLGTFRPVKVDNILEHHMHSEYYNIPEEAANIINKSRENGGKIISVGTTSTRTLETVSDENGKIIPKSGWTDIFIYPGYRFKIIDRLITNFHLPESTLLMLVSALATQERILDAYKIAVEEEYRFFSFGDAMFIK

SEQ ID NO: 73305 - protein, 341 aa, Tissierella praeacuta; identical to SEQ ID NO: 73304
  misc_feature (1)..(341): tr|A0A1M4ZEX1|A0A1M4ZEX1_9FIRM S-adenosylmethionine:tRN A ribosyltransferase-isomerase OS=Tissierella praeacuta DSM 18095 OX=1123404 GN=queA PE=3 SV=1

SEQ ID NO: 73306 - protein, 341 aa, Tissierella sp.
  misc_feature (1)..(341): tr|A0A265Q3J6|A0A265Q3J6_9FIRM S-adenosylmethionine:tRN A ribosyltransferase-isomerase OS=Tissierella sp. P1 OX =1280483 GN=queA PE=3 SV=1
MKREDFNYFLPENLIAQHPLENREESRLLILDKKTGEIEHKTFKHIIEYLDKGDCLVLNDTRVIPARLFGNRIGKEESIEILLLKRIENNVWESLVKPGKKARPGHIIEFGGGILKGEVLSIEEDGTRIIRFEYKGIFEEILDKLGEMPLPPYITEVLDDRERYQTVYSKNKGSAAAPTAGLHFTNKLLDEIKDKGVNIAYITLHVGLGTFRPVKVDNILDHHMHSEYYNISEEAAAIINNSKHNGGKVISVGTTSTRTLETVADENGKIISKSGWTDIFIYPGYRFKIIDRLITNFHLPESTLLMLVSALATQENVLNAYRIAVEKEYRFFSFGDAMFIK

SEQ ID NO: 73307 - protein, 341 aa, Tissierellales bacterium
  misc_feature (1)..(341): tr|A0A3D3QU60|A0A3D3QU60_9FIRM S-adenosylmethionine:tRN A ribosyltransferase-isomerase OS=Tissierellales bacter ium OX=2053631 GN=queA PE=3 SV=1
MKTSDFYYDLPKELIAQHPLENRTSSRLLILDRKTGEMNHKIFSELLDELNSGDVLVMNDSRVIPARLFGNRPGKEEKIETLLLKRVSGRIWECLVRPGKKMKPGGRIEYGDGLLTGIVKGIGEDGTRFIEFKFEGIFEEVLDKLGEMPLPTYITERLENSERYQTVYSKNNGSAAAPTAGLHFDKILLDKIRDKGVHTLYLTLHVGLGTFRPVKVEDINEHIMHSEYYDISHETAEEINRAKLRGSKIIAVGTTSTRTLETAADENGMIKPSSGWTDIFIYPGYKFKAVDVMLTNFHLPESTLLMLVSAFSSKELMLTAYNEAIKERYRFFSFGDAMLIK

SEQ ID NO: 73308 - protein, 350 aa, Tissierellia bacterium
  misc_feature (1)..(350): tr|A0A133YUY9|A0A133YUY9_9FIRM S-adenosylmethionine:tRN A ribosyltransferase-isomerase OS=Tissierellia bacteriu m KA00581 OX=1588751 GN=queA PE=3 SV=1
MENLRTDDFDFDLDESLIAQFPLEDRASSRLLVANRDSFELEHRTFRDIVDYIKEGEVLVINDTKVIPARLFGNRLGKDEAIEVLLLKKHEGNIWETLVKPGKKMKIGTKILFGNGKLEGEVIDISDDGERFIKFSFDGIFEEILDELGTMPLPPYIHEKLKDKDRYQTVYAKHKGSAAAPTAGLHFTKELLEKLKEKGVKIAKVTLHVGLGTFRPVKVENVKEHKMHEEYYEVSQQACDIINEAKKNGKRIFAVGTTSIRTLESVYKRFGKVVSCKGNTDIFIYPGFKFGVVDCLITNFHLPKSTLVMLVSAFASKDIIMNAYKVATKERYRFFSFGDAMLIKREEKKC

SEQ ID NO: 73309 - protein, 340 aa, Tissierellia bacterium
  misc_feature (1)..(340): tr|A0A095XBW8|A0A095XBW8_9FIRM S-adenosylmethionine:tRN A ribosyltransferase-isomerase OS=Tissierellia bacteriu m S7-1-4 OX=1284708 GN=queA PE=3 SV=1
MRVDDYDFDLPEELIAQTPLKERDKSRLMVVDKKGSEPKDYVFSDLVDLLDEGDILVFNDSRVIPARLFGHRKDKEEKVEFLLLKELGDDRWQCLSKPGKKAKVGTEFFFGDELSLVVDEVDEEGLRYVTLKYDGILYEILDRLGTMPLPPYIHEKLEDQEMYQTVYAKDPGSAAAPTAGLHFTDELLEKLKNKGIEELFITLNVGLGTFRPVTSEFIEDHKMHEELYTVSEEVAAKINAAKKAGKKVVAVGTTTIRTLESAADENGEVRAGSRWTNIFIYPGYKFKVVDKLITNFHLPKSTLLMLISAIMGRENALHAYKIAVDRKYRFFSFGDAMFIE

SEQ ID NO: 73310 - protein, 351 aa, Tistlia consotensis
  misc_feature (1)..(351): tr|A0A1Y6CFK6|A0A1Y6CFK6_9PROT S-adenosylmethionine:tRN A ribosyltransferase-isomerase OS=Tistlia consotensis U SBA 355 OX=560819 GN=queA PE=3 SV=1
MLLSDFDFELPQSLIAQQPVEPRDSARLLQVGRDGLADRRVRDLPELLRAGDLLVVNDTRVLPARLTGKRGEAGVEVTLHKAEGPARWRAFARPAKRLKPGDRIVFASDAEGAFAAEVAEKHEGGELALVFERSGPALIEALERHGAMPLPPYIKRPSGAEAADRRAYQTVFAQRSGAVAAPTAGLHFTEPLLEALAARGIERTTLTLHVGAGTFLPVKHERVEEHRMHAEWASLSAETAAAVARTRARGGRVVAVGTTALRTLESAARPGAGAGLVEPFEGETSLFILPGYRFKAVDLLMTNFHLPRSTLFMLVAAFSGLETMRTAYAHAIAEGYRFFSYGDACLLERQA

SEQ ID NO: 73311 - protein, 353 aa, Tistrella mobilis
  misc_feature (1)..(353): tr|A0A3B9IK08|A0A3B9IK08_9PROT S-adenosylmethionine:tRN A ribosyltransferase-isomerase OS=Tistrella mobilis OX= 171437 GN=queA PE=3 SV=1
MKVDLFDFDLPRELIAQRPAEPRESARLLRIKADGLSDHRVADLPDLLRPDDLLVVNDTRVIPSRLFGRRGDAKVEVTLHKAEGLDVWAAFARPARKLRLGDRFEAEAGGRVLGAEVIERRDAGEVVLRFDLAGGELIQALEEVGRLPLPPYIERPEGADARDTDDYQTIFARDKGAVAAPTAGLHFTDRLLAALDARGIERLALTLHVGAGTFLPVKAEDTVDHHMHAEWGRLTAETADRLNAARAAGRRIIAVGTTAMRLLETAAGEDRRFRPFEGETRIFITPGGRPIRGTDVLMTNFHLPRSTLFMLVSAFAGLNRMHAAYAHAIAGGYRFFSYGDACLIDHCPDDVAS

SEQ ID NO: 73312 - protein, 353 aa, Tistrella mobilis
  misc_feature (1)..(353): tr|I3TKX3|I3TKX3_TISMK S-adenosylmethionine:tRNA ribosy ltransferase-isomerase OS=Tistrella mobilis (strain KA0 81020-065) OX=1110502 GN=queA PE=3 SV=1
MKVDLFDFDLPRELIAQRPAEPRESARLLRIKADGLSDHRVADLPDLLRPDDLLVVNDTRVIPSRLFGRRGEAKVEVTLHKAEGLDVWAAFARPARKLRLGDRFEAEAGGRVLGAEVIERRDAGEVVLRFDLAGGELIQALEEVGRLPLPPYIERPEGADARDTDDYQTIFARDKGAVAAPTAGLHFTDRLLAALDARGIERLALTLHVGAGTFLPVKAEDTVDHHMHAEWGRLTAETADRLNAARAAGRRIIAVGTTAMRLLETAAGEDRRFRPFEGETRIFITPGGRPTRGTDVLMTNFHLPRSTLFMLVSAFAGLNRMHAAYAHAIAGGYRFFSYGDACLIDHCPDDVAS

SEQ ID NO: 73313 - protein, 353 aa, Tistrella sp.; identical to SEQ ID NO: 73311
  misc_feature (1)..(353): tr|A0A2E3ENK5|A0A2E3ENK5_9PROT S-adenosylmethionine:tRN A ribosyltransferase-isomerase OS=Tistrella sp. OX=2024 861 GN=queA PE=3 SV=1

SEQ ID NO: 73314 - protein, 186 aa, Unknown
  misc_feature (1)..(186): tr|A0A563D3D6|A0A563D3D6_9BACT S-adenosylmethionine:tRN A ribosyltransferase-isomerase (Fragment) OS=TM7 phylum sp. oral taxon 346 OX=713049 GN=EUA59_01670 PE=3 SV=1
MSAILRIMQLSDFHYDIPDELIAATPPAVRGTSRLLVLDRQTGTITDRHYPDVVDYLQAGDVLVINDTKVIKARLITRKPSGGERELVLVEQHGAHDDWFRHKVIYRRKLIAGDILTIGDDTLMVEKIIGNGIALIRSERNLLDIAAEHGTVPLPPYLGRDATAADIERYQTVFARETGSVAAPTA

SEQ ID NO: 73315 - protein, 275 aa, Unknown
  misc_feature (1)..(275): tr|A0A563CSG0|A0A563CSG0_9BACT S-adenosylmethionine:tRN A ribosyltransferase-isomerase (Fragment) OS=TM7 phylum sp. oral taxon 349 OX=713051 GN=queA PE=3 SV=1
LRARKPSGGERELVLVEQHGSHDDWFRHKVIYRRKLHAGDTLFVSDDELVVEEILGGGVAVVRSQRSLLDIAEEYGSVPLPPYMNRDATPTDIERYQTVFAHKIGSVAAPTASLNMTDEILARLRAKGVVIVHATLHVGLGTFLPIRVDDITKHTMHQEYFSIPAATIAAIQTAKASDNRVIALGTTMTRTLEYAHQQILHESPHDITGEADIFIYPGYKFQVIDALITNFHLPESTVLMLTAAFADWNVLRPAYKHAVAERYQFFSYGDSMLIT

SEQ ID NO: 73316 - protein, 348 aa, Tolumonas auensis
  misc_feature (1)..(348): sp|C4L7L4|QUEA_TOLAT S-adenosylmethionine:tRNA ribosylt ransferase-isomerase OS=Tolumonas auensis (strain DSM 9 187 / TA4) OX=595494 GN=queA PE=3 SV=1
MLVSDFQFDLPDELIARYPMPERSASRLLMLDGNSGETRHGQFRDVLDLLQPGDLLVFNNTRVIPARMFGQKASGGKLEILVERILDDHSVLAHVRASKAPKPGTQILLDNGFSAKMVARHDTLFELHFAGDLPVLDILNQIGHMPLPPYIDRPDENSDKERYQTVYNQRPGAVAAPTAGLHFDEPLLAALREKGVDFAYVTLHVGAGTFQPVRVERLEDHQMHSEYAEVPAEVIAKINATRERGGRVVAVGTTSVRSLETAAQASLKAGKPLSPFFGDTSIFIFPGYQYQLVDVLITNFHLPGSTLIMLVSAFAGYEHVMNAYQEAITSGYRFFSYGDAMFITRQSL

SEQ ID NO: 73317 - protein, 396 aa, Tolypothrix bouteillei
  misc_feature (1)..(396): tr|A0A0C1NJV2|A0A0C1NJV2_9CYAN S-adenosylmethionine:tRN A ribosyltransferase-isomerase OS=Tolypothrix bouteille i VB521301 OX=1479485 GN=queA PE=3 SV=1
MQEPSTRNNYDAAFNANKEDTELDTCLAGYDYELPQELIAQNPVVPRDRSRLLVVDPKTGLEAAPQHHIFCDLPELLQSGDLLIMNNTRVIPARLYGYKQTGAEIEVLLLEERQHNCWLTLVKPGKRFKPGTKIVFEPRIKSGDKGWEIGNNKDFSQVPRQIAATVVDKDETTGGRLLQFDLPEGTSLVQLLDVFGEVPLPPYITASEAKSEQYQTVYAQHPGAVAAPTAGLHFTPELLDRLQQRGIEQAFVTLHVGVGTFRPVEVEDIKTHKMHEEWIEVPSATVEKIRMTQASGGRIIAVGTTVVRALEGAASQGELKPFCGKTDMFIYPGYQWRVVEGLITNFHLPRSSLLMLVSALIGRQKLLSVYQEAIASGYRFYSFGDAMLILPQMVSG

SEQ ID NO: 73318 - protein, 411 aa, Tolypothrix campylonemoides
  misc_feature (1)..(411): tr|A0A0C2PXN3|A0A0C2PXN3_9CYAN S-adenosylmethionine:tRN A ribosyltransferase-isomerase OS=Tolypothrix campylone moides VB511288 OX=1245935 GN=queA PE=3 SV=1
MQQQRTKSNLNTISSPKKEDVEFESCLSGYDYELPQELIAQNPVVPRDSSRLLVVNSPSTGTDTAPLHHIFRDLPELLHSGDLLVMNNTKVMPARLYGCKSTGAEIEVLLLEEQKHNCWLALVKPGKRFKTGAKIFFEARGEGTREGESERGRDSHIPSLPQSLTPSSSSFPPELTATVLETDEATGGRLLQFDLPEGMSLVQLLDVFGEVPLPPYITASDAENKQYQTVYAKTPGAVAAPTAGLHFTTELLERLGDRGIHQAFVTLHVGVGTFRPVEVEDIKTHKMHEEWIEVPSSTVEQIRATQASGGRIIAVGTTVVRALEGAAAKGELQPFCGKTDLFIYPGYKWRVVEGLITNFHLPRSSLLMLVSALIGRQRLLNIYQQAIASRYRFYSFGDAMLILPEATTPGE

SEQ ID NO: 73319 - protein, 348 aa, Tolypothrix campylonemoides
  misc_feature (1)..(348): tr|A0A0C2L7N5|A0A0C2L7N5_9CYAN S-adenosylmethionine:tRN A ribosyltransferase-isomerase OS=Tolypothrix campylone moides VB511288 OX=1245935 GN=SD81_07735 PE=3 SV=1
MLTKPFTFTLPAELSAKEPPERRGIARDQVRLMVINRNDYRVEHTYFNSIGEFLRPGDLLVFNTSRTLPASLDGCERPKGQCMEIRLAQHLPDDSWLALPLCQQQPTCSLQTGIDIDFGHGLTATVENRDTHIPQLWKIRFSKSGTELMDTLYRLGRPIRYEYVSEPWDLDYYQTVYAKEPGSAEMPSAGRAFTWKLLFDLKRCGVETAHIVLHTGLSSYMDDELDAQHLASEEEYFISEAAAQKINHTHEKGGRVIAVGTTVVRALESVADANALVQPQHGYTRLRITAEHKLKIVDGLLTGLHEPEASHLDLLTAFLPAQQIKQAYEDAVQRGYLWHEFGDLNLIL

SEQ ID NO: 73320 - protein, 384 aa, Tolypothrix sp.; identical to SEQ ID NO: 66772
  misc_feature (1)..(384): tr|A0A0D6KZP1|A0A0D6KZP1_9CYAN S-adenosylmethionine:tRN A ribosyltransferase-isomerase OS=Tolypothrix sp. PCC 7 601 OX=1188 GN=queA PE=3 SV=1

SEQ ID NO: 73321 - protein, 409 aa, Tolypothrix sp.
  misc_feature (1)..(409): tr|A0A218QS32|A0A218QS32_9CYAN S-adenosylmethionine:tRN A ribosyltransferase-isomerase OS=Tolypothrix sp. NIES- 4075 OX=2005459 GN=queA PE=3 SV=1
MYQQPTLTNMNSTFSQEGENIELDRSLAGYDYELPQELIAQNPALPRDTSRLLLVNSPSTGKYSAPLDHIFRDLPELLHSGDLLVMNNTRVLAARLYGRKSTGAEIEVLLLEERKNNCWLALVKPGKRFKVGASIVFEARGVGEWGSGGVERQGRQEEISSPAPPAFHPPLSPSSLTATVLETDEATGGRLLQFDLPEGVSLVELLDVFGEVPLPPYITQSKAESEQYQTVYAQHPGAIAAPTAGLHFTPELLQRLRDRGINQAFVTLHVGVGTFRPVEVENVSTHKMHEEWISVPPETVEQIRATKASGGRIIAVGTTVTRALEGAAKSGNLQPFSGKTDLFIYPGYSFRVVDGLITNFHLPRSSLLMLVSALIGRERLLNIYQQAIASQYRFYSFGDAMLILPEARD

SEQ ID NO: 73322 - protein, 384 aa, Tolypothrix tenuis; identical to SEQ ID NO: 63591
  misc_feature (1)..(384): tr|A0A1Z4N8P7|A0A1Z4N8P7_9CYAN S-adenosylmethionine:tRN A ribosyltransferase-isomerase OS=Tolypothrix tenuis PC C 7101 OX=231146 GN=queA PE=3 SV=1

SEQ ID NO: 73323 - protein, 356 aa, Trabulsiella guamensis
  misc_feature (1)..(356): tr|A0A085AE95|A0A085AE95_9ENTR S-adenosylmethionine:tRN A ribosyltransferase-isomerase OS=Trabulsiella guamensi s ATCC 49490 OX=1005994 GN=queA PE=3 SV=1
MRVADFSFELPESLIAHYPQPERSSCRLLSLDGPTGALTHGTFTDLLDKLNPGDLLVFNNTRVIPARLFGRKASGGKIEVLVERMLDDKRILAHIRASKAPKPGAELLLGDDESIAATMVARHGALFEVQFNDPRPVLDILNSIGHMPLPPYIDRPDEDADRELYQTVYSEKPGAVAAPTAGLHFDEPLLARLREKGIEMAFVTLHVGAGTFQPVRVDSIEEHIMHSEYAEVPQDVVDAVLAAKSRGNRVVAVGTTSVRSLESAAQAAKDALIAPFFGDTQIFIYPGYQYQVIDALVTNFHLPESTLIMLVSAFAGYQHTMKAYQEAVKTKYRFFSYGDAMFITYNPQAINERVGE

SEQ ID NO: 73324 - protein, 356 aa, Trabulsiella odontotermitis
  misc_feature (1)..(356): tr|A0A0L0H299|A0A0L0H299_9ENTR S-adenosylmethionine:tRN A ribosyltransferase-isomerase OS=Trabulsiella odontote rmitis OX=379893 GN=queA PE=3 SV=1
MRVADFAFELPESLIAHYPQPERSSCRLLSLDGPTGALTHGTFTDLLDKLNPGDLLVFNNTRVIPARLFGRKASGGKIEVLVERMLDDKRILAHIRASKAPKPGAELLLGDDESINATMVARHDALFEVQFNDERPVLDILNSIGHMPLPPYIDRPDEDADRELYQTVYSEKPGAVAAPTAGLHFDEPLLARLREKGIEMAFVTLHVGAGTFQPVRVDSIEEHIMHSEYAEVPQDVVDAVLAAKARGNRVVAVGTTSVRSLESAAQAAKEALIAPFFGDTQIFIYPGYQYQVIDALVTNFHLPESTLIMLVSAFAGYQHTMNAYQEAVKTKYRFFSYGDAMFITYNPQAITERVGE

SEQ ID NO: 73325 - protein, 350 aa, Tranquillimonas alkanivorans
  misc_feature (1)..(350): tr|A0A1I5NYI4|A0A1I5NYI4_9RHOB S-adenosylmethionine:tRN A ribosyltransferase-isomerase OS=Tranquillimonas alkan ivorans OX=441119 GN=queA PE=3 SV=1
MKLSDFDFDLPERLIATRPARPRSSARLLVAEGDRITDAVVRDLGRWLRPGDRLVLNDTKVIPARLSGQRFRDGAEGRTAARIEVTLLEPRADGAWSALVKPLKKIRDGEVIVFSDALTGTLDSRGEGQAAIRFNLAGEDFDAALAEAGAMPLPPYIAAKRPADERDREDYQTVWARHSGAVAAPTASLHFDAPLLAELRAMGVEFTHVTLHVGAGTFLPVKVDDITQHKMHAEWGEVTKQAAGEINATRAAGGRVIPVGTTALRLIESAAIEDGIAPWRGDTDIFITPGFRFRVAGGLMTNFHLPKSTLMMLVSALMGPERIRRIYAHALHEEYRFFSYGDASLLLPAA

SEQ ID NO: 73326 - protein, 355 aa, Tranquillimonas sp.
  misc_feature (1)..(355): tr|A0A438AKU2|A0A438AKU2_9RHOB S-adenosylmethionine:tRN A ribosyltransferase-isomerase OS=Tranquillimonas sp. M 0103 OX=2486419 GN=queA PE=3 SV=1
MKLSEFDFDLPETLIATRPARPRSSARLLVADGPRTQDARVGDLPDWLRPGDRLVLNDTRVIPARLSGIRRRSGEAGETEARIEVTLLEPLAEGWRALLKPLKKVRDGEVITFRGGLSARVASRAEGTATLVFDRGGADFDAALDAAGDMPLPPYIAGRRAADAADREDYQTVWARHAGAVAAPTASLHFDAPLLDRIRARGVAITYVTLHVGAGTFLPVKVEDIADHKMHAERGEVTQAAADDINATKAAGGRIIPVGTTALRLIESAAAGHGRIAPWQGDTDIFITPGFRFALTDALMTNFHLPKSTLMMLVSALMGAERIREIYAHAICEEYRFFSYGDASLLIPAATGDRG

SEQ ID NO: 73327 - protein, 349 aa, Treponema azotonutricium
  misc_feature (1)..(349): tr|F5YC93|F5YC93_TREAZ S-adenosylmethionine:tRNA ribosy ltransferase-isomerase OS=Treponema azotonutricium (str ain ATCC BAA-888 / DSM 13862 / ZAS-9) OX=545695 GN=queA PE=3 SV=1
MKTSDFFFDLPENLIAQYPPEKRGMSRLVVLDRKSGLREHRMTAELPQILSAWDKRPLLVFNNSKVRKARLLGTSAETGAKAEFLLLNKIDEYTWKAMAQRAKRRHPGSRYVFGDFAKGEILAEDEEFRILRFDRPIDDSWLDIHGHIPLPPYIKRDDTKTDSDRYQTVYAQNTGSAAAPTAGLHFTREILADLEKHGMDTAFVTLHVGLGTFLPVRASNIEDHTMHEESFSIDEETAAKIEKAKSEKRPVLAVGTTSVRTLESAWICDAGSPSGGYLKRGDGATSIFIYPGYQFKVIDAMFTNFHTPGSTLLMLVSAFAGRELILETYREAVEKEYRFFSYGDAMLIK

SEQ ID NO: 73328 - protein, 351 aa, Treponema berlinense
  misc_feature (1)..(351): tr|A0A1T4P7V9|A0A1T4P7V9_9SPIO S-adenosylmethionine:tRN A ribosyltransferase-isomerase OS=Treponema berlinense OX=225004 GN=queA PE=3 SV=1
MKLSDFKFDLPEELIAQKPSGIRGQDKLMLLNRETGEVQHLKMEDLPDLISPDTLMIFNNSKVRRSRCYGIKMSEKEGQGGREQEFMFLNQMTPDLKTWHTMVKGAKKVKPGNKYSFFDGTVGTIIENEGDEGSEFRTVKFEIPLDDSWFEKNGHIPLPPYIRREDDDTDSERYQTIYAKETGSSACPTAGLHFTQEMFEKLDAKKIERCFVTLHVGLGTFLPVRSENIEEHKMHKEVYSIPFDVAEKINRAKKEGRPILAVGTTSVRTLESASDENGFVKSGSGATSIFMYPGYKFKCVNQMFTNFHTPESTLIMLVSAFAGRENILNAYKKAVEQKYRFFSYGDCMFIK

SEQ ID NO: 73329 - protein, 345 aa, Treponema brennaborense
  misc_feature (1)..(345): tr|F4LNS0|F4LNS0_TREBD S-adenosylmethionine:tRNA ribosy ltransferase-isomerase OS=Treponema brennaborense (stra in DSM 12168 / CIP 105900 / DD5/3) OX=906968 GN=queA PE =3 SV=1
MRTKDFYFDLPEELIAQHPSGIRGQDKLMVLDKATGDVRHQLMDDLPDLVPQNALMVFNNSRVRRSRVYGIKENTGRETEFLFLTPLAPTLWKTMVKNAKKQRPGNRYRFPDGSVGVITENPADAGTEFRTLSFTQPIEEQWFERNGHIPLPPYIKRKDTEEDSERYQNIYARETGSAACPTAGLHFTERMLEKLDSRGIRRTFVTLHVGLGTFLPVRAERIEDHTMHEETYSVSRETAELVNTAKKEGRPVLAVGTTSVRTLESAWDPVKSELIPGINSTRIFMYPGYRFNVVDKMFTNFHTPESTLLMLVSAFAGKEHIMDAYRNAVAHRYRFFSYGDAMLIL

SEQ ID NO: 73330 - protein, 357 aa, Treponema bryantii
  misc_feature (1)..(357): tr|A0A1I3K2B8|A0A1I3K2B8_9SPIO S-adenosylmethionine:tRN A ribosyltransferase-isomerase OS=Treponema bryantii OX =163 GN=queA PE=3 SV=1
MLTSDFNFDLPEDLIAQHPSGVRGQDKLMLLNRATGEVEHHMMDDLPDLIEPGTLMIFNNSRVRRARVYGIKETTGRETEFMFLNTIDKDCCIWNTMVKSAKKQKPGMHYKFPDGTVAEIVEHEGNAGTEFRALKFDFAIDEDWFERNGHIPLPPYIKRGDTEEDSERYQNVYATNTGSAACPTAGLHFTEDMLARLDAKGIERRFVTLHVGLGTFLPVREENIENHKMHEEWYTVPKETADAINKAKAEGRPILAVGTTSVRTLESVAQKIEQDGGVVGANNEWVRAGTNSTSIFMYPGFKFKVVDKMFTNFHTPESTLIMLVSAFAGREHILNAYKTAVENRYRFFSYGDCMFIR

SEQ ID NO: 73331 - protein, 357 aa, Treponema bryantii
  misc_feature (1)..(357): tr|A0A1H9A711|A0A1H9A711_9SPIO S-adenosylmethionine:tRN A ribosyltransferase-isomerase OS=Treponema bryantii OX =163 GN=queA PE=3 SV=1
MLTSDFNFDLPEDLIAQHPSGVRGQDKLMLLNRATGEVEHHMMDDLPDLIEPGTLMIFNNSRVRRARVYGIKETTGRETEFMFLNTIDKDCCIWNTMVKSAKKQKPGMHYKFPDGTVAEIVEHEGNAGTEFRALKFDFAIDEDWFERNGHIPLPPYIKRGDTEEDSERYQNVYATDTGSAACPTAGLHFTEDMLARLDAKGIERRFVTLHVGLGTFLPVREENIENHKMHEEWYTVPKETADAINKAKTEGRPILAVGTTSVRTLESVAQKIEQDGGVVGANNEWVRAGTNSTSIFMYPGFKFKVVDKMFTNFHTPESTLIMLVSAFAGRDHILSAYKTAVENRYRFFSYGDCMFIR

SEQ ID NO: 73332 - protein, 339 aa, Treponema caldarium
  misc_feature (1)..(339): tr|F8F2U5|F8F2U5_TRECH S-adenosylmethionine:tRNA ribosy ltransferase-isomerase OS=Treponema caldarium (strain A TCC 51460 / DSM 7334 / H1) OX=744872 GN=queA PE=3 SV=1
METTDFSFELPPELIAQHPPAERGKSRLLVLDRRTGRRRHLMVADLPDLVPEGALMVFNDSRVRKARLFARSLDTGAEVEFLLTRFIGGSRWEVMVKRAKRRRPGSRYQFPDGTTVLIEAEAGELRIINFDHPIDDAWLDTYGHIPLPPYIKRSDEAEDSERYQTVYARTPGSSAAPTAGLHFTDEILTRLDARGIERVFVTLHVGLGTFMPVRTSRIEDHVMHEETYSVSEETAAAVERAKREKRPVLAVGTTSVRTLESAWKGDHLERGSSSTSIFIYPPYRFKVVDQLFTNFHTPESTLLMLVSAFAGRELILESYAEAVRERYRFFSYGDAMYIQ

SEQ ID NO: 73333 - protein, 347 aa, Treponema denticola
  misc_feature (1)..(347): sp|Q73JQ7|QUEA_TREDE S-adenosylmethionine:tRNA ribosylt ransferase-isomerase OS=Treponema denticola (strain ATC C 35405 / CIP 103919 / DSM 14222) OX=243275 GN=queA PE= 3 SV=1
MLTKEFNFDLPEELIAQSPSEKRGGDRLLILDKQSGKLEDRLFTELPEILPKNALMVFNNSKVRHARIYAKSKTNAVCEFLMINPMRDSDGSLWQVMAKKAKRQKPGKTFLFEDGTEAEIIESEIPLESEFRCMKFNRVIDDEWLDKYGHMPLPPYIHRKDTQEDADRYQTVYAEIYGSIAAPTAGLHFTQEVLSKIRDKGIDIEYVTLHVGLGTFLPVRAEKIEDHKMHTEHFFISEKTAQAVEKAKKEGRPIIAVGTTTVRTLESAWDEKRKELKWGNQSTDIFIYPSYKFKLIDKLFTNFHTPESSLVMLVSALAGKENIFKAYRHAVEEKYKFFSYGDAMLIL

SEQ ID NO: 73334 - protein, 347 aa, Treponema denticola
  misc_feature (1)..(347): tr|A0A0E2EMK8|A0A0E2EMK8_TREDN S-adenosylmethionine:tRN A ribosyltransferase-isomerase OS=Treponema denticola A L-2 OX=999426 GN=queA PE=3 SV=1
MLTKEFNFDLPEELIAQSPSEKRGGDRLLILDKQSGKLEDKLFTELPEILPKNALMVFNNSKVRHARIYAKSKTNAICEFLMINPMKDSDGSLWQVMAKKAKRQKPGKIFLFEDGTEAEIIESEIPLESEFRCMKFNRVIDDEWLDKYGHMPLPPYIHRKDTSEDADRYQTVYAEIYGSIAAPTAGLHFTQEVLSKIRDKGIDIEYVTLHVGLGTFLPVRAEKIEDHKMHREHFFISEKTAQAVEKAKKEGRPIIAVGTTTVRTLESAWDEKRKELKRGNQSTNIFIYPSYKFKLIDKLFTNFHTPESSLVMLVSALAGKENIFKAYRHAVEEKYKFFSYGDAMLIL

SEQ ID NO: 73335 - protein, 406 aa, Treponema lecithinolyticum
  misc_feature (1)..(406): tr|U2KJZ6|U2KJZ6_TRELE S-adenosylmethionine:tRNA ribosy ltransferase-isomerase OS=Treponema lecithinolyticum AT CC 700332 OX=1321815 GN=queA PE=3 SV=1
MLTKDFYFDLPEKLIAQYPSAVRGNDRLMVLNRCDKSIKHCHMQNLVDLIGKDTLMVFNDSKVRRSRCYAQKENAPLSKKTEFLLLDEVDAEDAQVPAADGGAGQQGTGSAGSQPNGGQKRLWRAMVKQAKKKRIGDRFVFADGTVGTIAGCPEGENSAFRTLFFEKPQPPLSASQSVSQRHCAPSNGTNRFANEEKHFMLDEAWFERNGHIPLPPYIKRNDTEKDAQRYQTVYAKNIGSAACPTAGLHFTQSMLDAFKEKGVELCTVTLHVGLGTFLPVRTDTVEAHVMHEEVYTVSPETAQAVNQAKKEGKSVLAVGTTSVRTLEAAWKDGALQSGTGSTRIFLYPPCTFHAVDRMFTNFHTPESTLLMLVSAFAGREYILEAYRQAVEQEYRFFSYGDAMLIM

SEQ ID NO: 73336 - protein, 365 aa, Treponema maltophilum
  misc_feature (1)..(365): tr|S3K1T8|S3K1T8_TREMA S-adenosylmethionine:tRNA ribosy ltransferase-isomerase OS=Treponema maltophilum ATCC 51 939 OX=1125699 GN=queA PE=3 SV=1
MLTKDFYFDLPEQLIAQHPSAVRGEDRLMVLNKADGKTADYMIEDLPDLIEEGSLMVFNNSKVRPSRCFARKIDSLSVKPVEFLLIEKIGGRSVQTHAEPSKYRLNDEPKELWRAMVKNAKKQRTGNRYRFSDGTIGIIVESAEDEGTEFRVLEFSRPELDEAWFERNGHMPLPPYIKRADTSEDAERYQNVYAAVSGSIACPTAGLHFTEKILQRLKEKGVHMCSLTLHVGLGTFLPVRTERIEDHAMHGENYTVSEQTAAAVNSAKKEGRPVIAVGTTSVRTLESAWKDGLLKSGSGSTHIFLYPGCTFNVVDRLITNFHTPESTLLMLVSAFAGKERILNAYAQAVEKRYRFFSYGDAMYIR

SEQ ID NO: 73337 - protein, 346 aa, Treponema medium
  misc_feature (1)..(346): tr|S3JSX8|S3JSX8_TREMD S-adenosylmethionine:tRNA ribosy ltransferase-isomerase OS=Treponema medium ATCC 700293 OX=1125700 GN=queA PE=3 SV=1
MFTKDFDFDLPKELIAQYPSAERGNDRLLVLHRRTGALTDAMFSDLPDFLPPDCLMVFNNTKVRHARLYAHTASGEAEFLLIEPLDEGFVWKTIVKRAKRQREGKEYTFNDGTRAVLIPPPSSNAAEPDCKYVRFDRCIDDRWLEANGHIPLPPYIKRGDTNEDAARYQTVYAQNTGSVAAPTAGLHFTEPILQELDKRHIARTAVTLHVGLGTFLPVRTEVVEEHTMHSEKFFISNETAETVENAHRSGKTILAVGTTSVRTLESAWKSDTQQLSCGMQATNIFIYPGFQFGLTGALLTNFHTPQSSLVMLVSAFAGRDNIFAAYRHAIEKKYRFFSYGDAMLIL

SEQ ID NO: 73338 - protein, 347 aa, Treponema pedis
  misc_feature (1)..(347): tr|S5ZYT9|S5ZYT9_9SPIO S-adenosylmethionine:tRNA ribosy ltransferase-isomerase OS=Treponema pedis str. T A4 OX= 1291379 GN=queA PE=3 SV=1
MLTKEFNFELPQELIAQTPSKMRGNDKLLILNKKTGNLEDKVFCELPDILPKDALMVFNNSKVRRARIYAESSSGAQTEFLLINPIPEFGGFVWQVMVKKAKRQKAGKVFVFRDGTKAEIIETEKELGNEFRCLKFDKIIDDDWLDLNGHIPLPPYIRRDDTEEDAERYQTVYAKAYGSIAAPTAGLHFTEEVLNRIKNLGIGIEYVTLHVGLGTFLPVRSENVEEHKMHTEYFSISEIAAYNISKAKKDGRPIIAVGTTSVRTLESAWNEKTLSLKTGNQSTDIFIYPPYKFKVVDKLFTNFHTPESSLVMLVSALAGKENIFNAYRHAIERRYRFFSYGDAMLII

SEQ ID NO: 73339 - protein, 348 aa, Treponema phagedenis
  misc_feature (1)..(348): tr|A0A5D5BUZ1|A0A5D5BUZ1_TREPH S-adenosylmethionine:tRN A ribosyltransferase-isomerase OS=Treponema phagedenis OX=162 GN=queA PE=3 SV=1
MNTKDFDFYLPEHLIAQKPSGKRGEDKLLLLDKKTGAFSDRQFSELPDILPPNALMVFNNSKVRRARVYAKSKDSGAQTEFLLIDSLDDGRLWQAMTKKAKRQRIGKTFLFDEGVEAMVVEPPANTDTSAEFRWLQFNTPITDSWLETHGHIPLPPYIRREDTEEDASRYQTVYAQTTGSIAAPTAGLHFTDEILQRIDARGIERTAITLHVGLGTFLPVRTEKIEEHRMHTEKFFITDTTATAIEKAKREGRPIIAVGTTSVRSLESAWNPDTQRLMRGSQSTNIFIYPPYQFKLVDMLFTNFHTPESTLLMLVSALAGKDQILAAYAHAVEQEYRFFSYGDAMFIR

SEQ ID NO: 73340 - protein, 348 aa, Treponema phagedenis; identical to SEQ ID NO: 73339
  misc_feature (1)..(348): tr|E7NV38|E7NV38_TREPH S-adenosylmethionine:tRNA ribosy ltransferase-isomerase OS=Treponema phagedenis F0421 OX =754027 GN=queA PE=3 SV=1

SEQ ID NO: 73341 - protein, 346 aa, Treponema porcinum
  misc_feature (1)..(346): tr|A0A1T4JXN1|A0A1T4JXN1_9SPIO S-adenosylmethionine:tRN A ribosyltransferase-isomerase OS=Treponema porcinum OX =261392 GN=queA PE=3 SV=1
MKTSDFYFDLPEELIAQHPSGIRGQDKLMRLGKNDGAVTHFAMDNLPELISPDTLMVFNNSRVRRARCYGIKETTGRETEFMFLNQIDKDCRVWNTMVKNAKKQKPGMRYTFPDGTVGTIIECPGNEGTEFRALQFDFIISEDWFEKNGHIPLPPYIKREDTEEDSERYQNVYAVNTGSAACPTAGLHFTEEMLSRLDAKGIERAFVTLHVGLGTFLPVREEMIENHKMHEEVFTVPPETAQKINEAKKQGRPVLAVGTTSVRTLESACDENGLVRSGTGSTRIFMYPGYKFKVVDQMFTNFHTPESTLIMLVSAFAGRENILNAYRTAVENRYRFFSYGDCMLIQ

SEQ ID NO: 73342 - protein, 340 aa, Treponema primitia
  misc_feature (1)..(340): tr|F5YLY6|F5YLY6_TREPZ S-adenosylmethionine:tRNA ribosy ltransferase-isomerase OS=Treponema primitia (strain AT CC BAA-887 / DSM 12427 / ZAS-2) OX=545694 GN=queA PE=3 SV=1
MKLTDFSFDLPQNLIAQFPPEQRGQSRLLVLDRMQRSRSHHHIADLPSLLEPGDLLVFNNSKVRKARIYGTGAGGGRVEFLLLKQQDPQTWTVMAQRTKRRRMGTRYIFDDALEAEIIGEEGELRLLRFDRPIDEAWLDRHGHIPLPPYIRREDSPADSERYQTVYAAVPGSAAAPTAGLHFTEELLAHLTERGIESAFVTLHVGLGTFLPVRSETIEDHLMHEENYSIDEENAARIERAKAEKRRVIAVGTTSVRTLESAWDSNAGKLCRGEGATSIFIYPGYTFKVVDALFTNFHTPESTLLMLVSAFADRNFILDSYREAADQGYRFFSYGDAMLIV

SEQ ID NO: 73343 - protein, 347 aa, Treponema putidum
  misc_feature (1)..(347): tr|A0A562S6U6|A0A562S6U6_9SPIO S-adenosylmethionine:tRN A ribosyltransferase-isomerase OS=Treponema putidum OX= 221027 GN=queA PE=3 SV=1
MLTKEFNFDLPEELIAQSPSEKRGGDRLLILDKQSGKLEDRLFTELPELLPKKALMVFNNSKVRHARIYAKSKTNAVCEFLMINPMKDSDGTLWQVMAKKAKRQKPGKSFLFEDGTEAEIIESEIPLESEFRCMKFNRIIDDEWLDKYGHMPLPPYIHRKDTQEDADRYQTVYAEIYGSIAAPTAGLHFTQEVLSKIRDKGIDIEYVTLHVGLGTFLPVRAEKIEDHKMHTEHFFISEKTAQAVEKAKKEGRPIIAVGTTTVRTLESAWDEKRKELKRGNQSTDIFIYPSYKFKLIDKLFTNFHTPESSLVMLVSALAGKENIFKAYRHAVEEKYKFFSYGDAMLIL

SEQ ID NO: 73344 - protein, 351 aa, Treponema saccharophilum
  misc_feature (1)..(351): tr|H7EMK4|H7EMK4_9SPIO S-adenosylmethionine:tRNA ribosy ltransferase-isomerase OS=Treponema saccharophilum DSM 2985 OX=907348 GN=queA PE=3 SV=1
MKLSDFYFDLPEELIAQKPSGIRGEDKLMFLDRATGAVRHFAMRDLPDLIEPGTLMVFNNSKVRRSRCYGIKEANEKGQGGREQEFMFLNQMSASGDVWHTMVKGAKKVKAGSRYRFPDGSVGEIVDSEGDAGSEFRTVRFPFALDDGWFSRNGHIPLPPYIKREDDDTDSERYQTVYAKETGSSACPTAGLHFTEEMFRRLDEKGIDRTFVTLHVGLGTFLPVRSENIEEHKMHEEVYTIPFDAAEKINRAKREGRPILAVGTTSVRTLESAAGDDGLVRSGSSATRIFMYPGYRFKCVSQMFTNFHTPESTLIMLVSAFAGRENILGAYRTAVENRYRFFSYGDAMLIK

SEQ ID NO: 73345 - protein, 344 aa, Treponema socranskii
  misc_feature (1)..(344): tr|U1F6T5|U1F6T5_TRESO S-adenosylmethionine:tRNA ribosy ltransferase-isomerase OS=Treponema socranskii subsp. s ocranskii VPI DR56BR1116 = ATCC 35536 OX=1125725 GN=que A PE=3 SV=1
MKTTDFYFDLPEELVAQHPSGIRGEDKLMRLDKKSGSVSHFDMRDLPDLLEPGTLAVFNDSRVRRARVFGVKETTGRECEFMFLHQIDEKGSLWRTMVKGAKKQKRGMRYAFPDGFFGVIEGEDAGTEFRNLKFDNPISESWFEKNGHIPLPPYIKRGDTASDAERYQNVYAKTTGSAACPTAGLHFTEDMLSRLKEKGIDIAWVTLHVGLGTFLPVRESEIEKHKMHEEAYTVPDLTAQKINDAKRSGRRVLAVGTTSVRTLESSCDENGFVKAGAGSTHIFMYPGFRFKVADELFTNFHTPESTLIMLVSAFAGREHILNAYKIAVEKRYRFFSYGDAMLIR

SEQ ID NO: 73346 - protein, 344 aa, Treponema socranskii
  misc_feature (1)..(344): tr|S3KSE1|S3KSE1_TRESO S-adenosylmethionine:tRNA ribosy ltransferase-isomerase OS=Treponema socranskii subsp. p aredis ATCC 35535 OX=1125701 GN=queA PE=3 SV=1
MKTMDFYFDLPEELVAQHPSGIRGEDKLMLLDKKSGSVSHFDMRDLPDLLEPGTLAVFNDSRVRRARVFGVKETTGRECEFMFLHQIDEKGSLWRTMVKGAKKQKRGMRYAFPDGLFGVIEGEDTGTEFRNLKFDHPISESWFEKNGHIPLPPYIKRGDTASDAERYQNVYAKTTGSAACPTAGLHFTEDMLSRLKEKGIDIAWVTLHVGLGTFLPVRESEIEKHKMHEEAYTVPDITAQKINDAKRSGRRVLAVGTTSVRTLESSCDENGFVKAGSGSTHIFMYPGFRFKVADELFTNFHTPESTLIMLVSAFAGREHILNAYKIAVEKRYRFFSYGDAMLIR

SEQ ID NO: 73347 - protein, 358 aa, Treponema sp.
  misc_feature (1)..(358): tr|A0A2G6QPN4|A0A2G6QPN4_9SPIO S-adenosylmethionine:tRN A ribosyltransferase-isomerase OS=Treponema sp. OX=166 GN=queA PE=3 SV=1
MHTDDFDFDLPENLIAQEPAKTRGQDRLLVLDARSGNYFDRQFSDLVDLIPENALMVFNNSRVRKARVFAANKKTGGQAEFLFLHPYEAGRVWQVMAKRNKRQKAGNRYLFEDGMEAELVLHNTIDFDNCTQNTPALNEDLTQAKFLRFAKPLSDDWFDINGHIPLPPYIRRADCPEDADRYQTVFAEKTGSVAAPTAGLHFTKDILSKLDAKGIKRAEITLHVGRGTFLPVRTGNLEDHKMHIENFFISDETAALVENQKQTGNPIIAVGTTSVRALETAYQNAGLQKGWQSSDIFIYPGYKFKIVNHLLTNFHTPKSTLLMLVSALAGRENILKAYNHAVQKEYRFFSYGDAMLIM

SEQ ID NO: 73348 - protein, 346 aa, Treponema sp.
  misc_feature (1)..(346): tr|A0A352B997|A0A352B997_9SPIO S-adenosylmethionine:tRN A ribosyltransferase-isomerase OS=Treponema sp. OX=166 GN=queA PE=3 SV=1
MKTSDFYFDLPQELIAQKPAGKRGDDRLMLLSRSNGSVQHYMMESLPDLVEEGTLMIFNNSRVRRSRCYGIKVATGREQEFMFLNQMGPEGNRWNTMVRGAKKVKVGGVYRFSDGSEGTIVENPCDTGTEFRTIEFSQRIDEDWFERNGHIPLPPYIKREDTEIDSERYQTIYAKETGSAACPTAGLHFTEPLLARLREKKIDLEWITLHVGLGTFLPVRSEQIEDHKMHEEVYTVPYDVAEKINLAKKEGRPVLAVGTTSVRTLESAADENGIVHGGTGSTHIFMYPGYKFKVVDQMFTNFHTPESTLIMLVSAFASREYILNAYSEAVKEKYHFFSYGDAMLIK

SEQ ID NO: 73349 - protein, 346 aa, Treponema succinifaciens
  misc_feature (1)..(346): tr|F2NVJ7|F2NVJ7_TRES6 S-adenosylmethionine:tRNA ribosy ltransferase-isomerase OS=Treponema succinifaciens (str ain ATCC 33096 / DSM 2489 / 6091) OX=869209 GN=queA PE= 3 SV=1
MKTSDFNFDLPEELIAQKPSGIRGNDKLMFLDKSTGKVFHYAMKDLVDLVEPGTLMVFNNSKVRRSRCYGIKTDTGREQEFMFLNQTSPEGNIWNTMVKGAKKVKPGNVYKFPDGSEGKIVSDSKNDGTEFRFIEFPFRLTEVWFEKNGHIPLPPYIRREDDDTDSERYQTIYAKETGSAACPTAGLHFTEFVLEKLKEKNVDLEWITLHVGLGTFLPVRADNIEEHKMHEEFYTVPYDVAEKINSAKKEGRPVLAVGTTSVRTLESASDENGIVHGGTRSTNIFMYPGYKFKVVDQMFTNFHTPESTLIMLVSAFAGRENILNAYKIAVENRYRFFSYGDAMLIK

SEQ ID NO: 73350 - protein, 346 aa, Treponema vincentii
  misc_feature (1)..(346): tr|S3MF79|S3MF79_9SPIO S-adenosylmethionine:tRNA ribosy ltransferase-isomerase OS=Treponema vincentii F0403 OX= 1125702 GN=queA PE=3 SV=1
MFTKDFDFDLPKELIAQYPSAERGNDRLLVLNRRTGALTDAVFSDLPDFLPPDCLMVFNNTKVRHARLYARTGSGEAEFLLIEPLDEGFVWKTIVKRAKRQREGKEYIFDDGTRAVLIPPPSPNAAETDCKYIRFDRCIDDRWLEANGHIPLPPYIKRGDTDEDAERYQTVYAKNTGSVAAPTAGLHFTEPILQELDKRHIARTAVTLHVGLGTFLPVRTEVVEEHTMHSEKFFISDETAAAVEEAHRAGKTILAVGTTSVRTLESAWKSDTQQLSRGMHATDIFIYPGFRFGLTGALLTNFHTPQSSLVMLVSAFAGRDNIFAAYRHAIEKKYRFFSYGDAMLIL

SEQ ID NO: 73351 - protein, 354 aa, Treponema vincentii
  misc_feature (1)..(354): tr|C8PRN2|C8PRN2_9SPIO S-adenosylmethionine:tRNA ribosy ltransferase-isomerase OS=Treponema vincentii ATCC 3558 0 OX=596324 GN=queA PE=3 SV=1
MFTKDFDFDLPKELIAQYPSAERGNDRLLVLNRRTGALTDAVFSDLPDFLPPDCLMVFNNTKVRHARLYARTGSGEAEFLLIEPLDEGFVWKTIVKRAKRQREGKEYIFDDGTRAVLIPPPSPNAAEADCKYIRFDRCIDDRWLEANGHIPLPPYIKRGDTDEDAERYQTVYAKNTGSVAAPTAGLHFTEPILQELDKRHIARTAVTLHVGLGTFLPVRTEVVEEHTMHSEKFFISDETAAAVEEAHRTEKTILAVGTTSVRTLESAWKSDTQQLSRGMHATDIFIYPGFRFGLTGALLTNFHTPQSSLVMLVSAFAGRDNIFAAYRHAIEKNTGSSLTATPCLSCKDCLLCEI

SEQ ID NO: 73352 - protein, 342 aa, Trichococcus collinsii
  misc_feature (1)..(342): tr|A0A143YAC1|A0A143YAC1_9LACT S-adenosylmethionine:tRN A ribosyltransferase-isomerase OS=Trichococcus collinsi i OX=157076 GN=queA PE=3 SV=1
MRTSDFDFYLPEELIAQTPLLDRSSSRLLALNSKTGEITDKHFTDMVEELQEGDALVLNNTRVLPARLHGVKPDTGGHIEVLLLNNIQGDEWETLVKPGKRVKVGTVISFGDGRLTAEVTQSLDHGGRILNFKYDGVFLEILESLGEMPLPPYIKETLDDQERYQTVYAKEVGSAAAPTAGLHFTAELLEEVANKGVKIVYLTLHVGLGTFRPVSVDDIASHEMHSEFYQLTDEAAQTLNEVRSNGGKIVAVGTTSVRTLETIGTKFDGEIKADSGWTKIFISPGYSFKVVQGIITNFHLPKSTLVMLVSAFAGRDNVLAAYEHAVKEKYRFFSFGDAMFIK

SEQ ID NO: 73353 - protein, 342 aa, Trichococcus flocculiformis
  misc_feature (1)..(342): tr|A0A143YGU2|A0A143YGU2_9LACT S-adenosylmethionine:tRN A ribosyltransferase-isomerase OS=Trichococcus flocculi formis OX=82803 GN=queA PE=3 SV=1
MRTSDFDFYLPEELIAQTPLLDRSSSRLLSLDSKTGAITDKHFTDMVAELQEGDALVLNNTRVLPARLHGVKPDTGGHIEVLLLNNIQGDEWETLVKPGKRVKVGTVISFGDGRLTAEVTQSLEHGGRILNFKYDGVFLEILESLGEMPLPPYINETLDDQERYQTVYAKEVGSAAAPTAGLHFTADLLEEVANKGVKIVYLTLHVGLGTFRPVSVDDIASHEMHSEFYQLTDEAAQALNQVRSNGGKIVAVGTTSVRTLETIGTKFDGEIKADSGWTKIFISPGYSFKVVQGIITNFHLPKSTLVMLVSAFAGRDNVLAAYEYAVKEKYRFFSFGDAMFIK

SEQ ID NO: 73354 - protein, 342 aa, Trichococcus ilyis
  misc_feature (1)..(342): tr|A0A143YB22|A0A143YB22_9LACT S-adenosylmethionine:tRN A ribosyltransferase-isomerase OS=Trichococcus ilyis OX =640938 GN=queA PE=3 SV=1
MRTSDFDFNLPEELIAQTPLLDRSSSRLLALDSKTGEIMDKHFTDIVAELQEGDALVLNNTRVLPARLHGVKPDTGGHIEVLLLNNIQGDEWETLVKPGKRVKVGTVISFGDGRLTAEVTQSLEHGGRILNFKYDGVFLEILESLGEMPLPPYIKETLDDQERYQTVYAKEVGSAAAPTAGLHFTAELLQEVANKGVKIVYLTLHVGLGTFRPVSVDDIASHEMHSEFYQLTDEAAQTLNDVRSNGGKIVAVGTTSVRTLETIGTKFDGEIKADSGWTKIFISPGYSFKVVQGIITNFHLPKSTLVMLVSAFAGRDNVLAAYEHAVKEKYRFFSFGDAMFIK

SEQ ID NO: 73355 - protein, 342 aa, Trichococcus palustris
  misc_feature (1)..(342): tr|A0A143Y944|A0A143Y944_9LACT S-adenosylmethionine:tRN A ribosyltransferase-isomerase OS=Trichococcus palustri s OX=140314 GN=queA PE=3 SV=1
MKTSDFDFYLPEELIAQTPLLDRSSSRLLVLDAETGGLEDKHFTAILDELNEGDALVLNNTRVLPARLHGVKPDTGGHIEVLLLNNTNGDEWETLVKPGKRVKVGTVISFGDGRLTAEVTKVLEHGGRMITFKYDGVFLEILESLGEMPLPPYIKEKLEDQGRYQTVYAKENGSAAAPTAGLHFTDELLKQIEAKGVQIVYVTLHVGLGTFRPVSVDNLDEHEMHSEFYQLTEESAAALNSVREHGGKIYAVGTTSVRTLETIGSKFDGNIVADSGWTSIFISPGYTFKVVEGFITNFHLPKSTLVMLVSAFAGREHVLGAYEHAVQEKYRFFSFGDAMFIK

SEQ ID NO: 73356 - protein, 342 aa, Trichococcus pasteurii
  misc_feature (1)..(342): tr|A0A1W1ICF8|A0A1W1ICF8_9LACT S-adenosylmethionine:tRN A ribosyltransferase-isomerase OS=Trichococcus pasteuri i OX=43064 GN=queA PE=3 SV=1
MRTSDFDFYLPEELIAQTPLLDRSSSRLLALDSKTGEITDKHFTDMVEELQEGDALVLNNTRVLPARLHGVKPDTGGHIEVLLLNNIQGDEWETLVKPGKRVKVGTVISFGDGRLTAEVTQSLEHGGRILNFKYDGVFLEILESLGEMPLPPYIKETLDDQERYQTVYAKEVGSAAAPTAGLHFTADLLKEVSNKGVKIVYLTLHVGLGTFRPVSVDDIASHEMHSEFYQLTNEAAQTLNQVRSNGGKIVAVGTTSVRTLETIGTKFDGKIKADSGWTKIFISPGYSFKVVQGIITNFHLPKSTLVMLVSAFAGRENVLSAYEHAVKEKYRFFSFGDAMFIK

SEQ ID NO: 73357 - protein, 342 aa, Trichococcus patagoniensis
  misc_feature (1)..(342): tr|A0A2T5ILH0|A0A2T5ILH0_9LACT S-adenosylmethionine:tRN A ribosyltransferase-isomerase OS=Trichococcus patagoni ensis OX=382641 GN=queA PE=3 SV=1
MRTSDFDFYLPEELIAQTPLLDRSSSRLLALDSKTGEITDKHFTDMVEELQDGDALVLNNTRVLPARLHGIKPDTGGHIEVLLLNNIQGDEWETLVKPGKRVKVGTVISFGDGRLTAEVTQSLDHGGRILNFKYDGVFLEILESLGEMPLPPYIKETLDDQERYQTVYAKEVGSAAAPTAGLHFTAELLADVAKKGVKIVYLTLHVGLGTFRPVSVDDIASHEMHSEFYQLTDEAAQALNQVRSNGGKIVAVGTTSVRTLETIGTKFDGEIKADSGWTKIFISPGYSFKVVQGIITNFHLPKSTLVMLVSAFAGRDNVLAAYEHAVKEKYRFFSFGDAMFIK

SEQ ID NO: 73358 - protein, 342 aa, Trichococcus sp.
  misc_feature (1)..(342): tr|A0A5C5E959|A0A5C5E959_9LACT S-adenosylmethionine:tRN A ribosyltransferase-isomerase OS=Trichococcus sp. SKBG OX=2585775 GN=queA PE=3 SV=1
MRTSDFDFYLPEELIAQTPLLDRSSSRLLSLDSKTGEITDKHFTDMVEELQEGDALVLNNTRVLPARLHGVKPDTGGHIEVLLLNNIQGDEWETLVKPGKRVKVGTVISFGDGRLTAEVTQSLDHGGRILNFKYDGVFLEILESLGEMPLPPYIKETLDDQERYQTVYAKEVGSAAAPTAGLHFTAELLEGVANKGVKIVYLTLHVGLGTFRPVSVDDIASHEMHSEFYQLTEEAAQTLNEVRSNGGKIVAVGTTSVRTLETIGTKFDGEIKADSGWTKIFISPGYSFKVVQGIITNFHLPKSTLVMLVSAFAGRDSVLSAYEHAVKEKYRFFSFGDAMFIK

SEQ ID NO: 73359 - protein, 342 aa, Trichococcus sp.
  misc_feature (1)..(342): tr|A0A143YMA4|A0A143YMA4_9LACT S-adenosylmethionine:tRN A ribosyltransferase-isomerase OS=Trichococcus sp. ES5 OX=872292 GN=queA PE=3 SV=1
MRTSDFDFYLPEELIAQTPLLDRSSSRLLSLDSKTGAITDKHFTDMVAELQAGDALVLNNTRVLPARLHGVKPDTGGHIEVLLLNNIQGDEWETLVKPGKRVKVGTVISFGDGRLTAEVTQSLDHGGRILNFKYDGVFLEILESLGEMPLPPYIKETLDDQERYQTVYAKEVGSAAAPTAGLHFTADLLEEVANKGVEIVYLTLHVGLGTFRPVSVDDIASHEMHSEFYQLTDEAAQALNQVRSNGGKIVAVGTTSVRTLETIGTKFDGEIKADSGWTKIFISPGYSFKVVQGIITNFHLPKSTLVMLVSAFAGRDNVLAAYEYAVKEKYRFFSFGDAMFIK

SEQ ID NO: 73360 - protein, 369 aa, Trichodesmium erythraeum
  misc_feature (1)..(369): tr|Q118B2|Q118B2_TRIEI S-adenosylmethionine:tRNA ribosy ltransferase-isomerase OS=Trichodesmium erythraeum (str ain IMS101) OX=203124 GN=queA PE=3 SV=1
MTDLDWSIEAYDYELPQELIAQNPVVPRDSSRLMVIESLTHNHRIFRDLPDLLQPEDLLVLNNTRVIPARLYGQKTSGAQVEILLLKQITNDSWLALVKPGKHFSAGTRIEFEPNSSFTCDYKLQATVLAIDQETGGRVLQFYWPQEVSWLDLLKQFGHIPFPPYVTGSQALTEQYQTVYSKIAGAIAAPTAGLHFTDELLYKLEQGNIGRAFITLHVGIGTFRPVEVKDITTHNIHSEWVEVSSLSVDKIHQTKAKGGRIIAVGTTVVRAIEAAALANDNYSTQESLIPLIRPFSDYTDIFIYPGYKWRVVDGLITNFHLPRSSLLMLVSAMIGRKRLLSLYQDAIDQKYRFYSFGDAMFILPSARVN

SEQ ID NO: 73361 - protein, 397 aa, Trichormus variabilis; identical to SEQ ID NO: 69452
  misc_feature (1)..(397): tr|A0A1Z4KEM2|A0A1Z4KEM2_ANAVA S-adenosylmethionine:tRN A ribosyltransferase-isomerase OS=Trichormus variabilis NIES-23 OX=1973479 GN=queA PE=3 SV=1

SEQ ID NO: 73362 - protein, 408 aa, Trichormus variabilis
  misc_feature (1)..(408): sp|Q3M3N7|QUEA_TRIV2 S-adenosylmethionine:tRNA ribosylt ransferase-isomerase OS=Trichormus variabilis (strain A TCC 29413 / PCC 7937) OX=240292 GN=queA PE=3 SV=1
MKKQILQLNLEQTSSAAAEDTNLDCSLAGYDYVLPPERIAQNPAVPRDSSRLLVVNSQTTGKETPPLHQIFRDLPDILRPGDLLIMNNTKVIPARLYGRKSSGAEVEILLLEERKFNCWLALVKPGKRFKKGTQIIFEGLGIRNLGIKNSPHYPLSPEGFPPSPVPNPHQLTATVLETDKATGGRLLQFDLPEGESLVQLLDKFGEIPLPPYITASQAADEQYQTVYAEQPGAIAAPTAGLHFTPELLEKLRDRNINQAFITLHVGVGTFRPVEVEDVATHQMHEEWIEIPAATVAQIKATKAAGGRIIAVGTTVVRALEGAAASGDLQEFCGKTNLFIYPGYKWQVVEGLITNFHLPRSSLLMLVSALIGRERLLNIYQEAIASQYRFYSFGDAMLILPEARGVNSH

SEQ ID NO: 73363 - protein, 349 aa, Trinickia caryophylli
  misc_feature (1)..(349): tr|A0A1X7CCA8|A0A1X7CCA8_TRICW S-adenosylmethionine:tRN A ribosyltransferase-isomerase OS=Trinickia caryophylli OX=28094 GN=queA PE=3 SV=1
MFTLSDFDFNLPPELIAQEALPERSASRLLEVDAAHAPARLVDRRFAELPDCLAPGDLLVFNDTKVIKARFFGTKASGGKIEVLIERLTGERTALAQIRASKSPAPGTTLRLADAFDVSVGERVEPFYTLHFPAPCLALIERHGRLPLPPYIEHDPDSTDEARYQTVFARNPGAVAAPTAGLHFDDAVLARLEARGIERATLTLHVGAGTFQPVRVENIAEHKMHSEWYQLPQALVDKIAATRARGGRVVAVGTTSLRALEAAARDAEAAGGPLAAATAETDIFITPGYRFRLVDRLVTNFHLPKSTLLMLVSAFAGMDTIRAAYRHAVEAHYRFFSYGDAMLLTRRDG

SEQ ID NO: 73364 - protein, 349 aa, Trinickia soli
  misc_feature (1)..(349): tr|A0A2N7W8G2|A0A2N7W8G2_9BURK S-adenosylmethionine:tRN A ribosyltransferase-isomerase OS=Trinickia soli OX=380 675 GN=queA PE=3 SV=1
MFTLSDFDFNLPPELIAQTALPERSASRLLEVDGATAPARLVDRRFAELPECVAPGDLLVFNDTKVLKARFFGQKASGGKIEVLVERLTGERTALAQIRASKSPAPGTTLMLADAFEVTVGERVEPFYTLHFPDDCLSLIERHGRLPLPPYIEHDADATDETRYQTVFAQNPGAVAAPTAGLHFDEALLARLDAHGVERATLTLHVGAGTFQPVRVENIAEHKMHSEWYRLPQTLVDKIAATRARGGRVIAVGTTSMRALESAARDAEDAGRPLAATSAETDIFITPGYRFRIVDRLVTNFHLPKSTLLMLVSAFAGMETIRDAYRHAIEQRYRFFSYGDAMLLTRAER

SEQ ID NO: 73365 - protein, 351 aa, Trinickia sp.
  misc_feature (1)..(351): tr|A0A4U1IBW7|A0A4U1IBW7_9BURK S-adenosylmethionine:tRN A ribosyltransferase-isomerase OS=Trinickia sp. 7GSK02 OX=2571161 GN=queA PE=3 SV=1
MFTLSDFDFNLPPELIAQTALKERSASRLLEVDNSSDPARLVDRQFAELPECIAPGDLLVFNDTKVLKARFFGQKASGGKVEVLVERLTGERTALAQIRASKSPAAGTTIKLAGAFDVTVGERVEPFYTLHFPDDCLTLIEQYGRLPLPPYIEHDPDATDETRYQTVFAQNPGAVAAPTAGLHFDDALIARLDARGVERATLTLHVGAGTFQPVRVENIAEHKMHSEWYRLPQTLVDKIAATRARGGRVIAVGTTSMRALEAAARGAEAAGRQLAATTAETDIFITPGYRFRVVDRLVTNFHLPKSTLLMLVSAFAGVETIRGAYQHAIEERYRFFSYGDAMLLTRREDRA

SEQ ID NO: 73366 - protein, 357 aa, Trinickia symbiotica
  misc_feature (1)..(357): tr|A0A2N7WZ29|A0A2N7WZ29_9BURK S-adenosylmethionine:tRN A ribosyltransferase-isomerase OS=Trinickia symbiotica OX=863227 GN=queA PE=3 SV=1
MFTLSDFDFNLPPELIAQEALPQRSASRLLEVVAPRPGGDPQTATDTMRLVDRRFAELPDCLTAGDLLVFNDTKVLKARFFGVKASGGRIEVLIERLTGERTALAQIRASKSPTLGTTLRLADAFDVTVGERVEPFYTLHFPEACLDLIERFGRLPLPPYIEHDPDATDEARYQTVYARNPGAVAAPTAGLHFDDALLAELDRRGIERATLTLHVGAGTFQPVRVENIAEHKMHSEWYHLPQTLADKIAATRARGGRVVAVGTTSLRALEAAARDAEAAGRPLAATSAETDIFITPGYRFRVVDRLITNFHLPKSTLMMLVSAFAGMATIREAYRHAIEARYRFFSYGDAMLLTRSH

SEQ ID NO: 73367 - protein, 364 aa, Trinickia symbiotica
  misc_feature (1)..(364): tr|A0A2N7X677|A0A2N7X677_9BURK S-adenosylmethionine:tRN A ribosyltransferase-isomerase OS=Trinickia symbiotica OX=863227 GN=C0Z20_08055 PE=3 SV=1
MRTEDFYFTLEPALVPEFPVELRGHQRDSGRMIVLDRECGTIAHEVFSSICDHVRGGDLLVLNDSYVLPNMLLFQNGNHAAWVIICGHEPEATAIVAIRPIDVPESGLVLVSADDDRLRCTLTAPLPRGLWRATFDPMDRLTQTLEQYGQRFYRSALPAERGMVDTSPVPSSWRSTPAAYRSVYAKTPGSLHIPSAGLHFSEALLGRLAGKGVEIAYITLHVGATELLSVRAIGEPEIEQHQVRPEFFSVGPIAAAQINRAMDEGRRVVAVGTTVLRTLETLAVGNTSKAAIEPQTGWTGLYIYPGFRFNVADALLTNLHRPRSTHLVLTAAFGGYDLVMKSYAEMIAAGGYEFDMFGDSMLIV

SEQ ID NO: 73368 - protein, 367 aa, Tritonibacter horizontis
  misc_feature (1)..(367): tr|A0A132BST9|A0A132BST9_9RHOB S-adenosylmethionine:tRN A ribosyltransferase-isomerase OS=Tritonibacter horizon tis OX=1768241 GN=queA PE=3 SV=1
MGNREPWTFVLHRSIARFMKLSDFDFDLPEDLIATRPAVPRSSARLLVAEQDRLSDARVSDLTQWLRPGDRLVLNDTRVIPARLSGQRHRLSAQGPVAARIEVTLLEPQADGAWTALLKPLKKIKPGEEIVFGADLRAELVAVIDGQVRLQFNLTGEDFDAALSEAGAMPLPPYIAAKRPADAQDKTDYQTVWAKHAGAVAAPTASLHFDAPLLEALADMGVAFTYVTLHVGAGTFLPVKVEDVTTHKMHAEWGQVSQTAAEEISETRAAGHRVIPVGTTALRLIESAARATGAIAPWEGETDIFIYPGFTFRVADALMTNFHLPKSTLMMLVSALMGQERMRQVYAHAVQERYRFFSYGDASLLFP

SEQ ID NO: 73369 - protein, 352 aa, Tropicibacter naphthalenivorans
  misc_feature (1)..(352): tr|A0A0P1G570|A0A0P1G570_9RHOB S-adenosylmethionine:tRN A ribosyltransferase-isomerase OS=Tropicibacter naphtha lenivorans OX=441103 GN=queA PE=3 SV=1
MKLSDFDFDLPDRLIATRPAKPRPSARLLVAEGDQITDARVYDILGWLRPGDRLVLNDTKVIPARLSGTRARDTAQGPMQAKIEVTLLEPRADGLWSALVKPLKKVKEGEEIKFSNDLSAILEVKDEGQGLLRFNLSGDDFDAALNAAGAMPLPPYIAAKRPADAQDRTDYQTVWARNTGAVAAPTASLHFDQDLLQKLADHGVSFTHVTLHVGAGTFLPVKVEDVTTHKMHGEWGEVSPEAAAQIQATKQAGGRVIPVGTTALRLIETAARAGQIAPFQGVTDIFIYPGFDFHVTDALMTNFHLPKSTLLMLVSALMGQDRIRKIYDHALSEEYRFFSYGDASLLIPPSAD

SEQ ID NO: 73370 - protein, 352 aa, Tropicibacter phthalicicus
  misc_feature (1)..(352): tr|A0A238JG94|A0A238JG94_9RHOB S-adenosylmethionine:tRN A ribosyltransferase-isomerase OS=Tropicibacter phthali cicus OX=1037362 GN=queA PE=3 SV=1
MQLSDFDFDLPETLIATRPARPRSSAKLLVAEGDKIHDRVVTDLLDWLRPGDRLVLNDTRVIPARLSGTRHRVSAQGETEARIEVTLLEPRADGCWSGLVKPLKKIKEGEEVVFSPELSAVLEAKEDGQGVLRFNLTGEDFDTALNAAGAMPLPPYIAAKRAADEQDHEDYQTVWAKNTGAVAAPTASLHFDDALLKALREKGVTFTHVTLHVGAGTFLPVKVDDITTHKMHGEWGEVSDQAVAEIKATQEAGGRVIPVGTTALRLIETAARSGDIAPFKGVTDIFIYPGFTFHVADALMTNFHLPKSTLMMLVSALIGKDRIMDIYAHAIENQYRFFSYGDASLLIPDRSL

SEQ ID NO: 73371 - protein, 348 aa, Tropicimonas isoalkanivorans
  misc_feature (1)..(348): tr|A0A1I1E7X5|A0A1I1E7X5_9RHOB S-adenosylmethionine:tRN A ribosyltransferase-isomerase OS=Tropicimonas isoalkan ivorans OX=441112 GN=queA PE=3 SV=1
MRLSDFDFALPDELIATRPASPRSSARLLVARPDRLTDAHVRDLPDFLRPGDRLVLNNTRVIPARLSGVRRRAGVEGETEARIEITLLEPRSDGTWSALAKPAKKVRDGEEIHFGPGFSARVLSRAEGQLALAFALEGDAFQAALESAGAMPLPPYISARRPADDRDRTDYQTVFARHSGAVAAPTASLHFDRPLLQRIAEMGVDFTEVTLHVGAGTFLPVKTDDVSRHRMHAEWGEVSEQAADEVNATRAAGGRIIPVGTTACRLLETAATDDGLAAFRGDTDIFIRPGHRFRATDALMTNFHLPKSTLMMLVSALMGRERMMQVYAHAVAQRYRFFSYGDASLLLP

SEQ ID NO: 73372 - protein, 348 aa, Tropicimonas sediminicola
  misc_feature (1)..(348): tr|A0A239GP23|A0A239GP23_9RHOB S-adenosylmethionine:tRN A ribosyltransferase-isomerase OS=Tropicimonas sedimini cola OX=1031541 GN=queA PE=3 SV=1
MRLSDFDFTLPEDLVATRPANPRTSARLLVAGPDTITDARVSNLPDFLRPGDRLVLNNTKVIPARLSGIRRRDGGEGVTEARIEVTLLDPRGDGSWQALAKPAKKVRDGEEIHFGPGFSARVLGRSEGQLTLGFTLKGDDFDAALDAAGAMPLPPYIAAKRAADAQDRTDYQTVFARHSGAVAAPTASLHFDRPLLERIAAMGVDFTEVTLHVGAGTFLPVKVDDVSEHKMHAEWGEVTGAAAAEINATRAAGGRIIPVGTTACRLIESAATDAGLAPWRGETDIFIRPGFRFRATDALMTNFHLPKSTLMMLISALMGRERVMEIYDHAISERYRFFSYGDASLLIP

SEQ ID NO: 73373 - protein, 351 aa, Tropicimonas sp.
  misc_feature (1)..(351): tr|A0A4Q3ZNR9|A0A4Q3ZNR9_9RHOB S-adenosylmethionine:tRN A ribosyltransferase-isomerase OS=Tropicimonas sp. IMCC 6043 OX=2510645 GN=queA PE=3 SV=1
MRLSDFDFDLPEELIATRPASPRPSARLLVAPGPVAIEDAHVFDLPRFLRPGDRLILNNTKVIPARLSGVRRRVSAQGATEARIEVTLLEPRGDGSWQVLAKPAKKLRDGEEIHFAPGFSARVLARAEGQLTLAFSLAGTEFDAALDAAGAMPLPPYIAARRAADARDRVDYQTIFARHSGAVAAPTASLHFDQALLEEIAAMGVAFTEVTLHVGAGTFLPVKVDDVRHHRMHAEWGEVTEAAAAEINATRAAGGRIIPVGTTACRLIESAAGASGVEPWRGETDIFIRPGFDFRITDGLMTNFHLPKSTLMMLVSALMGRERMMGIYAHAIAGRYRFFSYGDASLLLPGE

SEQ ID NO: 73374 - protein, 364 aa, Truepera radiovictrix
  misc_feature (1)..(364): tr|D7CTT7|D7CTT7_TRURR S-adenosylmethionine:tRNA ribosy ltransferase-isomerase OS=Truepera radiovictrix (strain DSM 17093 / CIP 108686 / LMG 22925 / RQ-24) OX=649638 GN=Trad_2528 PE=3 SV=1
MSLTLSDLTFERPEHLQATEPPEQRGVPRDAVRLLVSTPEGHHGSCFANLANFLEPGDLLVVNRSATLPASLPAEGGFGSFVLNLATRYGRGPNAETWLAEPRWSFAEPGPLPLALGDVVTAGGLRATLVHPYPGLPRLWFVRFDGDVGAAMQRLGAPIRYGYVARAYPLATYQTLFADAPGSAEMPSAARPFSKRVLRCLAARGVGVARITLHTGVSSLEVTEYKAARHPLPPEPFEVPPETADAVRETKAAGGRVIAVGTTVVRALESAWDGTMKPARGFTRLYLHPGRAVNVVDGLLTGFHDPKASHLAMLYAVAGQALVRGAYAEAVREGYLWHEFGDSHLILPRSGEHPSMLRPSEGPA

SEQ ID NO: 73375 - protein, 341 aa, Tumebacillus algifaecis
  misc_feature (1)..(341): tr|A0A223CZE9|A0A223CZE9_9BACL S-adenosylmethionine:tRN A ribosyltransferase-isomerase OS=Tumebacillus algifaec is OX=1214604 GN=queA PE=3 SV=1
MRVEEFDFHLPEELIAQHPLEERTASRLMTLNKRTGEIGHHRFSDLLDFLQPGDALILNNTRVLPARLYGVKSDTGAKVEFLLLKELEPNVWEVLVRPGKKLRIGAQVTFGDGLLTAEVLEKTEEGGRIVRFSFEGIFYEILDQLGQMPLPPYITEQLEDQERYQTVFSKHRGSAAAPTAGLHFTEDLLKQIEAKGIKIGFVTLHVGLGTFRPVSAETLDEHKMHAEWYHLPQETADLINATKAGGHRVVAVGTTACRTLETAGQKEGDLREASGWTDIFIYPGVEFKVVDALITNFHLPKSSLVMLVSALAGRESVLHAYAEAVREEYRFFSFGDAMFIY

SEQ ID NO: 73376 - protein, 340 aa, Tumebacillus avium
  misc_feature (1)..(340): tr|A0A1Y0IVA0|A0A1Y0IVA0_9BACL S-adenosylmethionine:tRN A ribosyltransferase-isomerase OS=Tumebacillus avium OX =1903704 GN=queA PE=3 SV=1
MRVEEFDFHLPDELIAQHPLLERTASRLMTLNKRTGEIGHRRFSDLIEFLEPGDALILNDTRVLPARLYGVKSDTGAKVEFLLLKEMEPNVWEVLVRPGKKLRVGTQVTFGDGLLTAEVLDTTEEGGRIVRFSYEGMFYEILDQLGQMPLPPYITEQLDDQERYQTVFSKHRGSAAAPTAGLHFTKEFLEQIQAKGIQIGFVTLHVGLGTFRPVSADTLDEHKMHAEWYHLPQETADLIRETKAGGHRVIAVGTTACRTLETAGQKGEIREASGWTDIFIYPGVAFTVVDALVTNFHLPKSSLVMLVSALAGREAVLRAYAEAVREEYRFFSFGDAMFIY

SEQ ID NO: 73377 - protein, 343 aa, Tumebacillus flagellatus
  misc_feature (1)..(343): tr|A0A074LV00|A0A074LV00_9BACL S-adenosylmethionine:tRN A ribosyltransferase-isomerase OS=Tumebacillus flagella tus OX=1157490 GN=EL26_05005 PE=3 SV=1
MEARRLHHFQLPEALNATTPPERRGLRRDHVRMMVLDRKTGATAHAKFFQLDQFLKKDDLLLLNASRTVPAVLQAVRLRSGEEVEIRLAHRLDDSVWQALVVAEGVAVGERFIFSPSLTADVVKEQGSGPFVTLQFSREGAALYDEIYQLGEPVRYEYIHTDWSLDYYQTVYASVPGSVEMPSAGRAFSWEMLFRLQRKGVKIAYMQLHTGLSYLLDDSWRHDPRENHEQYMIPQETVEAVEQCKAAGGRVIAVGTTVVRSLETAVDAEGVLRAQSGWTNLYIHEGFPLRVVDGLITGFHEPEASHLDLLSAFVDPSLLYTAYQEAIDREYLWHEFGDMNLIL

SEQ ID NO: 73378 - protein, 342 aa, Tumebacillus flagellatus
  misc_feature (1)..(342): tr|A0A074LR03|A0A074LR03_9BACL S-adenosylmethionine:tRN A ribosyltransferase-isomerase OS=Tumebacillus flagella tus OX=1157490 GN=queA PE=3 SV=1
MRLDQFDFQLPEELIAQHPLEERTASRLMTLNKRTGETGNHMFSDLIDYLEEGDTLILNDTRVIPARLYGMKPDTGAKVEFLLLKEKESAPDTWEVLVRPGKKVRPGTTVSFGDGLLTAEVLDSTEEGGRIVRFSYDGIFYEVLERLGEMPLPPYITEQLEDDERYQTVFSKHRGSVAAPTAGLHFTQDYLAKIQAKGIRIGYVTLHVGLGTFRPVSVEDINEHKMHSEWYDMPQSTADLIRETKANGKRVVCVGTTACRTVETVGNKGEIAASSGWTDIFIYPGYEFKVVDALLTNFHLPKSSLMMLISALAGLENVMRAYEEAVRERYRFFSFGDAMFIY

SEQ ID NO: 73379 - protein, 343 aa, Tumebacillus permanentifrigoris
  misc_feature (1)..(343): tr|A0A316DA31|A0A316DA31_9BACL S-adenosylmethionine:tRN A ribosyltransferase-isomerase OS=Tumebacillus permanen tifrigoris OX=378543 GN=C7459_105101 PE=3 SV=1
MEARHLHQFHLPDALNATTPPERRGVRRDHVQMMVLDRATGQTQHETFFQLDRFLKPGDLLILNASRTVPAVLKATRLAGAEHVEVRLAHRLDESVWQALVVAQGVCIGERLRFSPTLEAEVVAQQTGRPFVTLQFSREGAALYDEIYQLGEPVRYEYIHTDWGLDYYQTVYASVPGSVEMPSAGRAFSWELLFKLQRKGVRLAYMQLHTGLSYLLDDRWHQDPRENIEQYMIPQETVEAVEQCKAAGGRVIAVGTTVVRSLETAVDTDGILRAQSGWTNLYIHDRYPLRVVDGLITGFHEPEASHLDLLSAFVKPELLYAAYQEAIDRQYLWHEFGDMNLIL

SEQ ID NO: 73380 - protein, 340 aa, Tumebacillus permanentifrigoris
  misc_feature (1)..(340): tr|A0A316D5F2|A0A316D5F2_9BACL S-adenosylmethionine:tRN A ribosyltransferase-isomerase OS=Tumebacillus permanen tifrigoris OX=378543 GN=queA PE=3 SV=1
MRLDQFDFELPEELIAQHPLAERTASRLMTLNKRTGETGNHKFADLIEYLQAGDTLILNDTRVIPARLYGVKPDTGAKVEFLLLKETGIDTWEVLVRPGKKVRPGTTVSFGDGLLTAEVLDSTEEGGRIVRFSYDGIFYEVLDRLGEMPLPPYITAQLDDNERYQTVFNKHRGSVAAPTAGLHFTTEFLDRLAFKGIRIGFVTLHVGLGTFRPVAAEDILDHKMHAEYYDMPAETADLISATKAAGGRVICVGTTACRTVESVGMKGEVTASSGWTDIFIHPGYEFKLVDALLTNFHLPKSSLMMLISALAGHENVMRAYEEAVRERYRFFSFGDAMFIY

SEQ ID NO: 73381 - protein, 340 aa, Tumebacillus sp.
  misc_feature (1)..(340): tr|A0A4R2QZ76|A0A4R2QZ76_9BACL S-adenosylmethionine:tRN A ribosyltransferase-isomerase OS=Tumebacillus sp. BK43 4 OX=2512169 GN=queA PE=3 SV=1
MRVEEFDFHLPEKLIAQHPLLERTASRLMALNKRTGEIGHHRFSDLIEFLQPGDALILNDTRVLPARLYGVKSDTGAKVEFLLLKELEPNVWEVLVRPGKKLRVGAQVSFGDGLLTADVLDTTEEGGRIVRFSYEGMFYEILDRLGQMPLPPYITEQLEDQERYQTVFSKHRGSAAAPTAGLHFTSEFLEQIAAKGVRIGFVTLHVGLGTFRPVSADTLDEHKMHAEWYHLPQVTADLIRETKAAGHRVIAVGTTACRTLETAGQKGEIREASGWTDIFIYPGVEFTVVDALVTNFHLPKSSLVMLVSALAGREAVLRAYAEAVREEYRFFSFGDAMFIY

SEQ ID NO: 73382 - protein, 342 aa, Turicibacter sanguinis
  misc_feature (1)..(342): tr|D4W4J2|D4W4J2_9FIRM S-adenosylmethionine:tRNA ribosy ltransferase-isomerase OS=Turicibacter sanguinis PC909 OX=702450 GN=queA PE=3 SV=1
MRVDQFDFELPDELIAQTPLKDRDTSRLMVLNKKTGEVKHEVFHDVLNYLRPNDTLVLNNTKVMPARLMGQKPDTGASIEVLLLKQEQQDCWETLVKPAKRVKVGTIVEFGDGRLKAECISTGDMGKRVFKFMYDGIFYEVLDSLGEMPLPPYITEKLDDRDRYQTVFAKEIGSAAAPTAGLHFTPELLEEIQAKGVKIAYVTLHVGLGTFRPVSVDSVEEHDMHAEFYQMSQETADILNQTHELGGRIITVGTTSTRTLETIARDHGKFVACEGWTDIFIYPPYQFKGIDGMITNFHLPKSTLIMLISSLAGQDAVMNAYKIAVEEKYRFFSFGDAMLIIE

SEQ ID NO: 73383 - protein, 342 aa, Turicibacter sanguinis; identical to SEQ ID NO: 73382
  misc_feature (1)..(342): tr|A0A173QUW0|A0A173QUW0_9FIRM S-adenosylmethionine:tRN A ribosyltransferase-isomerase OS=Turicibacter sanguini s OX=154288 GN=queA PE=3 SV=1

SEQ ID NO: 73384 - protein, 343 aa, Turicibacter sp.
  misc_feature (1)..(343): tr|A0A0X8G2I5|A0A0X8G2I5_9FIRM S-adenosylmethionine:tRN A ribosyltransferase-isomerase OS=Turicibacter sp. H121 OX=1712675 GN=queA PE=3 SV=1
MRVEQFDFELPEELIAQTPLKDRDTSRLMVLNKKTGEVNHEVFHDIINHLRPNDTLVLNNTKVMPARLIGQKPDTGASIEVLLLKQEEQDCWETLVKPAKRVKIGTIVEFGDGRLKAECIGTGDMGKRIFKFVYEGIFYEVLDSLGEMPLPPYITEKLDDRDRYQTVFAKEIGSAAAPTAGLHFTTELLDQIKAKGINITYVTLHVGLGTFRPVSVDSVEEHDMHAEFYQMSQETADVLNATHEKGGRIITVGTTSTRTLETIARDHGKFIACEGWTDIFIYPPYQFKGIDGMITNFHLPKSTLIMLISALAGQESVMNAYRIAVEEKYRFFSFGDAMLIIEE

SEQ ID NO: 73385 - protein, 353 aa, Turicimonas muris
  misc_feature (1)..(353): tr|A0A227KPE2|A0A227KPE2_9BURK S-adenosylmethionine:tRN A ribosyltransferase-isomerase OS=Turicimonas muris OX= 1796652 GN=queA PE=3 SV=1
METEQYLSDFDFELPEELIAQFPLADRTASRLLHVSKDGKIEDLTFRDILKLLRKDDLLVFNNTKVIKARLNGNKESGGAVEAMLERILGEYEVLTMLRSSKSPKPGTKLFFVKDGVEGRAEAEVTGRQGEFFLLQFTEPVLDVLEKFGKVPLPPYITHAASKSDESRYQTVYAKEPGAVAAPTAGLHFTDELLKDIKALGCEEVFVTLHVGAGTFQPVRSEKLSEHKMHSEWYHIDQKTADAINKALKEGRRVVCVGTTSLRAVESAAALEEDNQVKAGIHETRLFIKPGYKFKVCGAMVTNFHLPKSTLVMLVSALSGKDEIFKAYKHAVEEKYRFFSYGDACFLEKKETV

SEQ ID NO: 73386 - protein, 363 aa, Turneriella parva
  misc_feature (1)..(363): tr|I4B2F9|I4B2F9_TURPD S-adenosylmethionine:tRNA ribosy ltransferase-isomerase OS=Turneriella parva (strain ATC C BAA-1111 / DSM 21527 / NCTC 11395 / H) OX=869212 GN=T urpa_0815 PE=3 SV=1
MKDFWPEEYADLNFDLPEELIATHPVEPADHARLMIIDRVRGTITHSRFDKLSEILRAGDAIFYNATQVEARRVYLKKPDAEKTFECVFLKSVPPPDLPPLAGGGAEGRGGTWQVLMRGIRRLKDGQVLQAVKDPAFEFLLHRADDKIFVTTHRPLGAADFARIGEMPIPPYMRRAATADEADTYQNFFKHQIAEKEKVQGSAASPTAALHFTTGLHMKLREQGVDLYPLCLDIGYGTFAPLTAENFSQGELHAEHYYIPPLTAEKFAGAVTGRKIALGTTSLRCLISYQRSGKAEGETALFVTPRDNVSGIDGLITNFHLPQSSLLLLTAAVCRRELLAQAYRAAIRERYRFYSYGDAMLII

SEQ ID NO: 73387 - protein, 384 aa, Tychonema bourrellyi
  misc_feature (1)..(384): tr|A0A2G4EWV9|A0A2G4EWV9_9CYAN S-adenosylmethionine:tRN A ribosyltransferase-isomerase OS=Tychonema bourrellyi FEM_GT703 OX=2040638 GN=queA PE=3 SV=1
MTEIDWSLDGYDYELPPDRIAQNPVVPRDSSRLLVVDSPSSQQHRIFRDLPDLLNPGDLLVLNNTRVIPARLYGHKPNGPAVEILLMEERQHNCWLALVKPGKRLKLGAKIEFDPICNEESAGPCCCLSQATATLSDRLTATVIERDDATGGRLLEFNLPTEMSLIPFLDEYGHVPLPPYIDNSQAAPEQYQTVYADRLGAIAAPTAGLHFTKELFSRLEQRGIETTFVTLHVGVGTFRPVEVEDVTTHKMHGEWVEVSPATVEKIRETKARGGRIIAVGTTAVRALEGAAAATETPIGDFPLQPFSGQTNLFIYPGYKWRVVDGMITNFHLPRSTLLMMLSAMIGRSRVLDLYLEAIAQQYRFYSFGDAMLILPEAVFDQIGD

SEQ ID NO: 73388 - protein, 353 aa, Tyzzerella nexilis
  misc_feature (1)..(353): tr|B6FSR3|B6FSR3_9FIRM S-adenosylmethionine:tRNA ribosy ltransferase-isomerase OS=Tyzzerella nexilis DSM 1787 O X=500632 GN=queA PE=3 SV=1
MAALDKKGSFKKMRKEDFYFDLPEELIAQDPLEDRSSSRLLVLDKETGKVEHHVFREIIDYLQEGDCLVINDTKVIPARLIGSKIGTDAKIEVLLLKRKENDVWETLVKPGKKAKVGTRISFGDGLLVGEVVDIVEEGNRLIHFEYEGIFEEILDQLGQMPLPPYITHQLEDKNRYQTVYAKHSGSAAAPTAGLHFTPELLKEIEEKGVQIARVTLHVGLGTFRPVKVDNILEHHMHSEFYQIDEEAAEKINRAKESGHRVICVGTTSCRTIESAADKNGKLHATNGWTEIFIYPGYEFKVLDCLITNFHLPESTLVMLVSALAGREQVLSAYEEAVKEKYRFFSFGDAMFIK

SEQ ID NO: 73389 - protein, 341 aa, Tyzzerella nexilis; identical to SEQ ID NO: 65445
  misc_feature (1)..(341): tr|A0A413J5J8|A0A413J5J8_9FIRM S-adenosylmethionine:tRN A ribosyltransferase-isomerase OS=Tyzzerella nexilis OX =29361 GN=queA PE=3 SV=1

SEQ ID NO: 73390 - protein, 345 aa, Tyzzerella sp.
  misc_feature (1)..(345): tr|A0A1Y4URI2|A0A1Y4URI2_9FIRM S-adenosylmethionine:tRN A ribosyltransferase-isomerase OS=Tyzzerella sp. An114 OX=1965545 GN=queA PE=3 SV=1
MKTSDFYYDLPEELIAQEPLKDRSSSRLLVLDNETGEIEHRIFKDITEYLQEGDCLVINDTKVLPARLIGERVGTGARIEILLLVRKNIDTWEVLVKPGKKARPGDKVSFGGGKLVAEILETIEGGNRIIKFHYDGVFENILEELGEMPLPPYITHKLEDKNRYQTVYAEHDGSAAAPTAGLHFTPELLEKIKNMGVKIAHVTLHVGLGTFRPVKVDDVTNHEMHSEYYVVEKSQADIINDTKKNGGRVIAVGTTSTRTLESVTDENGVVHEGNGWTKIFIYPGYKFKAIDCLITNFHLPESTLVMLVSALAGKENIFKAYEIAVKEKYRFFSFGDAMFIKVGKK

SEQ ID NO: 73391 - protein, 345 aa, Tyzzerella sp.
  misc_feature (1)..(345): tr|A0A352URU4|A0A352URU4_9FIRM S-adenosylmethionine:tRN A ribosyltransferase-isomerase OS=Tyzzerella sp. OX=205 3632 GN=queA PE=3 SV=1
MKTSDFYFDLPEELIAQEPLADRASSRLMVVHKDSGKREHRHFRDIKEYLRAGDCLVINNTKVLPARLYGERVGTGAAIEILLLVRKDMDTWEVLVRPGKKARPGDRISFGGGKLIAEVLEVIEGGNRIIKFEYEGVFENILEELGEMPLPPYITHKLEDKNRYQTVYAEHEGSAAAPTAGLHFTPELLKEIEDMGVRIAHVTLHVGLGTFRPVKVEDVLEHEMHSEYYVVEPEQAAIMNETKKNGGRIIAVGTTSTRTLESVTDENGVIQPKSGWTKIFIYPGYTFKAVDCLVTNFHLPESTLIMLVSALMGKDLVMESYAEAVKERYRFFSFGDACLFLAKEK

SEQ ID NO: 73392 - protein, 345 aa, Uliginosibacterium sp.
  misc_feature (1)..(345): tr|A0A2N4XT26|A0A2N4XT26_9RHOO S-adenosylmethionine:tRN A ribosyltransferase-isomerase OS=Uliginosibacterium sp . TH139 OX=2067453 GN=queA PE=3 SV=1
MMLTLDDFDYFLPPELIAQTALPDRSASRLLVAGPDSLEDRVFRDLPGLLRAHDLLVLNDSRVLHARLFGHKESGGQVEVMVERPIGDHEVLAMIRASKSPKPGGRIRLMEAFDVEVIGRAGANQEFFQLRFPTDASAVDYIERYGKLPLPPYIEHSADSGDETRYQTVYSRELGSVAAPTAGLHFDDELFAALDAKSVRRAFVTLHVGAGTFQPVREHDLSKHQMHREYYSIPQDTVDAIATTRAAGGRVICVGTTALRALESAAQHGEVRAGSDETGIFIMPGYEFRVADALITNFHLPKSTLLMLVSALAGVDTIRQAYAHAIANRYRFFSYGDAMFLNRAR

SEQ ID NO: 73393 - protein, 351 aa, Ulvibacter antarcticus
  misc_feature (1)..(351): tr|A0A3L9YGE7|A0A3L9YGE7_9FLAO S-adenosylmethionine:tRN A ribosyltransferase-isomerase OS=Ulvibacter antarcticu s OX=442714 GN=queA PE=3 SV=1
MGMKLSNFQFNLPEELLAEYPADNRDESRLMVLNRKEKTIEHKMFKDLIDYFEEDDVLVLNNTKVFPARLFGNKEKTGARIEVFLLRELNSETRLWDVLVDPARKIRIGNKLYFGEDETLVAEVIDNTTSRGRTLRFLFDGSYEEFRSKLTELGETPLPKYIKRDVEPEDAERYQTIFAKNEGAVAAPTAGLHFSKHLLKRLEIKGVDFAEVTLHVGLGTFSAVEVEDLSKHKMDSEEMIIDEPTAKIINRGIERKKRVCAVGTTAMRALESSVSSGHTLNAYSGWTNKFIFPPYDFSIANAMVTNFHTPKSTLLMMVAAFAGHEFIKEAYAEAIKEKYRFYTYGDAMLII

SEQ ID NO: 73394 - protein, 351 aa, Ulvibacter litoralis
  misc_feature (1)..(351): tr|A0A1G7C4U5|A0A1G7C4U5_9FLAO S-adenosylmethionine:tRN A ribosyltransferase-isomerase OS=Ulvibacter litoralis OX=227084 GN=queA PE=3 SV=1
MGMKLSAFQFNLPDELLAEYPADNRDEARLMVLNRKEQTIEHKMFKDLIDYFEEDDVLVLNNTKVFPARLFGNKEKTGARIEVFLLRELNPETRLWDVLVDPARKIRIGNKLYFGDDETLVAEVIDNTTSRGRTLRFLFDGSYEEFRNKLTELGETPLPKYIKREVEPEDAERYQTIFAKNEGAVAAPTAGLHFSKHLLKRLEIKGIDFAEVTLHVGLGTFSSVEVEDLSKHKMDSEEMIIDEAAAKIINNGIERKKRVCAVGTTAMRALESSVSSGYRLNAYSGWTNKFIFPPYDFSIANAMITNFHTPKSTLLMMVSAFAGHDFIKKAYDEAIKEKYRFYTYGDAMLII

SEQ ID NO: 73395 - protein, 349 aa, Ulvibacter sp.
  misc_feature (1)..(349): tr|A0A167F5V9|A0A167F5V9_9FLAO S-adenosylmethionine:tRN A ribosyltransferase-isomerase OS=Ulvibacter sp. LPB000 5 OX=1763537 GN=queA PE=3 SV=1
MKLSNFNFELPEELLAEYPAPNRDEARLMVLNRKEKTIEHKMFKDLIDYFNEDDVLVLNNTKVFPARLFGNKEKTGARIEVFLLRELNPETRLWDVLVDPARKIRIGNKLYFGDDESLVAEVIDNTTSRGRTLRFLFDGSYEEFRNKLTELGETPLPKYIKREVEPEDADRYQTIFAKNEGAVAAPTAGLHFSKHLLKRLEIKGVNFAEVTLHVGLGTFSPVEVEDLSKHKMDSEEMSVNDAAAEIINTGINRKKRVCAVGTTAMRALESSVSSDHMLNPYSGWTNKFIFPPYDFSIANAMVTNFHTPKSTLLMMISAFAGHDFIKEAYAEAIKEKYRFYTYGDAMLII

SEQ ID NO: 73396 - protein, 351 aa, Ulvibacter sp.
  misc_feature (1)..(351): tr|A0A2N0EQS4|A0A2N0EQS4_9FLAO S-adenosylmethionine:tRN A ribosyltransferase-isomerase OS=Ulvibacter sp. MAR_20 10_11 OX=1250229 GN=queA PE=3 SV=1
MGMKLSNFSFNLPPELLAEYPAPNRDESRLMVLNRKEKTIEHKMFKDLINYFNEDDVLVLNNTKVFPARLFGNKEKTGARIEVFLLRELNSETRLWDVLVDPARKIRIGNKLYFGDDESLVAEVIDNTTSRGRTLRFLFDGSYEEFRSKLTELGETPLPKYIKREVEPEDAERYQTIFAKTEGAVAAPTAGLHFSKHLLKRLEIKGINFAEVTLHVGLGTFSPVEVEDLSKHKMDSEEIIIGEDAVGVINNGIAKKRRVCAVGTTVMRALESSVSSDHTLNAYSGWTNKFIFPPYDFSIANTMVTNFHTPKSTLLMMVAAFAGHEFIKEAYAEAIKEKYRFYTYGDAMLII

SEQ ID NO: 73397 - protein, 352 aa, Umboniibacter marinipuniceus
  misc_feature (1)..(352): tr|A0A3M0A5M7|A0A3M0A5M7_9GAMM S-adenosylmethionine:tRN A ribosyltransferase-isomerase OS=Umboniibacter marinip uniceus OX=569599 GN=queA PE=3 SV=1
MKRSSFSFELPPHLIADMPMSERTNSRLLKLDGETGDTEDLGFRDILSLINAGDLLVFNDTRVIPARLFAQKATGGKLEVLVERVLSEDSVLAHIRSSKSPKEGSIIKFPDDANAQAEMVGRDGALFKLVFNQPVLPLLDRIGHMPLPPYIERSDNDEDKERYQTVYNRAPGAVAAPTAGLHFDEALLAELREKGVETAFVTLHVGAGTFQPVRADDIESHEMHSEWVEVNDSVVEAVKQTKARGGRVIAVGTTSVRSLESAAQSGQLEPMSDDTSIFIYPGKSFNVVDALITNFHLSESTLIMLVSAFAGYHHTMSAYQHAIAEEYRFFSYGDAMFITRNNAANAEEVPNA

SEQ ID NO: 73398 - protein, 355 aa, Unknown
  misc_feature (1)..(355): tr|E0XYT8|E0XYT8_9BACT S-adenosylmethionine:tRNA ribosy ltransferase-isomerase OS=uncultured Acidobacteria bact erium HF0770_27F21 OX=710730 GN=queA PE=3 SV=1
MRIELFDYHLPADLIAQSPPERRDESRLLSLIRGVTDKPSEYRFAEVPELLREGDVLIVNDAMVAPQRLYAQRTTGGAVEILLLDDAGASVGSQGSVWEAMIRGGKRLRPGEILYLDDCATHLVIHGETKKGRHLVELPANYRAEEVLDRWGQMPLPPYIRRYRGDEHGTIDRERYQTVYAREPGAVAAPTAGLHFTQALLEKIERDGVKIETLTLKVGTGTFQPVRVGQVAEHRMESESYVLPDQCVSAIVAAKAKQGRVIGVGTTVVRTLEHAARASDGIENAAGAGKADIFIYPGFRFHVVDAMLTNFHLPRSTPILMAAAFAGRERLLQAYEFAVRQRFRFYSYGDAMLIT

SEQ ID NO: 73399 - protein, 347 aa, Acidobacteriales bacterium
  misc_feature (1)..(347): tr|E0XUI5|E0XUI5_9BACT S-adenosylmethionine:tRNA ribosy ltransferase-isomerase OS=uncultured Acidobacteriales b acterium HF0200_23L05 OX=710732 GN=queA PE=3 SV=1
MDLSEFGFHLPDELIAQEAEPTRDAARLMRLDRKTGEIEHHCVSDLADLLKPGDLIVVNDSRVIPARLLGRRDPGGGKAECLLLSRLDETRWNALVHPGQKLRQGARAVFEAGEHYLELEVLDCHFHGRRTIRLVSSGDDIETAIDAIGHTPLPPYIKREVQSVDRERYQTIFARKPGSVAAPTAGLHFTPELLARLITRGISRQAITLHVGYGTFEPVRTEKVEDHRVAAEHYYVSEGTAEAVNCALDEGRRIIAVGTTTTRTLEAVARLNGGRLRPGEGQTDLYIHGSFDFEVVGGLLTNFHLPRSSLLLLAAAFAGHERLLEAYGQAIARCYRFYSYGDAMLIL

SEQ ID NO: 73400 - protein, 350 aa, Alphaproteobacteria bacterium
  misc_feature (1)..(350): tr|A0A212JUK7|A0A212JUK7_9PROT S-adenosylmethionine:tRN A ribosyltransferase-isomerase OS=uncultured Alphaprote obacteria bacterium OX=91750 GN=queA PE=3 SV=1
MRVDAFDFDLPRERIAERPASPRDAARLLHVRADALGDLHVRDLPDLVAPGDVIVVNDSRVIPARLYGLRMRPGVDPLRVEILLHKAEGGPDWRAFARPGKRLKAGDALDFGGGFRAEVTGKSPEGDVGVRFDRHGADLIAALEAHGEMPLPPYIHRDHGADDRDKVDYQTVYARAEGSVAAPTAGLHFTPELLARLDAKGAKRVAVTLHVGAGTFLPVKAEDTENHKMHAEWGTIAPEVAEAINAARAGGGRLLAVGTTATRILETAADGAGIVHPFAGETAIFLTPGYRFRAVDRLMTNFHLPKSTLFMLVSAFAGLERMQSAYAHAIATGYRFYSYGDSSLLEGAPR

SEQ ID NO: 73401 - protein, 347 aa, Anaerotruncus sp.
  misc_feature (1)..(347): tr|A0A1C6GP39|A0A1C6GP39_9FIRM S-adenosylmethionine:tRN A ribosyltransferase-isomerase OS=uncultured Anaerotrun cus sp. OX=905011 GN=queA PE=3 SV=1
MSQPLLKKDFYFDLPQELIAQHPIYPRDHSRLLQLDRTTGEIAHKHFYDIVDVLQPGDTLVVNDSKVLPARLYGHKEDTGAKAEVLLLKKQATEDLWECLVKPGRKIREGTKLVFGEGLLTGEVCKVCDDGNRIIRFACKGRSFYDVIDQIGQMPLPHYITAELEDKDRYQTVYAHERGSAAAPTAGLHFTEELLERLRQKGVVIARVTLHVGLGTFRPVKEENVLDHKMHTEHYVIPQETADAIALAKKNGKRVIAVGTTSCRTLESCYQKNGAVVPFEDDTSIFIYPGYTFGVIDGMITNFHLPESTLIMLVSALAGREPILNAYRVAVLEKYRFYSFGDAMLIL

SEQ ID NO: 73402 - protein, 363 aa, Avibacterium sp.
  misc_feature (1)..(363): tr|A0A486XER8|A0A486XER8_9PAST S-adenosylmethionine:tRN A ribosyltransferase-isomerase OS=uncultured Avibacteri um sp. OX=1936169 GN=queA PE=3 SV=1
MRVSDFYFDLPDALIARYPKADRSASRLLQLNGENGELFHRTFADVVDLINEGDLLIFNNTRVIPARMYGRKASGGKVEVLVERILSEDRFLAHIRSSKAPKEGAELFLGEDKLGEGKGIKMIMKARHDTLFELEMAEKSTALLDVLQQIGHMPLPPYIDRPDEDADKERYQTVYNKVPGAVAAPTAGLHFDNELLEKLKAKGVNFAFVTLHVGAGTFQPVRVENIEDHKMHAEYVEVPQETVDAILRTKANGKRVIAVGTTSVRSIESAALFSQENQSEQLLAPYFSDTSIFLYPGKKFLVVDALITNFHLPESTLIMLVSAFAGYKHTMQAYESAVQNGYRFFSYGDAMFITKNPNVTGLD

SEQ ID NO: 73403 - protein, 347 aa, Unknown
  misc_feature (1)..(347): tr|A0A126SXW4|A0A126SXW4_9BACT S-adenosylmethionine:tRN A ribosyltransferase-isomerase OS=uncultured bacterium UPO42 OX=1776967 GN=queA PE=3 SV=1
MVSVAASLTLAAFDYELPPALIAQAPLPQRSASRLLVVNDCLHDRHIGDLPEQLQTGDLLVLNDSRVLHARLYGRKDSGGQVEVLVERIVGENEVLAQVRASKPPRPGSRLRLEDALEVEVGERGGEFYRLRLPGEALTLIERHGRLPLPPYITRAATAPDEARYQTVYARETGSVAAPTAGLHFDEALFDRLRARGVDLAHVTLHVGAGTFQPVRTDNLAAHRMHTERYTIPSATVAAIAQTRARGGRVVAVGTTTLRALEAAADDAGNVKVGAGETALFITPGFAFRVVDRLLTNFHLPRSTLLMLVSAFAGVEEIRAAYRHAIAERYRFFSYGDAMLLTRQDNA

SEQ ID NO: 73404 - protein, 149 aa, Unknown
  misc_feature (1)..(149): tr|A0A141RHL8|A0A141RHL8_9BACT S-adenosylmethionine:tRN A ribosyltransferase-isomerase (Fragment) OS=uncultured bacterium OX=77133 PE=3 SV=1
MRVADFSFELPESLIAHYPMPERSSCRLLSLDGPTGALTHGTFTDLLDKLNPGDLLVFNNTRVIPARLFGRKASGGKIEVLVERMLDDKRILAHIRASKAPKPGAELLLGDDESIKATMTARHDALFEVEFNDERTVLDILNAIGHMPL

SEQ ID NO: 73405 - protein, 352 aa, Bacteroides sp.; identical to SEQ ID NO: 64050
  misc_feature (1)..(352): tr|A0A1C5X885|A0A1C5X885_9BACE S-adenosylmethionine:tRN A ribosyltransferase-isomerase OS=uncultured Bacteroide s sp. OX=162156 GN=queA_1 PE=3 SV=1

SEQ ID NO: 73406 - protein, 405 aa, Bacteroides sp.
  misc_feature (1)..(405): tr|A0A1C5VPE9|A0A1C5VPE9_9BACE S-adenosylmethionine:tRN A ribosyltransferase-isomerase OS=uncultured Bacteroide s sp. OX=162156 GN=queA_2 PE=3 SV=1
MEDTKHIKISDYNYPLPDDRIAKFPLPVRDQSKLLVYRHGQISETHFTSLPDYLEPGTLMIFNNTKVIQARLHFRKETGALIEIFCLEPIEPNDYALNFQQTQHAAWLCMIGNLKKWKEGPLHKEMTVKGKTLTLTATRGACHGTSHWIDFTWDNPEVTFADILEFFGELPIPPYLNRETQESDKETYQTVYSKIKGSVAAPTAGLHFTERVLNALKEKGVDLEEVTLHVGAGTFKPVKSEEIEGHEMHTEYISVNRSTIEKLLAHGGEAVAVGTTSVRTLESLYYIGVTLSQHPDASQEELHVQQWQPYETHPALSTLEALQHILDYMDRHGLEALHTSTQIIIAPGYEYHIVKKMVTNFHQPQSTLLLLVSAFVKGNWRPIYDYALAHDFRFLSYGDSSLLIP

SEQ ID NO: 73407 - protein, 103 aa, Bacteroidetes bacterium
  misc_feature (1)..(103): tr|H5SMT8|H5SMT8_9BACT S-adenosylmethionine:tRNA ribosy ltransferase-isomerase OS=uncultured Bacteroidetes bact erium OX=152509 GN=HGMM_F50F04C37 PE=3 SV=1
MQGKPSSSLPPLVWKEAESLPPPSEALATLAPFTGSTALYILPGYPFQLAQALVTNFHLPGSTLLALVEAFIGREGIEKVYTYALTEGFRFLSYGDTSLLWRI

SEQ ID NO: 73408 - protein, 364 aa, Unknown
  misc_feature (1)..(364): tr|E0XST0|E0XST0_9PROT S-adenosylmethionine:tRNA ribosy ltransferase-isomerase OS=uncultured beta proteobacteri um HF0130_04F21 OX=710819 GN=queA PE=3 SV=1
MKRNFRLEDFDYELPDNLIAQYPAKTRSESRLLNVDLSDKKNLNFEELSFVDLASKLKKDDLLIFNNSRVIPAKLNCVKSTGGSVEILITNKLQTEKENIFLCNAMLKPSKKIFLGQKLKIKGSSETLTIIENNLKSENNFVIEFKNPIDHILKNFGIVPLPPYIKRHPEKQDYTDYQNIFATTPGSIAVPTAGLHFDNLVFKKLAEKGVKYEFVTLHVGIGTFQPIRVVDISRHEMHSEFCSVSNNCAKAINKATRENRRIIAVGTTSLRVLESLASIEIQEKSHIKSVSPRSWRTNLFVKPGFKFQMVSGLITNFHLPKSTLLILVSTFLGHETCMRVYKEAIKKEFKFFSFGDAMMAIKPQ

SEQ ID NO: 73409 - protein, 341 aa, Blautia sp.; identical to SEQ ID NO: 64236
  misc_feature (1)..(341): tr|A0A1C5XEV6|A0A1C5XEV6_9FIRM S-adenosylmethionine:tRN A ribosyltransferase-isomerase OS=uncultured Blautia sp . OX=765821 GN=queA PE=3 SV=1

SEQ ID NO: 73410 - protein, 341 aa, Blautia sp.
  misc_feature (1)..(341): tr|A0A1C5UY24|A0A1C5UY24_9FIRM S-adenosylmethionine:tRN A ribosyltransferase-isomerase OS=uncultured Blautia sp . OX=765821 GN=queA PE=3 SV=1
MRTSDFYYELPQELIAQDPLEDRSSSRLMHLSMADGSIEHRHFRDILDYLNKGDTLVINDTKVIPARLYGHKEETGAVIEILLLKRRENDIWECLVKPGKKARPGAKITFGDGILKGEIIDVVDEGNRLIQFHYEGIFEEILDQLGEMPLPPYITHKLKDKNRYQTVYAKHEGSAAAPTAGLHFTKELLEQVKAKGVNIAHVTLHVGLGTFRPVKVDDVEQHHMHSEFYIVEEDQAKLINDTKKNGGRVIAVGTTSCRTLESATGEDGILKAGSGWTEIFIYPGYKFKMIGGLITNFHLPESTLVMLVSALAGKENIMHAYEVAVQERYRFFSFGDAMLIL

SEQ ID NO: 73411 - protein, 341 aa, Butyricicoccus sp.
  misc_feature (1)..(341): tr|A0A1C6GWG7|A0A1C6GWG7_9CLOT S-adenosylmethionine:tRN A ribosyltransferase-isomerase OS=uncultured Butyricico ccus sp. OX=1193532 GN=queA PE=3 SV=1
MKKSDFYFDLPERLIAQHPLEQRDASRLMVLDRRDGSVTHRHFRDLLEYVQPGDCMVFNNSRVIPARLMGHAVGHVTPIEVLLLTDKGDGLWECLTRPGKKTRTGVELTFGDGLLTATVEAVQPDGNRLIRFHYEGIFLEILDKLGTMPLPPYIKEKLDDPERYQTVYSKTPGSAAAPTAGLHFTTELLDALKAKGVKLAFVTLHVGLGTFRPVKEDEITDHIMHSEYYVMDEMTAGIINDTRAAGGKIWAVGTTATRTLETIAADDGTVRAQSGWTDIFIYPGYKFKAVDHLVTNFHLPESTLMMLISAFATREMVMNAYQEAIKEEYRFFSFGDSMLLY

SEQ ID NO: 73412 - protein, 342 aa, Butyricicoccus sp.
  misc_feature (1)..(342): tr|A0A1C5Y897|A0A1C5Y897_9CLOT S-adenosylmethionine:tRN A ribosyltransferase-isomerase OS=uncultured Butyricico ccus sp. OX=1193532 GN=queA PE=3 SV=1
MMKKSDFYFDLPERLIAQHPLEQRDASRLLVLDRTDGSVSHRHFRDLLAYVEPGDCMVFNNSRVIPARLMGHAVGHTTPIEVLLLTDKGEGLWECLTRPGRKTRTGVELTFGDGMLTATVEAVQPDGNRLIRFHHEGIFLEILDQLGTMPLPPYIKEQLDDPERYQTVYSKTPGSAAAPTAGLHFTPELLEALRKKGVKLAFVTLHVGLGTFRPVKEEEITDHVMHAEYYIMDAETAGLINGTRAAGGKIWAVGTTACRTLETIADESGQVRPQSGWTDIFIYPGYQFKAVDHLVTNFHLPESTLMMLISAFATREMVMNAYRQAIGEEYRFFSFGDSMLLY

SEQ ID NO: 73413 - protein, 340 aa, Atribacteria sp.
  misc_feature (1)..(340): tr|G3BMR7|G3BMR7_9BACT S-adenosylmethionine:tRNA ribosy ltransferase-isomerase OS=uncultured Candidatus Atribac teria bacterium OX=263865 GN=queA PE=3 SV=1
MDITLFDYHLPQQYIAQEPLTKRDESRLMILDRKQKVIKHRKFYQLIDFLGPGDLLVLNDSKVIPARLLGYKKRTGGKVSALLINSISGCCWQALLKPGRKTPPGTELVFPPQLEAEVISKDQKEGIYLLKLKYKGKVDEILQEIGKIPTPPYIKKELKNPSSYQTVYARKDGSIAAPTAGIHFTYELLTKLKEKRIEIIYITLHIGRGTFELVKVDQVEKHQMKEELYTISSENAKIINQALIQKRRIIAVGTSVTRALESAFVKDKIAEGTSETKLFIYPGYNFKVIKALITNFHLPRSTPLMLAAAFAGKDFLMKAYHEAIHTKYRFYSFGDAMFII

SEQ ID NO: 73414 - protein, 340 aa, Atribacteria sp.
  misc_feature (1)..(340): tr|G3BMH0|G3BMH0_9BACT S-adenosylmethionine:tRNA ribosy ltransferase-isomerase OS=uncultured Candidatus Atribac teria bacterium OX=263865 GN=queA PE=3 SV=1
MDITLFDFELPPSYIAQEPLKKRDDSKLMILDRKTGLVEHKKFFQIIDYLKPDDLLVLNDSKVVPVRLVGYKKKTGGKVEVLLIKSVSGYLWQVLLKPGRRTPPGTEIIFSSQLKGMVIGKDEKEGVYLLEIQIKGNFREILGKIGKMPTPPYIKKELQNPSSYQTIYANQEGSLAAPTAGIHFSKELLTEIERKGIEIIYLTLHIGRGTFELVRDNQVENHQMKEEWYSISSENARIINQAILDKRRIVGVGTSVTRTLESAFVQDRVSEGTRWTNLFIYPGYQFQVLGALVTNFHLPRSTPLLLAAAFAGKDLLLKAYREAIHKHYRFYSFGDAMFII

SEQ ID NO: 73415 - protein, 356 aa, Citrobacter sp.; identical to SEQ ID NO: 65347
  misc_feature (1)..(356): tr|A0A212ICF3|A0A212ICF3_9ENTR S-adenosylmethionine:tRN A ribosyltransferase-isomerase OS=uncultured Citrobacte r sp. OX=200446 GN=queA PE=3 SV=1

SEQ ID NO: 73416 - protein, 341 aa, Clostridiales bacterium
  misc_feature (1)..(341): tr|A0A212JWE8|A0A212JWE8_9FIRM S-adenosylmethionine:tRN A ribosyltransferase-isomerase OS=uncultured Clostridia les bacterium OX=172733 GN=queA PE=3 SV=1
MRTSDFYYDLPPELIAQTPLDRRDDSRLLTLNKGTGETEHLHFYDLPGLLQPGDCLVLNDSRVLPARLLGHREPTGGAVEVLLLIDRGDKVWECLVRPGRKVKPGTKLSFGDSLLTGDVLEEVEGGNRLIRFHYEGIFLELLERLGKMPLPPYIKEELNDPERYQTVYSREVGSAAAPTAGLHFTKELLAQVEAVGVDLAYVTLHVGLGTFRPVKEEEITDHEMHAEYCMVSADAAEKINRAKKGGGRVICVGTTSCRTIESWAAEDGTLKESAGWTSIYIYPGYHFKALDCLITNFHLPESTLVMLVSALAGREHILSAYQEAVEQKYRFFSFGDAMFIY

SEQ ID NO: 73417 - protein, 341 aa, Clostridium sp.
  misc_feature (1)..(341): tr|A0A1C6A3A0|A0A1C6A3A0_9CLOT S-adenosylmethionine:tRN A ribosyltransferase-isomerase OS=uncultured Clostridiu m sp. OX=59620 GN=queA PE=3 SV=1
MKTSDFYYDLPQELVAQTPLERRDGSRLMVLDKKTGATAHRHFYDIPTLLRPGDCLVLNDSRVLPARLLGHREPTGGAVEVLLLTDRGDKVWECLVRPGKKVRPGVRLSFGDGLLTAEVVETLEGGNRLIRFDYDGIFLEILERLGKMPLPPYIKEELSDPERYQTVYSKEVGSAAAPTAGLHFTRELLEQIQTMGVNLAYVTLHVGLGTFRPVKEEEITDHEMHAEYCAISRETADLINRTKKNGGRIICVGTTSCRTIESWAAEDGTLREAAGWTSIYIYPGYRFKVLDGLITNFHLPESTLVMLVSALAGREHILAAYEEAVREKYRFFSFGDAMFIG

SEQ ID NO: 73418 - protein, 341 aa, Clostridium sp.; identical to SEQ ID NO: 65419
  misc_feature (1)..(341): tr|A0A1C6HN25|A0A1C6HN25_9CLOT S-adenosylmethionine:tRN A ribosyltransferase-isomerase OS=uncultured Clostridiu m sp. OX=59620 GN=queA PE=3 SV=1

SEQ ID NO: 73419 - protein, 406 aa, Collinsella sp.
  misc_feature (1)..(406): tr|A0A1C5S1X5|A0A1C5S1X5_9ACTN S-adenosylmethionine:tRN A ribosyltransferase-isomerase OS=uncultured Collinsell a sp. OX=165190 GN=queA PE=3 SV=1
MRTDDFDYNLPEELIAQAPAEPRDSCRLLVLHRGEPLATTGETVPLAHGGSVEHRHFYDIIDYLEPGDLLVANETRVMPARLIGRKAKTGGMAETLLLTRREDQDSLGHVWECLVSPGKRLKPGAVIEYRAGGPHAPESAPVVLVGEVLDFVSDSRGGRLVRFTPQGENASGAPRTLDEAIHAAGHVPLPPYITDYEGDPEKYQTVYAMSEEHSAAAPTAGLHFTPELIERIKQKGVGWATVELEVGIDTFRLVEEDDPTEHVMHTERYHVPQSVVDAVHATKAAGHRVIAVGTTAVRSLESAWDAQAAASEPPVVARRFENAPGSAVEGMGDIVARENATTNLYLMPGSTYHVVDALITNFHVPRSTLMMLVSALATREEIMDAYGEAVRERYRFFSFGDAMLIE

SEQ ID NO: 73420 - protein, 341 aa, Coprococcus sp.; identical to SEQ ID NO: 65574
  misc_feature (1)..(341): tr|A0A1C5SP68|A0A1C5SP68_9FIRM S-adenosylmethionine:tRN A ribosyltransferase-isomerase OS=uncultured Coprococcu s sp. OX=458253 GN=queA PE=3 SV=1

SEQ ID NO: 73421 - protein, 341 aa, Coprococcus sp.
  misc_feature (1)..(341): tr|A0A1C5S9C7|A0A1C5S9C7_9FIRM S-adenosylmethionine:tRN A ribosyltransferase-isomerase OS=uncultured Coprococcu s sp. OX=458253 GN=queA PE=3 SV=1
MQLSDFYYDLPQELIAQDPLLKRDNSRLMVLNRAEETIEHKHFYDVISYLKEGDCLVINDTKVIPARLIGEKEGTGAAIEVLLLKRLDDCTWETLVKPGKKARVGARIIFGGGKLVGEVIDIVEEGNRIVRFEYEGIFEEILDELGQMPLPPYITHKLEDKNRYQTVYAEHEGSAAAPTAGLHFTKELLEEIKAKGIKIAHVTLHVGLGTFRPVKEDNILDHHMHSEFYVIDEKAAETINETKKNGGRIIAVGTTSTRTLETVADENGMLRACSGWTDIFIYPGYKFKAIDGLITNFHLPESTLLMLVSALYSREKILEAYKVAVEERYRFFSFGDAMLIL

SEQ ID NO: 73422 - protein, 370 aa, Unknown
  misc_feature (1)..(370): tr|A0A212JZ54|A0A212JZ54_9DELT S-adenosylmethionine:tRN A ribosyltransferase-isomerase OS=uncultured delta prot eobacterium OX=34034 GN=queA PE=3 SV=1
MTRFMPETGPEDVLLSSYRFALPEELIAQEPSRRRDASRLMVLDRAANTLTDAVFADLAAYLTPGVIVVNNSRVVPARVLGSRPSGGRVEFLLTTPLPHIVPEAVPHTAGEDLWQATVSCLLKSSKKVPVNETITLGKSFSATVLERGEYGQCLAKLIWRGSLPDRLLSEGVMPLPPYIKRPQSADDAERYQTVYAQPEKAGSIAAPTAGLHFTPAVKQALIDAGFTWAEVTLYVGYGTFSPVRCDDIRDHQMHKEYCEVPEETAKIIAEARRQGRPITAVGTTAARTLEGVARQHGSVVPFKGWTDIFLYPGKTMKVVDHLLTNFHLPESTLLMLISAFAGRERVLEAYAKAVAERYRFFSYGDAMLIL

SEQ ID NO: 73423 - protein, 354 aa, Desulfobacteraceae bacterium
  misc_feature (1)..(354): tr|A0A484HN92|A0A484HN92_9DELT S-adenosylmethionine:tRN A ribosyltransferase-isomerase OS=uncultured Desulfobac teraceae bacterium OX=218296 GN=queA PE=3 SV=1
MHSLKDYHYDLPEDLIALKPAAQRDRSRLLAVSRAQKTFSHREFYEIPDFLSPGDVLVINDTRVIRARLMGKKETGGKVEALIVNYPEAVRTAFQSGDLTFQCMVKASKKPGVGTWIFFENGLKARVEKHGENGVCDLVFPGAADLETIERAGRVPLPPYIESRREKDDGVDHPSAYQTIYASKKGAVAAPTAGLHFSTDIFKRLNSRGVKIAPVTLHVGHGTFLPVRARDIRKHRMHPEWSHIPDASADVINHARENGGRIVSVGTTCVRTLEHAAGADGKIRPGSAKCDLFIYPGHRFKAVDALVTNFHLPESTLLMLVSAFAGRDLILSAYQAAIDERYRFYSYGDAMYIE

SEQ ID NO: 73424 - protein, 357 aa, Desulfobacterium sp.
  misc_feature (1)..(357): tr|E1YFS9|E1YFS9_9DELT S-adenosylmethionine:tRNA ribosy ltransferase-isomerase OS=uncultured Desulfobacterium s p. OX=201089 GN=queA PE=3 SV=1
MGVFLLSDYDYELSEDQIAQKPASCRDASRLMVLDKNTGSTFHNKFSEICDFISPKDIIVINNTKVIPGRLFGKKETGGKAEILILDFTGGIREQDKTGDFICECLVKTSKPAKQGSLILFEENLTAKVLNDVKDGICLLKFSSSENFEEILLRIGKMPLPPYIKRDKDNNKSIDDKTSYQTVYASYSGAVAAPTAGLHFTRELLEKIKAKGTKTAEITLHVGYGTFLPVRVSDIREHEIHSERYDISFEAAEAINTVRADGGKIIAVGTTCIRTLEYASDHKGRVLSGSGKCDLFIYPGYSFKVVDSIITNFHLPRSTLLMLVSAFAGRERILSAYKEAISQGYRFYSYGDAMFIQ

SEQ ID NO: 73425 - protein, 351 aa, Desulfobacterium sp.
  misc_feature (1)..(351): tr|A0A445MVA2|A0A445MVA2_9DELT S-adenosylmethionine:tRN A ribosyltransferase-isomerase OS=uncultured Desulfobac terium sp. OX=201089 GN=queA PE=3 SV=1
MFDTEDYDYDLPADLIAHAPAHKRDHSRLLVIDRKTGAFRDKFFFDLPVLLASGDLIVVNDTRVVPARLYGRKESGGLIEILVLDHPDGAGNNTLTRSCLLKSSKRPRPGSKLFFDSGVLGRVDDVLDNGLVSITFSGDCSVDSLMEEKGQMPLPPYIKRQHHDPHSGLDRERYQTVYSRNRGAVAAPTAGLHFTQDLIARLAESEISLTYITLHVGYGTFRPVRTKDIRKHDLDSEQYRIGPETASAIERTKKKGGRVIAVGTTVVRTLETAANPEGGVSAGEGRTNLLITPGFTFKVVDALITNFHLPKSSLLFLVSAFAGLGLVKEAYIRAIENGYRFYSYGDAMLAL

SEQ ID NO: 73426 - protein, 368 aa, Desulfofustis sp.; identical to SEQ ID NO: 65880
  misc_feature (1)..(368): tr|V4IMK2|V4IMK2_9DELT S-adenosylmethionine:tRNA ribosy ltransferase-isomerase OS=uncultured Desulfofustis sp. PB-SRB1 OX=1385624 GN=queA PE=3 SV=1

SEQ ID NO: 73427 - protein, 365 aa, Desulfovibrio sp.
  misc_feature (1)..(365): tr|A0A212JPF2|A0A212JPF2_9DELT S-adenosylmethionine:tRN A ribosyltransferase-isomerase OS=uncultured Desulfovib rio sp. OX=167968 GN=queA PE=3 SV=1
MPTAEADFFLESYNFALPEAQIAQFPPEERGNSRLLVMPRQGALELEHHQFSDLPDCLPEGALLVANNSRVLQARLLGTRSTGGKVEFLLLTPLPLVLERARPDKLGGSSAEVEGLIRSGGSIRDGEKLEFGAGISVTVLESGEFGHRRVRLAWDGDLSKAFAATGHIPLPPYIKRTDAEEDLSRYQTIYSREDKTGSVAAPTAGLHFTPEMRETLKARGFQWADVTLYVGYGTFSPVRSADIRGHRMHREYVEIPEATALAIAEAKREGRPVIAVGTTSLRSMEGVAELCGRVQPFTGWTDIFLYPGRPFRVVDGLLTNFHLPESSLIMLVSALAGRERVLAAYAEAVSRGYRFFSYGDAMLIR

SEQ ID NO: 73428 - protein, 365 aa, Desulfovibrio sp.
  misc_feature (1)..(365): tr|A0A212L4V1|A0A212L4V1_9DELT S-adenosylmethionine:tRN A ribosyltransferase-isomerase OS=uncultured Desulfovib rio sp. OX=167968 GN=queA PE=3 SV=1
MHIEEADFLLENYNFDLPQEQIAQFPPEERGSSRLLVMPRTGALDLHHKMFSDLPDCLPEGALLIANNSRVLQARLLGTRSTGGKVEFLLLTPLPLVVERAKADKSGGFFAEAEGLVRSGGSIREGETFEFGAGIGVTVLASGPFGQRRVRLGWKGDLAAAFAATGHIPLPPYIRRPDGEEDLSRYQTVYARQDKTGSVAAPTAGLHFTPPLREKLAERGFQWAEVTLYVGYGTFSPVRTPDIRSHRMHREYVEVPESTALAIAEARAQKRPVIAVGTTSLRTLEGVAELCGRVQAYTGWTDIFLYPGRPFRVVEGLVTNFHLPESSLLMLVAAFAGRKRMLDAYAEAIAKGYRFFSYGDAMLIR

SEQ ID NO: 73429 - protein, 341 aa, Dorea sp.
  misc_feature (1)..(341): tr|A0A1C5QS90|A0A1C5QS90_9FIRM S-adenosylmethionine:tRN A ribosyltransferase-isomerase OS=uncultured Dorea sp. OX=286138 GN=queA PE=3 SV=1
MKRQDFYYDLPEELIAQDPLEDRSSSRLLVLDKETGATSHHIFKEITGYLKEGDCLVINDTKVIPARLIGAKEGTGAKIEILLLKRKENNIWETLVKPGKKAKVGTRIVFGEGILVGEVVGIVEEGNRLVKFEYEGIFEEILDQLGQMPLPPYITHQLEDKNRYQTVYAKHTGSAAAPTAGLHFTPELLKEIEEKGIDIARVTLHVGLGTFRPVKVDEITDHHMHSEFYQVDEEAAEKINRAKDSGHRVICVGTTSCRTIESAADETGHLKPTSGWTEIFIYPGYKFKILDGLITNFHLPESTLIMLVSALAGREHVLAAYEEAVQERYRFFSFGDAMLIV

SEQ ID NO: 73430 - protein, 407 aa, Dysgonomonas sp.
  misc_feature (1)..(407): tr|A0A212JT40|A0A212JT40_9BACT S-adenosylmethionine:tRN A ribosyltransferase-isomerase OS=uncultured Dysgonomon as sp. OX=206096 GN=queA PE=3 SV=1
MEISSPQKIHIQDYNYNLPDDRIAKYPLTKRDNSKLLVYKNEKITDTVFSNINNFLPENCLMVFNNTKVIQARLHFQKTTGAQIEIFCLEPCIPNDYQLNFQQTEKCSWICLIGNLKKWKEGSLTRQINVNEQIVNFTATRTRSHGDAHVIDFEWDNQGVTFSELLDAVGELPIPPYLNRATEEQDKQTYQTVYSKIDGSVAAPTAGLHFTPEVMKSLKEQGMKLAEVTLHVGAGTFRPVKSDEIGDHVMHSEFISVQKSFIEELIRFEGKVIAVGTTSVRTLESLYYIGVSLENQKQSHLHVSQWMPYNDSNNRLSKKDALKNILAYLEANSLSTLIADTQIIIAPGYDFKIVDGIVTNFHQPQSTLLLLVSAFLGNNNWKNIYEHALSSDYRFLSYGDSSLLLKD

SEQ ID NO: 73431 - protein, 409 aa, Dysgonomonas sp.
  misc_feature (1)..(409): tr|A0A212JH85|A0A212JH85_9BACT S-adenosylmethionine:tRN A ribosyltransferase-isomerase OS=uncultured Dysgonomon as sp. OX=206096 GN=queA PE=3 SV=1
MEVSIFRDIRINDYDYGLPDSRIAKYPLVKRDESKLLVYKGGKITDARFSNLPEYLPDDSLMIFNNTKVIQARLHFQKITGAQIEIFCLEPHFPNDYQLNFQQTQRCSWVCLVGNLKKWKEGDLIKELVVNGEPVIFSARRIQTNGDSHIIEFEWDNTGVTFSELLEVAGELPIPPYLNRDTEEQDKETYQTIYSKIDGSVAAPTAGLHFTPEVFESLGKNGVKTAEVTLHVGAGTFRPVKTEEVKDHVMHSEFISVKRDVIEQLLNHKGKVIAVGTTSVRTLESLYYIGELLEKDNSSGELKVTQWQPYKASGEKELPVKESLTNILTYLDKNNLTSLIAETQIIIAPGYIYKIVDGIITNFHQPKSTLLLLVSAFTGGDNWKAIYKHALDNGYRFLSYGDSSLLLKE

SEQ ID NO: 73432 - protein, 347 aa, Eubacterium sp.
  misc_feature (1)..(347): tr|A0A1C6J8K7|A0A1C6J8K7_9FIRM S-adenosylmethionine:tRN A ribosyltransferase-isomerase OS=uncultured Eubacteriu m sp. OX=165185 GN=queA PE=3 SV=1
MKIDEFDYELPKELIAQKPSEKRDVCRMMVLDRQKGTITHQHFFDVIDYLNAGDCLVLNNSKVLPARLFGEKEGTGAKIEFLLIKRIEGDRWETMVKPGKRLKPGDSVTFSDHFRADILDYGPDGTRIAEFRYDGIFMERLEELGKMPLPPYIERESTLEDKDMYQTVYCKEEGSVAAPTAGLHFTEELLQKAQDKGVRLAYVTLHVGIGTFRPVKCENVEDHHMHFEEYFVDEETAKIINETILAGGRIISVGTTSTRTLESAAYHDEGSGKNLIRAGEGSTGIFIYPGYEYKVVDALITNFHLPKSTLLMLISALYDREKILEAYQAAVEEKYRFFSYGDAMLIQ

SEQ ID NO: 73433 - protein, 342 aa, Eubacterium sp.
  misc_feature (1)..(342): tr|A0A1C6F8L2|A0A1C6F8L2_9FIRM S-adenosylmethionine:tRN A ribosyltransferase-isomerase OS=uncultured Eubacteriu m sp. OX=165185 GN=queA PE=3 SV=1
MMKTSDFNFDLPQELIAQDPLEDRSSSRLMVLNKESGEIAHRIFHDITEYLHPGDCLVINDTKVIPARLIGTKEDTGAHIEILLLKRKENDVWETLVKPGKKCRPGARVVFGNGELKAEIVDVLEDGNRLVHFEYEGIFEEVLDRLGQMPLPPYITHKLQDKNRYQTVYAKYEGSAAAPTAGLHFTKELLKQIEDMGVNIARVTLHVGLGTFRPVKVENVLEHHMHSEYYNVTETAAKMINDTKKNGGRIIAVGTTSTRTLESVADENGIIHPGCGNTEIFIYPGYKFKAIDCLITNFHLPESTLLMLVSALAGKEHIMAAYKEAVKERYRFFSFGDAMFIQ

SEQ ID NO: 73434 - protein, 342 aa, Faecalibacterium sp.
  misc_feature (1)..(342): tr|A0A1C5LYV7|A0A1C5LYV7_9FIRM S-adenosylmethionine:tRN A ribosyltransferase-isomerase OS=uncultured Faecalibac terium sp. OX=259315 GN=queA PE=3 SV=1
MLKKDFWYDLPKELIAQEPADPRDSARLMVLSQKDDSIQHKIFHDLPEFLEPGDLLVVNNSKVLPARIVGVKQPTGAVCELLLLRQVKGDQWECLAKPGKRMQPGTKVSFGDGSLTAVVDETMEDGNKYVTFYYDTETLYEKLDEFGKMPLPPYITKQLEDQSQYQTVYAKELGSAAAPTAGLHFTPELMDTIRAKGVNIAEVTLHVGLGTFRPVQEDEISDHKMHSEWYCIDEKTAQMIRDTKAAGHRVIAVGTTSCRTLEAVAAKYGEIRACSGNTSIFLYPGVKFNCIDGLITNFHLPESTLIMLVSALYGYEKTMAAYKVAVEERYRFFSFGDAMLIL

SEQ ID NO: 73435 - protein, 345 aa, Faecalibacterium sp.
  misc_feature (1)..(345): tr|A0A1C5MQD0|A0A1C5MQD0_9FIRM S-adenosylmethionine:tRN A ribosyltransferase-isomerase OS=uncultured Faecalibac terium sp. OX=259315 GN=queA PE=3 SV=1
MQSMLKKDFWYDLPKELIAQEPADPRDSARLMVLSQKDDSIQHRIFRDLPEYLEPGDLLVVNNSKVLPARIVGVKQPTGAVCELLLLRQVKGDQWECLAKPGKRMQPGTKVSFGDGTLTAVVDETLEDGNKFVTFYYDTETLYEKLDEFGKMPLPPYITKQLEDQSQYQTVYAKELGSAAAPTAGLHFTPELMDTIRSKGVGIAEVTLHVGLGTFRPVQEDEISDHKMHSEWYSISEETAQRIRETKAAGHRVIAVGTTSCRTLEAAAAKYGEIKACSGNTSIFLYPGVKFNCIDGLITNFHLPESTLIMLVSALYGYEKTMAAYKVAVEEKYRFFSFGDAMLIL

SEQ ID NO: 73436 - protein, 349 aa, Flavobacteriia bacterium
  misc_feature (1)..(349): tr|H6RI11|H6RI11_9BACT S-adenosylmethionine:tRNA ribosy ltransferase-isomerase OS=uncultured Flavobacteriia bac terium OX=212695 GN=queA PE=3 SV=1
MKLSHFEFELPEELLAIYPAEHRDESRLMVLNKAEGTIEHKQFKDVINYFEEGDVMMLNNTKVFPARMFGNKEKTGARIEVFLLRELNAENRLWDVLVDPARKIRIGNKLFFGEDDSLVAEVIDNTTSRGRTLRFLFDGSYEEFRAKLLELGQTPLPKAIAREVEASDKERYQTIFAEDEGAVAAPSAGLHFSKHLLKRLEIKGVDFAKMTLHVGLGTFSAVEVEDLSKHKMDSEQIVIPEASATMINKAKKEKRRICAVGTTVMRTVESSVSSKQELKEFEGWTNKFIFPPHEFNIANAMITNFHTPKSTLLMQAAAFGGYDFVMDAYKVAIKEGYRFSTYGDAMLII

SEQ ID NO: 73437 - protein, 349 aa, Flavobacteriia bacterium
  misc_feature (1)..(349): tr|H6RG64|H6RG64_9BACT S-adenosylmethionine:tRNA ribosy ltransferase-isomerase OS=uncultured Flavobacteriia bac terium OX=212695 GN=queA PE=3 SV=1
MKLSHFNFELPDELLAEYPSEHRDESRLMVLNREKQTIEHKQFKDLIDYFNEDDVMILNDTKVFPARLFGNKEKTGARIEVFLLRELNAEQRLWDVLVDPARKIRIGNKLYFGEDEMLVAEVIDNTTSRGRTLRFLYDGSYEEFRKKLTQLGQTPLPKYINREVEPEDEERYQTIYAKNEGAVAAPTAGLHFSKHLLKRLEIKGINFAEVTLHVGLGTFNPVEVEDLSKHKMDSEEIIIPIQTADKINTALKEKRRICAVGTTAMRAIESSVSSKGNLNDYSGWTNKFIFPPYEFSIANCMITNFHTPKSTLLMMTAAFGGHDFVKKAYEEAVKEKYKFYSYGDAMLII

SEQ ID NO: 73438 - protein, 344 aa, Flavonifractor sp.
  misc_feature (1)..(344): tr|A0A1C6F530|A0A1C6F530_9FIRM S-adenosylmethionine:tRN A ribosyltransferase-isomerase OS=uncultured Flavonifra ctor sp. OX=1193534 GN=queA PE=3 SV=1
MIFMKTSDFYYDLPPELIAQTPLERRDGSRLLTLDKRTGETGHGHFYDLPRLLRPGDCLVMNDSRVLPARLLGRREPTGGAAEVLLLVDRGDQVWECLVRPGRKVKPGTRLSFGEGALTAEVLETLEGGNRLIRFDYEGIFLETLERLGKMPLPPYIKEELNDPERYQTVYSRQVGSAAAPTAGLHFTRELLDQIQAMGVSLCYVTLHVGLGTFRPVKEDEITDHEMHAEYCMIPQETADIINRTKQTGGRVVCVGTTSCRTIESWAGEDGTLKASAGWTDIFIYPGYRFKVLDALVTNFHLPESTLVMLVSALAGREHILAAYEEAVRERYRFFSFGDAMFIY

SEQ ID NO: 73439 - protein, 341 aa, Flavonifractor sp.
  misc_feature (1)..(341): tr|A0A1C6BFD5|A0A1C6BFD5_9FIRM S-adenosylmethionine:tRN A ribosyltransferase-isomerase OS=uncultured Flavonifra ctor sp. OX=1193534 GN=queA PE=3 SV=1
MKTSDFDFYLPEELIAQTPLERRDSSRLLTLDKCTGEIAHRHFYELPQLLRPGDCLVLNNSRVLPARLIGHRLPGGGACEVLLLTDKGDGLWECLVRPGRKLKPGAQVSFGEGHLTATVEAEASGGNRLVRFHYQGIFLEVLEELGKMPLPPYIKEELQDNERYQTVYSKINGSAAAPTAGLHFTPELLRQIQEMGVKLCYVTLHVGLGTFRPVKAEDISEHEMHSEYCMIPEETARTINETKRNGGRVICVGTTSCRTVESFGAEDGTLKESAGWTSIFIYPGYRFKVLDALVTNFHLPQSTLIMLVSALAGREHVLSAYEEAVKERYRFFSFGDAMFIS

SEQ ID NO: 73440 - protein, 342 aa, Gammaproteobacteria bacterium; identical to SEQ ID NO: 73295
  misc_feature (1)..(342): tr|A0A5E5PQQ7|A0A5E5PQQ7_9GAMM S-adenosylmethionine:tRN A ribosyltransferase-isomerase OS=uncultured Gammaprote obacteria bacterium OX=86473 GN=queA PE=3 SV=1

SEQ ID NO: 73441 - protein, 338 aa, Gammaproteobacteria bacterium
  misc_feature (1)..(338): tr|A0A5E6NAE1|A0A5E6NAE1_9GAMM S-adenosylmethionine:tRN A ribosyltransferase-isomerase OS=uncultured Gammaprote obacteria bacterium OX=86473 GN=queA PE=3 SV=1
MQLSDFDFDLPKSLIAQHPSKNRTDSRLLIAQSNLIDAQFHQIGDFIQSGDLLVMNNTKVIPARLFGHKDSGGKVEIMIERLLNDKQVLAMIRASRAPQIGSKITLENSEKASVLNKQDGFYTLEFATDSLLALLDNIGHIPLPPYIERTDDEQDLSRYQTVYAKHDGAVAAPTAGLHFDDALLNSLKDQGIDSAFVTLHVGAGTFQPVKTDNIKDHTMHSEYYEISQDSVDKINQTKANGGRIIAIGTTAVRSLESAAKSGILKATREETDIFIYPGYEFKVVDMMVTNFHLPKSSLLMLVSAFIGRERMMEIYQHAITQKYRFFSYGDAMLLTGKK

SEQ ID NO: 73442 - protein, 364 aa, Lachnospira sp.
  misc_feature (1)..(364): tr|A0A1C6FWP8|A0A1C6FWP8_9FIRM S-adenosylmethionine:tRN A ribosyltransferase-isomerase OS=uncultured Lachnospir a sp. OX=446043 GN=queA PE=3 SV=1
METMETKVNTTNETESAAHQTGMMDINDFDYDLPEELIAQDPIEDRSSSRLLLLDKKTGKTQDKIFRDIIDELNPGDCLVINNTKVIPARLLGVKEDTGAHIEVLLLKREQDDVWEVLVKPGKKAKPGTIITFGDGRLKAEVLEVVEDGNRKIRFSYQGIFEEILDELGQMPLPPYITHQLKDKNRYQTVYAKYEGSAAAPTAGLHFTKDLLKKIEEKGVVIASVTLHVGLGTFRPVKVENVLEHHMHSEFYRIEPEEAEKINAAKKAGKRVIAVGTTSCRTLESASTEDGILKAQSGWTDIFIYPGYHFKMVDALITNFHLPKSTLVMLVSALAGREHILAAYKEAVEKKYRFFSFGDAMFIH

SEQ ID NO: 73443 - protein, 341 aa, Unknown
  misc_feature (1)..(341): tr|A4GHV0|A4GHV0_9BACT S-adenosylmethionine:tRNA ribosy ltransferase-isomerase OS=uncultured marine bacterium E B0_39H12 OX=415437 GN=queA PE=3 SV=1
MDIEDYNFELPEALIAKEPKSERSSSRLLIAEDRLIDKKFSDLIDSLGNGDLLVINDTKVFKARLEAQKVSGGKVELLIERKIDANNALALTKSNRPLRESERLQVTNTNIFADIIKKDGYLSLIQFSEDIDDILDGFGTVPLPPYIDRKPDDNDEARYQTVYADANNMNSVAAPTAGLHFDNELLERIKDKGVNIASITLNIGIGTFKPIKQNDVRKHIMHSEKIYLSESNANIINEALLSNSRIFCVGTTSLRCLESIYSKFDEIKSYEGETDIFIYPGFKFKVADYLITNFHLPKTTLLLLVSAFSGLDRIQAAYKHAIEKEYRFFSYGDAMLLKRQD

SEQ ID NO: 73444 - protein, 339 aa, Megasphaera sp.; identical to SEQ ID NO: 68741
  misc_feature (1)..(339): tr|A0A1C5L822|A0A1C5L822_9FIRM S-adenosylmethionine:tRN A ribosyltransferase-isomerase OS=uncultured Megasphaer a sp. OX=165188 GN=queA PE=3 SV=1

SEQ ID NO: 73445 - protein, 349 aa, Unknown
  misc_feature (1)..(349): tr|E7C7P2|E7C7P2_9BACT S-adenosylmethionine:tRNA ribosy ltransferase-isomerase OS=uncultured nuHF1 cluster bact erium HF0770_35I22 OX=723586 GN=queA PE=3 SV=1
MKTSNFDFSLPPELIAQKPARPRESAKLLQVFSDGNFRDVYIKDLPALLKAGDLLVVNNTRVIPAQLSGKIFSTEKKVRVNLHKQKSNGVWLAFAKPAKKLLLNDKIFFSSTFFALITDKQPFGQITLKFNLVGATFLKALKKFGSMPLPPYIKRSGKVHPSDKTDYQTTFASRDGAVASPTAGLHFSMNLINDLKRCGIRVAPITLHVGAGTFLPIKTDTINHHRMHSEWVEINARTANLINKTRKAGGKIIAVGTTVLRTLETAVDTEGNIHPFKGKTDIFIAPGHQFKTVDLLITNFHLPKSTLFVLVSAFCGLNRMKNAYKYAIKKKYRFFSYGDASLLELRKKS

SEQ ID NO: 73446 - protein, 341 aa, Oscillibacter sp.; identical to SEQ ID NO: 66133
  misc_feature (1)..(341): tr|A0A1C5NRI1|A0A1C5NRI1_9FIRM S-adenosylmethionine:tRN A ribosyltransferase-isomerase OS=uncultured Oscillibac ter sp. OX=876091 GN=queA PE=3 SV=1

SEQ ID NO: 73447 - protein, 364 aa, Pleomorphomonas sp.
  misc_feature (1)..(364): tr|A0A212L9D2|A0A212L9D2_9RHIZ S-adenosylmethionine:tRN A ribosyltransferase-isomerase OS=uncultured Pleomorpho monas sp. OX=442121 GN=queA PE=3 SV=1
MQVSAFDFDLPPERIALRPAVPRDASRLLVVKPGQPFEDRQARDLADLLLPGDALVFNDTKVIPAQLEGRRDRNGAEPVRFSATLHMREAPDRWRAFVKGARKLRAGDRVRFSGADPAAAALGAVVAEKGEDGEITLVFDRAGPDLDVALMTVGHIPLPPYIAARRAEDEHDRADYQTVYARESGAVAAPTAGLHFTPDLFERLDARGIGRHFVTLHVGAGTFLPMKVDDTEAHKMHAEIGHVSPETAEALNAVRARGGRVVAVGTTSLRLLESAAGEDGLVRPFAGATDIFITPGYRFRAVDLLMTNFHLPKSTLFMLVSAFCGLDTMRDAYAHAIAGGYRFYSYGDTSLLHPSEESRLMKNS

SEQ ID NO: 73448 - protein, 374 aa, Prochlorococcus marinus
  misc_feature (1)..(374): tr|Q1PJX4|Q1PJX4_PROMR S-adenosylmethionine:tRNA ribosy ltransferase-isomerase OS=uncultured Prochlorococcus ma rinus clone HF10-88F10 OX=379378 GN=queA PE=3 SV=1
MISQINNEERDYKLEAYDYLLDPSLIASKPSAIRHESRLMIVRNSFLEEDCLTNKFTKNLLDEFREGDLVIVNNTKVMKARLKVELENKTLVELLVLERSHECVWLCLAKPAKKLKINRKLKLKSPLAQDINLIVDGVDEETGGRFIKFPENITCLNSMNELLDKYGEIPLPPYIKNSEEESFHEKSYQTEYATNPGAVAAPTAGLHLSKSLIFNLKKKGVIILPITLHVGYGTFKPIDQEDLSNLKLHKEWVSVNKEVVEEIKRIKKTDRKIIAIGTTSVRALESCYSYEIDDFIPIAKYVDLVIKPGYKFKVVDGLLTNFHLPKSSLLLLVSAMIGRERLLNLYKKAIKEKFRFFSYGDAMYISPDSLLEKK

SEQ ID NO: 73449 - protein, 341 aa, Roseburia sp.
  misc_feature (1)..(341): tr|A0A1C5SJU4|A0A1C5SJU4_9FIRM S-adenosylmethionine:tRN A ribosyltransferase-isomerase OS=uncultured Roseburia sp. OX=512314 GN=queA PE=3 SV=1
MDVKDFDYDLPEELIAQDPLEDRSSSRLMVLDKKTGDIEHKIFRDVVDYLQPGDCLVLNNTKVIPARLFGVKEGTEAKIEILLLKRKENDIWETLVKPGKKCKPGVKISFGEGLLTGEVLEVVEDGNRLIQFHYDGIFEEILDQLGQMPLPPYITHQLKDKNRYQTVYAKYDGSAAAPTAGLHFTPELLQQIRDMGIDIAEVTLHVGLGTFRPVKVDTIEEHHMHSEFYRIEQSEADKINRAKANGHRVVAVGTTSTRTLESAAEEDGTLREKSGWTDIFIYPGYKFKVIDALITNFHLPQSTLVMLVSALAGREHILAAYKKAVEEKYRFFSFGDAMLIK

SEQ ID NO: 73450 - protein, 341 aa, Roseburia sp.
  misc_feature (1)..(341): tr|A0A1C5WBD0|A0A1C5WBD0_9FIRM S-adenosylmethionine:tRN A ribosyltransferase-isomerase OS=uncultured Roseburia sp. OX=512314 GN=queA PE=3 SV=1
MDVKDFYFELPKEQIAQDPLEDRSASRLLVLDRETGAYEHKIFKNITEYLKPGDCLVLNNTKVIPARLFGEKEGTQAKIEILLLKRKENDIWETLVKPGKKARPGTRISFGGGLLTGEVLDVVEEGNRLIQFTYDGIFEEILDELGQMPLPPYITHQLEDKNRYQTVYAKYNGSAAAPTAGLHFTPELLDEVRGAGVEIAEVTLHVGLGTFRPVKVDDITRHHMHSEFYMISQEAAEKINTAKENGGKIICVGTTSCRTIESAADENGRLKESSGWTEIFIYPGYQFKVLDGLITNFHLPESTLLMLVSALAGREHVLAAYEEAVKQGYRFFSFGDAMLIR

SEQ ID NO: 73451 - protein, 341 aa, Ruminococcus sp.
  misc_feature (1)..(341): tr|A0A1C6CVI7|A0A1C6CVI7_9FIRM S-adenosylmethionine:tRN A ribosyltransferase-isomerase OS=uncultured Ruminococc us sp. OX=165186 GN=queA PE=3 SV=1
MKTSDFYYDLPKELIAQTPLEPRDSSRLLVLDREKQTLEHKHFYDIIDYLNEGDLLVANDSRVLPARIYGIKDETGAKVEFLLLKQVANNRWETLCKPGKKAKVGTKFSFGNGILRATVVDVKDDGNRIVDFDCEENFFTTLDKIGQMPLPPYITAELKDKERYQTVYSHELGSAAAPTAGLHFTTELMDRIKAKGVKIAYVTLHVGLGTFRPVKVDDVTKHKMHSEHYEVPEETAKLINETKKNGGRVIAVGTTSCRTLESVAAMYGEIKPCEGFTDIFIYPGFEFKVLDGLITNFHLPESTLIMLVSAFAGYDFIMNAYKEAVKEKYRFFSFGDAMFIS

SEQ ID NO: 73452 - protein, 350 aa, Ruminococcus sp.
  misc_feature (1)..(350): tr|A0A1C6H807|A0A1C6H807_9FIRM S-adenosylmethionine:tRN A ribosyltransferase-isomerase OS=uncultured Ruminococc us sp. OX=165186 GN=queA PE=3 SV=1
MLDINNMKRSDFYYDLPQELIAQTPVEPRNASRMMKINRQTGEVVHDHFYNLCNYLKKGDLLVLNDSKVLPARIYGEREDTGSFIEFLLVEQKENMVWEILCRPGKKAKIGTRFVFGGGKLKAEIIDVLEDGNRIARFECEENFFATLDEIGQMPLPPYITEKLKDKDRYQTVYAHELGSSAAPTAGLHFTEQQLEDLKAMGVNIAYVTLHVGLGTFRPVKEDKVLDHKMHREHYELSRQTADMINETKKNGGRVIAVGTTSCRTLESVAAFNDGKIVPCDGYTEIFIYPGFEFKVLDGLVTNFHLPESTLIMLVSAFMGYENTMNAYKIAVEEKYRFFSFGDCMLIISE

SEQ ID NO: 73453 - protein, 344 aa, Sphingopyxis sp.
  misc_feature (1)..(344): tr|A0A1Y5PNU9|A0A1Y5PNU9_9SPHN S-adenosylmethionine:tRN A ribosyltransferase-isomerase OS=uncultured Sphingopyx is sp. OX=310581 GN=queA PE=3 SV=1
MRVDAFDFDLPNERIALRPARPRDAARMLVVDGGEMIDAGVRDLSSWLRPGDCLVFNDTRVIPAQLEGQRGDAKISATLHKRVDLRRWQAFVRNAKRLRVGETVDFGSGVEAVAEERLADGSFILAFAGDEPVELLLERAGTMPLPPYIAGKRATDADDRSDYQTIFARRDGAVAAPTAALHFTPELLDALAAAGIGTETLTLHVGAGTFLPVKADDTDDHVMHAEWGRIEPETAARLNAVRAKGGRVIAVGTTSLRLLESAAADDGTIAPFAGDTAIFITPGYRFKAIDGLMTNFHLPRSTLFMLVSALMGLETMQAAYAHAIGKEYRFYSYGDASLLLPARP

SEQ ID NO: 73454 - protein, 376 aa, Unknown
  misc_feature (1)..(376): tr|A0A3P3XFW2|A0A3P3XFW2_9SPIR S-adenosylmethionine:tRN A ribosyltransferase-isomerase OS=uncultured spirochete OX=156406 GN=queA PE=3 SV=1
MKTDDFNFELPERLIAQYPPEHRGESRLMVLDRATEKTFDAMVADIASFIEPGTLMIFNDSRVRKARLYGICEQTGSHVEFVFLSPADEAEFDEQQFRGSDHAAQALNMPGSDKPVVPKHKLPSSSQRWLVVCSKAKRQKIGRKYLFPGELAGTIISDRVDEKIIEFSAPIGDEYFDRYGHVPLPPYIKREDTKADEQRYQTVYAKRTGSAASPTAGLHFTPEILSSLRDRGIEIAHVTLHVGLGTFLPVRTENIEDHRMHEEWFEISPEIANRVNAAKKEGRAILAVGTTSLRALESAWYDGALHSGSYSTRIFIYPGFEFHVVDQLFTNFHTPKSTLLMLVSAFAGRERILEAYRSAIEKQYRFFSYGDAMLIR

SEQ ID NO: 73455 - protein, 370 aa, Unknown
  misc_feature (1)..(370): tr|A0A3P3XU22|A0A3P3XU22_9SPIR S-adenosylmethionine:tRN A ribosyltransferase-isomerase OS=uncultured spirochete OX=156406 GN=queA PE=3 SV=1
MKTDDFNFELPETLIAQYPPQRRGESRLMVLDRAEGKTVDSMVSDIASFIEPGTLMVFNDSKVRKARVYGICEQTGARVEFVFLTPVEQESLIKIEELILHKGDQENVLVAPAQRIPSVSRLWRAVCSKAKRQKAGRSYAFPGDIRGILAEDIHDEKIIEFSAAIGDDYFDRYGHVPLPPYIKREDTKADEQRYQTVYARRTGSAASPTAGLHFTPEILSSLRSKGIGIEYITLHVGLGTFLPVRTENIEDHRMHEEWFEITEDVAKKINAAKSNGRKVLAVGTTSLRALESAWYGGAIHSGSFSTRIFIYPGFEFHVADRLFTNFHTPKSTLLMLVSAFAGRETIMEVYRSAIEKRYRFFSYGDAMLIL

SEQ ID NO: 73456 - protein, 339 aa, Sporomusa sp.
  misc_feature (1)..(339): tr|A0A212LRY1|A0A212LRY1_9FIRM S-adenosylmethionine:tRN A ribosyltransferase-isomerase OS=uncultured Sporomusa sp. OX=307249 GN=queA PE=3 SV=1
MLVSDFDYYLPEELIAQQPVEPRDHSRLLVLDRKTGTITHNAFYNLPQLLQPGDTLVFNDTRVIPARLLGIKPETGGKVEVFLLNRTTKDDWEVLVKPGKRARPGTVIEFGENLRCEVLDTTDFGGRIVRFTYQGIFEEILDVLGETPLPPYIKAQLSDKERYQTVYARERGSAAAPTAGLHFTRELMETIANMGVSLAYITLHVGLGTFRPVVAENINEHVMHREYYSVPPATAEIVNKTLAAGNRVIAVGTTAVRTLESAGSSGCLEAKSGWTEIFIYPGYEFKIVKALITNFHLPKSTLLMLISALAGREFIFDAYREAVDKRYRFFSFGDAMFIR

SEQ ID NO: 73457 - protein, 360 aa, Stenotrophomonas sp.
  misc_feature (1)..(360): tr|A0A1Y5Q4G4|A0A1Y5Q4G4_9GAMM S-adenosylmethionine:tRN A ribosyltransferase-isomerase OS=uncultured Stenotroph omonas sp. OX=165438 GN=queA PE=3 SV=1
MPDAPALKKSDFNYDLPAELIAQAPLPERSASRLLLVPPAPAAFADRHVRDLPDLLQPGDLLVFNDTRVIPARLFGQKATGGRVEILIERLLGGQQARAQVGASKSPKPGSRIALDAGGEAEVLGRDGEFYLLRFDIPEPLESWLVHAGRLPLPPYIQREPGADDRERYQTVFARQVGAVAAPTAGLHFDELLLERLRARGVQFGHITLHVGAGTFQPVRVDDLSQHVMHREWLNVGAELVQQVRRIRAAGGRVVGVGTTVVRALESAMRDGELHPYAGETQIFITPGYRIRSVDAMVTNFHLPESTLLMMISAFAGRERVFEAYAHAIAERYRFFSYGDAMLLWSREGAGALTDAPSHS

SEQ ID NO: 73458 - protein, 343 aa, Unknown
  misc_feature (1)..(343): tr|A0A482ZKS0|A0A482ZKS0_9GAMM S-adenosylmethionine:tRN A ribosyltransferase-isomerase OS=uncultured SUP05 clus ter bacterium OX=655186 GN=queA PE=3 SV=1
MMQLDDFDFDLPKSLIAQHPTKNRTDSRLLVPQSENINTIDTNFSKIGDFFQSGDLLVMNNTRVIPARLFGHKASGGKVEIMIERLINEHQVLAMMRASRAPQIGSKIILENGKKVIVLAKEKFYTLEFQTDSLLSLLDEVGHIPLPPYIERTDDEQDLSRYQTVYAEHDGAVAAPTAGLHFDDKLLAALKDKGVNSAFVTLHVGAGTFQPVKVDNIIEHKMHSEYFEISQQTVDKINQTKANGGRIIAVGTTAVRSLESAVKNGQLQATKQETDIFIYPGYQFKIVDKMVTNFHLPKSSLLMLVSAFIGHEQMQRIYQYAIDEKYRFFSYGDAMLLERNDDL

SEQ ID NO: 73459 - protein, 340 aa, Unknown
  misc_feature (1)..(340): tr|D1KBG3|D1KBG3_9GAMM S-adenosylmethionine:tRNA ribosy ltransferase-isomerase OS=uncultured SUP05 cluster bact erium OX=655186 GN=queA PE=3 SV=1
MLLSDFDFNLPNELIAQHPPKKRTDSNLLVAQSTIIDTKFHKIEDFISPGDLLVMNNTRVIPARLFGHKESGGKVEIMIERLLNDHQVLAMMKASRAPKIDSFITIENGEKAQVISKKNGFYTLNFITNSLLDLLDNVGHIPLPPYIERGDEQADLERYQTVFAKHEGAVAAPTAGLHFDDELLLSLKTKGVDHCFVTLHVGAGTFQPVKADKITDHKMHSEYFEIDQITVDKINQTKSNGGRIIAVGTTAVRSVESAAKSGTLKAIKGETDIFIYPGYEFKIVDKLITNFHLPKSSLLMLVSAFIGRDKMMEIYQHAIDKKYRFFSYGDAMLLEKHSDK

SEQ ID NO: 73460 - protein, 342 aa, Thiohalocapsa sp.; identical to SEQ ID NO: 65213
  misc_feature (1)..(342): tr|V4JYR0|V4JYR0_9GAMM S-adenosylmethionine:tRNA ribosy ltransferase-isomerase OS=uncultured Thiohalocapsa sp. PB-PSB1 OX=1385625 GN=queA PE=3 SV=1

SEQ ID NO: 73461 - protein, 359 aa, Undibacterium parvum
  misc_feature (1)..(359): tr|A0A3Q9BRS9|A0A3Q9BRS9_9BURK S-adenosylmethionine:tRN A ribosyltransferase-isomerase OS=Undibacterium parvum OX=401471 GN=queA PE=3 SV=1
MTYSLSDFDFVLPEALIAQLPLPQRSASRLLHVGTDTLSDQSFADVLEHLTAGDLLVFNDTRVLKARFFGVKESGGKVEVLVERVLANTDEQRAVLAQVRASKSPPAGTKIRLADQFDVIVGERAGEFYTLNFPSDVFELIEAHGRLPLPPYITHDADDFDEQRYQTVYSRVPGAVAAPTAGLHFDEALLERCRAKGINFAYVTLHVGAGTFQPVRTENLADHNMHSEWYTISEESVAAVRATKASGKAVVAVGTTSMRALESASQSGQLQAGSADTRLFITPGYVFKTVDRLITNFHLPKSSLLMLVSAFAGYDRIRAAYRHAIKQQYRFFSYGDAMLLSNASSSAFSSTDNSPEHKE

SEQ ID NO: 73462 - protein, 349 aa, Undibacterium pigrum
  misc_feature (1)..(349): tr|A0A318JTR0|A0A318JTR0_9BURK S-adenosylmethionine:tRN A ribosyltransferase-isomerase OS=Undibacterium pigrum OX=401470 GN=queA PE=3 SV=1
MSYSLSDFDFELPEALIAQTPLPDRTASRLLHVDGDTLVDRHFADIINQLNAGDLLVFNDTRVLKARFFGVKESGGKIQMLVERVLSNNDKERSVLAQMRASKSPLPGSKIRLADSFDVIVGERVGEFFTLYFPSDIFTLLETYGRLPLPPYIEHDADDFDEQRYQTVYNRVPGAVAAPTAGLHFDEALLQRCQDKGIKLAYVTLHVGAGTFQPVRTENLADHQMHSEWYTVPDETVAAVQATKAAGGKVVAVGTTSMRALESASQTGSLQTGSDDTRLFITPGYVFKTVDRLITNFHLPKSTLMMLVSAFAGYDRVRAAYAHAIAQQYRFFSYGDAMLLTNSSGEDHA

SEQ ID NO: 73463 - protein, 363 aa, Undibacterium sp.
  misc_feature (1)..(363): tr|A0A3S0GNM8|A0A3S0GNM8_9BURK S-adenosylmethionine:tRN A ribosyltransferase-isomerase OS=Undibacterium sp. S11 R28 OX=2495591 GN=queA PE=3 SV=1
MTYSLSDFDFVLPEALIAQMPLPQRSASRLLLVDGDNLCDQHFCDVLEQLSAGDLLVFNDTRVLKARFFGVKESGGKVEVLVERVLANTSEQHAVLAQVRASKSPPAGTRIRLADQFDVIVGARVGEFYTLNFPSDVFELIEAHGRLPLPPYITHDADGFDEQRYQTVYSRVPGAVAAPTAGLHFDEALLERCRAKGVNFAYVTLHVGAGTFQPVRTENLADHAMHSEWYTISPETVAAVRATKLDGKNVVAVGTTSMRALESASQSGTLEAGSADTKLFITPGYVFKTVDRLITNFHLPKSTLLMLVSAFAGYDRIRAAYAHAIAGQYRFFSYGDAMFLSNATASVIANTSLSTDNSPEAKE

SEQ ID NO: 73464 - protein, 349 aa, Unknown
  misc_feature (1)..(349): tr|A6ER93|A6ER93_9BACT S-adenosylmethionine:tRNA ribosy ltransferase-isomerase OS=unidentified eubacterium SCB4 9 OX=50743 GN=queA PE=3 SV=1
MKLSNFGFELPDELLAEYPSENRDESRLMVLNRKEQTIEHKKFKDLIDYFEEDDILCLNNTKVFPARLFGNKEKTGARIEVFLLRELNSETRLWDVLVDPARKIRIGNKLYFGDDETLVAEVIDNTTSRGRTLRFLFDGSYEEFRNKLKELGETPLPKYIKRDVEEDDAERYQTIYAKEEGAVAAPTAGLHFSKHLLKRFEIKGVNVAEVTLHVGLGTFSAVEVEDLSKHKMDSEEMHIGKETVDLINQGLIDKRRICAVGTTVMRSLESSVSSNHTLNEFSGWTNKFIFPPYDFSIANCMITNFHTPKSTLLMMVSAFAGHDFTQRAYEEAIKEKYNFYSYGDAMLII

SEQ ID NO: 73465 - protein, 347 aa, Ureibacillus terrenus
  misc_feature (1)..(347): tr|A0A540V017|A0A540V017_9BACL S-adenosylmethionine:tRN A ribosyltransferase-isomerase OS=Ureibacillus terrenus OX=118246 GN=queA PE=3 SV=1
MKIDEFDFDLPEELIAQTPLKDRAASRLLVVNPFTKEIEHHQFPHIVEELNPGDCLVLNDTRVMPARLFGVKEETGAHIEVLLLKQIGENRWETLVRPAKRVKVGTTVSFGDGLMTATCTNTLEHGGRVFEFHYDGIFYEVLDKLGEMPLPPYIHEKLEDKERYQTVYAKEIGSAAAPTAGLHFTEELLEKIRNKGVEIVFITLHVGLGTFRPVTSDTIEEHKMHSEFYSISDSAAETINRVKARGGKVVAVGTTTTRTLETVASKYDGKIKGEQGWTDIFIYPGYEFKCIDGLITNFHLPKSTLVMLVCALAGKETIFHAYSEAIKERYRFFSFGDAMYIRPKKSN

SEQ ID NO: 73466 - protein, 345 aa, Ureibacillus thermophilus
  misc_feature (1)..(345): tr|A0A4P6UU94|A0A4P6UU94_9BACL S-adenosylmethionine:tRN A ribosyltransferase-isomerase OS=Ureibacillus thermoph ilus OX=367743 GN=queA PE=3 SV=1
MKIEEFDFDLPEELIAQTPLKDRAASRLLVVTPYTKEIEHHQFSHIVEELNPGDCLVLNDTRVMPARLFGIKEETGAHVEVLLLKQLDNNRWETLVKPAKRVKIGTKITFGDGRMTATCTDILEHGGRIFEFHYDGIFYEVLDELGEMPLPPYIHEKLEDKERYQTVYAKEIGSAAAPTAGLHFTEELLEQIRNKGVEIVFITLHVGLGTFRPVTSDTIEEHKMHSEFYSISESAAETLNRVKANGGKVIAVGTTSTRTLETVASKYDGKIKAEQGWTDIFIYPGYEFKCIDGLVTNFHLPKSTLVMLVSALAGKETIFYAYEEAIKERYRFFSFGDAMFIRPKR

SEQ ID NO: 73467 - protein, 342 aa, Uruburuella suis
  misc_feature (1)..(342): tr|A0A4R2ME06|A0A4R2ME06_9NEIS S-adenosylmethionine:tRN A ribosyltransferase-isomerase OS=Uruburuella suis OX=2 52130 GN=queA PE=3 SV=1
MQLADFDFNLPEPLIAQHPPAVRGSSRLLAALPDTPIADKMFADLPDWVQPGDVLVFNNTKVMKARLFGQKESGGKIEALIERVVDAHTALAHVRSSKSPKPGTQLVFEGGIEATMLERQGELFCLRFAGSESVYELLARHGHLPLPPYIERAADDEDDSRYQTVYAKHQGAVAAPTAGLHFTDELLAQLKDKGVHMAEVTLHVGAGTFQPVRVDNIAEHKMHSEWYEVPPQVVALIEAAKARGNKVWAVGTTSMRALESAARASGRLQAGGGDTDIFITPGYRFKVVDRLITNFHLPKSTLLMLVSAFSGTAHIRAVYNHAIEQQYRFFSYGDAMILGLSE

SEQ ID NO: 73468 - protein, 344 aa, Vagococcus acidifermentans
  misc_feature (1)..(344): tr|A0A430B2Y2|A0A430B2Y2_9ENTE S-adenosylmethionine:tRN A ribosyltransferase-isomerase OS=Vagococcus acidiferme ntans OX=564710 GN=queA PE=3 SV=1
MTLTTSDFDFDLPEELIAQTPLADRAASRLLVLDKATGNIADKQFSDILDELNPGDALVMNDTRVLPARLHGEKPDTGGHLEVLLLMNTSGDRWETLIKPARRAKAGTRISFGDGRLQAVVVEELAHGGRIIEFSYSGVFLEILESLGEMPLPPYIKERLADQERYQTVYAKENGSAAAPTAGLHFTEDLLTAIQEKGVKLVYLTLHVGLGTFRPVSVENIDEHQMHSEFYRLTEEAAAILNDVKDQGGRIIAVGTTSIRTLETIGSKYDGKLCADSGWTDIFIKPGYTFKVVDAFSTNFHLPMSTLIMLVSAFAGREQVMAAYEHAVAERYRFFSFGDAMFVK

SEQ ID NO: 73469 - protein, 344 aa, Vagococcus carniphilus
  misc_feature (1)..(344): tr|A0A430B3P0|A0A430B3P0_9ENTE S-adenosylmethionine:tRN A ribosyltransferase-isomerase OS=Vagococcus carniphilu s OX=218144 GN=queA PE=3 SV=1
MTLQTSDFDFDLPEELIAQTPLKNRAASKLLILDKETGKVEDKHFNDILDELNEGDALVMNDTRVLPARLHGEKPETGGHLEVLLLNNIEGDRWETLIKPAKRAKVGTAISFGDGRLKAIVKEELEHGGRIIDFTYEGVFLENLESLGEMPLPPYIKETLDDQERYQTVYAKENGSAAAPTAGLHFTQELLEKIEAKGVKLVYLTLHVGLGTFRPVSVEDLDNHHMHSEFYRLTEEAAEVLREVKASGGRVVAVGTTSIRTLETIGSKFEGDIQADSGWTEIFIKPGYEFKVVDAFSTNFHLPMSTLIMLVSAFAGREHVLHAYEHAVEEKYRFFSFGDAMFVK

SEQ ID NO: 73470 - protein, 345 aa, Vagococcus elongatus
  misc_feature (1)..(345): tr|A0A430B156|A0A430B156_9ENTE S-adenosylmethionine:tRN A ribosyltransferase-isomerase OS=Vagococcus elongatus OX=180344 GN=queA PE=3 SV=1
MKTYTTDDFDFELPETLIAQTPLENREASRLLMLDHKTGKIHDKHFTDIIDELDAGDALVMNDTRVLPARIYGIKPATGGQLEVLLLKNIQGDRWETLIKPAKRAKVGTVISFGDGHLQATVIEELEHGGRVIDFQYQGVFLEILETLGEMPLPPYIKTRLEDPNRYQTVYAKENGSAAAPTAGLHFTEELLKKIEKKGIKLVYLTLHVGLGTFRPVSVVNIAEHHMHSEFYQLTDEAAAVLNDVKHQGGKIVAVGTTSIRTLETIGSKFSGEIQGDSGWTEIFITPGYEFKVVDAFVTNFHLPKSTLVMLVSAFAGRDQVLSAYKHAVSEKYRFFSFGDAMFIK

SEQ ID NO: 73471 - protein, 344 aa, Vagococcus entomophilus
  misc_feature (1)..(344): tr|A0A430AH67|A0A430AH67_9ENTE S-adenosylmethionine:tRN A ribosyltransferase-isomerase OS=Vagococcus entomophil us OX=1160095 GN=queA PE=3 SV=1
MGLTTEDFDFILPDELIAQIPLKNRETSRLLILDHHTGEMEDRHFYDIVEELNPGDALVMNNTRVLPARLYGEKPDTGGHLEVLLLNNRQGNEWETLIKPAKRAKVGTIISFGDGRLKAEVKKELEHGGRMIEFQYEGVFLEILESLGEMPLPPYIKERLEDPDRYQTVYAKENGSAAAPTAGLHFTTELLEKIQEKGVKLVYLTLHVGLGTFRPVSVENIEEHTMHSEFYKLTQEAADQLNAVKKNGGKIVAVGTTSIRTLETIGTKFEGEIQADSGWTDIFITPGYNFKIVDAFSTNFHLPKSTLVMLVSAFAGRDNTLAAYAHAVEERYRFFSFGDAMFVK

SEQ ID NO: 73472 - protein, 344 aa, Vagococcus fessus
  misc_feature (1)..(344): tr|A0A430A8Z5|A0A430A8Z5_9ENTE S-adenosylmethionine:tRN A ribosyltransferase-isomerase OS=Vagococcus fessus OX= 120370 GN=queA PE=3 SV=1
MTFTTNDFDFDLPEELIAQTPLADRQSSRLLVVDKETGELQDKHFYDILDELNEGDALVMNNTRVLPARLYGEKPDTGGHLEVLLLTNTEGNQWETLIKPAKRAKKGTVISFGDGRLKAEVIEELEHGGRIIEFQYEGVFLEIIESLGEMPLPPYIKERLEDPNRYQTVYAEENGSAAAPTAGLHFTEELLEKIKAKGVKLVYLTLHVGLGTFRPVNVESIEDHEMHSEFYKLTEESAAALREVKANGGRIVAVGTTSIRTLETIGTKFNGDIKADSGWTDIFITPGYEFKLVDAFSTNFHLPKSTLVMLVSAFATRDTVMSAYHHAIEEKYRFFSFGDAMFVK

SEQ ID NO: 73473 - protein, 344 aa, Vagococcus fluvialis
  misc_feature (1)..(344): tr|A0A369B2T2|A0A369B2T2_9ENTE S-adenosylmethionine:tRN A ribosyltransferase-isomerase OS=Vagococcus fluvialis OX=2738 GN=queA PE=3 SV=1
MTLQTSDFDFYLPEELIAQTPLKDRASSKLLILDKETGDIKDKHFEDIIDELNEGDALVMNNTRVLPARLHGEKPDTGGHLEVLLLNNTEGDTWETLIKPAKRAKVGTNISFGDGRLTAVVKEELEHGGRIIEFSYEGIFIENLEALGEMPLPPYIKEKLDDQERYQTVYAKENGSAAAPTAGLHFTKELLEKIEAKGVKLVYLTLHVGLGTFRPVSVEDLESHHMHSEFYSLSEESAASLREIKAQGGRIVAVGTTSIRTLETIGTKFNGEIQADSGWTDIFIKPGYEFKLVDAFSTNFHLPMSTLVMLVSAFAGREEVLHAYNHAVKEEYRFFSFGDAMFVK

SEQ ID NO: 73474 - protein, 344 aa, Vagococcus fluvialis
  misc_feature (1)..(344): tr|A0A1X6WMI9|A0A1X6WMI9_9ENTE S-adenosylmethionine:tRN A ribosyltransferase-isomerase OS=Vagococcus fluvialis bH819 OX=1255619 GN=queA PE=3 SV=1
MTLQTSDFDFHLPEELIAQTPLKDRTASKLLILDKKTGDIQDKHFHDILDELHPGDALVMNNTRVLPARLYGEKPETGGHLEVLLLNNIENDTWETLIKPAKRAKVGTEISFGDGRLKAVVKEELEHGGRIIDFAYEGVFLENLEALGEMPLPPYIKETLEDQERYQTVYAKENGSAAAPTAGLHFTQELMEKIEAKGIKIVYLTLHVGLGTFRPVNVEDLDNHHMHSEFYALSEESAESLRQIKATGGRIVAVGTTSIRTLETIGTKFNGDIQADSGWTEIFIKPGYEFKLVDAFTTNFHLPMSTLIMLVSAFSTRENVLNAYEHAVAEEYRFFSFGDAMFVK

SEQ ID NO: 73475 - protein, 344 aa, Vagococcus humatus
  misc_feature (1)..(344): tr|A0A429Z6E0|A0A429Z6E0_9ENTE S-adenosylmethionine:tRN A ribosyltransferase-isomerase OS=Vagococcus humatus OX =1889241 GN=queA PE=3 SV=1
MTLTTEDFDFDLPEELIAQTPIEHREESRLLVLDSKSGEIEDRHFYDIIDELNPGDALVMNNTRVLPARLYGEKPETGGHLEVLLLTNTEGNTWETLIKPARRAKVGTEITFGDGRLTAVVKEELEHGGRIVEFSYDGVFLEILESLGEMPLPPYIKERLDDPDRYQTVYAKENGSAAAPTAGLHFTQDLLKQIEAKGVKLVYLTLHVGLGTFRPVSVDNIEEHTMHSEFYKLSEEAAQTLNQVRQAGGRIIAVGTTSIRTLETIGSKFDGDIQADSGWTDIFIKPGYTFKVVDAFSTNFHLPKSTLVMLVSAFASRELVLEAYQHAIEEKYRFFSFGDAMFIK

SEQ ID NO: 73476 - protein, 344 aa, Vagococcus lutrae
  misc_feature (1)..(344): tr|A0A429ZDB2|A0A429ZDB2_9ENTE S-adenosylmethionine:tRN A ribosyltransferase-isomerase OS=Vagococcus lutrae OX= 81947 GN=queA PE=3 SV=1
MVMSTEDFDFDLPEKLIAQTPLKNRETSRLLVVEQATGKMADKHFTDILDELHPGDALVMNDTRVLPARLHGVKPDTGGQLEVLLLVNQEGNRWETLIKPARRAKVGTEIYFGDGRLKAKVVEELDHGGRIIDFMYEGVFLEILESLGEMPLPPYIKEQLEDPERYQTVYAKENGSAAAPTAGLHFTKELLQKIEEKGVKLVYLTLHVGLGTFRPVSVENVDEHEMHREFYRLTEEAAETLKEVKASGGRIVAVGTTSIRTLETIGTKFDGQLQADSGWTDIFIYPGYEFKIVDAFSTNFHLPKSTLVMLVSAFLGKELTMEAYAHAVSEEYRFFSFGDAMFVK

SEQ ID NO: 73477 - protein, 344 aa, Vagococcus lutrae
  misc_feature (1)..(344): tr|V6Q4B6|V6Q4B6_9ENTE S-adenosylmethionine:tRNA ribosy ltransferase-isomerase OS=Vagococcus lutrae LBD1 OX=140 8226 GN=queA PE=3 SV=1
MVMSTEDFDFDLPEKLIAQTPLKNRETSRLLVVEQATGKMADKHFTDILDELHPGDALVMNDTRVLPARLHGVKPDTGGQLEVLLLVNQEGNRWETLIKPARRAKVGTEIHFGDGRLKAKVVEELDHGGRIIDFMYEGVFLEILESLGEMPLPPYIKEQLEDPERYQTVYAKENGSAAAPTAGLHFTKELLQKIEEKGVKLVYLTLHVGLGTFRPVSVENVDEHEMHREFYRLTEEAAETLREVKASGGRIVAVGTTSIRTLETIGTKFEGQLQADSGWTDIFIYPGYEFKIVDAFSTNFHLPKSTLVMLVSAFLGKELTMEAYAHAVSEEYRFFSFGDAMFVK

SEQ ID NO: 73478 - protein, 344 aa, Vagococcus martis
  misc_feature (1)..(344): tr|A0A1V4DIC3|A0A1V4DIC3_9ENTE S-adenosylmethionine:tRN A ribosyltransferase-isomerase OS=Vagococcus martis OX= 1768210 GN=queA PE=3 SV=1
MTLKTSDFDFDLPEELIAQTPLENRASSKLLILDSKTGAIEDTQFPAIIDELNEGDALVMNDTRVLPARLHGEKPDTGGHLEVLLLTNTTGDTWETLIKPAKRAKKGTVISFGDGALKAVVDEELEHGGRMITFSYDGVFLEILESLGEMPLPPYIKERLSDNDRYQTVYAKENGSAAAPTAGLHFTPDVLKKIEDKGVKLVYLTLHVGLGTFRPVSVDDVENHKMHSEFYRLTKDAADTLNAVKENGGKVVAVGTTSIRTLETIGTKFDGKLQEDNGWTDIFIKPGYEFKIVDAFLTNFHLPMSTLIMLVSAFAGKENVLHAYEHAVKERYRFFSFGDAMFVK

SEQ ID NO: 73479 - protein, 344 aa, Vagococcus penaei
  misc_feature (1)..(344): tr|A0A1Q2D6S7|A0A1Q2D6S7_9ENTE S-adenosylmethionine:tRN A ribosyltransferase-isomerase OS=Vagococcus penaei OX= 633807 GN=queA PE=3 SV=1
MTLSTSDFDFYLPEELIAQTPLKNRVSSRLLVLDSKTGQMQDKHFSDIIDELHPGDALVMNNTRVLPARLHGEKPDTGGHLEVLLLTNTEGDTWETLIKPAKRAKKGTVISFGDGRLMATVTEELEHGGRMIDFTYDGVFLETLESLGEMPLPPYIKEKLEDNDRYQTVYAKENGSAAAPTAGLHFTKDLLEKIAAKGVKLVYLTLHVGLGTFRPVSVDDVENHTMHSEFYRLTEEAATELRAIKAAGGRIVAVGTTSIRTLETIGIKFNGEIHADSGWTDIFIKPGYTFKLVDAFSTNFHLPKSTLIMLVSAFAGRETTLAAYAHAVTERYRFFSFGDAMFVK

SEQ ID NO: 73480 - protein, 344 aa, Vagococcus salmoninarum
  misc_feature (1)..(344): tr|A0A429ZGF8|A0A429ZGF8_9ENTE S-adenosylmethionine:tRN A ribosyltransferase-isomerase OS=Vagococcus salmoninar um OX=2739 GN=queA PE=3 SV=1
MTLSTEDFDFDLPEELIAQTPLANRETSKLLTLDKETGKLTDGHFSDILDELNPGDALVLNNTRVLPARLYGEKPETGGHVEVLLLTNIEGNKWETLIKPAKRAKKGTLISFGDGRLQAEVMEEIEHGGRIIEFKYEGVFLEIIESLGEMPLPPYIKERLEDPERYQTVYAEENGSAAAPTAGLHFTKELLDKIAAKGVELVYLTLHVGLGTFRPVSVDNIAEHQMHSEFYKLTPAAAEKLQQVKAQGGRIVAVGTTSIRTLETIGTKFAGEIQADSGWTDIFITPGYQFKIVDAFSTNFHLPKSTLVMLVSAFATRDYTLAAYHHAIEERYRFFSFGDAMFVK

SEQ ID NO: 73481 - protein, 344 aa, Vagococcus sp.
  misc_feature (1)..(344): tr|A0A4D7CXH6|A0A4D7CXH6_9ENTE S-adenosylmethionine:tRN A ribosyltransferase-isomerase OS=Vagococcus sp. MN-17 OX=2571750 GN=queA PE=3 SV=1
MTYTTEDFDFALPEELIAQTPLENRATSRLLILNKETGEMEDKHFTDIIDELNAGDALVMNDTRVLPARIYGVKPDTGGQLEILLLNNTTGDRWETLIKPAKRAKVGTVIDFGEGKLQATVVEELEHGGRVIEFNYEGVFLEILESLGEMPLPPYIKERLEDPDRYQTVYAKENGSAAAPTAGLHFTKELLEKIEAKGIRLVYLTLHVGLGTFRPVSVDNIAEHKMHSEFYRLTEEAAQALNEVKAQGGRIVAVGTTSIRTLETIGQKFDGEIKADSGWTDIFITPGFDFKVVDAFSTNFHLPKSTLVMLVSAFAGRDNVLNAYNHAVQERYRFFSFGDAMFVK

SEQ ID NO: 73482 - protein, 344 aa, Vagococcus sp.
  misc_feature (1)..(344): tr|A0A429ZY62|A0A429ZY62_9ENTE S-adenosylmethionine:tRN A ribosyltransferase-isomerase OS=Vagococcus sp. SS1995 OX=1977869 GN=queA PE=3 SV=1
MTLSTSDFDFDLPEELIAQTPLKDRVSSRLLVLDSKTGQMQDKHFSEIIDELNPGDALVMNNTRVLPARLYGEKPETGGHLEVLLLTNTDGDTWETLIKPAKRAKVGTVISFGDGRLKATVTKELDHGGRIIDFDYDGVFLEILESLGEMPLPPYIKEKLTDNERYQTVYAEENGSAAAPTAGLHFTKELLDEIKAKGVNLVYLTLHVGLGTFRPVSVEDVENHTMHSEFYRLTENAAVELNRIRQAGGRIIAVGTTSIRTLETIGTKFNGELKADSGWTDIFIKPGYEFKVVDAFSTNFHLPKSTLIMLVSAFAGRDTTLAAYEHAVKERYRFFSFGDAMFVK

SEQ ID NO: 73483 - protein, 344 aa, Vagococcus teuberi
  misc_feature (1)..(344): tr|A0A1J0A7M4|A0A1J0A7M4_9ENTE S-adenosylmethionine:tRN A ribosyltransferase-isomerase OS=Vagococcus teuberi OX =519472 GN=queA PE=3 SV=1
MTLKTSDFDFDLPEELIAQTPLENRASSKLLILDSKTGAIEDTQFPAIIDELNEGDALVMNDTRVLPARLHGEKPDTGGHLEVLLLTNTTGDTWETLIKPAKRAKKGTVISFGNGALKAVVDEELEHGGRMITFSYDGVFLEILESLGEMPLPPYIKERLSDNDRYQTVYAKENGSAAAPTAGLHFTPVVLKKIEDKGVKLVYLTLHVGLGTFRPVSVDDVENHKMHSEFYRLTKDAADTLNAVKENGGKVVAVGTTSIRTLETIGTKFDGKLQEDNGWTDIFIKPGYEFKIVDAFLTNFHLPMSTLIMLVSAFAGKENVLHAYEHAVKERYRFFSFGDAMFVK

SEQ ID NO: 73484 - protein, 349 aa, Vampirococcus sp.
  misc_feature (1)..(349): tr|A0A410P2S2|A0A410P2S2_9BACT S-adenosylmethionine:tRN A ribosyltransferase-isomerase OS=Vampirococcus sp. LiM OX=1930593 GN=queA PE=3 SV=1
MHHLSDYDYELPVDRIAQTPAAQRDASRLLVMERAGGRLRDKRFFQLAEDLAAGDLLVFNDTRVVPARLLGRRATGGCVEILLLGPASKRCHRPARFTYQALIKPLGRLKEGEKIFLDKGLVCRLLDPKNRIVDFDGRPAEDVMKKAGVLPLPPYVRRPPQKEDQTRYQTIFARHPGAVAAPTAGLHFTRRLLEVLRTKGVGTAFLTLHVGYGTFSPVRSDDIRRHQVHEEDFYIPAAAVKAIRRLKEGRRGRVIAVGTTVVRALEDAASEILQGDRAVDIRRSSRLFIYPPYAFRVVDGLITNFHLPRTSLLMLVAAFGGQRSILEAYRHAIEHSYRFYSYGDAMLIV

SEQ ID NO: 73485 - protein, 358 aa, Variibacter gotjawalensis
  misc_feature (1)..(358): tr|A0A0S3PXK6|A0A0S3PXK6_9BRAD S-adenosylmethionine:tRN A ribosyltransferase-isomerase OS=Variibacter gotjawale nsis OX=1333996 GN=queA PE=3 SV=1
MRTDLFDFDLPPERIALRPASPRDSARLLEVTPGASTELADRSVGDLPSLLRAGDAIVFNNTRVIPAQLFGHRLVPEGPGARISATLHKRVDGARWRAFVKNAKRLSPGDVVRFGDEGRVCFLGSLDATVEAKGDNGEVTFAFQFHGAVLDQAIAERGAMPLPPYIASKRPADERDRDDYQTMFAREEGSVAAPTAALHFTPALVERLRDAGVSVHFVTLHVGAGTFLPVKADDIEDHAMHAEFGTVSAEVAEALNAVKARGGRVLAVGSTALRLLESAASEDGTLAPFAGDTAIFITPGYRFRVADLMLTNFHLPRSTLFMLVAAFSGLDVMQRAYAHAIKDGYRFYSYGDACLLHR

SEQ ID NO: 73486 - protein, 353 aa, Variovorax boronicumulans
  misc_feature (1)..(353): tr|A0A1E7TXY1|A0A1E7TXY1_9BURK S-adenosylmethionine:tRN A ribosyltransferase-isomerase OS=Variovorax boronicumu lans OX=436515 GN=queA PE=3 SV=1
MRAFTLSDFDFHLPPELVAQHPATERTASRLLDGTGPAPADRIFKELPSLLRAGDLLVFNDTRVVKARLFGEKPTGGKLELLVERVLQGHEVVAHMKVSKKPPVGTTLEMVGGFRATLLGRWPEEDGALFRFGFESDAGEDPYALMQRCGHVPLPPYITHTDSADDESRYQTVFARVPGAVAAPTAALHFDEGLLAELEARGVQRANVTLHVGAGTFQPVKTENIAEHTMHAERYEVPEATQRAIAECKARGGRVVAVGTTTVRTLESWAKSGEATGDTRIFITPGFAFAHVDVLVTNFHLPKSTLMMLVSAFAGYERVMALYAHAIASGYRFFSYGDAMLLERTLHPVVQSK

SEQ ID NO: 73487 - protein, 347 aa, Variovorax boronicumulans
  misc_feature (1)..(347): tr|A0A250DTP9|A0A250DTP9_9BURK S-adenosylmethionine:tRN A ribosyltransferase-isomerase OS=Variovorax boronicumu lans OX=436515 GN=queA PE=3 SV=1
MRAFTLSDFDFHLPPELVAQHPATERTASRLLDGTGPAPADRIFKELPSLLRAGDLLVFNDTRVVKARLFGEKPTGGKLELLVERVLQGHEVVAHMKVSKKPPVGTTLEMVGGFRATLLGRWPEEDGALFRFGFESDAGEDPYALMQRCGHVPLPPYITHTDSADDESRYQTVFARVPGAVAAPTAALHFDEGLLAELEARGVQRANVTLHVGAGTFQPVKTENIAEHTMHAERYEVPEATQRAIAECKARGGRVVAVGTTTVRTLESWAKSGEATGDTRIFITPGFAFAHVDVLVTNFHLPKSTLMMLVSAFAGYERVMALYAHAIANGYRFFSYGDAMLLARTQD

SEQ ID NO: 73488 - protein, 349 aa, Variovorax guangxiensis
  misc_feature (1)..(349): tr|A0A3S0Z886|A0A3S0Z886_9BURK S-adenosylmethionine:tRN A ribosyltransferase-isomerase OS=Variovorax guangxiens is OX=1775474 GN=queA PE=3 SV=1
MRAFTLSDFDFALPPELVAQHPAPERTSSRLLDGTGPAPVDRIFRNLPSLLRPGDLLVFNDTRVVKARLFGEKPTGGKLELLVERVLQGQEVVAHMKVSKKPTVGTTLEMVGGFRATLLGRWPDENGALFRFAFESDTGENPYMLMERCGHVPLPPYITHTDSAEDESRYQTVFARVPGAVAAPTAALHFDEGLLAELEANGVQRANVTLHVGAGTFQPVKTENISEHTMHAERYEVPEATQRAIAECKARGGRIVAVGTTTVRTLESWARSGEAAGDTRIFITPGFVFEHVDLLVTNFHLPKSTLMMLVSAFAGYERVMGLYAHAIAERYRFFSYGDSMLLARTNTPI

SEQ ID NO: 73489 - protein, 351 aa, Variovorax guangxiensis
  misc_feature (1)..(351): tr|A0A502DU95|A0A502DU95_9BURK S-adenosylmethionine:tRN A ribosyltransferase-isomerase OS=Variovorax guangxiens is OX=1775474 GN=queA PE=3 SV=1
MRAFTLSDFDFVLPPDLVAQHPATERTSSRLLDGTDDTPVDRIFRDLPSLLRSGDLLVFNDTRVVKARLFGEKPTGGKLELLVERVLTSQEVVCHMKVSKKPPVGTTLRMVGGFTATLLGRWPEEDGALFRFAFASPAGEDPYALMARCGHVPLPPYIDHTDSADDESRYQTVFARVPGAVAAPTAALHFDQSLLAQLEARGVQRASVTLHVGAGTFQPVKTENIAEHTMHAERYEVPEATQRAIADCKARGGRVVAVGTTTVRTLESWAKSGEASGDTRIFITPGFAFAHIDLLITNFHLPKSTLMMLVSALAGYERVMALYAHAIERRYRFFSYGDAMLLARQPDGTTC

SEQ ID NO: 73490 - protein, 347 aa, Variovorax paradoxus
  misc_feature (1)..(347): tr|E6UWL1|E6UWL1_VARPE S-adenosylmethionine:tRNA ribosy ltransferase-isomerase OS=Variovorax paradoxus (strain EPS) OX=595537 GN=queA PE=3 SV=1
MRAFTLSDFDFDLPPELVAQHPASERTSSRLLDGTGDAPVDRIFKDLPSLLREGDLLVFNDTRVVKARLFGEKPTGGKLELLVERVLQGQEVVAHMKVSKKPPVGTTLEMVGGFRATLLGRWPEEDGALFRFAFESDAGENPYMLMERCGHVPLPPYITHTDSVDDESRYQTVFARVPGAVAAPTAALHFDEGLLAALEARGVQRANVTLHVGAGTFQPVKTENIAEHTMHAERYEVPEATRRAIAECKARGGRVIAVGTTTVRTLESWAKSGEATGDTRIFITPGFAFAHVDVLVTNFHLPKSTLMMLVSAFAGYERVMALYANAIAHQYRFFSYGDAMLLARTQD

SEQ ID NO: 73491 - protein, 350 aa, Variovorax paradoxus
  misc_feature (1)..(350): tr|A0A0P9B1H5|A0A0P9B1H5_VARPD S-adenosylmethionine:tRN A ribosyltransferase-isomerase OS=Variovorax paradoxus OX=34073 GN=queA PE=3 SV=1
MRAFTLSDFDFALPPELVAQHPATERTASRLLDGTGPAPADRIFRDLPSLLREGDLLVFNDTRVVKARLFGEKPTGGKLELLVERVLQGQEVVAHMKVSKKPPVGTTLQMVGGFRATLLGRWPEEDGALFRFAFESDSGENPYLLMERCGHVPLPPYITHDDSAEDERRYQTVFARVPGAVAAPTAALHFDEGLLAALEARGVRRANVTLHVGAGTFQPVKTENIAEHTMHAERYEVPEATQRAIAECKARGGRIVAVGTTTVRTLESWAKSGEAAGDTRIFITPGFAFAHVDLLITNFHLPKSTLMMLVSALAGYERVMALYAHAIAQRYRFFSYGDAMLLARQPRTED

SEQ ID NO: 73492 - protein, 347 aa, Variovorax sp.
  misc_feature (1)..(347): tr|A0A0Q6MSK0|A0A0Q6MSK0_9BURK S-adenosylmethionine:tRN A ribosyltransferase-isomerase OS=Variovorax sp. Root31 8D1 OX=1736513 GN=queA PE=3 SV=1
MRAFTLSDFDFALPPELVAQHPASERTSSRLLDGTGSEPVDRIFKNLPSLLREGDLLVFNDTRVVKARLFGEKPTGGKLELLIERVLQGHEVVAHMKVSKKPPVGTTLQMVGGFRATLLGRWPDEQGALFRFGFESDAGEDPYALMARCGHVPLPPYITHTDSADDESRYQTVFARVPGAVAAPTAALHFDEALLDELDARGVQRANVTLHVGAGTFQPVKTENIAEHTMHAERYEVPETTRRAIAECKARGGRVVAVGTTTVRTLESWAKSGEATGDTRIFITPGFAFEHVDQLVTNFHLPKSTLMMLVSAFAGYEHVMALYSHAIAHRYRFFSYGDAMLLARAAL

SEQ ID NO: 73493 - protein, 347 aa, Variovorax sp.
  misc_feature (1)..(347): tr|A0A561CIH0|A0A561CIH0_9BURK S-adenosylmethionine:tRN A ribosyltransferase-isomerase OS=Variovorax sp. T529 O X=2491343 GN=queA PE=3 SV=1
MRAFTLSDFDFDLPPELVAQHPAPERTSSRLLDGTGDAPADRIFKDLPSLLRAGDLLVFNDTRVVKARLFGEKPTGGKLELLVERVLQGHEVVAHMKVSKKPPVGTTLQMVGGFRATLLGRWPDEQGALFHFGFESDAGEDPYALMARCGHVPLPPYITHTDSADDESRYQTVFARVPGAVAAPTAALHFDEALLAELEARGVQRANVTLHVGAGTFQPVKTENISEHTMHAERYEVPEATQRAIADCKARGGRVVAVGTTTVRTLESWARSGEAAGDTRIFITPGFVFEHVDLLVTNFHLPKSTLMMLVSAFAGYEHVMALYAHAIAQHYRFFSYGDAMLLARAPT

SEQ ID NO: 73494 - protein, 352 aa, Varunaivibrio sulfuroxidans
  misc_feature (1)..(352): tr|A0A4R3J8R8|A0A4R3J8R8_9PROT S-adenosylmethionine:tRN A ribosyltransferase-isomerase OS=Varunaivibrio sulfuro xidans OX=1773489 GN=queA PE=3 SV=1
MKVNAFDFELPTSAIAQHPAEPRDRARLLYLPTGDRHDGHCITDLPRLLRAGDVMVFNDTRVIPARMHAARASGGRTELTLHKQDGPALWRAFARPAKRLGAGEVLTIADGFALRVEEKHDGGELLVRFDREGAELLAALERHAIMPLPPYIKRGPEGDSADRERYQTLFADRPGAVAAPTAGLHFTPALMDAIAAAGIHSARVTLHVGAGTFLPVKADDTQNHVMHSEWGEVSPETAAAINAARAKGGRVVCVGTTSLRLLESATGDDGVVRPFCGDTDIFITPGYRFKAADVLITNFHLPKSTLFMLVCAFSGLARMKTAYAHAIAAGYRFYSYGDACLLERAAEEKDPT

SEQ ID NO: 73495 - protein, 341 aa, Veillonella atypica
  misc_feature (1)..(341): tr|A0A133S2E6|A0A133S2E6_9FIRM S-adenosylmethionine:tRN A ribosyltransferase-isomerase OS=Veillonella atypica O X=39777 GN=queA PE=3 SV=1
MKVTDFDYDLPEELIAQHPVEPRDTSRLLTLDKITGEYTHKAHFYDLLDELQAGDVLVFNNTKVIPARLYGQREGSGGKVEVLLLTPCGENRWECLVKPGKKCPIGQVIVFDERLKATVLDKTDFGGRIVKFTCDGVFDDIIQEIGEMPLPPYIHEKLEDKDRYQTVYAKEKGSAAAPTAGLHFTPELLEKIKAKGVELEFVTLHVGLGTFRPVSVETIEDHDMHSEFYSVSEDTARRINEAKSKGKRIIAVGTTSIRTLESASTDDGILHATSGWTKIFIYPGYKFKMVDALVTNFHLPQSTLLMLISALAGREHCLAAYKAAVKERYRFFSFGDAMFIR

SEQ ID NO: 73496 - protein, 341 aa, Veillonella atypica
  misc_feature (1)..(341): tr|A0A380N3T2|A0A380N3T2_9FIRM S-adenosylmethionine:tRN A ribosyltransferase-isomerase OS=Veillonella atypica O X=39777 GN=queA PE=3 SV=1
MKVTDFDYDLPEELIAQHPVEPRDTSRLLTLDKITGEYTHKAHFYDLLDELQAGDVLVFNNTKVIPARLYGQREGSGGKVEVLLLTPCGENRWECLVKPGKKCPIGQVIVFDERLKATVLDKTDFGGRIVEFTCDGVFDDIIQEIGEMPLPPYIHEKLEDKDRYQTVYAKEKGSAAAPTAGLHFTPELLEKIKAKSVELEFVTLHVGLGTFRPVSVETIEDHDMHSEFYSVSEDTARRINEAKSKGKRIIAVGTTSIRTLESASTDDGILHATSGWTKIFIYPGYKFKMVDALVTNFHLPQSTLLMLISALAGREHCLAAYKAAVKERYRFFSFGDAMFIR

SEQ ID NO: 73497 - protein, 340 aa, Veillonella criceti
  misc_feature (1)..(340): tr|A0A380NJ74|A0A380NJ74_9FIRM S-adenosylmethionine:tRN A ribosyltransferase-isomerase OS=Veillonella criceti O X=103891 GN=queA PE=3 SV=1
MQVTDFDYELPEELIAQHPVEPRDTSRLMTLDKVTGALSHKEHFYDILDELTDNDVLVFNDTKVIPARLYGHRKGSGGKVEVLLLTPCGDNKWECLVKPGKKCPVGQELVFDDRLTGLVVDKTSFGGRIIQFEAQGVFDDIIQEIGEMPLPPYIHEKLADKDRYQTVYAREKGSAAAPTAGLHFTPELLERIKAKGVTLAFVTLHVGLGTFRPVSVDTIEDHEMHSEYYVVTAETAKTINEARQAGKRIIAVGTTSVRTLESATKNGVLQAGHDWTQIFIYPGYEYKMVDALITNFHLPQSTLLMLISALAGREHCLKAYEEAVKERYRFFSFGDAMFIR

SEQ ID NO: 73498 - protein, 341 aa, Veillonella denticariosi
  misc_feature (1)..(341): tr|A0A2S7ZBB0|A0A2S7ZBB0_9FIRM S-adenosylmethionine:tRN A ribosyltransferase-isomerase OS=Veillonella denticari osi JCM 15641 OX=1298594 GN=queA PE=3 SV=1
MKVTDFDYELPEELIAQHPVEPRDTARLLILDKVTGAVEHKAHFYDLLDELHEGDVLVFNNTKVIPARLYGHRRESGGKVEVLLLTPCGENRWECLVKPGKKCPVGQVVEFDDRLRGTVLDKTEFGGRIIEFTCDGVFDDIIQEIGEMPLPPYIHEKLEDKDRYQTVYAKEKGSAAAPTAGLHFTPQLLDAIKAKGVSLEFVTLHVGLGTFRPVSAEIIEDHEMHSEFFVVPKDTADRINAAKRNGSRIIAVGTTSVRTLESATDDDGILQGMSGWTQIFIYPGYQFKMIDALVTNFHLPQSTLLMLISALAGREHCLAAYEEAVRERYRFFSFGDAMFIR

SEQ ID NO: 73499 - protein, 57 aa, Veillonella dispar
  misc_feature (1)..(57): tr|W1V1G6|W1V1G6_9FIRM S-adenosylmethionine:tRNA ribosy ltransferase-isomerase (Fragment) OS=Veillonella dispar DORA_11 OX=1403949 GN=Q619_VDC00459G0001 PE=3 SV=1
YKFKMIDALVTNFHLPQSTLLMLISALAGREHCLAAYEEAVKERYRFFSFGDAMFIR

SEQ ID NO: 73500 - protein, 341 aa, Veillonella dispar
  misc_feature (1)..(341): tr|C4FRS0|C4FRS0_9FIRM S-adenosylmethionine:tRNA ribosy ltransferase-isomerase OS=Veillonella dispar ATCC 17748 OX=546273 GN=queA PE=3 SV=1
MKVTDFDYELPEELIAQHPVEPRDTARLLTLDKVTGEVAHKEHFYDLLDELHEGDVLVFNNTKVIPARLYGQRQGSGGKVEVLLLTPCGENRWECLVKPGKKCPIGQVIEFDDRLSGTVIDKTEFGGRIIEFTCDGVFDDVIQEIGEMPLPPYIHEKLEDKDRYQTVYAKEKGSAAAPTAGLHFTPELLEKIKAKGVELEFVTLHVGLGTFRPVSAETIEDHEMHSEFFVVSQDTADRINAAKRNGRRIIAVGTTSVRTLESATNDDGVLQGISGWTQIFIYPGYKFKMIDALVTNFHLPQSTLLMLISALAGREHCLAAYEEAVRERYRFFSFGDAMFIR

SEQ ID NO: 73501 - protein, 341 aa, Veillonella montpellierensis
  misc_feature (1)..(341): tr|A0A096AN89|A0A096AN89_9FIRM S-adenosylmethionine:tRN A ribosyltransferase-isomerase OS=Veillonella montpelli erensis DNF00314 OX=1401067 GN=queA PE=3 SV=1
MKVTDFDYNLPEELIAQTPVYPRDSSRLMILDKLTGNIEHKHAFTDIIDELSEGDVIVFNNTKVIPARLFGHRKESGGKVEVLLLTPCGSNRWECLVKPGKKCPIGQEIIFDHRLTATVIDKTDFGGRIVEFSCEGVFDDIIEELGQMPLPPYIHETLKDQDRYQTVYAEHKGSAAAPTAGLHFTPELLKRIQDKGVTEVFITLHVGLGTFRPVSVDNVENHVMHSEFYSVSEDAAAIINQAKKAGKRIIAVGTTSVRTLESATNEAGILQAGSGNTEIFIYPGYTYKMVDALITNFHLPQSTLLMLISALAGRDHCLNAYHEAVKEKYRFFSFGDAMFIR

SEQ ID NO: 73502 - protein, 341 aa, Veillonella parvula
  misc_feature (1)..(341): tr|D1BLM0|D1BLM0_VEIPT S-adenosylmethionine:tRNA ribosy ltransferase-isomerase OS=Veillonella parvula (strain A TCC 10790 / DSM 2008 / JCM 12972 / Te3) OX=479436 GN=qu eA PE=3 SV=1
MKVTDFDYELPEELIAQHPIEPRDTARLLTLDKVSGKVSHKEHFYDLLEELHEGDVLVFNNTKVIPARLYGHRQGSGGKVEVLLLTPCGENRWECLVKPGKKCPVGQVIEFDDRLRGIVIDKTEFGGRIIEFTCNGVFDDVIQEIGEMPLPPYIHEKLEDKDRYQTVYAKEKGSAAAPTAGLHFTPDLLEKIKAKGVELEFVTLHVGLGTFRPVSAETIEDHEMHSEFFVVSQETADRINAAKRNGRRIIAVGTTSVRTLESATNDDGVLQGMSGWTQIFIYPGYKFKMIDALVTNFHLPQSTLLMLISALAGREHCLAAYEEAVKERYRFFSFGDAMFIR

SEQ ID NO: 73503 - protein, 341 aa, Veillonella parvula
  misc_feature (1)..(341): tr|D1YQU5|D1YQU5_9FIRM S-adenosylmethionine:tRNA ribosy ltransferase-isomerase OS=Veillonella parvula ATCC 1774 5 OX=686660 GN=queA PE=3 SV=1
MKVTDFDYELPEELIAQHPVEPRDTARLLTLDKVSGEVKHKGHFYDLLEELHEGDVLVFNNTKVIPARLYGHRQGSGGKVEVLLLTPCGENRWECLVKPGKKCPIGQVIEFDDRLSGVIIDKTNFGGRIIQFTCNGVFDDVIQEIGEMPLPPYIHEKLEDKDRYQTVYAKEKGSAAAPTAGLHFTPDLLEKIKAKGVELEFVTLHVGLGTFRPVSAETIEDHEMHSEFFVVPQDTANRINAAKQKGSRIIAVGTTSVRTLESATNDDGVLQGMSGWTQIFIYPGYKFKMIDALVTNFHLPQSTLLMLISALASREHCLAAYEEAVRERYRFFSFGDAMFIR

SEQ ID NO: 73504 - protein, 341 aa, Veillonella rodentium
  misc_feature (1)..(341): tr|A0A239YPU4|A0A239YPU4_9FIRM S-adenosylmethionine:tRN A ribosyltransferase-isomerase OS=Veillonella rodentium OX=248315 GN=queA PE=3 SV=1
MKVTDFDYELPEELIAQHPVELRDTARLLVLDKVTGAVEHKAHFYDLLEELHEGDVLVFNNTKVIPARLYGHRRESGGKVEVLLLTPCGESRWECLVKPGKKCPIGQVIEFDDRLRGTVLDKTEFGGRIIEFTCDGVFDDIIQEIGEMPLPPYIHEKLKDKDRYQTVYAKEKGSAAAPTAGLHFTPQLLDAIKAKGVSLEFVTLHVGIGTFRPVSAESIEDHEMHSEFFVVPKDVADRINAAKRNGSRIIAVGTTSVRTLESATDDDGILQGMSGWTQIFIYPGYQFKMIDALVTNFHLPQSTLLMLISALAGREHCLAAYEEAVRERYRFFSFGDAMFIR

SEQ ID NO: 73505 - protein, 341 aa, Veillonella rogosae
  misc_feature (1)..(341): tr|A0A2S7Z0X7|A0A2S7Z0X7_9FIRM S-adenosylmethionine:tRN A ribosyltransferase-isomerase OS=Veillonella rogosae J CM 15642 OX=1298595 GN=queA PE=3 SV=1
MKVTDFDYELPEELIAQHPVEPRDTARLLTLDKVTGEVVHKEHFYDLLEELYEGDVLVFNNTKVIPARLYGHRQGSGGKVEVLLLTPCGENRWECLVKPGKKCPVGQVIEFDDRLSGTVIDKTEFGGRIIEFTCNGVFDDVIQEIGEMPLPPYIHEKLEDKDRYQTVYAKEKGSAAAPTAGLHFTPELLEKIKAKGVELEFVTLHVGLGTFRPVSAETIEDHEMHSEFFVVSQDTADRINAAKQKGSRIIAVGTTSVRTLESATNDEGILQGISGTTQIFIYPGYKFKMIDALVTNFHLPQSTLLMLISALAGREHCLAAYEEAVKERYRFFSFGDAMFIR

SEQ ID NO: 73506 - protein, 340 aa, Veillonella seminalis
  misc_feature (1)..(340): tr|K9D0D1|K9D0D1_9FIRM S-adenosylmethionine:tRNA ribosy ltransferase-isomerase OS=Veillonella seminalis ACS-216 -V-Col6b OX=883156 GN=queA PE=3 SV=1
MKVTDFDYELPEELIAQYPVEPRDTSRLMLLDKVTGEVAHKEHFYDIVDELTDNDVLVFNDTKVIPARLYGHRRGSGGKVEVLLLTPCGENKWECLVKPGKKCPIGQELVFDDRLTGKVIDKTSFGGRIIEFTAQGVFDDIIQEIGEMPLPPYIHEKLEDKDRYQTVYAREKGSAAAPTAGLHFTSELLERIKAKGVTLAFVTLHVGLGTFRPVSEETIEDHEMHSEYYVVTAETAKIINDAKAAGKRIVAVGTTSVRTLESATKNGVLKAGHDWTQIFIYPGYEYKMVDALITNFHLPQSTLLMLISALAGRDHCLAAYQEAVKERYRFFSFGDAMFIR

SEQ ID NO: 73507 - protein, 345 aa, Veillonella sp.
  misc_feature (1)..(345): tr|A0A134C8F8|A0A134C8F8_9FIRM S-adenosylmethionine:tRN A ribosyltransferase-isomerase OS=Veillonella sp. DNF00 869 OX=1384081 GN=queA PE=3 SV=1
MRNSMKVSDFNYDLPEELIAQHPVEPRDTSRLMTLDKVSGEICHKASFHSILDELSEGDVLIFNNTKVIPARLYGERKGTGGKVEALLLTPKGEHLWECLVKPGKKCLKGQLLSFGPNLEAEVIDHTDFGGRLIQFKPNGNFDEIINDIGEMPLPPYIHEKLEDKDRYQTVYAKEKGSAAAPTAGLHFTPELLDEIQRKGVQVGFVTLHVGLGTFRPVSAESIEDHDMHKEFYHVSEETAELVNRAKAEGRRVIAVGTTSVRTLESAATEVGHVRSGSDWTQIFIYPGYEYKMVDALITNFHLPQSTLLMLISALAGREHCLEAYEEAVREKYRFFSFGDAMFIR

SEQ ID NO: 73508 - protein, 142 aa, Veillonella sp.
  misc_feature (1)..(142): tr|R5BKQ1|R5BKQ1_9FIRM S-adenosylmethionine:tRNA ribosy ltransferase-isomerase OS=Veillonella sp. CAG:933 OX=12 62980 GN=BN814_00973 PE=3 SV=1
MAFVTLHVGLGTFRPVSEETIEDHEMHSEYYVVTAETAKIINDAKAAGKRIVAVGTTSVRTLESATKDGVLQAGHDWTQIFIYPGYEYKMVDALITNFHLPQSTLLMLISALAGREHCLAAYKEAVKERYRFFSFGDAMFIR

SEQ ID NO: 73509 - protein, 341 aa, Veillonella tobetsuensis
  misc_feature (1)..(341): tr|A0A480B2X4|A0A480B2X4_9FIRM S-adenosylmethionine:tRN A ribosyltransferase-isomerase OS=Veillonella tobetsuen sis OX=1110546 GN=queA PE=3 SV=1
MKVTDFDYDLPEELIAQHPVEPRDTSRLLTLDKITGEYTHKEHFYELLDELQDGDVLVFNNTKVIPARLYGYREGSGGKVEVLLLTPCGENRWECLVKPGKKCPIGQVIVFDERLKATVIDKTDFGGRIVEFACDGVFDDIIQDIGEMPLPPYIHEKLEDKDRYQTVYAKEKGSAAAPTAGLHFTPELLEKIKAKGVELEFVTLHVGLGTFRPVSVDNIENHDMHSEFYSVSEDTARRINEAKEKGKRIIAVGTTSIRTLESASTDDGVLHATSGWTKIFIYPGYKFKMVDALVTNFHLPQSTLLMLISALAGREHCLAAYEAAVKERYRFFSFGDAMFIR

SEQ ID NO: 73510 - protein, 341 aa, Veillonella tobetsuensis
  misc_feature (1)..(341): tr|A0A480B8Q6|A0A480B8Q6_9FIRM S-adenosylmethionine:tRN A ribosyltransferase-isomerase OS=Veillonella tobetsuen sis OX=1110546 GN=queA PE=3 SV=1
MKVTDFDYDLPEELIAQHPVEPRDTSRLLTLDKITGEYTHKEHFYELLDELQDGDVLVFNNTKVIPARLYGYREGSGGKIEVLLLTPCGENRWECLVKPGKKCPIGQVIVFDKRLKATVIDKTDFGGRIVEFACDGVFDDIIQDIGEMPLPPYIHEKLEDKDRYQTVYAKEKGSAAAPTAGLHFTPELLEKIKAKGVELEFVTLHVGLGTFRPVSVDTIENHDMHSEFYSVSEDTARRINEAKEKGKRIIAVGTTSIRTLESASTDDGVLHATSGWTKIFIYPGYKFKMVDALVTNFHLPQSTLLMLISALAGREHCLAAYEAAVKERYRFFSFGDAMFIR

SEQ ID NO: 73511 - protein, 339 aa, Veillonellaceae bacterium
  misc_feature (1)..(339): tr|A0A134C9W8|A0A134C9W8_9FIRM S-adenosylmethionine:tRN A ribosyltransferase-isomerase OS=Veillonellaceae bacte rium DNF00626 OX=1588754 GN=queA PE=3 SV=1
MKLEEFNYDLPKELIAQEPVEPRDSCRLLYLDKQTGAWEHHHFRDILDEVHKGDVFVFNNTKVIPARLHGNRKDTGGKVEVLLLTPKGDDVWEVLVNPGRKALPGQEIVFSEHFSCTVLEKTEFGGRKVVFHYDGDFDESLDKIGEMPTPPYIHKKLENKDEYQTVYAKYKGSAAAPTAGLHFTPELLDALRKKGAELLFVTLHVGIGTFRPVSEENIEDHEMHKEWYTIDEETANKINKARSEKRRIIAVGTTSVRTLESAGQSGIVQAGHNWTQLYIYPGYQWHIVDAIVTNFHLPESTLIMMMASFAGREHVLAAYEEAVKEKYRFFSFGDAMFIK

SEQ ID NO: 73512 - protein, 339 aa, Veillonellaceae bacterium; identical to SEQ ID NO: 63201
  misc_feature (1)..(339): tr|A0A316M015|A0A316M015_9FIRM S-adenosylmethionine:tRN A ribosyltransferase-isomerase OS=Veillonellaceae bacte rium OX=2049049 GN=queA PE=3 SV=1

SEQ ID NO: 73513 - protein, 347 aa, Ventosimonas gracilis
  misc_feature (1)..(347): tr|A0A139SJG5|A0A139SJG5_9GAMM S-adenosylmethionine:tRN A ribosyltransferase-isomerase OS=Ventosimonas gracilis OX=1680762 GN=queA PE=3 SV=1
MRVADFYFDLPKSLIARYPLKRRTDSRLLLLDGRSGAVQHQRFTELPQQLKAGDLLVLNDTKVIAARLFGHKTSGGRVEILLERLLDDRRALVQLRSSKTPKAGSLIRLGGGTEARLLSRHNALFELEFNQAILPLLEQAGQIPLPPYLEREAEVLDGERYQTVYATHPGAVAAPTAGLHFDQALLAKLKSQGVESARVTLHVGAGTFSPVRSEQVEQHQMHSERFEVSQALVDAVAACRARGGRVIAVGTTCARALESAALSGKLRAQQGETDIFLYPGRRFHVVDKLLTNFHLPGSTLLMLVAAFAGYRNCMQAYQVAIAEQYRFFSYGDAMLISRNPNADAPAD

SEQ ID NO: 73514 - protein, 384 aa, Verminephrobacter eiseniae
  misc_feature (1)..(384): tr|A1WKC6|A1WKC6_VEREI S-adenosylmethionine:tRNA ribosy ltransferase-isomerase OS=Verminephrobacter eiseniae (s train EF01-2) OX=391735 GN=queA PE=3 SV=1
MTDLPRSGAARAHTLSDFDFTLPPELIAQHPAPERSAARLLDGRTAPPVDRIFRELPGLLRAGDLLVSNDTRVLNARLFGAKASGGKLELLIERVLPAAAGSAGNEVAAHMKVGKKPQPGSTVQIAGGRQAGGFDATLLGRWPTADGPLYRFALHGPANESPWELMQRHGHLPLPPYIVRRQNTGHDPHGAEDSQRYQTLFARHPGAVAAPTAALHFDQSVLSALAARGIEHASITLHVGAGTFLPVKTENLEQHRMHSEWYRLPPSTLTALERCRQRGARVVAVGTTTVRTLESWARSGLATGETSIFITPGFPFQVVDLLITNFHLPKSTLMMLVSAFAGHAHVMALYRHAMAQRYRFFSYGDAMLLARQHDGPNRPALDAI

SEQ ID NO: 73515 - protein, 384 aa, Verminephrobacter sp.
  misc_feature (1)..(384): tr|A0A4Q2LA57|A0A4Q2LA57_9BURK S-adenosylmethionine:tRN A ribosyltransferase-isomerase OS=Verminephrobacter sp. Larva24 OX=2509434 GN=queA PE=3 SV=1
MTDLPRSGAARAHTLSDFDFTLPPELIAQHPAPERSAARLLDGRTAPPVDRIFRELPGLLRAGDLLVSNDTRVLNARLFGAKASGGKLELLIERVLPAAAGSAGNEVAAHMKVGKKPQPGSTVQIAGGRQAGGFDATLLGRWPMADGPLYRFALHGPANESPWELMQRHGHLPLPPYIVRRQNTGHDPHEAEDSQRYQTLFARHPGAVAAPTAALHFDPSVLSALAARGIEHASITLHVGAGTFLPVKTENLEQHRMHSEWYRLPPSTLTALERCRQRGARVVAVGTTTVRTLESWARSGLATGETSIFITPGFPFQVVDLLITNFHLPKSTLMMLVSAFAGHAHVMALYRHAMAQRYRFFSYGDAMLLARQHDGPSHLALDAI

SEQ ID NO: 73516 - protein, 326 aa, Verrucomicrobia bacterium
  misc_feature (1)..(326): tr|A0A1Q6V5Q2|A0A1Q6V5Q2_9BACT S-adenosylmethionine:tRN A ribosyltransferase-isomerase OS=Verrucomicrobia bacte rium 13_2_20CM_55_10 OX=1805420 GN=queA PE=3 SV=1
MTARLSDYDYDLPRELIAQRPLQRREDSRMMVLHRDRQTIDHCQFHELKKFLRAGDLLVLNDTRVLPARRFSDDGVVEFLFLEHLGPKRWKCLVKPGRKMRVGAAARINGVTLRVEEITDGGARIVTLDEDIDPYAGGSMPLPPYINRLSDEKDAARYQTVFANAAGAIAAPTAGLHFTPEILSELPHTFVTLHVGPGTFLPVQSDNIAEHRMHSEHFSISPEVARRINDARRIIAVGTTTVRTLESARGADGKVQAQEGATDLFIYPPYEFRMVDVLLTNFHLPRSTLVMLVSAFASREFLLRAYEEAIRQRYRFYSYGDCMLIL

SEQ ID NO: 73517 - protein, 367 aa, Verrucomicrobia bacterium
  misc_feature (1)..(367): tr|A0A3R7QBG0|A0A3R7QBG0_9BACT S-adenosylmethionine:tRN A ribosyltransferase-isomerase OS=Verrucomicrobia bacte rium TMED71 OX=1986878 GN=queA PE=3 SV=1
  misc_feature (13)..(13): Xaa can be any naturally occurring amino acid
  misc_feature (48)..(48): Xaa can be any naturally occurring amino acid
  misc_feature (50)..(50): Xaa can be any naturally occurring amino acid
  misc_feature (169)..(169): Xaa can be any naturally occurring amino acid
  misc_feature (171)..(171): Xaa can be any naturally occurring amino acid
  misc_feature (177)..(177): Xaa can be any naturally occurring amino acid
  misc_feature (215)..(215): Xaa can be any naturally occurring amino acid
  misc_feature (241)..(241): Xaa can be any naturally occurring amino acid
  misc_feature (245)..(245): Xaa can be any naturally occurring amino acid
  misc_feature (249)..(249): Xaa can be any naturally occurring amino acid
  misc_feature (253)..(253): Xaa can be any naturally occurring amino acid
  misc_feature (282)..(282): Xaa can be any naturally occurring amino acid
  misc_feature (285)..(285): Xaa can be any naturally occurring amino acid
  misc_feature (289)..(289): Xaa can be any naturally occurring amino acid
  misc_feature (294)..(294): Xaa can be any naturally occurring amino acid
  misc_feature (303)..(303): Xaa can be any naturally occurring amino acid
  misc_feature (306)..(306): Xaa can be any naturally occurring amino acid
  misc_feature (328)..(328): Xaa can be any naturally occurring amino acid
  misc_feature (331)..(331): Xaa can be any naturally occurring amino acid
  misc_feature (341)..(341): Xaa can be any naturally occurring amino acid
  misc_feature (343)..(343): Xaa can be any naturally occurring amino acid
MDAALFDYELPPXRIAQEPLPARDESRLLVVHRSSQTIEHRKFRDLLXYXKPTDLFFRNTAKVLPARIFARRPTGGRVECLLLRPAGKASSDSNKTSNEQWWCLLKPGKKLPEGAVFSVENELDATVLEKNAQAEYRVSFSMKNEGSVASMAENLGKMPLPPYIDREKXDXRDRSDXDRYQTVYAKSEKTVAAAAPTAGLHFTPALVKSIEGLGXQFHDLTLHVGMGTFKPLDEGSVESHXIHRXIYEXPESXQKALREAPEGGERRICIGTTSVRSVEDYXRKXGTVXSPVFXGEAALFLYXPCXFLGVDALITNFHLPKSTLLCLXSAXLKPGSTEGIXWXKDIYKEALAHDYRFLSYGDAMLIL

SEQ ID NO: 73518 - protein, 323 aa, Verrucomicrobia subdivision
  misc_feature (1)..(323): tr|A0A0R2RGE0|A0A0R2RGE0_9BACT S-adenosylmethionine:tRN A ribosyltransferase-isomerase (Fragment) OS=Verrucomic robia subdivision 6 bacterium BACL9 MAG-120507-bin52 OX =1655590 GN=ABR82_09070 PE=3 SV=1
TTPAHPRDSARLLHIDRATGVMSDLTIRDLPSLLSPADLLVLNNSKVIPARLICSENRTELLLLEETSPGWWTALGTPSKRLQPGTIVSPDPIPGSTPARPAPQLRVEKHIPGGQLVLKVLGDSLNLEQYGLPPLPPYILKTRKVQGQPDFQPSDPIDYQTTYAQPSGSVAAPTAGLHFTPELLAQFSHAFVTLHVGLGTFRPIKTADFRDHPMHEEKYEIPLGLAEKVAAATRTIAVGTTSARVLESAPNLNPHHGTTSAFFYPPYQFQRISGLLTNFHLAHSTLLLLVAAFAGPELTLRAYRHALEKKYRFFSFGDAMLIL

SEQ ID NO: 73519 - protein, 361 aa, Verrucomicrobia subdivision
  misc_feature (1)..(361): tr|A0A520RT48|A0A520RT48_9BACT S-adenosylmethionine:tRN A ribosyltransferase-isomerase OS=Verrucomicrobia subdi vision 3 bacterium OX=2052186 GN=queA PE=3 SV=1
MKTDAFDFELPQELIAQHPIEGARDQSRLFCYHRSKQSIKHQGFQEIVSHLHAGDLLVMNNTKVIPSRLRGEKAQSGGKIELLLIEATGHQEWLAMLKPGKRAHPGTLIDLHDRHGEKSGILAKVIDKTESGHFHLRFSDGIDIMELLEKYGEIPLPPYIHREHAPSSNDSVRYQTVYAENEGSVAAPTAGLHFTPALMEALEKKGIQIAYVTLHVGLGTFNPVKAEWVNDHKMHKERYMVSAQTLKMIRDTRKRKGKITAVGTTSLRVLESLALTWKPSDPIQAMHASTDIFIYPPHTFQYTDRLITNFHLPMSSLIMLISAFVSPGDTNGVEQIKRIYNEAIKYQYRFFSYGDAMLIDS

SEQ ID NO: 73520 - protein, 323 aa, Verrucomicrobiaceae bacterium
  misc_feature (1)..(323): tr|A0A1Z9FKK1|A0A1Z9FKK1_9BACT S-adenosylmethionine:tRN A ribosyltransferase-isomerase OS=Verrucomicrobiaceae b acterium TMED137 OX=1986879 GN=queA PE=3 SV=1
  misc_feature (110)..(110): Xaa can be any naturally occurring amino acid
  misc_feature (114)..(114): Xaa can be any naturally occurring amino acid
  misc_feature (118)..(118): Xaa can be any naturally occurring amino acid
MRTTDFHYELPPELIASRPLVDRESSRMMLVNRATSEISHHRFSDFPDLLPPDHLLVLNDTKVIPARLFSNDGKVELVRTDAPDPNHWWCLVRPGKKMRDGRSVEVGKSXGTVXQTNXKGERLIKWDTPPDLEVHGHLALPHYMEREPDKSDRDRYQTVYAKEEGAIAAPTAGLHFTPELLSKLDHTFLTLHVGVGTFRPVKTDDPREHDMHSERYVLGQEAAGKIQTAKKIAAVGTTVTRVLEHLARDRKLEACDGETDIFIYPSYEFKVISALQTNFHLPCSTLMMLVSAFATRDLIMEAYAKAVEEKYRFYSYGDCMLII

SEQ ID NO: 73521 - protein, 327 aa, Verrucomicrobiaceae bacterium
  misc_feature (1)..(327): tr|A0A4Q3BAH1|A0A4Q3BAH1_9BACT S-adenosylmethionine:tRN A ribosyltransferase-isomerase OS=Verrucomicrobiaceae b acterium OX=2026800 GN=queA PE=3 SV=1
MVSSLTRDYDYQLPEGLIARYPLPQREASRMMVLHRAEQRIEHRLFSDFPEFLRQGDLVVLNDTRVIPARVFSDDRRIELLFLEAVGENAWKCLVKPGRKMRIGATVTVLGVPGQVFEIHPEGERSIQFAGPVDLDRCGELPLPPYFERSPEVSDSERYQTVFAKERGAVAAPTAGLHFTPEILAGVPHAFLTLHVGVGTFRPVQVEDVTEHRMHSERFHLPQETASAINGASRVVAVGTTTTRVLESCAREGLPLKETTGSTDIFIYPPYQFRAIGALLTNFHLPKSTLLMLVSAFAGREFVLRAYEEAVREQYRFYSYGDCMLIL

SEQ ID NO: 73522 - protein, 330 aa, Verrucomicrobiae bacterium
  misc_feature (1)..(330): tr|A0A2A2Q910|A0A2A2Q910_9BACT S-adenosylmethionine:tRN A ribosyltransferase-isomerase OS=Verrucomicrobiae bact erium Tous-C5FEB OX=1982331 GN=queA PE=3 SV=1
MRTKDFDYHLPEELIAARPLADRAASRMLVVHRDSGRIEHRMFRDIAEYLRPDDLLVLNNTRVIPARVFSDDGSIELLCLDRLGELEWRCLVRPGKRMKLGREVSVGGIRGVVTEVFENGDRLIRWDLPLDLEKHGQLALPHYMGRVEDEADRERYQTVYAQKDGAIAAPTAGLHFTHEMLERISHAFLTLHVGVGTFRPVSAEVVTDHVMHSEKFIVTEETAKRVNSAGRVLAVGTTVTRVLEALAKQNPSAATRIAEIHHAGETDIFIHPPHEFRAIDALLTNFHLPQSTLLMLVSALAGRGLILEAYREAVAQRYRFFSYGDCMLIL

SEQ ID NO: 73523 - protein, 358 aa, Verrucomicrobiae bacterium
  misc_feature (1)..(358): tr|A0A2A2YDK3|A0A2A2YDK3_9BACT S-adenosylmethionine:tRN A ribosyltransferase-isomerase OS=Verrucomicrobiae bact erium AMD-G2 OX=1982328 GN=queA PE=3 SV=1
MRLSEKNPAFTLDFNCQATPLPFSITCVSLTTKDFDYHLPEELIASRPLDDRAASRMMVIHRDSGLIEHKMFRDFPSYIHAGDQLVLNDTKVIPARLFSTDGKSEILCLDRPSPTLWRCLVKPGKKMRVGATVQVADAIGSVIEVYENGDRLIEWDREIDLNVHGHLALPHYMNREDELSDRERYQTVYAREEGAIAAPTAGLHFTPEILQSLPHTFLTLHVGVGTFRPVKAERPEDHEMHSENYAISADAARAINDASRVIAIGTTVTRVLEHLAQSAADGLLIPSETQSGSTNIFLYPPYQLRVIGALLTNFHLPQSTLLMLVSAFAGRDLMLEAYRQAVEEKYRFYSYGDCMLIL

SEQ ID NO: 73524 - protein, 333 aa, Verrucomicrobiales bacterium
  misc_feature (1)..(333): tr|A0A3D0YNG8|A0A3D0YNG8_9BACT S-adenosylmethionine:tRN A ribosyltransferase-isomerase OS=Verrucomicrobiales ba cterium OX=2026801 GN=queA PE=3 SV=1
MLKTTDFDYHLPEKLIASRPLVERAASRMMVIDRNTGEIEHHMFTDFSSYLKPYDLLILNDTKVTPARFFSNDGNIEIVCTHKLGELEWECLVRPGKKMKPGRSIKIGEATGTVESVLENGNRIIRWDQPVDEEAHGRLALPHYMNRESDPADRDRYQTTFAREEGAIAAPTAGLHFTPEILSEINHTFLTLHVGVGTFRPIKAEYVKDHNMHSERYSLSAETADRINTTRELGGRIVSTGTTCTRVLESIAQSQMTNLGHISSTRGETDIFINPPHDFKIVDSLLTNFHLPQSTLIMLVSAFANRELILEAYAKAVEAKYRFFSYGDCMLIV

SEQ ID NO: 73525 - protein, 324 aa, Verrucomicrobiales bacterium
  misc_feature (1)..(324): tr|A0A2D5AIJ7|A0A2D5AIJ7_9BACT S-adenosylmethionine:tRN A ribosyltransferase-isomerase OS=Verrucomicrobiales ba cterium OX=2026801 GN=queA PE=3 SV=1
  misc_feature (5)..(5): Xaa can be any naturally occurring amino acid
MQTSXFDYKLPNELIAQRPPEKRGESRMMVIDRKSGEISHQRFLDFPNFIHSDDRLVLNDTRVVAARYFSNDSRKEVLRVDVLGPNRWKCLVRPGKKFRIGQTVEIGDGTGTVVEICEEGGERIIEFDREPDEESHGHLALPPYIDRPDTADDQARYQTVYAREEGAIAAPTAGLHFSDEMLASLPHCFVTLHVGIGTFRPVSDDDINKHHMHSERFELSPETVSQIESANRTVAVGTTVVRVLESCVRDGKLQSDSGETDIFIYPPYEFHAVDALLTNFHLPKSTLLMLVSALAGRELVMEAYHKAVEERYRFFSYGDCMLII

SEQ ID NO: 73526 - protein, 351 aa, Verrucomicrobium sp.
  misc_feature (1)..(351): tr|A0A1H2DYR1|A0A1H2DYR1_9BACT S-adenosylmethionine:tRN A ribosyltransferase-isomerase OS=Verrucomicrobium sp. GAS474 OX=1882831 GN=queA PE=3 SV=1
MTTPSRTDLLTDDFSFDLPTERIAAWPTPDRAASRLMVLDRAARTITHAQFSDLPTFLRPDDLLVLNNSRVMPASLDSADGALSILLLKETSPRHWMALVKPAKRAMPGMRHTFRSRDGKRTIEAEVLKTLESGERVFRFFDDLPLDEYGDMPIPPYILKRRKALEAEASAIPSIDDRVRYQTVYADAAQAGSVAAPTAGLHFTPEMLAKFDHAFVTLHVGLGTFRPVKVEKLADHVMHREEFEIPAGLAEKVKREDGTKRRIVAVGTTSARVLESVESLRPRRGETEIFLYPPYRFKHVGALLTNFHLPKSTLLMLVSAFAGREFILEAYREAVAKEYRFFSYGDAMLIL

SEQ ID NO: 73527 - protein, 340 aa, Vesicomyosocius okutanii
  misc_feature (1)..(340): sp|A5CXQ6|QUEA_VESOH S-adenosylmethionine:tRNA ribosylt ransferase-isomerase OS=Vesicomyosocius okutanii subsp. Calyptogena okutanii (strain HA) OX=412965 GN=queA PE= 3 SV=1
MQLKDFDFDLPASLIAQHPIKNRTDSRLLIKRSSIIDIQFNQIGDFFQSGDLLIMNNTKVIPARLFGTKETGGKVEIMIERILDENQVLAMIKASRAPKIGSCIFLENDVNIIVYQKDNGFYTLIFETDSLFDLLNNIGHTPLPPYIKRTNNVQDLSRYQTVYAQKDGAVAAPTAGLHFDDSLLAQLKIQGIDHLFVTLHIGSGTFTPIRTDNIKNHVMHSEIFEISQVTVDRINLTKANGGRIIAVGTTTVRVLESSLKNGKLIAQNGETDIFIYPSYQFRIVDSLITNFHLPKSSLLMLVSAFIGRDKMLELYKHAIEQKYKFLSYGDAMFLEKNNDL

SEQ ID NO: 73528 - protein, 361 aa, Vespertiliibacter pulmonis
  misc_feature (1)..(361): tr|A0A3N4W3Y6|A0A3N4W3Y6_9PAST S-adenosylmethionine:tRN A ribosyltransferase-isomerase OS=Vespertiliibacter pul monis OX=1443036 GN=queA PE=3 SV=1
MLVTDFHFELPDSLIARYPMPNRTASRLLYLDGPTGEYHDQQFTDLLSYINSGDLLIFNNTRVIPARVYGRKISGGKLEILVERIIDSHRCLAHIRASKALKEGAEIILGEDKLGEGNGLHATMIARHNTLFELQFNEQQPLLELLQQAGHMPLPPYIDRPDEDADQERYQTVYNKVPGAVAAPTAGLHFDNALLQALKEKGVNTAFVTLHVGAGTFQPVRVETIEDHTMHAEYAEVSQEVVDQILATKAKGKRVICVGTTSVRSIESAAQAAEKNGELIAPFYSDTTIFLYPGKTFRVVDALVTNFHLPESTLIMLVSAFAGYQNCMQAYQHAISAQYRFFSYGDAMFITKNPNALHDIP

SEQ ID NO: 73529 - protein, 400 aa, Vibrio aerogenes
  misc_feature (1)..(400): tr|A0A1M5YY27|A0A1M5YY27_9VIBR S-adenosylmethionine:tRN A ribosyltransferase-isomerase OS=Vibrio aerogenes CECT 7868 OX=1216006 GN=queA PE=3 SV=1
MCSSVSLFFLKNRHPLLMNLLNLLPLRKISVYTTALQMSQSNSMKTRTMQVSDFYFDLPDELIARYPKPERSASRLLQLNGNTGEVVDRTFKDVLDLVSPGDLLVFNNTRVIPARMFGRKSSGGKIEVLVERILDEQHILAHVRSSKAPKPGAALFLGEHDEFQATMVSRQDALFEIRFESELPVLDILDSIGHMPLPPYIDRPDEEADKERYQTVYNEKPGAVAAPTAGLHFDDELLEQISAKGVEMAYVTLHVGAGTFQPVRVDNISEHHMHSEYVEVSQDVVDAIQATKARGGSVIAVGTTSVRSLESAAQNALKNSEALASFFGDTSIFIYPGYEYQVVDCLITNFHLPESTLIMLVSAFAGYTHVMEAYQHAVKEKYRFFSYGDAMFINKRTDKS

SEQ ID NO: 73530 - protein, 350 aa, Vibrio agarivorans
  misc_feature (1)..(350): tr|A0A2K1CJZ3|A0A2K1CJZ3_9VIBR S-adenosylmethionine:tRN A ribosyltransferase-isomerase OS=Vibrio agarivorans OX =153622 GN=queA PE=3 SV=1
MQVSDFHFDLPDELIARYPQPERTASRLLQMDGNTGELVDGTFTDVLIQVQEGDLVVFNNTRVIPARMFGRKASGGKLEVLVERMLDDKSILAHVRCSKSPKPGSTVLLGENDEYSAEMVARHDALFELKFESDKTVLDILEEIGHMPLPPYIDRPDEDSDKERYQTVYNQKPGAVAAPTAGLHFDDELLENIKAKGAEFAYVTLHVGAGTFQPVKVDNINDHHMHAEYVEVSQEVIDAIRATKARGGRIIAVGTTSVRSLESAAQSALKNGTELVPFFDDTEIFIFPGYEYQLVDCLITNFHLPESTLIMLVSAFAGYDNTMNAYQHAVKNKYRFFSYGDSMFIKKKIS

SEQ ID NO: 73531 - protein, 350 aa, Vibrio alfacsensis
  misc_feature (1)..(350): tr|A0A347USI8|A0A347USI8_9VIBR S-adenosylmethionine:tRN A ribosyltransferase-isomerase OS=Vibrio alfacsensis OX =1074311 GN=queA PE=3 SV=1
MQVSDFHFDLPDELIARYPQPERTASRLLQMDGNTGELVDGTFTDVLDHIQAGDLVVFNNTRVIPARMFGRKESGGKLEVLVERMLDEKSILAHVRCSKSPKPGSRVIVGENDEYSAEMVARHDALFELKFNSDKTVLEILEEIGHMPLPPYIDRPDEDADKERYQTVYNQKPGAVAAPTAGLHFDDVLLEKIKAKGAEFAYVTLHVGAGTFQPVKVDNINDHHMHAEYVEVPQEVVDAVTATKARGGRVIAVGTTSVRSLESAAQDALKKGTELVPFFGDTEIFIFPGYEYQLVDCLITNFHLPESTLIMLVSAFAGYENTMNAYKHAVENHYRFFSYGDSMFIKKKTN

SEQ ID NO: 73532 - protein, 350 aa, Vibrio alginolyticus
  misc_feature (1)..(350): tr|D0WU66|D0WU66_VIBAL S-adenosylmethionine:tRNA ribosy ltransferase-isomerase OS=Vibrio alginolyticus 40B OX=6 74977 GN=queA PE=3 SV=1
MQVSDFHFDLPDELIARYPQPERTASRLLQMDGNTGELIDGTFTDVLGQVQPGDLVVFNNTRVIPARLFGRKESGGKLEVLVERMLDEKSILAHVRCSKSPKPGTTIIVGENDEYSAEMVARHDALFELKFSSDKTVLEILEEIGHMPLPPYIDRPDEDADKERYQTVYNQKPGAVAAPTAGLHFDDVLLEKIKAKGAEFAYVTLHVGAGTFQPVKVENINDHHMHAEYVEVPQEVVEAIKATKARGGRIIAVGTTSVRSLESAAQDALQKGTELAPFFGDTEIFIFPGYEYQLVDCLITNFHLPESTLIMLVSAFAGYENTMNAYKHAVENKYRFFSYGDSMFIKKKTA

SEQ ID NO: 73533 - protein, 350 aa, Vibrio alginolyticus; identical to SEQ ID NO: 73532
  misc_feature (1)..(350): tr|A0A0P7F9Q7|A0A0P7F9Q7_VIBAL S-adenosylmethionine:tRN A ribosyltransferase-isomerase OS=Vibrio alginolyticus OX=663 GN=queA PE=3 SV=1

SEQ ID NO: 73534 - protein, 349 aa, Vibrio algivorus
  misc_feature (1)..(349): tr|A0A557P6H0|A0A557P6H0_9VIBR S-adenosylmethionine:tRN A ribosyltransferase-isomerase OS=Vibrio algivorus OX=1 667024 GN=queA PE=3 SV=1
MQVSDFDFDLPDELIARYPQPQRTASRLLQLDGNSGELTDGKFTDVLDLVQPGDLVVFNNTRVIPARVFGRKESGGKIEILVERVLDEHSILAHVRASKSPKPGNALFLGENDEYQATMVARHEALFEIHFEHEKGVFDILNEIGHMPLPPYIDRPDEDTDKERYQTVYNQKPGAVAAPTAGLHFDNELLDEIKAKGVEFAYVTLHVGAGTFQPVRVDDINDHHMHSEYVEVPQEVVDAIADTKARGGRVVAVGTTSVRSLESAAQDAKQKGTELAPFFGDTEIFIYPGYEYQLVDVLITNFHLPESTLIMLVSAFAGYEHVMNAYQHAVQQQYRFFSYGDAMFVTKKQ

SEQ ID NO: 73535 - protein, 350 aa, Vibrio anguillarum
  misc_feature (1)..(350): tr|A0A378MQT5|A0A378MQT5_VIBAN S-adenosylmethionine:tRN A ribosyltransferase-isomerase OS=Vibrio anguillarum OX =55601 GN=queA PE=3 SV=1
MQVSDFHFELPDELIARYPTAERTASRLLQLDGNSGELADGSFKDVLDRVQPGDLLVFNNTRVIPARMFGRKASGGKLEVLVERMLDEQTILAHVRSSKPPKPGSELYLGEHDEYHAHMVARHDALFEIRFTASKTVLEILNEIGHMPLPPYIDRPDEDADKERYQTVYNQKPGAVAAPTAGLHFDEALLEQIKAKGVEFAYVTLHVGAGTFQPVRVDNIHDHHMHAEYVEVPQEVVDAVNATKARGGRVIAVGTTSVRSLESAAQDALKKGTELVPFFGDTEIFIFPGYEYQLVDCLITNFHLPESTLIMLVSAFAGYEHTMAAYAHAVKHQYRFFSYGDAMFITKNTN

SEQ ID NO: 73536 - protein, 373 aa, Vibrio anguillarum
  misc_feature (1)..(373): tr|F7YNL0|F7YNL0_VIBA7 S-adenosylmethionine:tRNA ribosy ltransferase-isomerase OS=Vibrio anguillarum (strain AT CC 68554 / 775) OX=882102 GN=queA PE=3 SV=1
MFTYILRRLKKLRHPLKTNKIRTMQVSDFHFELPDELIARYPTAERTASRLLQLDGNSGELADGSFKDVLDRVQPGDLLVFNNTRVIPARMFGRKASGGKLEVLVERMLDEQTILAHVRSSKPPKPGSELYLGEHDEYHAHMVARHDALFEIRFTASNTVLEILNEIGHMPLPPYIDRPDEDADKERYQTVYNQKPGAVAAPTAGLHFDEALLEQIKAKGVEFAYVTLHVGAGTFQPVRVDNIHDHHMHAEYVEVPQEVVDAVNATKARGGRVIAVGTTSVRSLESAAQDALKKGTELVPFFGDTEIFIFPGYEYQLVDCLITNFHLPESTLIMLVSAFAGYEHTMAAYAYAVKHQYRFFSYGDAMFITKNTN

SEQ ID NO: 73537 - protein, 350 aa, Vibrio antiquarius
  misc_feature (1)..(350): tr|A7K197|A7K197_VIBAE S-adenosylmethionine:tRNA ribosy ltransferase-isomerase OS=Vibrio antiquarius (strain Ex 25) OX=150340 GN=queA PE=3 SV=1
MQVSDFHFDLPDELIARYPQPERTASRLLQMDGNTGELIDGTFTDVLGQVQPGDLVVFNNTRVIPARLFGRKESGGKLEVLVERMLDEKSILAHVRCSKSPKPGTTIIVGENDEYSAEMVARHDALFELKFNADKTVLEILEEIGHMPLPPYIDRPDEDADKERYQTVYNQKPGAVAAPTAGLHFDDVLLEKIKAKGAEFAYVTLHVGAGTFQPVKVENINDHHMHAEYVEVPQEVVEAIKATKARGGRIIAVGTTSVRSLESAAQDALKKGTELAPFFGDTEIFIFPGYEYQLVDCLITNFHLPESTLIMLVSAFAGYENTMNAYKHAVENKYRFFSYGDSMFIKKKTI

SEQ ID NO: 73538 - protein, 350 aa, Vibrio atlanticus
  misc_feature (1)..(350): tr|A0A558GP34|A0A558GP34_9VIBR S-adenosylmethionine:tRN A ribosyltransferase-isomerase OS=Vibrio atlanticus OX= 693153 GN=queA PE=3 SV=1
MQVSDFHFDLPDELIARYPQEERTASRLLKLDGNNGNLTDGSFKDVLDLAEPGDLVVFNNTRVIPARVFGRKASGGKLEVLVERMLDEKSILAHVRCSKSPKPGTKLFLGENDEYEAEMVARHDSLFEIHFTSDQSVLEILNSVGHMPLPPYIDRPDEDADKERYQTVYNEKPGAVAAPTAGLHFDDKLMADMKAKGVEFAYVTLHVGAGTFQPVKVDNINDHHMHAEYVEVPQEVVDAVAAAKARGGRIIAVGTTSVRSLESAAQDALKKGTELVPFFGDTEIFIFPGYEYQLVDCLITNFHLPESTLIMLVSAFAGYDHVMGAYDHAVKSEYRFFSYGDAMFINKKTS

SEQ ID NO: 73539 - protein, 350 aa, Vibrio atlanticus
  misc_feature (1)..(350): tr|A0A1C3IKQ7|A0A1C3IKQ7_9VIBR S-adenosylmethionine:tRN A ribosyltransferase-isomerase OS=Vibrio atlanticus OX= 693153 GN=queA PE=3 SV=1
MQVSDFHFDLPDELIARYPQEERTASRLLKLDGNNGNLADGSFKDVLDLVEPGDLVVFNNTRVIPARVFGRKASGGKLEVLVERMLDEKSILAHVRCSKSPKPGTKLFLGENDEYEAEMVARHDALFEIHFTSDQSVLEILNSVGHMPLPPYIDRPDEDADKERYQTVYNEKPGAVAAPTAGLHFDDKLMADMKEKGVEFAYVTLHVGAGTFQPVKVDNINDHHMHAEYVEVPQEVVDAVAAAKARGGRIIAVGTTSVRSLESAAQDAVKNGTELVPFFGDTEIFIFPGYEYQLVDCLITNFHLPESTLIMLVSAFAGYDNVMGAYDHAVKSEYRFFSYGDAMFINKKTS

SEQ ID NO: 73540 - protein, 350 aa, Vibrio azureus
  misc_feature (1)..(350): tr|U3CDP6|U3CDP6_9VIBR S-adenosylmethionine:tRNA ribosy ltransferase-isomerase OS=Vibrio azureus NBRC 104587 OX =1219077 GN=queA PE=3 SV=1
MQVSDFHFDLPDELIARYPQPERTASRLLQMDGNTGELIDGTFTDVLSQVQAGDLVVFNNTRVIPARMFGRKASGGKLEVLVERMLDDKSILAHVRCSKSPKPGSTVLLGENDEYSAEMVARHDALFELKFASDKTVLEILEEIGHMPLPPYIDRPDEDSDKERYQTVYNQKPGAVAAPTAGLHFDDELLENIKAKGAEFAYVTLHVGAGTFQPVKVDDINDHHMHAEYVEVPQEVVDAIHDTKARGGRIIAVGTTSVRSLESAAQDALKNGTELVPFFGDTEIFIFPGYEYQLVDCLITNFHLPESTLIMLVSAFAGYDNTMNAYQHAVKNKYRFFSYGDSMFIKKKTS

SEQ ID NO: 73541 - protein, 350 aa, Vibrio barjaei
  misc_feature (1)..(350): tr|A0A1J4QYL4|A0A1J4QYL4_9VIBR S-adenosylmethionine:tRN A ribosyltransferase-isomerase OS=Vibrio barjaei OX=167 6683 GN=queA PE=3 SV=1
MQVSDFHFDLPDKLIARYPKAERSSSRLLQLTGNTGEVVDGSFTDIIDQVQPGDLLVFNNTRVIPARMFGRKASGGKIEVLVERMLDDKRVLAHVRSSKAPKPGTELFLGENDEYQALMVARHDALFEIEMQSDKTVLDILNDIGHMPLPPYIDRPDEDADKERYQTVYNEKPGAVAAPTAGLHFDDVVLEKIKAKGANFAYVTLHVGAGTFQPVRVENINDHHMHAEYVEVPQEVVDAINETKANGGRIIAVGTTSVRSLESAAQDALKNGTELVPFFGDTEIFIFPGYEYQLVDCLVTNFHLPESTLIMLVSAFAGYDNVMSAYHHAVEQKYRFFSYGDAMFITKKTA

SEQ ID NO: 73542 - protein, 350 aa, Vibrio bivalvicida
  misc_feature (1)..(350): tr|A0A177XV62|A0A177XV62_9VIBR S-adenosylmethionine:tRN A ribosyltransferase-isomerase OS=Vibrio bivalvicida OX =1276888 GN=queA PE=3 SV=1
MQVSDFHFDLPDELIARYPQPERTASRLLQLNGDSGELNDGTFTDVLNHVQPGDLVVFNNTRVIPARMFGRKESGGKLEVLVERVLDEKSILAHVRCSKSPKPGSTIFIGENDEYSAQMVARHDALFELKFNSEQNVLAVLEEIGHMPLPPYIDRPDEDSDKERYQTVYNQKPGAVAAPTAGLHFDEPLIEKIKEKGAELAYVTLHVGAGTFQPVKVDNINEHHMHAEYVEVPQQVVEAINAAKARGGRIIAVGTTSVRSLESAAQDALKKGTELAPFFGDTEIFIYPGYEYQLVDCLITNFHLPESTLIMLVSAFAGYENTMNAYKHAVENKYRFFSYGDSMFIKKKTA

SEQ ID NO: 73543 - protein, 353 aa, Vibrio brasiliensis
  misc_feature (1)..(353): tr|E8LPX2|E8LPX2_9VIBR S-adenosylmethionine:tRNA ribosy ltransferase-isomerase OS=Vibrio brasiliensis LMG 20546 OX=945543 GN=queA PE=3 SV=1
MQVSDFHFDLPDELIARYPQPERTASRLLQMDGNTGELVDGTFTDVLEQVQPGDLVVFNNTRVIPARMFGRKESGGKLEVLVERVVDEKSILAHVRCSKSPKPGSTIFVGENDEFSAEMVARHDALFELKFNSEQNVLAVLEEIGHMPLPPYIDRPDEDSDKERYQTVYNQKPGAVAAPTAGLHFDEPLLEKIKAKGAEFAYVTLHVGAGTFQPVKVDDIHDHHMHAEYVEVPQEVVDAINAAKARGGRIVAVGTTSVRSLESAAQDALKKGTELVPFFGDTEIFIYPGYQYQLVDCLITNFHLPESTLIMLVSAFAGYENTMNAYKHAVENKYRFFSYGDSMFIKKKLATSS

SEQ ID NO: 73544 - protein, 350 aa, Vibrio breoganii
  misc_feature (1)..(350): tr|A0A193K9Y8|A0A193K9Y8_9VIBR S-adenosylmethionine:tRN A ribosyltransferase-isomerase OS=Vibrio breoganii OX=5 53239 GN=queA PE=3 SV=1
MQVSDFHFDLPDELIARYPMPDRTSSRLLQLTGNSGEVQDKNFTDMLDLVCEGDLLVFNNTRVIPARVFGRKASGGKIEVLVERMVDEHTILAHVRSSKSPKPGTELFLGDKDQYAAVMVARHDALFEIRFTSDKAVLQILEEVGHMPLPPYIDRPDEDSDQERYQTVYNEKPGAVAAPTAGLHFDDEILEKIKAKGANLAFVTLHVGAGTFQPVRVDNILEHHMHAEYVEVTQEVVDAINETKAKGGRVIAVGTTSVRSLESAAQDAVRKGTELKPFFGDTDIFIYPGYEFQLIDCLLTNFHLPESTLIMLVSAFAGYDNVMGAYLHAVEHKYRFFSYGDAMFVTRKGL

SEQ ID NO: 73545 - protein, 350 aa, Vibrio breoganii
  misc_feature (1)..(350): tr|A0A2N7HEW8|A0A2N7HEW8_9VIBR S-adenosylmethionine:tRN A ribosyltransferase-isomerase OS=Vibrio breoganii OX=5 53239 GN=queA PE=3 SV=1
MQVSDFHFDLPDELIARYPMPDRTSSRLLQLTGNSGEVQDKNFTDMLDLVGEGDLLVFNNTRVIPARVFGRKASGGKIEVLVERMVDEHTILAHVRSSKSPKPGTELFLGDKDQYAAVMVARHDALFEIRFTSDKAVLQILEEVGHMPLPPYIDRPDEDSDQERYQTVYNEKPGAVAAPTAGLHFDDEILEKIKAKGANLAFVTLHVGAGTFQPVRVDNILEHHMHAEYVEVTQEVVDAINETKAKGGRVIAVGTTSVRSLESAAQDAVRKGTELKPFFGDTDIFIYPGYEFQLIDCLLTNFHLPESTLIMLVSAFAGYDNVMGAYLHAVEHKYRFFSYGDAMFVTRKGL

SEQ ID NO: 73546 - protein, 350 aa, Vibrio campbellii
  misc_feature (1)..(350): sp|A7MT82|QUEA_VIBCB S-adenosylmethionine:tRNA ribosylt ransferase-isomerase OS=Vibrio campbellii (strain ATCC BAA-1116 / BB120) OX=338187 GN=queA PE=3 SV=1
MQVSDFHFDLPDELIARYPQPERTASRLLQMDGNTGELIDGTFSDVLEQVQAGDLVVFNNTRVIPARLFGRKESGGKLEVLVERMLNEKSILAHVRCSKSPKPGTTILVGENDEYSAQMVARHDALFELKFNSDKTVLEILEEIGHMPLPPYIDRPDEDADKERYQTVYNQKPGAVAAPTAGLHFDDVLLEKITAKGAEFAYVTLHVGAGTFQPVKVDDIDDHHMHAEYVEVPQDVVDAINATKARGGRVVAVGTTSVRSLESAAQDALKKGTELVPFFGDTEIFIYPGYEYQLVDCLITNFHLPESTLIMLVSAFAGYENTMNAYKHAVENKYRFFSYGDSMFIKKKTA

SEQ ID NO: 73547 - protein, 350 aa, Vibrio campbellii
  misc_feature (1)..(350): tr|A0A0A3FBA6|A0A0A3FBA6_9VIBR S-adenosylmethionine:tRN A ribosyltransferase-isomerase OS=Vibrio campbellii OX= 680 GN=queA PE=3 SV=1
MQVSDFHFDLPDELIARYPQPERTASRLLQMDGNTGELIDGTFTDVLEQVQAGDLVVFNNTRVIPARLFGRKESGGKLEVLVERMLDEKSILAHVRCSKSPKPGTTILVGENDEYSAQMVARHDALFELKFNSDKTVLEILEEIGHMPLPPYIDRPDEDADKERYQTVYNQKPGAVAAPTAGLHFDDVLLEKIKAKGAEFAYVTLHVGAGTFQPVKVDDINDHHMHAEYVEVPQDVVDAINATKARGGRIVAVGTTSVRSLESAAQDALKKGTELVPFFGDTEIFIYPGYEYQLVDCLITNFHLPESTLIMLVSAFAGYENTMNAYKHAVENKYRFFSYGDSMFIKKKTA

SEQ ID NO: 73548 - protein, 351 aa, Vibrio caribbeanicus
  misc_feature (1)..(351): tr|E3BMT9|E3BMT9_9VIBR S-adenosylmethionine:tRNA ribosy ltransferase-isomerase OS=Vibrio caribbeanicus ATCC BAA -2122 OX=796620 GN=queA PE=3 SV=1
MQVSDFHFELPDELIARYPQPERTASRLLQLDGNSGDLKDGTFVDVLAQVQPGDLVVFNNTRVIPARMFGRKESGGKLEVLVERVLDEKSILAHVRCSKSPKPGSTIFVGEHDEFSAQMVARHDALFELKFNSDQNVLSVLEQIGHMPLPPYIDRPDEDSDKERYQTVYNQKPGAVAAPTAGLHFDELMLEKLAQKGVELAYVTLHVGAGTFQPVKVDNIHDHHMHAEYVEVPASVIDAIKATKARGGRIIAVGTTSVRSLESAAQHALTNGTELAPFFGDTEIFIYPGYEYQLVDCLITNFHLPESTLIMLVSAFAGYENTMNAYHHAVKNNYRFFSYGDSMFIKKKTAK

SEQ ID NO: 73549 - protein, 350 aa, Vibrio caribbeanicus
  misc_feature (1)..(350): tr|A0A0A6QLY3|A0A0A6QLY3_9VIBR S-adenosylmethionine:tRN A ribosyltransferase-isomerase OS=Vibrio caribbeanicus OX=701175 GN=queA PE=3 SV=1
MQVSDFHFDLPDELIARYPQPERTASRLLQMDGNTGELVDGTFTDVLEQVQPGDLVVFNNTRVIPARMFGRKESGGKLEVLVERVLDEKSILAHVRCSKSPKPGTTIFIGENDEYSAEMVARHDALFELKFNAEQNVLAVLEEIGHMPLPPYIDRPDEDSDKERYQTVYNEKPGAVAAPTAGLHFDEPLLEKIKAKGVEFAYVTLHVGAGTFQPVKVDNINEHHMHAEYVEVPQEVVDAINATKARGGRIIAVGTTSVRSLESAAQDAIKKGTELAPFFGDTEIFIFPGYEYQLVDCLITNFHLPESTLIMLVSAFAGYENTMNAYKHAVENKYRFFSYGDSMFIKKKTD

SEQ ID NO: 73550 - protein, 350 aa, Vibrio casei
  misc_feature (1)..(350): tr|A0A368LL67|A0A368LL67_9VIBR S-adenosylmethionine:tRN A ribosyltransferase-isomerase OS=Vibrio casei OX=67337 2 GN=queA PE=3 SV=1
MQVSDFDFELPDELIARYPQPQRTASRLLQLNGESGALTDGQFTDVLDLVQAGDLVVFNNTRVIPARVFGRKASGGKIEVLVERVIDEKSILAHVRASKSPKPGNELFLGENDEFKAVMVARHDALFEIRFDSDKSVLEVLNDVGHMPLPPYIDRPDEDADKERYQTVYNKKPGAVAAPTAGLHFDNELLDKIKAKGVSFAYVTLHVGAGTFQPVRVDDINDHHMHSEYVEVPQDVVDAIAETKARGGRIVAVGTTSVRSLESAAQDAKQKGTELVPFFGDTEIFIYPGYEYQLIDVLITNFHLPESTLIMLVSAFAGYDNVMAAYKHAVNKEYRFFSYGDAMFVTKRDS

SEQ ID NO: 73551 - protein, 350 aa, Vibrio celticus
  misc_feature (1)..(350): tr|A0A1C3JLB7|A0A1C3JLB7_9VIBR S-adenosylmethionine:tRN A ribosyltransferase-isomerase OS=Vibrio celticus OX=44 6372 GN=queA PE=3 SV=1
MQVSDFHFDLPDELIARYPQEERTASRLLKLDGNSGNLADGSFKDVLDLVEPGDLVVFNNTRVIPARVFGRKASGGKLEVLVERMLDEKSILAHVRCSKSPKPGTKLFLGENDEYEAEMVARHDALFEIHFTSDQSVLEILNSVGHMPLPPYIDRPDEDADKERYQTVYNEKPGAVAAPTAGLHFDDKLMADMKEKGVEFAYVTLHVGAGTFQPVKVDNINDHHMHAEYVEVPQEVVDAVAAAKARGGRIIAVGTTSVRSLESAAQDAVKKGTELVPFFGDTEIFIFPGYEYQLVDCLITNFHLPESTLIMLVSAFAGYDNVMGAYDHAVKSEYRFFSYGDAMFINKKTS

SEQ ID NO: 73552 - protein, 350 aa, Vibrio chagasii
  misc_feature (1)..(350): tr|A0A2S7VCY2|A0A2S7VCY2_9VIBR S-adenosylmethionine:tRN A ribosyltransferase-isomerase OS=Vibrio chagasii OX=17 0679 GN=queA PE=3 SV=1
MQVSDFHFDLPDELIARYPQEERTASRLLKLDGNNGNLTDGSFKDVLDLVEPGDLVVFNNTRVIPARVFGRKASGGKLEVLVERMLDEKSILAHVRCSKSPKPGTKLFLGENDEYEAEMVARHDALFEIHFTSDQSVLEILNSVGHMPLPPYIDRPDEDADKERYQTVYNEKPGAVAAPTAGLHFDDKLMADMKAKGVEFAYVTLHVGAGTFQPVKVDNINDHHMHAEYVEVPQEVVDAVAATKARGGRIIAVGTTSVRSLESAAQDALKNGTELVPFFGDTEIFIFPGYEYQLVDCLITNFHLPESTLIMLVSAFAGYDHVMSAYDHAVKSEYRFFSYGDAMFINKKTS

SEQ ID NO: 73553 - protein, 352 aa, Vibrio cholerae
  misc_feature (1)..(352): sp|Q9KTZ1|QUEA_VIBCH S-adenosylmethionine:tRNA ribosylt ransferase-isomerase OS=Vibrio cholerae serotype O1 (st rain ATCC 39315 / El Tor Inaba N16961) OX=243277 GN=que A PE=3 SV=1
MQVSDFHFELPDELIARYPKAERTASRLLQLDGNSGQLVDGTFKDVLELVEPGDLLVFNNTRVIPARMFGRKASGGKLEVLVERMLDEHTILAHVRSSKPPKPGTELYLGENDEFHAVMQARHDALFEIRFTAETVVLDILNQIGHMPLPPYIDRPDEEADKERYQTVYNQKPGAVAAPTAGLHFDQALLEQIQAKGVELAYVTLHVGAGTFQPVRVENIHDHHMHAEYVEVPQEVVDAITATKARGGRVVAVGTTSVRSLESAAQDALQKGTELKPFFGDTEIFIFPGYQYQLVDCLITNFHLPESTLIMLVSAFAGYEHTMAAYEHAVKEQYRFFSYGDAMFIRKQMTKA

SEQ ID NO: 73554 - protein, 352 aa, Vibrio cholerae; identical to SEQ ID NO: 73553
  misc_feature (1)..(352): sp|C3LSZ2|QUEA_VIBCM S-adenosylmethionine:tRNA ribosylt ransferase-isomerase OS=Vibrio cholerae serotype O1 (st rain M66-2) OX=579112 GN=queA PE=3 SV=1

SEQ ID NO: 73555 - protein, 350 aa, Vibrio cidicii
  misc_feature (1)..(350): tr|A0A151KYN9|A0A151KYN9_9VIBR S-adenosylmethionine:tRN A ribosyltransferase-isomerase OS=Vibrio cidicii OX=176 3883 GN=queA PE=3 SV=1
MQVSDFHFDLPDELIARYPQPERTASRLLQLNGNTGEVKDGTFKDVLDLVQPGDLVVFNNTRVIPARMFGRKASGGKLEVLVERMLDDKRLLAHVRCSKSPKPGSTVILGENDQYSAEMVARHGALFELKLNGDKTLLEVLEEIGHMPLPPYIDRPDEDADKERYQTVYNQKPGAVAAPTAGLHFDAQLLEQMQAKGVELAYVTLHVGAGTFQPVKVDNIHDHHMHAEYAEVPQEVVDAIAATKARGGRIIAVGTTSVRSLESAAQDALKKGTELAPYFADTEIFIYPGYQYQLVDCLITNFHLPESTLIMLVSAFAGYEHTMRAYQHAVDNQYRFFSYGDAMFIEKKTC

SEQ ID NO: 73556 - protein, 350 aa, Vibrio cincinnatiensis
  misc_feature (1)..(350): tr|A0A1T4N9J9|A0A1T4N9J9_VIBCI S-adenosylmethionine:tRN A ribosyltransferase-isomerase OS=Vibrio cincinnatiensi s DSM 19608 OX=1123491 GN=queA PE=3 SV=1
MQVSDFHFDLPDELIARYPKEQRTASRLLRLDGNSGTLVDGTFTDVLQYVAPGDLLVFNNTRVIPARMFGRKATGGKLEVLVERMLDEHSILAHVRSSKPPKPGAELYLGEQDEYHATMVARHDALFEIQFSAHTPVLEILNHIGHMPLPPYIDRPDEDADKERYQTVYNQKPGAVAAPTAGLHFDEALLEQIKAKGVTFAYVTLHVGAGTFQPVRVENIHDHHMHAEYVEVPQEVVDAIAATKARGGRVIAVGTTSVRSLESAAQDALKKGTELVPFFGDTEIFIFPGYQYQLVDCLITNFHLPESTLIMLVSAFAGYEHTMAAYQHAVAQKYRFFSYGDAMFIEKKLD

SEQ ID NO: 73557 - protein, 350 aa, Vibrio comitans
  misc_feature (1)..(350): tr|A0A4Y3IN72|A0A4Y3IN72_9VIBR S-adenosylmethionine:tRN A ribosyltransferase-isomerase OS=Vibrio comitans NBRC 102076 OX=1219078 GN=queA PE=3 SV=1
MQVSDFHFDLPDELIARYPMPDRTSSRLLQLTGNSGEVQDKSFTDVLDLVNEGDLLVFNNTRVIPARVFGRKASGGKIEVLVERMVDEHTILAHVRSSKSPKPGTELFLGDKDQYAAKMVARHDALFEIRFTSDKAVLQILEEVGHMPLPPYIDRPDEDSDQERYQTVYNEKPGAVAAPTAGLHFDDEILEKIKAKGANLAFVTLHVGAGTFQPVRVDNILEHHMHAEYVEVTQEVVDAINETKAKGGRVIAVGTTSVRSLESAAQDAVRNGTKLKPFFGDTDIFIYPGYEFQLIDCLLTNFHLPESTLIMLVSAFAGYDNVMGAYQHAVEHKYRFFSYGDAMFVTRKGL

SEQ ID NO: 73558 - protein, 350 aa, Vibrio coralliilyticus
  misc_feature (1)..(350): tr|A0A2A2MTD3|A0A2A2MTD3_9VIBR S-adenosylmethionine:tRN A ribosyltransferase-isomerase OS=Vibrio coralliilyticu s OX=190893 GN=queA PE=3 SV=1
MQVSDFHFDLPDELIARYPQPERTASRLLQLDGNSGELSDGTFTDVLEQVQPGDLVVFNNTRVIPARMFGRKESGGKLEVLVERVLDEKSILAHVRCSKSPKPGSTIFIGENDEYSAQMVARHDALFELKFNAEKNVLAVLEEIGHMPLPPYIDRPDEDSDKERYQTVYNEKPGAVAAPTAGLHFDEALLEKIKAKGAEFAYVTLHVGAGTFQPVKVENINDHHMHAEYVEVPQEVVDAINAAKARNGRVIAVGTTSVRSLESAAQDALKKGTALAPFFGDTEIFIYPGYEYQLVDCLITNFHLPESTLIMLVSAFAGYENTMNAYKHAVENKYRFFSYGDSMFIKKKTD

SEQ ID NO: 73559 - protein, 350 aa, Vibrio coralliilyticus
  misc_feature (1)..(350): tr|A0A2A2CQ76|A0A2A2CQ76_9VIBR S-adenosylmethionine:tRN A ribosyltransferase-isomerase OS=Vibrio coralliilyticu s OX=190893 GN=queA PE=3 SV=1
MQVSDFHFDLPDELIARYPQPERTASRLLQLDGNSGELSDGTFTDVLEQVQPGDLVVFNNTRVIPARMFGRKESGGKLEVLVERVLDEKSILAHVRCSKSPKPGSTILIGENDEYSAQMVARHDALFELKFNAEKNVLAVLEEIGHMPLPPYIDRPDEDSDKERYQTVYNEKPGAVAAPTAGLHFDEALLEKIKAKGAEFAYVTLHVGAGTFQPVKVENINDHHMHAEYVEVPQEVVDAINAAKVRNGRVIAVGTTSVRSLESAAQDALKKGTALAPFFGDTEIFIYPGYEYQLVDCLITNFHLPESTLIMLVSAFAGYENTMNAYKHAVENKYRFFSYGDSMFIKKKTD

SEQ ID NO: 73560 - protein, 350 aa, Vibrio crassostreae
  misc_feature (1)..(350): tr|A0A4R2FFV1|A0A4R2FFV1_9VIBR S-adenosylmethionine:tRN A ribosyltransferase-isomerase OS=Vibrio crassostreae O X=246167 GN=queA PE=3 SV=1
MQVSDFHFDLPDELIARYPQEERTASRLLKLDGNNGNLTDGSFKDVLDLVEPGDLVVFNNTRVIPARVFGRKASGGKLEVLVERMLDEKSILAHVRCSKSPKPGTKLFLGENDEYEAEMVARHDALFEIHFTSDQSVLEILNSVGHMPLPPYIDRPDEDADKERYQTVYNEKPGAVAAPTAGLHFDDKLMADMKEKGVEFAYVTLHVGAGTFQPVKVDNINDHHMHAEYVEVPQEVVDAVAAAKARGGRIIAVGTTSVRSLESAAQDALKKGTEFVPFFGDTEIFIFPGYEYQLVDCLITNFHLPESTLIMLVSAFAGYDNVMGAYDHAVKSEYRFFSYGDAMFINKKTS

SEQ ID NO: 73561 - protein, 350 aa, Vibrio crassostreae
  misc_feature (1)..(350): tr|A0A4R3P0T1|A0A4R3P0T1_9VIBR S-adenosylmethionine:tRN A ribosyltransferase-isomerase OS=Vibrio crassostreae O X=246167 GN=queA PE=3 SV=1
MQVSDFHFDLPDELIARYPQEERTASRLLKLDGNNGNLTDGSFKDVLDLVEPGDLVVFNNTRVIPARVFGRKASGGKLEVLVERMLDEKSILAHVRCSKSPKPGTKLFLGENDEYEAEMVARHDALFEIHFTSDQSVLEILNSVGHMPLPPYIDRPDEDADKERYQTVYNEKPGAVAAPTAGLHFDDKLMADMKEKGVEFAYVTLHVGAGTFQPVKVDNINDHHMHAEYVEVPQEVVDAVAATKVRGGRIIAVGTTSVRSLESAAQDALKKGTELVPFFGDTEIFIFPGYEYQLVDCLITNFHLPESTLIMLVSAFAGYDNVMGAYDHAVKSEYRFFSYGDAMFINKKTS

SEQ ID NO: 73562 - protein, 350 aa, Vibrio diabolicus
  misc_feature (1)..(350): tr|A0A2L2K4X0|A0A2L2K4X0_9VIBR S-adenosylmethionine:tRN A ribosyltransferase-isomerase OS=Vibrio diabolicus OX= 50719 GN=queA PE=3 SV=1
MQVSDFHFDLPDELIARYPQPERTASRLLQMDGNTGELIDGTFTDVLGQVQPGDLVVFNNTRVIPARLFGRKESGGKLEVLVERMLDEKSILAHVRCSKSPKPGTTIIVGENDEYSAEMVARHDALFELKFNADKTVLEILEEIGHMPLPPYIDRPDEDADKERYQTVYNQKPGAVAAPTAGLHFDDVLLEQIKAKGAEFAYVTLHVGAGTFQPVKVENINDHHMHAEYVEVPQEVVEAIKATKARGGRIIAVGTTSVRSLESAAQDALKKGTELVPFFGDTEIFIFPGYEYQLVDCLITNFHLPESTLIMLVSAFAGYENTMNAYKHAVENKYRFFSYGDSMFIKKKTI

SEQ ID NO: 73563 - protein, 350 aa, Vibrio diazotrophicus
  misc_feature (1)..(350): tr|A0A2J8GFZ0|A0A2J8GFZ0_VIBDI S-adenosylmethionine:tRN A ribosyltransferase-isomerase OS=Vibrio diazotrophicus OX=685 GN=queA PE=3 SV=1
MQVSDFHFELPDELIARYPKADRTASRLLQLNGNTGALTDSTFKNVLDLVEPGDLLVFNNTRVIPARMFGRKASGGKLEVLVERMLDEHTILAHVRSSKPPKPNTELYLGENDEYHAVMVARHDALFEIRFTDEKAVLEILNDIGHMPLPPYIDRPDEDADKERYQTVYNQKPGAVAAPTAGLHFDETLLEQIKAKGVEFAYVTLHVGAGTFQPVRVDNINDHHMHAEYVEVPQEVVDAIAATKARGGRIIAVGTTSVRSLESAAQDALSKGTELAPFFGDTEIFIFPGYQYQLVDCLITNFHLPESTLIMLVSAFASYEHTMAAYEHAVKEQYRFFSYGDAMFITKRTI

SEQ ID NO: 73564 - protein, 350 aa, Vibrio diazotrophicus
  misc_feature (1)..(350): tr|A0A329E9N4|A0A329E9N4_VIBDI S-adenosylmethionine:tRN A ribosyltransferase-isomerase OS=Vibrio diazotrophicus OX=685 GN=queA PE=3 SV=1
MQVSDFHFELPDELIARYPKADRTASRLLQLNGNTGALTDSTFKNVLDLVEPGDLLVFNNTRVIPARMFGRKASGGKLEVLVERMLDEHTILAHVRSSKPPKPNTELYLGENDEYHAVMVARHDALFEIRFTDEKAVLEILNDIGHMPLPPYIDRPDEDADKERYQTVYNQKPGAVAAPTAGLHFDETLLEQIKAKGIEFAYVTLHVGAGTFQPVRVDNINDHHMHAEYVEVPQEVVDAIAATKARGGRIIAVGTTSVRSLESAAQDALSKGTELVPFFGDTEIFIFPGYQYQLVDCLITNFHLPESTLIMLVSAFASYEHTMAAYEHAVKEQYRFFSYGDAMFITKRTI

SEQ ID NO: 73565 - protein, 350 aa, Vibrio europaeus
  misc_feature (1)..(350): tr|A0A178JCQ4|A0A178JCQ4_9VIBR S-adenosylmethionine:tRN A ribosyltransferase-isomerase OS=Vibrio europaeus OX=3 00876 GN=queA PE=3 SV=1
MQVSDFHFDLPDELIARYPQPERTASRLLQLDGNSGELNDGTFTDVLEQVQAGDLVVFNNTRVIPARLFGRKESGGKLEVLVERVLDEKSILAHVRCSKSPKPGSTIFIGENDEYSAQMVARHDALFELKFNSEQNVLAVLEEIGHMPLPPYIDRPDEDSDKERYQTVYNEKPGAVAAPTAGLHFDEPLIEKIKAKGAELAYVTLHVGAGTFQPVKVDNINDHHMHAEYVEVPQQVVEAIKAAKARGGRIIAVGTTSVRSLESAAQDAIKKGTELVPFFGDTEIFIYPGYEYQLVDCLITNFHLPESTLIMLVSAFAGYENTMNAYKHAVDNNYRFFSYGDSMFIKKKTD

SEQ ID NO: 73566 - protein, 350 aa, Vibrio ezurae
  misc_feature (1)..(350): tr|U3ALE2|U3ALE2_9VIBR S-adenosylmethionine:tRNA ribosy ltransferase-isomerase OS=Vibrio ezurae NBRC 102218 OX= 1219080 GN=queA PE=3 SV=1
MQVSDFHFDLPDELIARYPTPDRTSSRLLQLTGNSGEVQDKHFTDILDLVNEGDLLVFNNTRVIPARVFGRKASGGKIEVLVERMVDEHTVLAHVRASKSPKPGTELLLGDKDQYSAVMVARHDALFEIRFTSDKAVLQILEEVGHMPLPPYIDRPDEDSDQERYQTVYNAKPGAVAAPTAGLHFDDEILAKIKAKGAKLAFVTLHVGAGTFQPVRVDNILEHHMHAEYVEVTQDVVDAINETKAQGGRVIAVGTTSVRSLESAAQDAVKKGTELKPFFGDTDIFIYPGYQFQLIDCLLTNFHLPESTLIMLVSAFAGYDNVMQAYKHAVEHNYRFFSYGDAMFVTRLGL

SEQ ID NO: 73567 - protein, 350 aa, Vibrio fluvialis
  misc_feature (1)..(350): tr|A0A1L9L6B0|A0A1L9L6B0_VIBFL S-adenosylmethionine:tRN A ribosyltransferase-isomerase OS=Vibrio fluvialis OX=6 76 GN=queA PE=3 SV=1
MQVSDFHFDLPDELIARYPQSERTASRLLQLNGNTGAVKDGSFKDVLELVQAGDLVVFNNTRVIPARMFGRKESGGKLEVLVERMLDEKRFLAHVRSSKSPKPGTLVFLGEEDQYSAEMVARQDALFELHLKADKTILEVLEEIGHMPLPPYIDRPDEDADKERYQTVYNQKPGAVAAPTAGLHFDNQLLEQIKAKGAEFAYVTLHVGAGTFQPVKVDNILEHHMHSEYAEVPQEVVDAIKATKARGGRVIAVGTTSVRSLESAAQESLKNGTELMPFFGDTEIFIFPGYQYQLVDCLITNFHLPESTLIMLVSAFAGYDHTMNAYQHAVANQYRFFSYGDAMFIEKKTQ

SEQ ID NO: 73568 - protein, 352 aa, Vibrio fluvialis
  misc_feature (1)..(352): tr|S7I212|S7I212_VIBFL S-adenosylmethionine:tRNA ribosy ltransferase-isomerase OS=Vibrio fluvialis PG41 OX=1336 752 GN=queA PE=3 SV=1
MQVSDFHFELPDELIARYPMAERTASRLLQLDGNTGELVDGTFKDVLNCVEPGDLLVFNNTRVIPARMFGRKASGGKLEVLVERMLDEHSILAHVRCSKPPKPGTELFLGENDEFHAIMEARHDALFEIRFTAETVVLDILNQIGHMPLPPYIDRPDDDADKERYQTVYNQKPGAVAAPTAGLHFDQALLEQIKAKGVEFAYVTLHVGAGTFQPVRVDNINDHHMHAEYVEVPQEVVDAIAATKARGGRIIAVGTTSVRSLESAAQDALKKGTELVPFFGDTEIFIFPGYEYQLVDCLITNFHLPESTLIMLVSAFAGYEHTMAAYDHAVTQQYRFFSYGDAMFIRKRTVEA

SEQ ID NO: 73569 - protein, 350 aa, Vibrio fortis
  misc_feature (1)..(350): tr|A0A066UVV5|A0A066UVV5_9VIBR S-adenosylmethionine:tRN A ribosyltransferase-isomerase OS=Vibrio fortis OX=2126 67 GN=queA PE=3 SV=1
MQVSDFHFDLPDELIARYPQEERTASRLLKLDGNTGNLNDGSFKDVLDLVEPGDLVVFNNTRVIPARVFGRKASGGKLEVLVERMLDEKSILAHVRCSKSPKPGTQLFLGENDEYEAEMVARHDALFEIRFTSEESVLDILNSVGHMPLPPYIDRPDEDADKERYQTVYNEKPGAVAAPTAGLHFDDKLMADMKAKGVEFAYVTLHVGAGTFQPVKVDNINDHHMHAEYVEVPQEVVDAIAATKARGGRVIAVGTTSVRSLESAAQDALKKGTELVPFFGDTEIFIFPGYEYQLVDCLITNFHLPESTLIMLVSAFAGYDNVMGAYDHAVKSEYRFFSYGDAMFINKKTS

SEQ ID NO: 73570 - protein, 352 aa, Vibrio furnissii
  misc_feature (1)..(352): tr|A0A0Q2Y0Z8|A0A0Q2Y0Z8_VIBFU S-adenosylmethionine:tRN A ribosyltransferase-isomerase OS=Vibrio furnissii OX=2 9494 GN=queA PE=3 SV=1
MQVSDFHFELPDELIARYPMAERTASRLLQLDGNTGELVDGTFKDVLNCVEPGDLLVFNNTRVIPARMFGRKASGGKLEVLVERMLDEHSILAHVRCSKPPKPGTELFLGENDEFHAVMDARHDALFEIRFTAETVVLDILNQIGHMPLPPYIDRPDEDADKERYQTVYNQKPGAVAAPTAGLHFDQALLEQIKAKGVEFAYVTLHVGAGTFQPVRVDNINDHHMHAEYVEVPQEVVDAIAATKARGGRIIAVGTTSVRSLESAAQDALKKGTELVPFFGDTEIFIYPGYEYQLVDCLITNFHLPESTLIMLVSAFAGYAHTMAAYDHAVKQQYRFFSYGDAMFIRKRTVDA

SEQ ID NO: 73571 - protein, 352 aa, Vibrio furnissii
  misc_feature (1)..(352): tr|F0LVX2|F0LVX2_VIBFN S-adenosylmethionine:tRNA ribosy ltransferase-isomerase OS=Vibrio furnissii (strain DSM 14383 / NCTC 11218 / VL 6966) OX=903510 GN=queA PE=3 SV =1
MQVSDFHFELPDELIARYPMAERTASRLLQLDGNTGELVDGTFKDVLNCVEPGDLLVFNNTRVIPARMFGRKASGGKLEVLVERMLDEHSILAHVRCSKPPKPGTELFLGENDEFHAVMDARHDALFEIRFTAETVVLDILNQIGHMPLPPYIDRPDEDADKERYQTVYNQKPGAVAAPTAGLHFDQALLEQIKAKGVEFAYVTLHVGAGTFQPVRVDNINDHHMHAEYVEVPQEVVDAIAATKARGGRIIAVGTTSVRSLESAAQDALKKGTELVPFFGDTEIFIYPGYEYQLVDCLITNFHLPESTLIMLVSAFAGYEHTMAAYDHAVKQQYRFFSYGDAMFIRKRTVDA

SEQ ID NO: 73572 - protein, 350 aa, Vibrio galatheae
  misc_feature (1)..(350): tr|A0A0F4NSJ4|A0A0F4NSJ4_9VIBR S-adenosylmethionine:tRN A ribosyltransferase-isomerase OS=Vibrio galatheae OX=5 79748 GN=queA PE=3 SV=1
MQVSDFHFDLPDELIARYPQPQRTASRLLQLDGNSGELTDGTFTDVLEQVQPGDLVVFNNTRVIPARMFGRKESGGKLEVLVERVLDEKSILAHVRCSKSPKPGTTIFIGENDEYSAQMVARHDALFELKFNTEQNVLAVLEEIGHMPLPPYIDRPDEDSDKERYQTVYNKKPGAVAAPTAGLHFDEPLLEKIKAKGAEFAYVTLHVGAGTFQPVKVDNINDHHMHAEYVEVPQEVVDAINAAKARGGRIIAVGTTSVRSLESAAQDAIKKGTELVPFFGDTEIFIFPGYEYQLVDCLITNFHLPESTLIMLVSAFAGYENTMNAYKHAVENNYRFFSYGDSMFIQKKTA

SEQ ID NO: 73573 - protein, 353 aa, Vibrio gazogenes
  misc_feature (1)..(353): tr|A0A1Z2SGX6|A0A1Z2SGX6_VIBGA S-adenosylmethionine:tRN A ribosyltransferase-isomerase OS=Vibrio gazogenes OX=6 87 GN=queA PE=3 SV=1
MQVSDFHFDLPDELIARYPKAERTSSRLLQLNGETGAVEDGTFTDVLNLVRPGDLLVFNNTRVIPARMFGRKASGGKIEVLVERMLDEHSILAHVRSSKAPRAGSALLLGENDDYPATMVARHDALFEIRLETEVTVLDVLNAIGHMPLPPYIDRPDEDADKERYQTVYNEKPGAVAAPTAGLHFDTDLLEQIAAKGVEMAYVTLHVGAGTFQPVRVENINDHHMHAEYVEVPPAVVDAINATRQRGGRVIAVGTTSVRSLESAAQQALKNGTALAPFFGDTEIFIYPGYEYQVIDCLITNFHLPESTLIMLVSAFAGYENVMAAYRHAVEQKYRFFSYGDAMFIEKRQHERT

SEQ ID NO: 73574 - protein, 353 aa, Vibrio gazogenes
  misc_feature (1)..(353): tr|A0A1M5G757|A0A1M5G757_VIBGA S-adenosylmethionine:tRN A ribosyltransferase-isomerase OS=Vibrio gazogenes DSM 21264 = NBRC 103151 OX=1123492 GN=queA PE=3 SV=1
MQVSDFHFDLPDELIARYPKAERTSSRLLQLNGETGAVVDGTFTDVLNLVRPGDLLVFNNTRVIPARMFGRKASGGKIEVLVERMLDEHSILAHVRSSKAPRAGSALLLGENDDYPATMVARHDALFEIRLETEVTVLDVLNAIGHMPLPPYIDRPDEDADKERYQTVYNEKPGAVAAPTAGLHFDTDLLEQIAAKGVEMAYVTLHVGAGTFQPVRVENINDHHMHAEYVEVPPAVVDAINATRQRGGRIIAVGTTSVRSLESAAQQALKNGTALAPFFGDTEIFIYPGYEYQVIDCLITNFHLPESTLIMLVSAFAGYENVMAAYRHAVEQKYRFFSYGDAMFIEKRQHERT

SEQ ID NO: 73575 - protein, 350 aa, Vibrio genomosp.
  misc_feature (1)..(350): tr|A0A1E5CZ48|A0A1E5CZ48_9VIBR S-adenosylmethionine:tRN A ribosyltransferase-isomerase OS=Vibrio genomosp. F6 s tr. FF-238 OX=1191298 GN=queA PE=3 SV=1
MQVSDFHFELPDELIARYPQAERTASRLLQLDGNTGALSDGSFKDVLDLVQPGDLVVFNNTRVIPARLFGRKESGGKLEVLVERMIDEKSILAHVRCSKSPKPGTTLFLGENDEYQAEMVARHDALFEIRFTSDQSVLDILNAVGHMPLPPYIDRPDEDADKERYQTVYNKKPGAVAAPTAGLHFDEQLLEQIKDKGVEFAYVTLHVGAGTFQPVKVDNIHDHHMHAEYVEVPQEVVDAIAATKARGGRVIAVGTTSVRSLESAAQDALKKGTELVPFFGDTEIFIFPGYEYQLVDCLITNFHLPESTLIMLVSAFADYDKVMAAYEHAVKNEYRFFSYGDAMFINKKTK

SEQ ID NO: 73576 - protein, 350 aa, Vibrio genomosp.
  misc_feature (1)..(350): tr|A0A4U1YJ84|A0A4U1YJ84_9VIBR S-adenosylmethionine:tRN A ribosyltransferase-isomerase OS=Vibrio genomosp. F6 O X=723172 GN=queA PE=3 SV=1
MQVSDFHFELPDELIARYPQAERTASRLLQLDGNTGTLSDGSFKDVLDLVQPGDLVVFNNTRVIPARLFGRKESGGKLEVLVERMIDEKSILAHVRCSKSPKPGTTLFLGEHDEYQAEMVARHDALFEIRFTSDQSVLEILNAVGHMPLPPYIDRPDEDADKERYQTVYNKKPGAVAAPTAGLHFDEQLLEQIKDKGVEFAYVTLHVGAGTFQPVKVDNIHDHHMHAEYVEVPQEVVDAIAATKARGGRVIAVGTTSVRSLESAAQDALKKGTELVPFFGDTEIFIFPGYEYQLVDCLITNFHLPESTLIMLVSAFADYDKVMAAYDHAVKNEYRFFSYGDAMFINKKTK

SEQ ID NO: 73577 - protein, 350 aa, Vibrio halioticoli
  misc_feature (1)..(350): tr|V5FEN5|V5FEN5_9VIBR S-adenosylmethionine:tRNA ribosy ltransferase-isomerase OS=Vibrio halioticoli NBRC 10221 7 OX=1219072 GN=queA PE=3 SV=1
MQVSDFHFDLPDELIARYPTPDRTSSRLLQLTGNSGEVQDKHFTDILDLVNEGDLLVFNNTRVIPARVFGRKASGGKIEVLVERMVDEHTVLAHVRASKSPKPGTELLLGDKDQYSAVMVARHDALFEIRFTSDKAVLQILEEVGHMPLPPYIDRPDEDSDQERYQTVYNAKPGAVAAPTAGLHFDDEILAKIKAKGAKLAFVTLHVGAGTFQPVRVDNILEHHMHAEYVEVTQEVVDAINETKAQGGRVIAVGTTSVRSLESAAQDAVKKGSELKPFFGDTDIFIYPGYQFQLIDCLLTNFHLPESTLIMLVSAFAGYDNVMQAYQHAVEHSYRFFSYGDAMFVTRLGL

SEQ ID NO: 73578 - protein, 382 aa, Vibrio hangzhouensis
  misc_feature (1)..(382): tr|A0A1H6AIG7|A0A1H6AIG7_9VIBR S-adenosylmethionine:tRN A ribosyltransferase-isomerase OS=Vibrio hangzhouensis OX=462991 GN=queA PE=3 SV=1
MTVQLAIPLGHFILCGCEFFRRFYLSLQKIGVMQVSDFHFDLPDELIARYPKAERSSSRLLQLTGNTGEVVDGNFTDIVAQVQPGDLLVFNNTRVIPARMFGRKASGGKLEVLVERMLDDKRVLAHVRSSKSPKPGTELLLGENDEYQATMVARHDALFEIEMKSEKTVLDILNDIGHMPLPPYIDRPDEDADKERYQTVYNEKPGAVAAPTAGLHFDDAVLEQIKAKGANFAYVTLHVGAGTFQPVRVENIHDHHMHAEYVEVPQEVVDAINETKSNGGRVIAVGTTSVRSLESAAQDALKKGTELVPFFGDTEIFIFPGYEYQLVDCLVTNFHLPESTLIMLVSAFAGYDNVMNAYKHAVEQQYRFFSYGDAMFITKKTS

SEQ ID NO: 73579 - protein, 350 aa, Vibrio harveyi
  misc_feature (1)..(350): tr|A0A454D2Q2|A0A454D2Q2_VIBHA S-adenosylmethionine:tRN A ribosyltransferase-isomerase OS=Vibrio harveyi OX=669 GN=queA PE=3 SV=1
MQVSDFHFDLPDELIARYPQPERTASRLLQMDGNTGELIDGTFTDVLEQVQAGDLVVFNNTRVIPARLFGRKESGGKLEVLVERMLDEKSILAHVRCSKSPKPGTTIFVGENDEYSAQMVARHDALFELKFNSDNTVLEILEEIGHMPLPPYIDRPDEDADKERYQTVYNQKPGAVAAPTAGLHFDDVLLEKIKAKGAEFAYVTLHVGAGTFQPVKVDDINDHHMHAEYVEVPQDVVDAINATKARGGRIIAVGTTSVRSLESAAQDALKKGTELVPFFGDTEIFIYPGYEYQLVDCLITNFHLPESTLIMLVSAFAGYENTMNAYKHAVENKYRFFSYGDSMFIKKKTA

SEQ ID NO: 73580 - protein, 350 aa, Vibrio harveyi
  misc_feature (1)..(350): tr|D0XDK0|D0XDK0_VIBH1 S-adenosylmethionine:tRNA ribosy ltransferase-isomerase OS=Vibrio harveyi (strain 1DA3) OX=673519 GN=queA PE=3 SV=1
MQVSDFHFDLPDELIARYPQPERTASRLLQMDGNTGELIDGTFTDVLEQVQAGDLVVFNNTRVIPARLFGRKESGGKLEVLVERMLDEKSILAHVRCSKSPKPGTTILVGENDEYSAQMVARHDALFELKFNADKTVLEILEEIGHMPLPPYIDRPDEDADKERYQTVYNQKPGAVAAPTAGLHFDDVLLEKIKAKGAEFAYVTLHVGAGTFQPVKVDDINDHHMHAEYVEVPQDVVDAINATKARGGRIVAVGTTSVRSLESAAQDALKKGTELVPFFGDTEIFIYPGYEYQLVDCLITNFHLPESTLIMLVSAFAGYENTMNAYKHAVENKYRFFSYGDSMFIKKKTA

SEQ ID NO: 73581 - protein, 350 aa, Vibrio hepatarius
  misc_feature (1)..(350): tr|A0A0M0HYQ9|A0A0M0HYQ9_9VIBR S-adenosylmethionine:tRN A ribosyltransferase-isomerase OS=Vibrio hepatarius OX= 171383 GN=queA PE=3 SV=1
MQVSDFHFDLPDELIARYPQPERTASRLLQLDGNTGELVDGTFTDVLSQVQPGDLVVFNNTRVIPARMFGRKESGGKLEVLVERMLDDKSILAHVRCSKSPKPGSTIIVGDNDEYSAEMVARHDALFELKFNADKTVLEILEEIGHMPLPPYIDRPDEDADKERYQTVYNQKPGAVAAPTAGLHFDDVLLEQIKAKGAEFAYVTLHVGAGTFQPVKVDNINDHHMHAEYVEVPQEVVDAISATKQRGGRIIAVGTTSVRSLESAAQDALKKGTELKPFFGDTEIFIFPGYEYQLVDCLITNFHLPESTLIMLVSAFAGYENTMNAYKHAVENKYRFFSYGDSMFIKKKTA

SEQ ID NO: 73582 - protein, 350 aa, Vibrio ichthyoenteri
  misc_feature (1)..(350): tr|F9RW71|F9RW71_9VIBR S-adenosylmethionine:tRNA ribosy ltransferase-isomerase OS=Vibrio ichthyoenteri ATCC 700 023 OX=870968 GN=queA PE=3 SV=1
MQVSDFHFDLPDELIARYPQPERTSSRLLQMNGNSGELVDGIFTDVLGHIEAGDLVVFNNTRVIPARMFGRKASGGKLEVLVERMLDTKSILAHVRCSKSPKPGTVILLGENDEFSAEMVARHDALFELKFNSDQTVLEILEQIGHMPLPPYIDRPDEDADKERYQTVYNQKPGAVAAPTAGLHFDEVLLEKIKAKGAELAYVTLHVGAGTFQPVKVDNIHDHHMHAEYVEVTQEVVDAINATKARGGRVIAVGTTSVRSLESAAQDALKNGTDLVPFFGDTEIFIFPGYEYQLVDCLITNFHLPESTLIMLVSAFAGYENTMNAYQHAVDNHYRFFSYGDSMFIEKKTV

SEQ ID NO: 73583 - protein, 350 aa, Vibrio inusitatus
  misc_feature (1)..(350): tr|A0A4Y3HV51|A0A4Y3HV51_9VIBR S-adenosylmethionine:tRN A ribosyltransferase-isomerase OS=Vibrio inusitatus NBR C 102082 OX=1219070 GN=queA PE=3 SV=1
MQVSDFHFDLPDELIARYPMPDRTSSRLLQLTGNSGEIQDKSFTDVLDLVNEGDLLVFNNTRVIPARVFGRKASGGKIEVLVERMVDEHTILAHVRSSKSPKPGTELFLGDKDQYAAKMVARHDALFEIRFTSDKAVLQILEEVGHMPLPPYIDRPDEDSDQERYQTVYNEKPGAVAAPTAGLHFDDEILEKIKAKGANLAFVTLHVGAGTFQPVRVDNILEHHMHAEYVEVTQEVVDAINETKAKGGRVIAVGTTSVRSLESAAQDAVRNGTGLKPFFGDTDIFIYPGYEFQLIDCLLTNFHLPESTLIMLVSAFAGYDNVMGAYQHAVEHKYRFFSYGDAMFVTRKGL

SEQ ID NO: 73584 - protein, 231 aa, Vibrio ishigakensis
  misc_feature (1)..(231): tr|A0A0B8NHR0|A0A0B8NHR0_9VIBR S-adenosylmethionine:tRN A ribosyltransferase-isomerase OS=Vibrio ishigakensis O X=1481914 GN=JCM19231_257 PE=3 SV=1
MQVSDFNFELPDELIARYPMEERTASRLLKLDGNSGQIQDKGFTDILDSIQEGDLLVFNNTRVIPARVFGRKASGGKIEVLVERMLDEHSILAHVRSSKAPKPGAQLFLGENDQYEAEMVARHDALFELKFTSDKAVLQILEEVGHMPLPPYIDRPDEDSDQERYQTVYNEKPGAVAAPTAGLHFDEAILEKIQAKALSLPLLPCTWVPAPSNQCALITSSSTTCMLSMLR

SEQ ID NO: 73585 - protein, 361 aa, Vibrio ishigakensis
  misc_feature (1)..(361): tr|A0A0B8QQ67|A0A0B8QQ67_9VIBR S-adenosylmethionine:tRN A ribosyltransferase-isomerase OS=Vibrio ishigakensis O X=1481914 GN=queA PE=3 SV=1
MQVSDFNFELPDELIARYPMEERTASRLLKLDGNSGQIQDKGFTDILDSIQEGDLLVFNNTRVIPARVFGRKASGGKIEVLVERMLDEHSILAHVRSSKAPKPGAQLFLGENDQYEAEMVARHDALFELKFTSDKAVLQILEEVGHMPLPPYIDRPDEDSDQERYQTVYNEKPGAVAAPTAGLHFDETILEKIQAKGAKLAFVTLHVGAGTFQPVRVDNILEHHMHAEYVEVTEEVVNTILETKKNGGRVIAVGTTSVRSLESAAQDAVKKGTELKPFFGDTDIFIYPGYEFQLIDGLLTNFHLPESTLIMLVSAFAGYDNVMNAYKHAVEQKYRFFSYGDAMFVTRKSISAILECKVWSD

SEQ ID NO: 73586 - protein, 350 aa, Vibrio jasicida
  misc_feature (1)..(350): tr|A0A2S7VND9|A0A2S7VND9_9VIBR S-adenosylmethionine:tRN A ribosyltransferase-isomerase OS=Vibrio jasicida OX=76 6224 GN=queA PE=3 SV=1
MQVSDFHFDLPDELIARYPQPERTASRLLQMDGNTGELIDGTFTDVLEQVQAGDLVVFNNTRVIPARLFGRKESGGKLEVLVERMLDEKSILAHVRCSKSPKPGSTIIVGENDEYSAQMVARHDALFELKFESDKTVLEILEEIGHMPLPPYIDRPDEDADKERYQTVYNQKPGAVAAPTAGLHFDDVLLEKIKAKGAEFAYVTLHVGAGTFQPVKVDDINDHHMHAEYVEVPQDVVDAINAAKARGGRIVAVGTTSVRSLESAAQDALKKGTELVPFFGDTEIFIYPGYEYQLVDCLITNFHLPESTLIMLVSAFAGYENTMNAYKHAVDNQYRFFSYGDSMFIKKKTA

SEQ ID NO: 73587 - protein, 350 aa, Vibrio kanaloae
  misc_feature (1)..(350): tr|A0A1E5DNN8|A0A1E5DNN8_9VIBR S-adenosylmethionine:tRN A ribosyltransferase-isomerase OS=Vibrio kanaloae 5S-14 9 OX=1191299 GN=queA PE=3 SV=1
MQVSDFHFDLPDELIARYPQEERTASRLLKLDGNSGNLADGSFKDVLDLVEPGDLVVFNNTRVIPARVFGRKASGGKLEVLVERMLDEKSILAHVRCSKSPKPGTKLFLGENDEYEAEMVARHDALFEIHFTSDQSVLEILNNVGHMPLPPYIDRPDEDADKERYQTVYNEKPGAVAAPTAGLHFDDKLMAGMKEKGVEFAYVTLHVGAGTFQPVKVDNINDHHMHAEYVEVPQEVVDAVAAAKARGGRIIAVGTTSVRSLESAAQDARNKGTELVPFFGDTEIFIFPGYEYQLVDCLITNFHLPESTLIMLVSAFAGYDNVMGAYDHAVKSEYRFFSYGDAMFINKKTS

SEQ ID NO: 73588 - protein, 350 aa, Vibrio kanaloae
  misc_feature (1)..(350): tr|A0A4U2CRM1|A0A4U2CRM1_9VIBR S-adenosylmethionine:tRN A ribosyltransferase-isomerase OS=Vibrio kanaloae OX=17 0673 GN=queA PE=3 SV=1
MQVSDFHFDLPDELIARYPQEERTASRLLKLDGNNGNLTDGSFKDVLDLVEPGDLVVFNNTRVIPARVFGRKASGGKLEVLVERMLDEKSILAHVRCSKSPKPGTKLFLGENDEYEAEMVARHDALFEIHFTSDQSVLEILNSVGHMPLPPYIDRPDEDADKERYQTVYNEKPGAVAAPTAGLHFDDKLMADMKEKGVEFAYVTLHVGAGTFQPVKVDNINDHHMHAEYVEVPQEVVDAVAAAKARGGRIIAVGTTSVRSLESAAQDARNKGTELVPFFGDTEIFIFPGYEYQLVDCLITNFHLPESTLIMLVSAFAGYDHVMGAYDHAVKSEYRFFSYGDAMFINKKTS

SEQ ID NO: 73589 - protein, 350 aa, Vibrio lentus
  misc_feature (1)..(350): tr|A0A0L1L7B3|A0A0L1L7B3_9VIBR S-adenosylmethionine:tRN A ribosyltransferase-isomerase OS=Vibrio lentus OX=1364 68 GN=queA PE=3 SV=1
MQVSDFHFDLPDELIARYPQEERTASRLLKLDGNNGNLTDGSFKDVLDLVEPGDLVVFNNTRVIPARVFGRKASGGKLEVLVERMLDEKSILAHVRCSKSPKPGTKLFLGENDEYEAEMVARHDALFEIHFTSDQSVLEILNSVGHMPLPPYIDRPDEDADKERYQTVYNEKPGAVAAPTAGLHFDDKLMADMKAKGVEFAYVTLHVGAGTFQPVKVDNINDHHMHAEYVEVPQEVVDAVAAAKARGGRIIAVGTTSVRSLESAAQDALKKGTELVPFFGDTEIFIFPGYEYQLVDCLITNFHLPESTLIMLVSAFAGYDNVMGAYDHAVKSEYRFFSYGDAMFINKKTS

SEQ ID NO: 73590 - protein, 350 aa, Vibrio lentus
  misc_feature (1)..(350): tr|A0A2J6UGW6|A0A2J6UGW6_9VIBR S-adenosylmethionine:tRN A ribosyltransferase-isomerase OS=Vibrio lentus OX=1364 68 GN=queA PE=3 SV=1
MQVSDFHFDLPDELIARYPQEERTASRLLKLDGNNGNLADGSFKDVLDLVEPGDLVVFNNTRVIPARVFGRKASGGKLEVLVERMLDEKSILAHVRCSKSPKPGTKLFLGENDEYEAEMVARHDALFEIHFTSDQSVLDILNNVGHMPLPPYIDRPDEDADKERYQTVYNEKPGAVAAPTAGLHFDDKLMAGMKEKGVEFAYVTLHVGAGTFQPVKVDNINDHHMHAEYVEVPQEVVDAVAAAKARGGRIIAVGTTSVRSLESAAQDALKKGTELVPFFGDTEIFIFPGYEYQLVDCLITNFHLPESTLIMLVSAFAGYDNVMGAYDHAVKSEYRFFSYGDAMFINKKTA

SEQ ID NO: 73591 - protein, 350 aa, Vibrio mangrovi
  misc_feature (1)..(350): tr|A0A1Y6IQX8|A0A1Y6IQX8_9VIBR S-adenosylmethionine:tRN A ribosyltransferase-isomerase OS=Vibrio mangrovi OX=47 4394 GN=queA PE=3 SV=1
MQVSDFHFDLPDELIARYPKAERTSSRLLQLNGNSGDVTDGTFKDVLDLVRPGDLLVFNNTRVIPARMFGRKASGGKIEVLVERVLDEHSILAHVRSSKAPRPGAALFLGENDDYPATMVARHDALFEIHLESEAAVLDVLNEIGHMPLPPYIDRPDEDADKERYQTVYNQKPGAVAAPTAGLHFDTDLLEQIAAKGVEMAYVTLHVGAGTFQPVRVENINDHHMHAEYVEVPSSVVEAIAATRERGGRVIAVGTTSVRSLESAAQQALKNGGALAPFFGDTDIFIYPGYEYQVVDCLITNFHLPESTLIMLVSAFAGYENVMAAYRHAVAQEYRFFSYGDAMFIEKRVN

SEQ ID NO: 73592 - protein, 350 aa, Vibrio maritimus
  misc_feature (1)..(350): tr|A0A090S464|A0A090S464_9VIBR S-adenosylmethionine:tRN A ribosyltransferase-isomerase OS=Vibrio maritimus OX=9 90268 GN=queA PE=3 SV=1
MQVSDFHFELPDELIARYPKAERSSSRLLQLTGNTGEVVDGNFTDIVSQVQPGDLLVFNNTRVIPARMFGRKASGGKLEVLVERMLDDKRVLAHVRCSKSPKPGTELFLGENDEYQAIMTARHDALFEIEMQSEKTVLEILNDVGHMPLPPYIDRPDEDADKERYQTVYNEKPGAVAAPTAGLHFDDGVLEQIKAKGANFAYVTLHVGAGTFQPVRVENIHDHHMHAEYVEVPQDVVDAIAETKANGGRIIAVGTTSVRSLESAAQDALKNGTELVPFFGDTEIFIFPGYEYQLVDCLVTNFHLPESTLIMLVSAFAGYDNVMNAYKHAVEQKYRFFSYGDAMFITKKTA

SEQ ID NO: 73593 - protein, 394 aa, Vibrio maritimus
  misc_feature (1)..(394): tr|A0A090T7V7|A0A090T7V7_9VIBR S-adenosylmethionine:tRN A ribosyltransferase-isomerase OS=Vibrio maritimus OX=9 90268 GN=queA PE=3 SV=1
MTLGKSRDNQSQTSVQLAIPTGHFILCGCEFFRRFSRLIKKIGVMQVSDFHFELPDELIARYPKAERSSSRLLQLTGNTGEVVDGNFTDIVSQVQPGDLLVFNNTRVIPARMFGRKASGGKLEVLVERMLDDKRVLAHVRCSKSPKPGTELFLGENDEYQAIMTARHDALFEIEMQSDKTVLEILNDVGHMPLPPYIDRPDEDADKERYQTVYNEKPGAVAAPTAGLHFDDSVLEQIKAKGANFAYVTLHVGAGTFQPVRVENIHDHHMHAEYVEVPQDVVDAIAETKANGGRIIAVGTTSVRSLESAAQDALKNGTELVPFFGDTEIFIFPGYEYQLVDCLVTNFHLPESTLIMLVSAFAGYDNVMNAYQHAVEQRYRFFSYGDAMFITKKTA

SEQ ID NO: 73594 - protein, 350 aa, Vibrio mediterranei
  misc_feature (1)..(350): tr|A0A2C9P882|A0A2C9P882_9VIBR S-adenosylmethionine:tRN A ribosyltransferase-isomerase OS=Vibrio mediterranei O X=689 GN=queA PE=3 SV=1
MQVSDFHFDLPDELIARYPKAERSSSRLLQLTGNTGEVVDGSFTDIVDQVQPGDLLVFNNTRVIPARMFGRKASGGKIEVLVERMLDDKRVLAHVRSSKAPKPGTELFLGENDEYQALMVARHDALFEIEMQSEKTVLDILNDIGHMPLPPYIDRPDEDADKERYQTVYNEKPGAVAAPTAGLHFDDAVLEKIKAKGVNFAYVTLHVGAGTFQPVRVENINDHHMHAEYVEVPQEVVDAINETKANGGRIIAVGTTSVRSLESAAQDALKNGTELVPFFGDTEIFIFPGYEYQLVDCLVTNFHLPESTLIMLVSAFAGYDNVMSAYHHAVEQKYRFFSYGDAMFITKKTA

SEQ ID NO: 73595 - protein, 352 aa, Vibrio metoecus
  misc_feature (1)..(352): tr|A0A0Q0PW91|A0A0Q0PW91_9VIBR S-adenosylmethionine:tRN A ribosyltransferase-isomerase OS=Vibrio metoecus OX=14 81663 GN=queA PE=3 SV=1
MQVSDFHFELPDELIARYPKAERTASRLLQLDGNSGQLTDGTFKDVLGLVEPGDLLVFNNTRVIPARMFGRKASGGKLEVLVERMLDEHTILAHVRSSKPPKPGTELYLGENDEFHAVMQARHDALFEIRFTAETVVLDILNQIGHMPLPPYIDRPDEDADKERYQTVYNQKPGAVAAPTAGLHFDQALLEQIQAKGVELAYVTLHVGAGTFQPVRVDNIHDHHMHAEYVEVPQEVVDAVAATKARGGRVIAVGTTSVRSLESAAQDALKKGTELKPFFGDTEIFIFPGYQYQLVDCLLTNFHLPESTLIMLVSAFAGYEHTMAAYEHAVKEQYRFFSYGDAMFIRKQTTKA

SEQ ID NO: 73596 - protein, 352 aa, Vibrio metoecus
  misc_feature (1)..(352): tr|A0A271VT16|A0A271VT16_9VIBR S-adenosylmethionine:tRN A ribosyltransferase-isomerase OS=Vibrio metoecus OX=14 81663 GN=queA PE=3 SV=1
MQVSDFHFELPDELIARYPKAERTASRLLQLDGNSGQLTDGTFKDVLGLVEPGDLLVFNNTRVIPARMFGRKASGGKLEVLVERMLDEHTILAHVRSSKPPKPGTELYLGENDEFHAVMQARHDALFEIRFTAETVVLDILNEIGHMPLPPYIDRPDEDADKERYQTVYNQKPGAVAAPTAGLHFDQALLEQIQAKGVELAYVTLHVGAGTFQPVRVDNIHDHHMHAEYVEVPQEVVDAVAATKARGGRVIAVGTTSVRSLESAAQDALKKGTELKPFFGDTEIFIFPGYQYQLVDCLITNFHLPESTLIMLVSAFAGYEHTMAAYEHAVKEQYRFFSYGDAMFIRKQTTKA

SEQ ID NO: 73597 - protein, 350 aa, Vibrio metschnikovii
  misc_feature (1)..(350): tr|C9P6D7|C9P6D7_VIBME S-adenosylmethionine:tRNA ribosy ltransferase-isomerase OS=Vibrio metschnikovii CIP 69.1 4 OX=675813 GN=queA PE=3 SV=1
MQVSDFHFDLPDELIARYPKAQRTDSRLLRLNGTTGERVDGTFTDVLHYIEPGDLLVFNNTRVIPARLFGRKASGGKLEVLVERMLDEHSILAHVRCSKPPKPGTELYLGEQDQYLATMVARHDALFEIRFNAQQTVLEILNHIGHMPLPPYIDRPDEETDKERYQTVYNQKPGAVAAPTAGLHFDQALLDQIQAKGVEFAYVTLHVGAGTFQPVRVENIHDHHMHAEYVEVPEEVVAAIAATKARGGRVIAVGTTSVRSLESAAQDALAKGTALAPFFGDTDIFIFPGYQYQLIDALITNFHLPESTLIMLVSAFAGYEHTMAAYQHAVEQKYRFFSYGDAMFIEKNQA

SEQ ID NO: 73598 - protein, 350 aa, Vibrio metschnikovii; identical to SEQ ID NO: 73597
  misc_feature (1)..(350): tr|A0A380NTS6|A0A380NTS6_VIBME S-adenosylmethionine:tRN A ribosyltransferase-isomerase OS=Vibrio metschnikovii OX=28172 GN=queA PE=3 SV=1

SEQ ID NO: 73599 - protein, 352 aa, Vibrio mimicus
  misc_feature (1)..(352): tr|A0A2J9V1F4|A0A2J9V1F4_VIBMI S-adenosylmethionine:tRN A ribosyltransferase-isomerase OS=Vibrio mimicus OX=674 GN=queA PE=3 SV=1
MQVSDFHFELPDELIARYPKAERTASRLLQLDGNSGQLVDGTFKDVLGLVEPGDLLVFNNTRVIPARMFGRKASGGKLEVLVERMLDEHTILAHVRSSKPPKPGTELYLGENDEFHAVMQARHDALFEIRFTAETVVLDILNQIGHMPLPPYIDRPDEDADKERYQTVYNQKPGAVAAPTAGLHFDQVLLEQIQAKGVELAYVTLHVGAGTFQPVRVENIHDHHMHAEYVEVPQEVVDAVAATKARGGRVIAVGTTSVRSLESAAQDALKKGTELKPFFGDTEIFIFPGYQYQLVDCLITNFHLPESTLIMLVSAFAGYGHTMAAYEHAVQQQYRFFSYGDAMFIRKQTTKA

SEQ ID NO: 73600 - protein, 352 aa, Vibrio mimicus
  misc_feature (1)..(352): tr|A0A5B6XEW4|A0A5B6XEW4_VIBMI S-adenosylmethionine:tRN A ribosyltransferase-isomerase OS=Vibrio mimicus OX=674 GN=queA PE=3 SV=1
MQVSDFHFELPDELIARYPKAERTASRLLQLDGNSGQLVDGTFKDVLGLVEPGDLLVFNNTRVIPARMFGRKASGGKLEVLVERMLDEHTILAHVRSSKPPKPGTELYLGEDDEFHAVMQARHDALFEIRFTAETVVLDILNQIGHMPLPPYIDRPDEVADKERYQTVYNQKPGAVAAPTAGLHFDQALLEQIQAKGVELAYVTLHVGAGTFQPVRVEKIHDHHMHAEYVEVPQEVVDAVAATKARGGRVIAVGTTSVRSLESAAQDALKKGTELKPFFGDTEIFIFPGYQYQLVDCLITNFHLPESTLIMLVSAFAGYEHTMAAYEHAVEEQYRFFSYGDAMFIRKQTIKA

SEQ ID NO: 73601 - protein, 350 aa, Vibrio mytili
  misc_feature (1)..(350): tr|A0A0C3I8P8|A0A0C3I8P8_9VIBR S-adenosylmethionine:tRN A ribosyltransferase-isomerase OS=Vibrio mytili OX=5071 8 GN=queA PE=3 SV=1
MQVSDFHFDLPDELIARYPQPERTASRLLQMDGNTGELVDGVFTDVLDQVQPGDLVVFNNTRVIPARLFGRKESGGKLEVLVERMQDEQSILAHVRCSKSPKPGTTIFVGENDEYSAEMVARHDALFELKFHSDKTVLEILEEIGHMPLPPYIDRPDEETDKERYQTVYNQKPGAVAAPTAGLHFDDVLLDKIKAKGVEFAYVTLHVGAGTFQPVKVENINDHHMHAEYVEVPAEVVEAIKATKARGGRIIAVGTTSVRSLESAAQDAVKKGTELVPFFGDTEIFIYPGYEYQLVDCLITNFHLPESTLIMLVSAFAGYENTMNAYKHAVENRYRFFSYGDSMFIKKKTA

SEQ ID NO: 73602 - protein, 350 aa, Vibrio natriegens
  misc_feature (1)..(350): tr|A0A1B1E9W7|A0A1B1E9W7_VIBNA S-adenosylmethionine:tRN A ribosyltransferase-isomerase OS=Vibrio natriegens OX= 691 GN=queA PE=3 SV=1
MQVSDFHFDLPDELIARYPQPERTASRLLQMDGNTGEIVDGTFTDVLDQVQPGDLVVFNNTRVIPARMFGRKESGGKLEVLVERMLDEKSILAHVRCSKSPKPGTTIIVGENDEYAAEMVARHDALFELKFNSDKTVLEILEEIGHMPLPPYIDRPDEDADKERYQTVYNQKPGAVAAPTAGLHFDDVLLDKIKAKGAEFAYVTLHVGAGTFQPVKVDNINDHHMHAEYVEVPQEVVDAIHATKARGGRIIAVGTTSVRSLESAAQDALKKGTELVPFFGDTEIFIYPGYEYQLVDCLITNFHLPESTLIMLVSAFAGYDNTMNAYKHAVENKYRFFSYGDSMFIKKKTA

SEQ ID NO: 73603 - protein, 350 aa, Vibrio navarrensis
  misc_feature (1)..(350): tr|A0A099LQX3|A0A099LQX3_9VIBR S-adenosylmethionine:tRN A ribosyltransferase-isomerase OS=Vibrio navarrensis OX =29495 GN=queA PE=3 SV=1
MQVSDFHFDLLDELIARYPQPERTASRLLQLNGNTGEVKDGTFKDVLDLVQPGDLVVFNNTRVIPARMFGRKASGGKLEVLVERMLDDKRLLAHVRCSKSPKPGSTVILGENNQYSAEMVARHGALFELKLNGDKTLLEVLEEIGHMPLPPYIDRPDEDADKERYQTVYNQKPGAVAAPTAGLHFDAQLLEQMQAKGVELAYVTLHVGAGTFQPVKVDNIHDHHMHAEYAEVPQEVVDAIAATKARGGRIIAVGTTSVRSLESAAQDALKKGTELAPFFADTEIFIYPGYQYQLVDCLITNFHLPESTLIMLVSAFAGYEHTMRAYQHAVDSQYRFFSYGDAMFIEKKTC

SEQ ID NO: 73604 - protein, 350 aa, Vibrio neocaledonicus; identical to SEQ ID NO: 73532
  misc_feature (1)..(350): tr|A0A4P8FYQ3|A0A4P8FYQ3_9VIBR S-adenosylmethionine:tRN A ribosyltransferase-isomerase OS=Vibrio neocaledonicus OX=1208308 GN=queA PE=3 SV=1

SEQ ID NO: 73605 - protein, 350 aa, Vibrio neptunius
  misc_feature (1)..(350): tr|A0A0F4NYC6|A0A0F4NYC6_9VIBR S-adenosylmethionine:tRN A ribosyltransferase-isomerase OS=Vibrio neptunius OX=1 70651 GN=queA PE=3 SV=1
MQVSDFHFDLPDELIARYPQPERTASCLLQLDGNSGELSDGTFIDVLEQVQPGDLVVFNNTRVIPARMFGRKESGGKLEVLVERVLDEKSILAHVRCSKSPKPGSTIFIGENDEYSAQMVARHDALFELKFNAEKNVLAVLEEIGHMPLPPYIDRPDEDSDKERYQTVYNEKPGAVAAPTAGLHFDEALLEKIKAKGAEFAYVTLHVGAGTFQPVKVENINDHHMHAEYVEVPQDVVDAINAAKARNGRIIAVGTTSVRSLESAAQDALKKGTALAPFFGDTEIFIYPGYEYQLVDCLITNFHLPESTLIMLVSAFAGYENTMNAYKHAVENNYRFFSYGDSMFIKKKTV

SEQ ID NO: 73606 - protein, 350 aa, Vibrio nereis
  misc_feature (1)..(350): tr|A0A0M0HPJ2|A0A0M0HPJ2_VIBNE S-adenosylmethionine:tRN A ribosyltransferase-isomerase OS=Vibrio nereis OX=693 GN=queA PE=3 SV=1
MQVSDFHFDLPDELIARYPQPERTASRLLQLDGNTGELVDGSFTDVLSQVQPGDLVVFNNTRVIPARMFGRKESGGKLEVLVERMLDEKSILAHVRCSKSPKPGSTIIVGENDEYAAEMVARHDALFELKFKSDKTVLEILEEIGHMPLPPYIDRPDEDADKERYQTVYNQKPGAVAAPTAGLHFDDVLLEQIKAKGAEFAYVTLHVGAGTFQPVKVENINDHHMHAEYVEVPQEVVEAINATKARGGRIIAVGTTSVRSLESAAQDALKNGTELKPFFGDTEIFIFPGYEYQLVDCLITNFHLPESTLIMLVSAFAGYDNTMNAYKHAVENHYRFFSYGDSMFIKKKTD

SEQ ID NO: 73607 - protein, 350 aa, Vibrio nigripulchritudo
  misc_feature (1)..(350): tr|U4K952|U4K952_9VIBR S-adenosylmethionine:tRNA ribosy ltransferase-isomerase OS=Vibrio nigripulchritudo OX=28 173 GN=queA PE=3 SV=1
MQVSDFHFELPDELIARYPQPERTASRLLQLDGNSGQVTDGTFKNVLEQVQPGDLLVFNNTRVIPARMFGRKASGGKLEALVERVLDEHSILAHVRCSKPPKPGTELYLGENDEYLAEMVARHDALFEIKFKSEKNVLDILNDIGHMPLPPYIDRPDEDADKERYQTVYNEKPGAVAAPTAGLHFDEELLEQIKAKGVEFAYVTLHVGAGTFQPVRVENINDHHMHAEYVEVPQEVVDAITATKARGGRIVAVGTTSVRSLESAAQESIKKGTELAPFFGDTEIFIYPGYEYQLVDCLITNFHLPESTLIMLVSAFAGYDNVMKAYEHAVKEKYRFFSYGDAMFISKKRG

SEQ ID NO: 73608 - protein, 350 aa, Vibrio nigripulchritudo
  misc_feature (1)..(350): tr|U4E2A3|U4E2A3_9VIBR S-adenosylmethionine:tRNA ribosy ltransferase-isomerase OS=Vibrio nigripulchritudo FTn2 OX=1238441 GN=queA PE=3 SV=1
MQVSDFHFELPDELIARYPQPERTASRLLQLDGNSGQVTDGTFKNVLEQVQPGDLLVFNNTRVIPARMFGRKASGGKLEALVERVLDEHSILAHVRCSKPPKPDTELYLGENDEYLAEMVARHDALFEIKFKSEKNVLDILNDIGHMPLPPYIDRPDEDADKERYQTVYNEKPGAVAAPTAGLHFDEELLEQIKAKGVEFAYVTLHVGAGTFQPVRVENINDHHMHAEYVEVPQEVVDAINATKARGGRIVAVGTTSVRSLESAAQESIKKGTELAPFFGDTEIFIYPGYEYQLVDCLITNFHLPESTLIMLVSAFAGYDNVMKAYEHAVKEKYRFFSYGDAMFISKKRG

SEQ ID NO: 73609 - protein, 350 aa, Vibrio orientalis
  misc_feature (1)..(350): tr|C9QL40|C9QL40_VIBOR S-adenosylmethionine:tRNA ribosy ltransferase-isomerase OS=Vibrio orientalis CIP 102891 = ATCC 33934 OX=675816 GN=queA PE=3 SV=1
MQVSDFHFDLPDELIARYPQPERTASRLLQMDGNTGELVDGTFTDVLEQVQPGDLVVFNNTRVIPARMFGRKESGGKLEVLVERVVDEKSILAHVRCSKSPKPGSTIFVGENDEFSAQMVARHDALFELKFNSEQNVLAVLEEIGHMPLPPYIDRPDEDSDKERYQTVYNEKPGAVAAPTAGLHFDEPLLEKIKAKGAEFAYVTLHVGAGTFQPVKVDDIHEHHMHAEYVEVPQEVVDAINATKARGGRIIAVGTTSVRSLESAAQDALKKGTELVPFFGDTEIFIFPGYEYQLVDCLITNFHLPESTLIMLVSAFAGYDNTMNAYKHAVENKYRFFSYGDSMFIKKKTA

SEQ ID NO: 73610 - protein, 350 aa, Vibrio owensii
  misc_feature (1)..(350): tr|A0A0C1ZC68|A0A0C1ZC68_9VIBR S-adenosylmethionine:tRN A ribosyltransferase-isomerase OS=Vibrio owensii CAIM 1 854 = LMG 25443 OX=1229493 GN=queA PE=3 SV=1
MQVSDFHFDLPDELIARYPQPERTASRLLQMDGNTGELIDGTFTDVLEQVQAGDLVVFNNTRVIPARLFGRKESGGKLEVLVERMLDEKSILAHVRCSKSPKPGTTILVGENDEYSAQMVARHDALFELKFNSDKTVLEILEEIGHMPLPPYIDRPDEDADKERYQTVYNQKPGAVAAPTAGLHFDDVLLEKIKAKGAEFAYVTLHVGAGTFQPVKVDDINDHHMHAEYVEVPQDVVDAINATKTRGGRIIAVGTTSVRSLESAAQDALKKGTELVPFFGDTEIFIYPGYEYQLVDCLITNFHLPESTLIMLVSAFAGYENTMNAYKHAVENKYRFFSYGDSMFIKKKTA

SEQ ID NO: 73611 - protein, 350 aa, Vibrio owensii; identical to SEQ ID NO: 73547
  misc_feature (1)..(350): tr|A0A3G2QCT1|A0A3G2QCT1_9VIBR S-adenosylmethionine:tRN A ribosyltransferase-isomerase OS=Vibrio owensii OX=696 485 GN=queA PE=3 SV=1

SEQ ID NO: 73612 - protein, 350 aa, Vibrio palustris
  misc_feature (1)..(350): tr|A0A1R4B8B6|A0A1R4B8B6_9VIBR S-adenosylmethionine:tRN A ribosyltransferase-isomerase OS=Vibrio palustris OX=1 918946 GN=queA PE=3 SV=1
MHVSDFHFDLPDELIARYPKEERTASRLLQLDGNTGDVVDGTFKDVLDIVQPGDLLVFNNTRVIPARMFGRKASGGKLEVLVERMLDDKSILAHVRCSKPPKPGTQLFLGENDEYQAEMLARHDALFELRFQSELTVLEILNAIGHMPLPPYIDRPDEDADKERYQTVYNKKPGAVAAPTAGLHFDTPLMEQIKEKGVEFAYVTLHVGAGTFQPVRVDDIENHHMHSEYVEVPEETVQAIQAVKARGGRVIAVGTTSVRSLESAAQDALKNGTELVPFFGDTEIFIYPGYEYQLVDCLITNFHLPESTLIMLVSAFTGYDNIMSAYRHAVEQEYRFFSYGDAMFLHKRDI

SEQ ID NO: 73613 - protein, 350 aa, Vibrio panuliri
  misc_feature (1)..(350): tr|A0A1Q9HCR9|A0A1Q9HCR9_9VIBR S-adenosylmethionine:tRN A ribosyltransferase-isomerase OS=Vibrio panuliri OX=13 81081 GN=queA PE=3 SV=1
MQVSDFHFDLPDELIARYPQPERTASRLLQLDGNSGALVDGSFTDVLNHIEAGDLVVFNNTRVIPARMFGRKESGGKLEVLVERMLDEKSILAHVRCSKSPKPGSTILLGENDEFSAEMVARHDALFELKFNAEQTVLEILEQIGHMPLPPYIDRPDEDADKERYQTVYNQKPGAVAAPTAGLHFDEVLLEKIKAKGAELAYVTLHVGAGTFQPVKVDNIHDHHMHAEYVEVTQDVVDAINATKARGGRVIAVGTTSVRSLESAAQDALKKGTELAPFFGDTEIFIFPGYEYQLVDCLITNFHLPESTLIMLVSAFAGYENTMNAYKHAVENHYRFFSYGDSMFIKKKTA

SEQ ID NO: 73614 - protein, 350 aa, Vibrio parahaemolyticus
  misc_feature (1)..(350): sp|Q87S37|QUEA_VIBPA S-adenosylmethionine:tRNA ribosylt ransferase-isomerase OS=Vibrio parahaemolyticus serotyp e O3:K6 (strain RIMD 2210633) OX=223926 GN=queA PE=3 SV =1
MQVSDFHFDLPDELIARYPQPERTASRLLQMDGNTGELIDGTFTDVLNQVQAGDLVVFNNTRVIPARMFGRKESGGKLEVLVERMLDEKSILAHVRCSKSPKPGTTIIVGENDEYSAEMVARHDALFELKFNSDKTVLDILEEIGHMPLPPYIDRPDEDADKERYQTVYNQKPGAVAAPTAGLHFDDVLLDKIKAKGAEFAYVTLHVGAGTFQPVKVDNINDHHMHAEYVEVPQEVVDAINATKARGGRIIAVGTTSVRSLESAAQDALKKGTELVPFFGDTEIFIYPGYEYQLVDCLITNFHLPESTLIMLVSAFAGYENTMNAYKHAVENKYRFFSYGDSMFIKKKTI

SEQ ID NO: 73615 - protein, 350 aa, Vibrio parahaemolyticus
  misc_feature (1)..(350): tr|A0A242V5Q1|A0A242V5Q1_VIBPH S-adenosylmethionine:tRN A ribosyltransferase-isomerase OS=Vibrio parahaemolytic us OX=670 GN=queA PE=3 SV=1
MQVSDFHFDLPDELIARYPQPERTASRLLQMDGNTGELIDGTFTDVLNQVQAGDLVVFNNTRVIPARMFGRKESGGKLEVLVERMLDEKSILAHVRCSKSPKPGTTIIVGENDEYSAEMVARHDALFELKFNSDKTVLEILEEIGHMPLPPYIDRPDEDADKERYQTVYNQKPGAVAAPTAGLHFDDVLLDKIKAKGAEFAYVTLHVGAGTFQPVKVDNINDHHMHAEYVEVPQEVVDAINATKARGGRIIAVGTTSVRSLESAAQDALKKGTELVPFFGDTEIFIYPGYEYQLVDCLITNFHLPESTLIMLVSAFAGYENTMNAYKHAVENKYRFFSYGDSMFIKKKTI

SEQ ID NO: 73616 - protein, 352 aa, Vibrio pectenicida
  misc_feature (1)..(352): tr|A0A427U6P1|A0A427U6P1_9VIBR S-adenosylmethionine:tRN A ribosyltransferase-isomerase OS=Vibrio pectenicida OX =62763 GN=queA PE=3 SV=1
MQVSDFHFDLPDELIARYPQPERTASRLLQLDGNTGLLCDGIFTDVLEQIQAGDLVVFNNTRVIPARLFGRKESGGKLEVLVERILDEQRILAHVRCSKSPKPGSTIMLGESDEYSAKMLARHEALFELQFESDKAVLEILEHIGHMPLPPYIDRPDEDSDKERYQTVYNQKPGAVAAPTAGLHFDDELLDRIQAKGAELAYVTLHVGAGTFQPVKVDNIHDHHMHAEYVEVPQQVVDAINKTKSRGGKIIAVGTTSVRSLESAAQDALKKGTELAPFFGDTEIFIYPGYEYQLVDCLITNFHLPESTLIMLVSAFAGFENTMNAYSYAVEKQYRFFSYGDSMFIKKKTIER

SEQ ID NO: 73617 - protein, 350 aa, Vibrio penaeicida
  misc_feature (1)..(350): tr|A0A432D499|A0A432D499_9VIBR S-adenosylmethionine:tRN A ribosyltransferase-isomerase OS=Vibrio penaeicida OX= 104609 GN=queA PE=3 SV=1
MQVSDFHFELPDELIARYPQPERTASRLLQLEGDSGALIDGTFKDVLEQVQPGDLLVFNNTRVIPARMFGRKASGGKLEALVERVLDEHTILAHVRCSKPPKPGTELFLGENDEYLAEMVARHDVLFEIKFKSDKNVLDILNDIGHMPLPPYIDRPDEDTDKERYQTVYNEKPGAVAAPTAGLHFDEALLEQIKGKGVEFAYVTLHVGAGTFQPVRVDNINDHHMHAEYVEVPQDVVDAIAATKKRGGRVIAVGTTSVRSLESAAQEAKKKGVEFEPFFGDTEIFIYPGYEYQLVDCLITNFHLPESTLIMLVSAFAGYDNVMRAYEHAVQEQYRFFSYGDAMFITKKRG

SEQ ID NO: 73618 - protein, 350 aa, Vibrio ponticus
  misc_feature (1)..(350): tr|A0A090P317|A0A090P317_9VIBR S-adenosylmethionine:tRN A ribosyltransferase-isomerase OS=Vibrio ponticus OX=26 5668 GN=queA PE=3 SV=1
MQVSDFHFDLPDELIARYPQPERTASRLLQLDGNSGALVDGTFTDVLKHIEAGDLVVFNNTRVIPARMFGRKESGGKLEVLVERMLDEKSILAHVRCSKSPKPGSTILLGENDEFSAQMVARHDALFELKFNAEQTVLEILEQIGHMPLPPYIDRPDEDADKERYQTVYNQKPGAVAAPTAGLHFDEVLLEKIKAKGAELAYVTLHVGAGTFQPVKVDNIHDHHMHAEYVEVTQDVVDAINATKARGGRVIAVGTTSVRSLESAAQDAVKKGTELVPFFGDTEIFIFPGYEYQLVDCLITNFHLPESTLIMLVSAFAGYENTMNAYKHAVENNYRFFSYGDSMFIKKKTV

SEQ ID NO: 73619 - protein, 350 aa, Vibrio ponticus
  misc_feature (1)..(350): tr|A0A3N3E3H3|A0A3N3E3H3_9VIBR S-adenosylmethionine:tRN A ribosyltransferase-isomerase OS=Vibrio ponticus OX=26 5668 GN=queA PE=3 SV=1
MQVSDFHFDLPDELIARYPQPERTASRLLQLDGNSGALVDGTFTDVLNHIESGDLVVFNNTRVIPARMFGRKESGGKLEVLVERMLDEKSILAHVRCSKSPKPGSTILLGENDEFSAQMVARHDALFELKFNAEQTVLEILEQIGHMPLPPYIDRPDEDADKERYQTVYNQKPGAVAAPTAGLHFDEVLLEKIKAKGAELAYVTLHVGAGTFQPVKVDNIHDHHMHAEYVEVTQDVVDAINATKARGGRVIAVGTTSVRSLESAAQDAVKKGTELVPFFGDTEIFIFPGYEYQLVDCLITNFHLPESTLIMLVSAFAGYENTMNAYKHAVENNYRFFSYGDSMFIKKKTS

SEQ ID NO: 73620 - protein, 350 aa, Vibrio proteolyticus
  misc_feature (1)..(350): tr|U3BDX9|U3BDX9_VIBPR S-adenosylmethionine:tRNA ribosy ltransferase-isomerase OS=Vibrio proteolyticus NBRC 132 87 OX=1219065 GN=queA PE=3 SV=1
MQVSDFHFDLPDELIARYPQPERTASRLLQLDGNSGELTDGTFTDVLYQVQPGDLVVFNNTRVIPARMFGRKESGGKLEVLVERMLDDKRILAHVRCSKSPKPGTTIFVGEQDEYRAQMVARHDALFELEFNSEKTVLEILEQIGHMPLPPYIDRPDEEADKERYQTVYNQKPGAVAAPTAGLHFDEVLLEKMKAKGVEFAYVTLHVGAGTFQPVKVDNVHEHHMHAEYVEVPQDVVDAIQATKARGGRIIAVGTTSVRSLESAAQDALKKGTPLVPFFGDTEIFIFPGYEYQLVDCLITNFHLPESTLIMLVSAFAGYENTMKAYQHAVANQYRFFSYGDSMFIKKKTA

SEQ ID NO: 73621 - protein, 350 aa, Vibrio qinghaiensis
  misc_feature (1)..(350): tr|A0A223MWE6|A0A223MWE6_9VIBR S-adenosylmethionine:tRN A ribosyltransferase-isomerase OS=Vibrio qinghaiensis O X=2025808 GN=queA PE=3 SV=1
MQVSDFHFELPDELIARYPMAERTASRLLQLDGNSGELADGSFKDVLDRVQPGDLLVFNNTRVIPARMFGRKASGGKLEVLVERMLDEQTILAHVRSSKPPKPGSELYLGERDEYHAQMVARHDALFEIRFTASKTVLEILNEIGHMPLPPYIDRPDEDADKERYQTVYNQKPGAVAAPTAGLHFDEALLEQIKAKGVEFAYVTLHVGAGTFQPVRVDNIHDHHMHAEYVEVPQEVVDAVNATKARGGRVIAVGTTSVRSLESAAQDALKKGTELVPFFGDTEIFIFPGYEYQLVDCLITNFHLPESTLIMLVSAFAGYEHTMAAYAHAVKHQYRFFSYGDAMFITKNTN

SEQ ID NO: 73622 - protein, 381 aa, Vibrio quintilis
  misc_feature (1)..(381): tr|A0A1M7YZX7|A0A1M7YZX7_9VIBR S-adenosylmethionine:tRN A ribosyltransferase-isomerase OS=Vibrio quintilis OX=1 117707 GN=queA PE=3 SV=1
MNLLNVLPLRKISVYTTALQMSQSNSMKTGTMQVSDFYFDLPDELIARYPKSERSASRLLQLNGNTGAVADGAFKDVLDLVAPGDLLVFNNTRVIPARMFGRKSSGGKIEVLVERILDEHHILAHVRSSKAPKPGAALFLGEQDEYQATMVSRQEALFEIRFESERPVLDILDDIGHMPLPPYIDRPDEDADKERYQTVYNKKPGAVAAPTAGLHFDDELLEQISAKGVEMAYVTLHVGAGTFQPVRVDNINDHHMHAEYVEVSQEVVDAIQTTKVRGGRVIAVGTTSVRSLESAAQNGLKNGTGLAPFFGDTSIFIYPGYEYQVIDCLITNFHLPESTLIMLVSAFAGYEHVMKAYQHAVKEKYRFFSYGDAMFIEKKNG

SEQ ID NO: 73623 - protein, 351 aa, Vibrio renipiscarius
  misc_feature (1)..(351): tr|A0A0C2KCP1|A0A0C2KCP1_9VIBR S-adenosylmethionine:tRN A ribosyltransferase-isomerase OS=Vibrio renipiscarius OX=1461322 GN=queA PE=3 SV=1
MQVSDFHFDLPDELIARYPQPERTSSRLLQLNGNSGELVDGIFTDVLGHVEAGDLVVFNNTRVIPARMFGRKASGGKLEVLVERMLDTKSILAHVRCSKSPKPGTMILLGENDEFSAEMVARHDALFELKFHSDQTVLEILEQIGHMPLPPYIDRPDEDADKERYQTVYNQKPGAVAAPTAGLHFDEVLLDKIKAKGADLAYVTLHVGAGTFQPVKVDNIHDHHMHAEYVEVTQDVVDAINATKARGGRIIAVGTTSVRSLESAAQDALKNGTDLVPFFGDTEIFIFPGYEYQLVDCLITNFHLPESTLIMLVSAFAGYDNTMNAYQHAVDNNYRFFSYGDSMFIQKKTNG

SEQ ID NO: 73624 - protein, 350 aa, Vibrio rotiferianus
  misc_feature (1)..(350): tr|A0A510I3C9|A0A510I3C9_9VIBR S-adenosylmethionine:tRN A ribosyltransferase-isomerase OS=Vibrio rotiferianus O X=190895 GN=queA PE=3 SV=1
MQVSDFHFDLPDELIARYPQPERTASRLLQMDGNTGELIDGTFTDVLEQVQAGDLVVFNNTRVIPARMFGRKASGGKLEVLVERMLDEKSILAHVRCSKSPKPGTTILVGENDEYSAEMVARHDALFELKFNSDKTVLEILEEIGHMPLPPYIDRPDEDADKERYQTVYNQKPGAVAAPTAGLHFDDVLLEKIKAKGAEFAYVTLHVGAGTFQPVKVDDINDHHMHAEYVEVPQDVVDAINATKARGGRIVAVGTTSVRSLESAAQDALKKGTELVPFFGDTEIFIYPGYEYQLVDCLITNFHLPESTLIMLVSAFAGYENTMNAYKHAVENKYRFFSYGDSMFIKKKTA

SEQ ID NO: 73625 - protein, 350 aa, Vibrio rotiferianus
  misc_feature (1)..(350): tr|A0A2K7SRZ0|A0A2K7SRZ0_9VIBR S-adenosylmethionine:tRN A ribosyltransferase-isomerase OS=Vibrio rotiferianus O X=190895 GN=queA PE=3 SV=1
MQVSDFHFDLPDELIARYPQPERTASQLLQMDGNTGELIDGTFTDVLEQVQAGDLVVFNNTRVIPARMFGRKASGGKLEVLVERMLDEKSILAHVRCSKSPKPGTTILVGENDEYSAEMVARHDALFELKFNSDKTVLEILEEIGHMPLPPYIDRPDEDADKERYQTVYNQKPGAVAAPTAGLHFDDVLLEKIKAKGAEFAYVTLHVGAGTFQPVKVDDINDHHMHAEYVEVPQDVVDAINATKARGGRIVAVGTTSVRSLESAAQDALKKGTELVPFFGDTEIFIYPGYEYQLVDCLITNFHLPESTLIMLVSAFAGYENTMNAYKHAVENKYRFFSYGDSMFIKKKTA

SEQ ID NO: 73626 - protein, 371 aa, Vibrio ruber
  misc_feature (1)..(371): tr|A0A1R4LNG7|A0A1R4LNG7_9VIBR S-adenosylmethionine:tRN A ribosyltransferase-isomerase OS=Vibrio ruber DSM 1637 0 OX=1123498 GN=queA PE=3 SV=1
MLISVYTTALRMTRQKRVMQVSDFHFDLPDELIARYPKAERTSSRLLQLNGETGAVVDGTFTDVLNLVQPGDLLVFNNTRVIPARMFGRKASGGKIEVLVERVLDEHRILAHVRSSKAPREGSALLLGEHDEYSATMVARHDALFEIRLETEVTVLDVLNVIGHMPLPPYIDRPDEDADRERYQTVYNQKPGAVAAPTAGLHFDTDLLEQIAAKGVEMAYVTLHVGAGTFQPVRVENINDHHMHAEYVEVPPAVVDAIAATRQRGGRVIAVGTTSVRSLESAAHQALKNGQTLAPFFGDTDIFIYPGYEYQIVDCLITNFHLPESTLIMLVSAFAGYDNVMAAYRHAVEQKYRFFSYGDAMFIEKRKHESA

SEQ ID NO: 73627 - protein, 350 aa, Vibrio rumoiensis
  misc_feature (1)..(350): tr|A0A1E5E5D5|A0A1E5E5D5_9VIBR S-adenosylmethionine:tRN A ribosyltransferase-isomerase OS=Vibrio rumoiensis 1S- 45 OX=1188252 GN=queA PE=3 SV=1
MQVSDFDFDLPDELIARYPQPQRTASRLLQLNGNTGELKDGQFTDVLDLVQEGDLVVFNNTRVIPARVFGRKASGGKIEVLVERVIDDKSILAHVRASKSPKPGNELFLGENDEFKAVMVARHDALFEIRFDSDKSVLDVLNDVGHMPLPPYIDRPDEDADKERYQTVYNEKPGAVAAPTAGLHFDNELLDKIKAKGVEFAYVTLHVGAGTFQPVRVDDINDHHMHSEYVEVPQEVVDAIAATKARGGRVIAVGTTSVRSLESAAQDAKQKGTELAPFFGDTEIFIYPGYEYQLIDVLITNFHLPESTLIMLVSAFAGYENVMAAYQHAVNKEYRFFSYGDAMFVTKRDS

SEQ ID NO: 73628 - protein, 350 aa, Vibrio sagamiensis; identical to SEQ ID NO: 73530
  misc_feature (1)..(350): tr|A0A511QGW4|A0A511QGW4_9VIBR S-adenosylmethionine:tRN A ribosyltransferase-isomerase OS=Vibrio sagamiensis NB RC 104589 OX=1219064 GN=queA PE=3 SV=1

SEQ ID NO: 73629 - protein, 350 aa, Vibrio scophthalmi
  misc_feature (1)..(350): tr|F9RLI0|F9RLI0_9VIBR S-adenosylmethionine:tRNA ribosy ltransferase-isomerase OS=Vibrio scophthalmi LMG 19158 OX=870967 GN=queA PE=3 SV=1
MQVSDFHFDLPDELIARYPQPERTSSRLLQLNGNSGELVDGIFTDVLGHIEAGDLVVFNNTRVIPARMFGRKASGGKLEVLVERMIDTKSILAHVRCSKSPKPGTVILLGENDEFSAEMVARHDALFELKFNSDQTVLEILEQIGHMPLPPYIDRPDEDADKERYQTVYNQKPGAVAAPTAGLHFDEVLLEKIKAKGADLAYVTLHVGAGTFQPVKVDNIHDHHMHAEYVEVTQEVVDAINATKARGGRVIAVGTTSVRSLESAAQDALKNGTELVPFFGDTEIFIFPGYEYQLVDCLITNFHLPESTLIMLVSAFAGYENTMNAYQHAVDNHYRFFSYGDSMFIEKKTA

SEQ ID NO: 73630 - protein, 350 aa, Vibrio scophthalmi
  misc_feature (1)..(350): tr|A0A1C7F844|A0A1C7F844_9VIBR S-adenosylmethionine:tRN A ribosyltransferase-isomerase OS=Vibrio scophthalmi OX =45658 GN=queA PE=3 SV=1
MQVSDFHFDLPDELIARYPQPERTSSRLLQLNGNSGELVDGIFTDVLGHIEAGDLVVFNNTRVIPARMFGRKASGGKLEVLVERMIDTKSILAHVRCSKSPKPGTVILLGENDEFSAEMVARHDALFELKFNSDQTVLEILEQIGHMPLPPYIDRPDEDADKERYQTVYNQKPGAVAAPTAGLHFDEVLLEKIKAKGADLAYVTLHVGAGTFQPVKVDNIHDHHMHAEYVEVTQDVVDAINATKARGGRVIAVGTTSVRSLESAAQDALKNGTELVPFFGDTEIFIFPGYEYQLVDCLITNFHLPESTLIMLVSAFAGYENTMNAYQHAVDNHYRFFSYGDSMFIEKKTA

SEQ ID NO: 73631 - protein, 350 aa, Vibrio shilonii; identical to SEQ ID NO: 73594
  misc_feature (1)..(350): tr|A6D749|A6D749_9VIBR S-adenosylmethionine:tRNA ribosy ltransferase-isomerase OS=Vibrio shilonii AK1 OX=391591 GN=queA PE=3 SV=1

SEQ ID NO: 73632 - protein, 350 aa, Vibrio sinaloensis
  misc_feature (1)..(350): tr|A0A0A5JMG1|A0A0A5JMG1_9VIBR S-adenosylmethionine:tRN A ribosyltransferase-isomerase OS=Vibrio sinaloensis OX =379097 GN=queA PE=3 SV=1
MQVSDFHFDLPDELIARYPQPERTASRLLQMDGNTGELVDGTFTDVLEQVQPGDLVVFNNTRVIPARMFGRKESGGKLEVLVERVLDEKSILAHVRCSKSPKPGTTIFIGENDEYSAEMVARHDALFELKFNAEQNVLAVLEEIGHMPLPPYIDRPDEDSDKERYQTVYNEKPGAVAAPTAGLHFDEPLLEKIKAKGVEFAYVTLHVGAGTFQPVKVDNINEHHMHAEYVEVPQEVVDAIHATKARGGRIIAVGTTSVRSLESAAQDAIKKGTELAPFFGDTEIFIFPGYEYQLVDCLITNFHLPESTLIMLVSAFAGYENTMNAYKHAVENKYRFFSYGDSMFIKKKTD

SEQ ID NO: 73633 - protein, 350 aa, Vibrio sinaloensis
  misc_feature (1)..(350): tr|E8MCY5|E8MCY5_9VIBR S-adenosylmethionine:tRNA ribosy ltransferase-isomerase OS=Vibrio sinaloensis DSM 21326 OX=945550 GN=queA PE=3 SV=1
MQVSDFHFDLPDELIARYPQPERTASRLLQMDGNTGELVDGTFTDVLDQVQPGDLVVFNNTRVIPARMFGRKESGGKLEVLVERVLDEKSILAHVRCSKSPKPGSTIFIGENDEYSAEMVARHDALFELKFNAEQNVLAVLEEIGHMPLPPYIDRPDEDSDKERYQTVYNEKPGAVAAPTAGLHFDEPLLEKIKAKGAEFAYVTLHVGAGTFQPVKVDNINEHHMHAEYVEVPQEVVDAIQATKARGGRIIAVGTTSVRSLESAAQDAIKKGTELVPFFGDTEIFIFPGYEYQLVDCLITNFHLPESTLIMLVSAFAGYENTMNAYKHAVENKYRFFSYGDSMFIKKKTD

SEQ ID NO: 73634 - protein, 350 aa, Vibrio sp.; identical to SEQ ID NO: 73535
  misc_feature (1)..(350): tr|A0A2T1J7W2|A0A2T1J7W2_9VIBR S-adenosylmethionine:tRN A ribosyltransferase-isomerase OS=Vibrio sp. V02_P2A34T 13 OX=1982231 GN=queA PE=3 SV=1

SEQ ID NO: 73635 - protein, 350 aa, Vibrio sp.; identical to SEQ ID NO: 73594
  misc_feature (1)..(350): tr|A0A084T9F9|A0A084T9F9_9VIBR S-adenosylmethionine:tRN A ribosyltransferase-isomerase OS=Vibrio sp. ER1A OX=15 17681 GN=queA PE=3 SV=1

SEQ ID NO: 73636 - protein, 353 aa, Vibrio spartinae
  misc_feature (1)..(353): tr|A0A1N6LZU0|A0A1N6LZU0_9VIBR S-adenosylmethionine:tRN A ribosyltransferase-isomerase OS=Vibrio spartinae OX=1 918945 GN=queA PE=3 SV=1
MQVSDFHFDLPDELIARYPKAERTSSRLLQLNGETGAVVDGTFTDVLNLVRPGDLLVFNNTRVIPARMFGRKASGGKIEVLVERMLDEHSILAHVRSSKAPRAGSALLLGENDDYPATMVARHDALFEIRLETEVTVLDVLNAIGHMPLPPYIDRPDEDADKDRYQTVYNEKPGAVAAPTAGLHFDTDLLEQIAAKGVEMAYVTLHVGAGTFQPVRVEHIHDHHMHAEYVEVPPAVVDAITATRQRGGRVIAVGTTSVRSLESAAQQALQNGTALAPFFGDTEIFIYPGYEYQVIDCLITNFHLPESTLIMLVSAFAGYDNVMAAYRHAVEQKYRFFSYGDAMFIEKRQHEST

SEQ ID NO: 73637 - protein, 350 aa, Vibrio splendidus
  misc_feature (1)..(350): tr|A0A1B9QGI4|A0A1B9QGI4_VIBSP S-adenosylmethionine:tRN A ribosyltransferase-isomerase OS=Vibrio splendidus OX= 29497 GN=queA PE=3 SV=1
MQVSDFHFDLPDELIARYPQEERTASRLLKLDGNSGNLADGSFKDVLDLVEPGDLVVFNNTRVIPARVFGRKASGGKLEVLVERMLDEKSILAHVRCSKSPKPGTKLFLGENDEYEAEMVARHDALFEIHFTSDQSVLEILNSVGHMPLPPYIDRPDEDADKERYQTVYNEKPGAVAAPTAGLHFDDKLMAGMKEKGVEFAYVTLHVGAGTFQPVKVDNINDHHMHAEYVEVPQEVVDAVAAAKARGGRILAVGTTSVRSLESAAQDALKNGTELVPFFGDTEIFIFPGYEYQLVDCLITNFHLPESTLIMLVSAFAGYDNVMGAYDHAVKSEYRFFSYGDAMFINKKTS

SEQ ID NO: 73638 - protein, 350 aa, Vibrio splendidus
  misc_feature (1)..(350): tr|A0A0P6Y941|A0A0P6Y941_VIBSP S-adenosylmethionine:tRN A ribosyltransferase-isomerase OS=Vibrio splendidus OX= 29497 GN=queA PE=3 SV=1
MQVSDFHFDLPDELIARYPQEERTASRLLKLDGNSGNLADGSFKDVLDLVEPGDLVVFNNTRVIPARVFGRKASGGKLEVLVERMLDEKSILAHVRCSKSPKPGTKLFLGENDEYEAEMVARHDALFEIHFTSDQSVLEILNSVGHMPLPPYIDRPDEDADKERYQTVYNEKPGAVAAPTAGLHFDDKLMAGMKEKGVEFAYVTLHVGAGTFQPVKVDNINDHHMHAEYVEVPQEVVDAVAAAKARGGRIIAVGTTSVRSLESAAQDALKNGTELVPFFGDTEIFIFPGYEYQLVDCLITNFHLPESTLIMLVSAFAGYDNVMGAYDHAVKSEYRFFSYGDAMFINKKTS

SEQ ID NO: 73639 - protein, 350 aa, Vibrio superstes
  misc_feature (1)..(350): tr|A0A511QPI0|A0A511QPI0_9VIBR S-adenosylmethionine:tRN A ribosyltransferase-isomerase OS=Vibrio superstes NBRC 103154 OX=1219062 GN=queA PE=3 SV=1
MQVSDFHFDLPDELIARYPMPDRTSSRLLHLTGNSGELQDKNFTDVLDSINEGDLLVFNNTRVIPARVFGRKASGGKIEVLVERMVDEHTILAHVRSSKSPKPGTQLFLGDKDQYSAEMIARHGALFEIRFSSDKAVLQILEEVGHMPLPPYIDRPDEDSDQERYQTVYNEKPGAVAAPTAGLHFDDVILEKIKAKGAKLAFVTLHVGAGTFQPVKVDNILEHHMHAEYVEVTQEVVDAINETKASGGRVIAVGTTSVRSLESAAQDARNNGTELKPFFGDTDIFIYPGYEFQLIDCLLTNFHLPESTLIMLVSAFAGYDNVMGAYKHAVEQAYRFFSYGDAMFVTRKGL

SEQ ID NO: 73640 - protein, 351 aa, Vibrio tapetis
  misc_feature (1)..(351): tr|A0A2N8ZEZ2|A0A2N8ZEZ2_9VIBR S-adenosylmethionine:tRN A ribosyltransferase-isomerase OS=Vibrio tapetis subsp. tapetis OX=1671868 GN=queA PE=3 SV=1
MSMQVSDFHFELPNELIARYPQPERTASRLLQLEGPTGQITDGHFTDVLDQVQQGDLLVFNNTRVIPARMFGRKASGGKLEVLVERMLDEESILAHVRCSKSPKPGTELFLGENDEYKAVMVARHDALFEIKFVSDKTVLEILNEVGHMPLPPYIDRPDEDADKERYQTVYNQKPGAVAAPTAGLHFDEALLEQIKAKGVEFAYVTLHVGAGTFQPVKVDNINDHHMHAEYVEVPQEVVDAIAATRARGGRIIAVGTTSVRSLESAAQDALKKGTELVPFFGDTEIFIFPGYEYQLVDCLITNFHLPESTLIMLVSAFAGYDSVMAAYQHAVDNQYRFFSYGDAMFITKKV

SEQ ID NO: 73641 - protein, 350 aa, Vibrio tasmaniensis; identical to SEQ ID NO: 73539
  misc_feature (1)..(350): sp|B7VJR7|QUEA_VIBTL S-adenosylmethionine:tRNA ribosylt ransferase-isomerase OS=Vibrio tasmaniensis (strain LGP 32) OX=575788 GN=queA PE=3 SV=1

SEQ ID NO: 73642 - protein, 350 aa, Vibrio tasmaniensis
  misc_feature (1)..(350): tr|A0A2N7NEQ4|A0A2N7NEQ4_9VIBR S-adenosylmethionine:tRN A ribosyltransferase-isomerase OS=Vibrio tasmaniensis O X=212663 GN=queA PE=3 SV=1
MQVSDFHFDLPDELIARYPQEERTASRLLKLDGNNGNLADGSFKDVLDLVEPGDLVIFNNTRVIPARVFGRKASGGKLEVLVERMLDEKSILAHVRCSKSPKPGTKLFLGENDEYEAEMVARHDALFEIHFTSDQSVLEILNSVGHMPLPPYIDRPDEDADKERYQTVYNEKPGAVAAPTAGLHFDDKLMADMKEKGVEFAYVTLHVGAGTFQPVKVDNINDHHMHAEYVEVPQEVVDAVAAAKARGGRIIAVGTTSVRSLESAAQDAVKNGTELVPFFGDTEIFIFPGYEYQLVDCLITNFHLPESTLIMLVSAFAGYDNVMGAYDHAVKSEYRFFSYGDAMFINKKTS

SEQ ID NO: 73643 - protein, 350 aa, Vibrio thalassae
  misc_feature (1)..(350): tr|A0A240EIL5|A0A240EIL5_9VIBR S-adenosylmethionine:tRN A ribosyltransferase-isomerase OS=Vibrio thalassae OX=1 243014 GN=queA PE=3 SV=1
MQVSDFHFDLPDELIARYPKAERSSSRLLQLTGNTGEVVDGNFTDIVNQVQPGDLLVFNNTRVIPARMFGRKASGGKIEVLVERMLDDKRVLAHVRSSKAPKPGTELFLGENDEFQALMVARHDALFEIEMQSDKTVLDILNDIGHMPLPPYIDRPDEDADKERYQTVYNEKPGAVAAPTAGLHFDAAVLEKIKAKGVNFAYVTLHVGAGTFQPVRVENINDHHMHAEYVEVPQDVVDAINETKANGGRIIAVGTTSVRSLESAAQDALKNGTELVPFFGDTEIFIFPGYEYQLVDCLVTNFHLPESTLIMLVSAFAGYDNVMSAYQHAVEQKYRFFSYGDAMFITKKTA

SEQ ID NO: 73644 - protein, 350 aa, Vibrio toranzoniae
  misc_feature (1)..(350): tr|A0A109D8F8|A0A109D8F8_9VIBR S-adenosylmethionine:tRN A ribosyltransferase-isomerase OS=Vibrio toranzoniae OX =1194427 GN=queA PE=3 SV=1
MQVSDFHFDLPDELIARYPQEERTASRLLKLDGNNGNLTDGSFKDVLDLVEPGDLVVFNNTRVIPARVFGRKASGGKLEVLVERMLDEKSILAHVRCSKSPKPGTKLFLGENDEYESEMVARHDALFEIHFTSDQSVLEILNSVGHMPLPPYIDRPDEDADKERYQTVYNEKPGAVAAPTAGLHFDDKLMAGMKEKGVEFAYVTLHVGAGTFQPVKVDNINDHHMHAEYVEVPQEVVDAVAAAKARGGRIIAVGTTSVRSLESAAQDARNKGTELVPFFGDTEIFIFPGYEYQLVDCLITNFHLPESTLIMLVSAFAGYDNVMGAYDHAVKSEYRFFSYGDAMFINKKTS

SEQ ID NO: 73645 - protein, 350 aa, Vibrio tubiashii
  misc_feature (1)..(350): tr|F9TBP1|F9TBP1_9VIBR S-adenosylmethionine:tRNA ribosy ltransferase-isomerase OS=Vibrio tubiashii ATCC 19109 O X=1051646 GN=queA PE=3 SV=1
MQVSDFHFDLPDELIARYPQPERTASRLLQLDGNSGELNDGTFTDVLDQVQAGDLVVFNNTRVIPARLFGRKESGGKLEVLVERVLDEKSILAHVRCSKSPKPGSTIFIGENDEYSAQMVARHDALFELKFNSEQNVLAVLEEIGHMPLPPYIDRPDEDSDKERYQTVYNEKPGAVAAPTAGLHFDEPLIEKIKAKGAELAYVTLHVGAGTFQPVKVDNINDHHMHAEYVEVPQQVVEAIKATKARGGRIIAVGTTSVRSLESAAQDAIKKGTELVPFFGDTEIFIYPGYEYQLVDCLITNFHLPESTLIMLVSAFAGYENTMNAYKHAVENNYRFFSYGDSMFIKKKTV

SEQ ID NO: 73646 - protein, 353 aa, Vibrio tubiashii
  misc_feature (1)..(353): tr|A0A0A5I7U9|A0A0A5I7U9_9VIBR S-adenosylmethionine:tRN A ribosyltransferase-isomerase OS=Vibrio tubiashii OX=2 9498 GN=queA PE=3 SV=1
MQVSDFHFELPDELIARYPQPERTASRLLQLDGNSGELKDGSFTDVLEQVQPGDLVVFNNTRVIPARMFGRKESGGKLEVLVERVLDEKSILAHVRCSKSPKPGSTIFIGENDEYSAEMVARHDALFELKFNSEQNVLAVLEEIGHMPLPPYIDRPDEDSDKERYQTVYNKKPGAVAAPTAGLHFDEPLLEKMKAKGAEFAYVTLHVGAGTFQPVKVDNINDHHMHAEYVEVPQEVVDAINAAKARGGRIIAVGTTSVRSLESAAQDALKKGTELAPFFGDTEIFIYPGYQYQLVDCLITNFHLPESTLIMLVSAFAGYENTMNAYKHAVENKYRFFSYGDSMFIKKKLATSS

SEQ ID NO: 73647 - protein, 220 aa, Vibrio variabilis
  misc_feature (1)..(220): tr|A0A090SAF0|A0A090SAF0_9VIBR S-adenosylmethionine:tRN A ribosyltransferase-isomerase OS=Vibrio variabilis OX= 990271 GN=JCM19239_7787 PE=3 SV=1
MQSEKTVLEILNDVGHMPLPPYIDRPDEDADKERYQTVYNEKPGAVAAPTAGLHFDDSVLEQIKAKGANFAYVTLHVGAGTFQPVRVENIHDHHMHAEYVEVPQDVVDAIAETKANGGRIIAVGTTSVRSLESAAQDALKNGTELVPFFGDTEIFIFPGYEYQLVDCLVTNFHLPESTLIMLVSAFAGYDNVMNAYKHAVEQKYRFFSYGDAMFITKKTA

SEQ ID NO: 73648 - protein, 110 aa, Vibrio variabilis
  misc_feature (1)..(110): tr|A0A090SBC6|A0A090SBC6_9VIBR S-adenosylmethionine:tRN A ribosyltransferase-isomerase OS=Vibrio variabilis OX= 990271 GN=JCM19239_7788 PE=3 SV=1
MTGNTGEVVDGNFTDIVSQVQPGDLLVFNNTRVIPARMFGRKASGGKLEVLVERMLDDKRVLAHVRCSKSPKPGTELFLGENDEYQAIIRHVTMRYLRSKCSLKRRCLRS

SEQ ID NO: 73649 - protein, 350 aa, Vibrio vulnificus; identical to SEQ ID NO: 73567
  misc_feature (1)..(350): sp|Q7MNH2|QUEA_VIBVY S-adenosylmethionine:tRNA ribosylt ransferase-isomerase OS=Vibrio vulnificus (strain YJ016 ) OX=196600 GN=queA PE=3 SV=1

SEQ ID NO: 73650 - protein, 350 aa, Vibrio vulnificus
  misc_feature (1)..(350): sp|Q8DEX9|QUEA_VIBVU S-adenosylmethionine:tRNA ribosylt ransferase-isomerase OS=Vibrio vulnificus (strain CMCP6 ) OX=216895 GN=queA PE=3 SV=1
MQVSDFHFDLPDELIARYPQSERTASRLLQLNGNTGAVKDGSFKDVLELVQAGDLLVFNNTRVIPARMFGRKESGGKLEVLVERMLDEKRFLAHVRSSKSPKPGTLVFLGEEDQYSAEMVARQDALFELHLKADKTILEVLEEIGHMPLPPYIDRPDEDADKERYQTVYNQKPGAVAAPTAGLHFDNQLLEQIKAKGAEFAYVTLHVGAGTFQPVKVDNILEHHMHSEYAEVPQEVVDAINATKARGGRVIAVGTTSVRSLESAAQESLKNGTELMPFFGDTEIFIFPGYQYQLVDCLITNFHLPESTLIMLVSAFAGYDHTMNAYQHAVSNQYRFFSYGDAMFIEKKTQ

SEQ ID NO: 73651 - protein, 350 aa, Vibrio xiamenensis
  misc_feature (1)..(350): tr|A0A1G7W3F1|A0A1G7W3F1_9VIBR S-adenosylmethionine:tRN A ribosyltransferase-isomerase OS=Vibrio xiamenensis OX =861298 GN=queA PE=3 SV=1
MQVSDFHFELPDELIARYPQPERTASRLLQLNGNSGQLVDGTFKDVLDQVQPGDLMVFNNTRVIPARLFGRKASGGKLEVLVERMLDEHSILAHVRCSKSPKPGSMILIGENDEYQAEMVARHDALFELRFSSDKPVLDILNHVGHMPLPPYIDRPDEDADKERYQTVYNQKPGAVAAPTAGLHFDDALLEQIKAKGVEFAYVTLHVGAGTFQPVRVENINDHHMHAEYVEVPQEVVDAINATKARGGRIIAVGTTSVRSLESAAQNALKNGTELVPFFDDTEIFIYPGYEYQLVDCLITNFHLPESTLIMLVSAFAGYDHTMAAYHHAVEQKYRFFSYGDAMFITKRTN

SEQ ID NO: 73652 - protein, 350 aa, Vibrionales bacterium
  misc_feature (1)..(350): tr|A0A366XLV5|A0A366XLV5_9GAMM S-adenosylmethionine:tRN A ribosyltransferase-isomerase OS=Vibrionales bacterium C3R12 OX=2267228 GN=queA PE=3 SV=1
MQVSDFHFELPDELIARYPQAERTASRLLQLDGNTGTLSDGSFKDVLDLVQPGDLVVFNNTRVIPARLFGRKESGGKLEVLVERMIDEKSILAHVRCSKSPKPGTTLFLGEHDEYQAEMVARHDALFEIRFTSDESVLEILNAVGHMPLPPYIDRPDEDADKERYQTVYNKKPGAVAAPTAGLHFDEQLLEQIKDKGVEFAYVTLHVGAGTFQPVKVDNIHDHHMHAEYVEVPQEVVDAIAATKARGGRVIAVGTTSVRSLESAAQDALKKGTELVPFFGDTEIFIFPGYEYQLVDCLITNFHLPESTLIMLVSAFADYDKVMAAYDHAVKNEYRFFSYGDAMFINKKTK

SEQ ID NO: 73653 - protein, 350 aa, Vibrionales bacterium
  misc_feature (1)..(350): tr|A5L7R6|A5L7R6_VIBBS S-adenosylmethionine:tRNA ribosy ltransferase-isomerase OS=Vibrionales bacterium (strain SWAT-3) OX=391574 GN=queA PE=3 SV=1
MQVSDFHFDLPDELIARYPQEERTASRLLKLDGNNGNLTDGSFKDVLDLVEPGDLVVFNNTRVIPARVFGRKASGGKLEVLVERMLDEKSILAHVRCSKSPKPGTKLFLGENDEYEAEMIARHDALFEIHFTSDQSVLEILNSVGHMPLPPYIDRPDEDADKERYQTVYNEKPGAVAAPTAGLHFDDKLMADMKAKGVEFAYVTLHVGAGTFQPVKVDNINDHHMHAEYVEVPQEVVDAVAATKARGGRIIAVGTTSVRSLESAAQDALKNGTELVPFFGDTEIFIFPGYEYQLVDCLITNFHLPESTLIMLVSAFAGYDNVMGAYDHAVKSEYRFFSYGDAMFINKKTS

SEQ ID NO: 73654 - protein, 408 aa, Vibrionimonas magnilacihabitans
  misc_feature (1)..(408): tr|A0A2S8SGT5|A0A2S8SGT5_9BACT S-adenosylmethionine:tRN A ribosyltransferase-isomerase OS=Vibrionimonas magnila cihabitans OX=669455 GN=CLV53_11148 PE=3 SV=1
MHPKALSILDFTYTLPDDRIARFPLEARDQSRLLVYRGGQISETVYASLAGELPGGSLLVFNNTKVVEARLLFQKNTGSIIEIFCLEPHEQYPDITSAMLEKGKVWWKCLVGGAKKWKEPVLHKALSDSGIVLSAKKIEQRADHYIIELSWSDETLSFAELLHMAGALPLPPYLNRAAEESDKERYQTIYARYDGSVAAPTAGLHFTDAVFASLSQKNIRHEFVTLHVGAGTFKPVKSATMEEHDMHAEFIDVPLSVIEKLLQQWPDTIVPVGTTSLRTIESLYWLGVKTILHPDIQPAALHLTQWEPYQLKHEAISPSLALQSLINWMQQHQLQKLLTKTQIIMAPGYQLKIAKGLITNFHQPQSTLLLLVAAIVGDDWKRIYNYALEHGFRFLSYGDGCLLMSDIV

SEQ ID NO: 73655 - protein, 349 aa, Vibrionimonas magnilacihabitans; identical to SEQ ID NO: 67377
  misc_feature (1)..(349): tr|A0A2S8SMG7|A0A2S8SMG7_9BACT S-adenosylmethionine:tRN A ribosyltransferase-isomerase OS=Vibrionimonas magnila cihabitans OX=669455 GN=queA PE=3 SV=1

SEQ ID NO: 73656 - protein, 348 aa, Vicingus serpentipes
  misc_feature (1)..(348): tr|A0A5C6RQH3|A0A5C6RQH3_9FLAO S-adenosylmethionine:tRN A ribosyltransferase-isomerase OS=Vicingus serpentipes OX=1926625 GN=queA PE=3 SV=1
MKLSKFKFDLPEELLAEHPAQERDESRLMVVHRDTGEIEHKLFKDMIDYFDEGDLLIMNDTKVFPARMYGNKEKTGARIEVFLLRELNRESLLWDVLVDPARKIRIGNKLYFGDDDLVAEVIDNTTSRGRTLRFLFDGPYEEFKAIIEKLGETPIPKYIQREVVPEDADRYQTVYAQNEGAVAAPTAGLHFSKHLLKRLEIKGINFAKLTLHVGLGTFRGVEVEDLTKHKMDSEEAHIDQKCADLVNATKLKKKRICAVGTTSMRAIESSVSSDGQLKPYDGWTNKFIFPPFDFNIANAMITNFHTPYSTLLMMTCAFGGYDLIMKAYKEAIKEKYRFYTYGDAMLII

SEQ ID NO: 73657 - protein, 354 aa, Victivallales bacterium
  misc_feature (1)..(354): tr|A0A2S0KX05|A0A2S0KX05_9BACT S-adenosylmethionine:tRN A ribosyltransferase-isomerase OS=Victivallales bacteri um CCUG 44730 OX=2094242 GN=queA PE=3 SV=1
MLSTSLFDYDLPEELIAQHPAGRRDGSRMLVLDRASGACEIRPFGAIREYLSAGDALIYNDTRVLRGRMYARKNGDPAGAKFELLLVQALDPERRKWNALLKPGKRALPGVSAVLLDGGGALNAAGDRFTVLGRNDDGSFIIEFNTADSDRLQMQYGHIPLPPYITRGDETADAERYQTVYADKAGAVAAPTAGLHFTPEILSELAAAGVREGAVTLHVGPGTFKPVSVENAEEHKMHSEEYFLTPETAELVNSAHAAGKRVLAVGTTTVRTLESCAEPDGTVRAGHGNTQIFLYPPYRVRSVDLLLTNFHLPKSTLLMLVSCFCDREKVLAAYELAIRERMRFYSYGDCMLLK

SEQ ID NO: 73658 - protein, 354 aa, Victivallis vadensis
  misc_feature (1)..(354): tr|A0A2U1AVZ2|A0A2U1AVZ2_9BACT S-adenosylmethionine:tRN A ribosyltransferase-isomerase OS=Victivallis vadensis OX=172901 GN=queA PE=3 SV=1
MLSTALFDYELPEELIAQHPAARRDGSRMMVLNRKSGECVIRPFSAIVDYLEPGDALIYNDTRVLRGRMYARKNSDPAGAKFELLLVEALDSERRRWNAMLKPGKRALPGVTAGLLDNDGSINSDGDSFCVIGRNGDGTFEIEFSTTDSDRLQQRYGHIPLPPYISRGDENADAERYQTVYAQKEGAVAAPTAGLHFTPEILAELKARGVGEAAVTLHVGPGTFKPVSVENAEEHQMHSEEYFLTPETAELVNSTRRTGHKVLAVGTTTVRVLESCVTPDGTVHAGHGKTRIFLYPPKPVLAEDMLLTNFHLPKSTLLMLVSCFCDREKVLAAYQVAIRERMRFFSYGDCMLLI

SEQ ID NO: 73659 - protein, 343 aa, Virgibacillus chiguensis
  misc_feature (1)..(343): tr|A0A1M5M6Y9|A0A1M5M6Y9_9BACI S-adenosylmethionine:tRN A ribosyltransferase-isomerase OS=Virgibacillus chiguen sis OX=411959 GN=queA PE=3 SV=1
MNIEEFDFDLPKELIAQTPLKERTASRLLVLNKQTKVISHHHFSDVKQFLKPGDCLVLNNTRVLPARLHGIKEDTGANVEILLLHQVDGDSWEILAKPAKKVKLGTVIRFGDGLLTATVTQVKEHGGRVVDFAYTGIFYEVLDQLGEMPLPPYIKEQLPEKERYQTVYAKEEGSAAAPTAGLHFTKKLLNELEQMGVRIAFITLHVGLGTFRPVSVETVEEHEMHAEFYHMDQDTADLLNAVKQSDGRIISVGTTSTRTLETIARDNQGAFKQASGWTDIFIYPPYQFQAVDGLITNFHLPKSTLLMLISAFAGKDAVMEAYREAVQEQYRFFSFGDAMFIYA

SEQ ID NO: 73660 - protein, 343 aa, Virgibacillus dokdonensis
  misc_feature (1)..(343): tr|A0A2K9J2J6|A0A2K9J2J6_9BACI S-adenosylmethionine:tRN A ribosyltransferase-isomerase OS=Virgibacillus dokdone nsis OX=302167 GN=queA PE=3 SV=1
MNIEEFDFDLPKELIAQTPLKERTASRLLVLNKQTKAISHHHFFDVKQFLKPGDCLVLNNTRVLPARLHGIKEDTGANVEILLLHQVDGDSWEILAKPAKKVKLGTVIRFGDGLLTATVTQIKEHGGRVVDFAYTGIFYEVLDQLGEMPLPPYIKEQLPEKERYQTVYAKEEGSAAAPTAGLHFTKELLNELEQMGVCIAFITLHVGLGTFRPVSVETVEEHEMHAEFYHMDQNTADLLNDVKQSDGRIISVGTTSTRTLETIARDNHGTFKQASGWTDIFIYPPYQFQAVDGLITNFHLPKSTLLMLISAFAGKDAVMEAYREAVQERYRFFSFGDAMFIYA

SEQ ID NO: 73661 - protein, 343 aa, Virgibacillus dokdonensis
  misc_feature (1)..(343): tr|A0A3E0WNI2|A0A3E0WNI2_9BACI S-adenosylmethionine:tRN A ribosyltransferase-isomerase OS=Virgibacillus dokdone nsis OX=302167 GN=queA PE=3 SV=1
MNIEEFYFDLPKELIAQTPLKERTASRLLVLNKQTKAISHHHFSDVKQFLKPGDCLVLNNTRVLPARLHGIKEDTGANVEILLLHQVDGDSWEILAKPAKKVKLGTVIRFGDGLLTATVTQVKEHGGRVVDFAYTGIFYEVLDQLGEMPLPPYIKEQLPEKERYQTVYAKEEGSAAAPTAGLHFTKKLLNELEQMGVRIAFITLHVGLGTFRPVSVETVEEHEMHAEFYHMDQDTADLLNAVKQSDGRIISVGTTSTRTLETIARDNQGAFKQASGWTDIFIYPPYQFQAVDGLITNFHLPKSTLLMLISAFAGKDAVMEAYREAVQEQYRFFSFGDAMFIYA

SEQ ID NO: 73662 - protein, 342 aa, Virgibacillus halodenitrificans
  misc_feature (1)..(342): tr|A0A1J0H0X2|A0A1J0H0X2_VIRHA S-adenosylmethionine:tRN A ribosyltransferase-isomerase OS=Virgibacillus haloden itrificans OX=1482 GN=queA PE=3 SV=1
MNIEDFDFDLPEELIAQTPLQERTASRLLVLDRQTKEVNHKHFSDIKSYFKKGDCLVLNDTKVLPARLYGVKEDTGAKVEILLLNQREADTWEVLAKPAKKIKVGTTLVFGEGKLKATCLATEEHGGRILEFYYTGIFYEVLDELGEMPLPPYIKEQLPEKERYQTVFAREEGSAAAPTAGLHFTNELLEEIEDMGVTIAFITLHVGLGTFRPVSVENIDDHEMHSEFYHMSKETADILNETKKSNGRIISVGTTSTRTLETIARDHQGAFKETSGWTDIFIYPPYEFKAIDGLITNFHLPKSTLIMLVSALVDKETILHAYKEAVQERYRFFSFGDAMLIL

SEQ ID NO: 73663 - protein, 342 aa, Virgibacillus indicus
  misc_feature (1)..(342): tr|A0A265NEG4|A0A265NEG4_9BACI S-adenosylmethionine:tRN A ribosyltransferase-isomerase OS=Virgibacillus indicus OX=2024554 GN=queA PE=3 SV=1
MNIEDFDFELPEELIAQTPLKERTSSRLLVLDQETKEVEHKHFRDIKQYFKKGDCLVLNDTRVLPARLYGVKKDTGAKIEVLLLTQEEKDTWEVLTKPAKKVKVGTELVFGDGKLRATCTGYKEHGGRILEFSYSGIFYEVLDELGEMPLPPYIKEQLPEKERYQTVFAREEGSAAAPTAGLHFTNELLEEIKSMGVTIAFITLHVGLGTFRPVSADTIDNHKMHAEFYQMTKDTADTLTKIKEAGGRIISVGTTSTRTLETIARDNNGAFAESSGWTDIFIYPPYQFRAVDGLITNFHLPKSTLIMLVSALADRKTILRAYNEAVNERYRFFSFGDAMLIL

SEQ ID NO: 73664 - protein, 342 aa, Virgibacillus massiliensis
  misc_feature (1)..(342): tr|A0A024QBY9|A0A024QBY9_9BACI S-adenosylmethionine:tRN A ribosyltransferase-isomerase OS=Virgibacillus massili ensis OX=1462526 GN=queA PE=3 SV=1
MNIDDFDFDLPEELIAQTPLKDRSASRLLALNKRNGEMEHSHFTDIKRYFRTGDCLVLNDTRVLPARLHGEKEDTGASVEILLLHQTEGDMWEVLAKPAKKIKKGTIISFGDGKLTATCMGLKEHGGRIVKFDYEGIFYEVLDELGEMPLPPYIKEQLPEKERYQTVYAKEEGSAAAPTAGLHFTNVLLDELKEMGVIITFITLHVGLGTFRPVSVDKVEEHEMHAEFYHMTKETAEILNRVKQENGRIISVGTTSTRTLETIARDHNGMFLEASGWTDIFIYPPYEFKAIDGLITNFHLPKSTLIMLISAFADKDTILAAYQEAVKHRYRFFSFGDAMIII

SEQ ID NO: 73665 - protein, 342 aa, Virgibacillus necropolis
  misc_feature (1)..(342): tr|A0A221MBY7|A0A221MBY7_9BACI S-adenosylmethionine:tRN A ribosyltransferase-isomerase OS=Virgibacillus necropo lis OX=163877 GN=queA PE=3 SV=1
MDINDFDFELPEKLIAQTPLQDRTASRLLVMNRKSKEIEHKHFPDIKNYLKKGDCLVLNDTRVLPARLYGIKKDTGAKLEVLLLQQEEEDCWEVLAKPAKKIKVGTELVFGDGRLRAFCLETREHGGRILQFNYDGIFYEVLDELGEMPLPPYITEQLSEKERYQTVFAKEEGSAAAPTAGLHFTNELLDELKDMGVIIAFITLHVGLGTFRPVSVDNIDDHTMHSEFYHMTAETAETLKAVKKNNGRIISVGTTSTRTIETIARDNDGEFVASSGWTDIFIYPPYNFQAIDGLITNFHLPKSTLIMLVSALVDRVSILRAYNEAVYEEYRFFSFGDAMLII

SEQ ID NO: 73666 - protein, 343 aa, Virgibacillus pantothenticus
  misc_feature (1)..(343): tr|A0A0L0QPU1|A0A0L0QPU1_VIRPA S-adenosylmethionine:tRN A ribosyltransferase-isomerase OS=Virgibacillus pantoth enticus OX=1473 GN=queA PE=3 SV=1
MNIEEFDFDLPEELIAQTPLKERTASRLLVLNKQTKEIAHRHFPDIKEYLQPGDCLVLNNTRVLPARLHGVKEGTGASIEVLLLHQVEGDSWEILAKPAKKVKLGSVIRFGDGLLTATCTQIKEHGGRVVQFAYEGIFYEVLDQLGEMPLPPYIKEQLSEKERYQTVYAKEEGSAAAPTAGLHFTTELLNELQQMGVCIAFITLHVGLGTFRPVSAETVENHKMHAEFYHMDQHTADMLNQVKQSAGRIISVGTTSTRTLETIARDNNGEFREASGWTDIFIYPPYQFQAIDGLITNFHLPKSTLIMLISAFAGKDIVMEAYREAVQERYRFFSFGDAMFIYA

SEQ ID NO: 73667 - protein, 349 aa, Virgibacillus phasianinus
  misc_feature (1)..(349): tr|A0A220U519|A0A220U519_9BACI S-adenosylmethionine:tRN A ribosyltransferase-isomerase OS=Virgibacillus phasian inus OX=2017483 GN=queA PE=3 SV=1
MDIHDFDFDLPEELIAQTPLKNRTASRLLVLNRESKQIDHKHFSDIKDYLKRGDCLVLNDTRVLPARLYGIKKDTGAKLEVLLLHQKEKDCWEVLAKPAKKMKVGTELVFGDGKLTATCLQTKEHGGRIVQFDYKGIFYEVLDELGEMPLPPYIKEQLPEKERYQTVYAREEGSAAAPTAGLHFTNELLDELKGMGVIITFITLHVGLGTFRPVSVDNIDDHTMHAEFYHMTEETAQTLKAVRKNNGRIISVGTTSTRTLETIARDHEGEFVASSGWTDIFIYPPYDFQAIDGLITNFHLPKSTLIMMVSALVDRESILHAYNEAVKEKYRFFSFGDAMLILPERKRNE

SEQ ID NO: 73668 - protein, 342 aa, Virgibacillus profundi
  misc_feature (1)..(342): tr|A0A2A2IDA7|A0A2A2IDA7_9BACI S-adenosylmethionine:tRN A ribosyltransferase-isomerase OS=Virgibacillus profund i OX=2024555 GN=queA PE=3 SV=1
MNIEDFDFDLPEELIAQTPLKDRTASRLLVLKRDTKEVQHKHFTDIKGYFKKGDCLVLNDTRVLPARLYGVKKDTGAKIEVLLLHQQEKDTWEVLTKPAKKVKIGTELIFGEGKLKATCTGYKDHGGRILEFSYVGIFYEVLDALGEMPLPPYIKEQLPEKERYQTVFAREEGSAAAPTAGLHFTNELLDEIKAMGVTITFITLHVGLGTFRPVSVDNIDEHKMHAEFYQMTRETAETLIEAKKSGGRIISVGTTSTRTLETIARDNNGTFVESSGWTDIFIYPPYNFRAIDGLITNFHLPKSTLIMLVSALVNKEAILGVYKEAVDERYRFFSFGDAMLIL

SEQ ID NO: 73669 - protein, 342 aa, Virgibacillus salinus
  misc_feature (1)..(342): tr|A0A1H1B4E2|A0A1H1B4E2_9BACI S-adenosylmethionine:tRN A ribosyltransferase-isomerase OS=Virgibacillus salinus OX=553311 GN=queA PE=3 SV=1
MNIEDFDFELPEELIAQTPLKERASSRLLVLNRDTKEVAHKYFTDIKQYLKKGDCLVLNNTRVLPARLYGVKEDTSAKIEVLLLHQQDEDEWEVLAKPAKKVKVGTTLVFGEGKIRATCTALKAHGGRIFDFSYEGIFYEVLDELGEMPLPPYIKKQLSEKERYQTVYAKEEGSAAAPTAGLHFTNSLLDELKSMGVTIAFITLHVGLGTFRPVSVDNIDDHTMHAEFYHMTKETANTLSQVKQAGGRIISVGTTSTRTLETIARDNNGQFAESSGWTDIFIYPPYQFQAIDGLITNFHLPKSTLIMLVSALADRESILNAYNEAVKEKYRFFSFGDAMLIL

SEQ ID NO: 73670 - protein, 342 aa, Virgibacillus soli; identical to SEQ ID NO: 63731
  misc_feature (1)..(342): tr|A0A0Q9XXJ9|A0A0Q9XXJ9_9BACI S-adenosylmethionine:tRN A ribosyltransferase-isomerase OS=Virgibacillus soli OX =480284 GN=queA PE=3 SV=1

SEQ ID NO: 73671 - protein, 341 aa, Virgibacillus sp.
  misc_feature (1)..(341): tr|A0A075JN42|A0A075JN42_9BACI S-adenosylmethionine:tRN A ribosyltransferase-isomerase OS=Virgibacillus sp. SK3 7 OX=403957 GN=queA PE=3 SV=1
MNIEDFDFDLPEELIAQTPLKERTASRLLVLDRQTKEVDHKHFTDIKDYLKKGDCLVLNDTKVLPARLYGIKEDTGAKVEILLLNQCEEDTWEILAKPAKKIKIGTTLVFGEGKLRATCTDIKEHGGRILEFYYTGIFYEVLDELGEMPLPPYIKEQLPEKERYQTVFAREEGSAAAPTAGLHFTKELLEEIEEMGVTIAFITLHVGLGTFRPVSVENIDDHEMHSEFYHMSTETADILNQTKKSNGRIISVGTTSTRTLETIARDQGAFKETSGWTDIFIYPPYDFKAIDGLITNFHLPKSTLIMLVSALVDKETILHAYKEAVQERYRFFSFGDAMLIL

SEQ ID NO: 73672 - protein, 342 aa, Virgibacillus sp.
  misc_feature (1)..(342): tr|A0A268I4N8|A0A268I4N8_9BACI S-adenosylmethionine:tRN A ribosyltransferase-isomerase OS=Virgibacillus sp. 750 5 OX=2022548 GN=queA PE=3 SV=1
MDIQDYDFHLPEELIAQTPLQDRTASRLLVLNKEEKTMEHRHFADIGDYLKPGDCLVLNDTRVLPARLYGIKKDTQAKVEILLLKQIEGDSWEVLVKPAKKVKVGTELSFGDGKLTAVCKELLEHGGRIVEFHYDGIFYEVLEQLGEMPLPPYIKEQLPDQERYQTVYAKEQGSAAAPTAGLHFTKELLANLQEKGVEIAFITLHVGLGTFRPVSVESIEEHEMHAEFYQMSQETADQLTRIRANGGRIISVGTTSTRTLETITRDHDGKFVAASGWTDIFIYPGFTYRAIDGLITNFHLPKSTLIMLVSAFAGRDFILDAYRTAVEERYRFFSFGDAMLLV

SEQ ID NO: 73673 - protein, 350 aa, Viridibacillus arenosi
  misc_feature (1)..(350): tr|W4EPD5|W4EPD5_9BACL S-adenosylmethionine:tRNA ribosy ltransferase-isomerase OS=Viridibacillus arenosi FSL R5 -213 OX=1227360 GN=queA PE=3 SV=1
MKLEDFDFELPEELIAQTPLEDRTSSRLMVVDRDSGEVTHHTFRDIIEELHEGDCLVLNDTRVLPARLMGVKEETGAHVEILLLKQTSNEDEWETLVKPAKRVKVGTEITFGEGLLKATCTGELDHGGRLFKFNYEGIFYEILDQLGEMPLPPYIREKLDDQDRYQTVFAKERGSAAAPTAGLHFTTDLLDEIRAKGVKVAFLTLHVGLGTFRPVNVETIETHAMHSEFYNLTEETATIINDTKRNGGRVIAVGTTSTRTLETIAERHDGNIVADSGWTSIFIYPGFEYKSIDGLITNFHLPKSTLVMLVSALTTREIILNAYNIAVQERYRFFSFGDAMFIRPKAKKGN

SEQ ID NO: 73674 - protein, 350 aa, Viridibacillus arvi
  misc_feature (1)..(350): tr|A0A0M0LMM9|A0A0M0LMM9_9BACL S-adenosylmethionine:tRN A ribosyltransferase-isomerase OS=Viridibacillus arvi O X=263475 GN=queA PE=3 SV=1
MKLEDFDFELLEELIAQTPLEDRTSSRLMIVDSDSGEVTHHTFRDIIEELHEGDCLVLNDTRVLPARLMGVKEETGAHVEILLLKQTSNEDEWETLVKPAKRVKVGTEITFGEGLLKATCTGELDHGGRLFKFNYEGIFYEILDQLGEMPLPPYIREKLDDQDRYQTVFAKERGSAAAPTAGLHFTTDLLDEIRAKGVKVAFLTLHVGLGTFRPVNVETIETHAMHSEFYNLTEETAAIINDTKRNGGRVIAVGTTSTRTLETIAERHDGKIVADSGWTSIFIYPGFEYKAIDGLITNFHLPKSTLVMLVSALTTREIILNAYNIAVQERYRFFSFGDAMFIRPKAQKGN

SEQ ID NO: 73675 - protein, 350 aa, Viridibacillus sp.
  misc_feature (1)..(350): tr|A0A2N0EXT8|A0A2N0EXT8_9BACL S-adenosylmethionine:tRN A ribosyltransferase-isomerase OS=Viridibacillus sp. OK 051 OX=1884360 GN=queA PE=3 SV=1
MKLEDFDFALPEELIAQTPLKDRTSSRLMVVDRESGEVTHHTFRDIIEELHEGDCLVLNDTRVLPARLMGVKEETGAHVEVLLLKQTANEDEWETLVKPAKRVKIGTEITFGEGLLKATCTGELDHGGRLFKFDYEGIFYEILDQLGEMPLPPYIREKLDDQDRYQTVFAKERGSAAAPTAGLHFTEELLDEIRAKGVKVTFLTLHVGLGTFRPVNVETIETHEMHSEFYHLSAETAALINETKQKGGRVISVGTTSTRTLETIAERHDGKLVADSGWTAIFIYPGFEYKVIDGLITNFHLPKSTLVMLVSALTTREIILNAYDIAVQERYRFFSFGDAMFIRPKAQKGN

SEQ ID NO: 73676 - protein, 349 aa, Vitellibacter aquimaris
  misc_feature (1)..(349): tr|A0A137RGN3|A0A137RGN3_9FLAO S-adenosylmethionine:tRN A ribosyltransferase-isomerase OS=Vitellibacter aquimar is OX=1548749 GN=queA PE=3 SV=1
MKLSNFNFNLPEELLAEYPAPNRDESRLMVLDRKNKTIEHKMFKDLIDYFEEDDVLVTNNTKVFPARLFGNKEKTGARIEVFLLRELNPETRLWDVLVDPARKIRIGNKLYFGDDETLVAEVIDNTTSRGRTLRFLFDGSYEEFRNKLTELGETPLPKYIKREVEPEDAERYQTIFAKNEGAVAAPTAGLHFSKHLLKRLEIKGVNVAEVTLHVGLGTFSSVEVEDLSKHKMDSEEMEIDQQAVNIINAGIQKKKRVCAVGTTAMRALESSVSSNHTLNSYKGWTNKFIFPPYDFSIANAMVTNFHTPKSTLLMMVSAFAGHDFIKEAYAEAIKEKYRFYTYGDAMLII

SEQ ID NO: 73677 - protein, 361 aa, Vitiosangium sp.
  misc_feature (1)..(361): tr|A0A2T4V2T7|A0A2T4V2T7_9DELT S-adenosylmethionine:tRN A ribosyltransferase-isomerase OS=Vitiosangium sp. GDMC C 1.1324 OX=2138576 GN=queA PE=3 SV=1
MSSLLSDYDFELPEAQIAQAPLAARDASRLMVVRRSSGAWAHRHFSELPELLRDGDLLVVNDARVIPARLLGSKAGTGGRVELLVVRPAASTLTSQALGGAAEALEWICLGQASKGLKPGARISFPEGLEAEVLEALGGGEYRVRFHASSGTSLAAALEKAGRLPLPPYITRAPEASDAERYQTVYARASGAVAAPTAGLHFTDATFAALAARGIHRVEVTLDVGPGTFLPVREENLEKHHMHPERYFVPEATARAVNAARAEGRRVVAVGTTVVRTLESATDPDSGALRAGPGETTMFIRPGFTFRQVDVLLTNFHLPRSTLVVLVSALLGRERTLAAYREAVAAGYRFFSYGDAMLVTE

SEQ ID NO: 73678 - protein, 341 aa, Vitiosangium sp.
  misc_feature (1)..(341): tr|A0A2T4VQV3|A0A2T4VQV3_9DELT S-adenosylmethionine:tRN A ribosyltransferase-isomerase OS=Vitiosangium sp. GDMC C 1.1324 OX=2138576 GN=DAT35_11925 PE=3 SV=1
MNAARWPREQPDSGRLLHVAPRSGRLDDARMTELPRMLRPGDLLVLNDAATLPAALHGHTEAGAPIELRLVSREAEGTWTAVLFGAGDWRTRTEDRPPPPAVSPGEQFVLGGLGARVVAVLPPSARLLRVEFALQGAALWTALYRAGRPVQYAHVERPLSLWHIQTAYAARPWAVETPSAGLPLTWALLLELKHRGIRLATLTHAAGLSSTGDEVLDAALPRPERFDVPASTVEAIHATRSSGGRVVAVGTTVVRALEGRAAQTGGRLEPGEGVTDLLLGPGFIPRVVDGLLSGMHEPGTSHFTLLQAFAPQELLRAACVLAESRGYLGHEFGDSCLILEP

SEQ ID NO: 73679 - protein, 366 aa, Vitreoscilla filiformis
  misc_feature (1)..(366): tr|A0A221KCC5|A0A221KCC5_VITFI S-adenosylmethionine:tRN A ribosyltransferase-isomerase OS=Vitreoscilla filiform is OX=63 GN=queA PE=3 SV=1
MTAADRLFTLSDFDFELPPALIAQHPAPERSASRLLDGRGAVPVDRVFRDLPQLLAPGDLLVFNDTKVLKARLFGEKHTGGSIEALVERILPPAQGESMARELWAHVRASKSPKPGSVIRLGTDRGPGFEAEVLGRGGPDDALFHLRVAGNAFDLVEQHGHVPLPPYITHGDAAEDERRYQTVFATHLGAVAAPTAALHFDEALLAALAARGVSTARVTLHVGAGTFQPVRTENLADHKMHSEWFDVPQTTVDALRATRAAGGRITSVGTTTLRALESAAWQEMQASGQDLHRARSGETDIFITPGFEFRVVDRLITNFHLPKSTLMMLVSALAGYERVMALYRHAIEARYRFFSYGDAMLLERQG

SEQ ID NO: 73680 - protein, 322 aa, Vitreoscilla sp.
  misc_feature (1)..(322): tr|A0A2L0PLZ4|A0A2L0PLZ4_VITS1 S-adenosylmethionine:tRN A ribosyltransferase-isomerase OS=Vitreoscilla sp. (str ain C1) OX=96942 GN=queA PE=3 SV=1
MIAQHPPEVRGSSRLLASWQDQAFQNLHFPDVVSFFKSGDVLVMNDTKVIKARLFGQKASGGKIEVLVERVMDDHTVWAHVRSSKSPKPGMVLEFGEDKAVMVERKDALFVLQFQGEKTVWEVLEEQGHMPLPPYIERADDADDDERYQTVYAQNDGAVAAPTAGLHFTPEILQQLQDKGVALHFVTLHVGAGTFQPVKVDNIEEHHMHSERFWVAQSVVDAIDEAKARGNHVWAVGTTSMRALESAALTGRLQAGSGDTDIFITPGFEIKVVDRLITNFHLPKSTLMMLVSAFHGYEKSWRCTNMLSKTNTAFSVMATRWC

SEQ ID NO: 73681 - protein, 341 aa, Vogesella indigofera
  misc_feature (1)..(341): tr|A0A495BD92|A0A495BD92_VOGIN S-adenosylmethionine:tRN A ribosyltransferase-isomerase OS=Vogesella indigofera OX=45465 GN=queA PE=3 SV=1
MLVSDFDYHLPEHLIAQHPPAERGGSRLLRVNGRVLQDDHFAAIAHALDAGDVLVFNDTRVIKARLFGEKASGGKIEALVERVLNEHEVLAHVRASKSPKPGTRLVFAGRWQAEMVERAGELFKLRFLDAANVFDILDASGKLPLPPYIERDTDGDDDERYQTVYAREKGAVAAPTAGLHFTDAMLQTLRDKGVILCSVTLHVGAGTFQPVRVENIAEHKMHSEIYDIPQATVDAIDAAHKVGRKVLAVGTTSMRALESAARPDGVLRAGRGETDIFITPGYRFNVVDKLLTNFHLPKSTLLMLVSAFAGYEEMRAAYAHAVAQEYRFFSYGDAMLLTRKE

SEQ ID NO: 73682 - protein, 340 aa, Vogesella sp.
  misc_feature (1)..(340): tr|A0A1C6LLM6|A0A1C6LLM6_9NEIS S-adenosylmethionine:tRN A ribosyltransferase-isomerase OS=Vogesella sp. LIG4 OX =1192162 GN=queA PE=3 SV=1
MHVSDFDYHLPDELIAQHPPAERGSSRLLLVHGHTPQDSRFTEFADQLQAGDVMVFNDTRVIKARLFGEKDSGGKVEALVERVLNEHEVLAHVRASKSPKPGTRIIFAGRWQAEMVARADELFHLKFLDAANVFDILEASGKLPLPPYIARDTDADDDERYQTVYAREQGAVAAPTAGLHFTDAMLQQLRDKGVQLCHVTLHVGAGTFQPVRVDNIAEHKMHSEIYEVPQGTVDAIHAAHAAGRKVLAVGTTSMRALESAARDGGLKAGRGETDIFITPGFRFQVVDKLLTNFHLPKSTLLMLVSAFAGYDEIRGAYAHAVTHGYKFFSYGDAMLLTRKD

SEQ ID NO: 73683 - protein, 341 aa, Vogesella sp.
  misc_feature (1)..(341): tr|A0A0J5GGL2|A0A0J5GGL2_9NEIS S-adenosylmethionine:tRN A ribosyltransferase-isomerase OS=Vogesella sp. EB OX=1 526735 GN=queA PE=3 SV=1
MLVSDFDYHLPEHLIAQHPPAERGGSRLLRVNGRVLQDDHFAAIADALDAGDVLVFNDTRVIKARLFGEKASGGKIEALVERVLNEHEVLAHVRASKSPKPGTRLVFAGRWQAEMVERAGELFKLRFLDAANVFDILDASGKLPLPPYIERDTDGDDDERYQTVYAREKGAVAAPTAGLHFTDAMLQTLRDKGVILCSVTLHVGAGTFQPVRVENIAEHKMHSEIYDIPQATVDAIDAAHKVGRKVLAVGTTSMRALESAARPDGVLRAGRGETDIFITPGYRFNVVDKLLTNFHLPKSTLLMLVSAFAGYEEMRAAYAHAVAQEYRFFSYGDAMLLTRKE

SEQ ID NO: 73684 - protein, 366 aa, Volucribacter psittacicida
  misc_feature (1)..(366): tr|A0A4R1FWC8|A0A4R1FWC8_9PAST S-adenosylmethionine:tRN A ribosyltransferase-isomerase OS=Volucribacter psittac icida OX=203482 GN=queA PE=3 SV=1
MRVSDFNFDLPDELIARYPMAERRASRLLQLNGKTGEITHRTFADIVELIDEGDLLIFNNTRVIPARMFGRKASGGKVEVLVERVLTESRFLAHIRSSKSPKEQAELWLGEDKLGEGKGIGVKMLARQGSLFELELLDQSLPLLEVLQQIGHMPLPPYIDRPDEDADQERYQTVYNQVPGAVAAPTAGLHFDQDLLDQLKQKGVNFAFVTLHVGAGTFQPVRVENIEDHQMHAEYVEVPPQVCEAIIATKKAGKRVIAVGTTSVRSVESAAQQAIAKQSRQIIEPYFADTAIFLYPGKTFHIIDALITNFHLPESTLIMLVSAFAGYQHTMQAYQSAVQHRYRFFSYGDAMFIEQKTEERWLMVRD

SEQ ID NO: 73685 - protein, 342 aa, Vulcanibacillus modesticaldus
  misc_feature (1)..(342): tr|A0A1D2YWS4|A0A1D2YWS4_9BACI S-adenosylmethionine:tRN A ribosyltransferase-isomerase OS=Vulcanibacillus modes ticaldus OX=337097 GN=queA PE=3 SV=1
MKIELFDFELPEELIAQTPLSHRDESKLLVLNRQTGVIEHRKFKNIIEYLQPGDALVLNDTKVLPARLYGHKKETGAKVEVLLLKQLDNNRWETLVKPGKKLRVGHEVVFGDGLLTGIVENTTEVGGRIIRFQYDGIFNEILDKLGNMPLPPYIKEQLEDKDRYQTVYAKNVGSSAAPTAGLHFTEELLNQIRQKGINIVYITLHVGLGTFRPVSVENIEEHQMHAEYFSMTKEAAETLNKTKDLKRKIIAVGTTSVRTLETIVDKQTGRFMPKDGWTDIFIYPGFEFKAIDGMITNFHLPKSSLVMLVSALAKRENIMNAYQEAIKNRYRFYSFGDAMFIY

SEQ ID NO: 73686 - protein, 357 aa, Vulcaniibacterium tengchongense
  misc_feature (1)..(357): tr|A0A3N4VE55|A0A3N4VE55_9GAMM S-adenosylmethionine:tRN A ribosyltransferase-isomerase OS=Vulcaniibacterium ten gchongense OX=1273429 GN=queA PE=3 SV=1
MSGPAPVPVSPLKKSDFHYDLPPELIAQEPLPERSASRLLVVPPAPAPFQDRVFRELPELLQPGDLLVFNDTRVIPARLYGHKSTGGRVEILIERLLGDGEARAQLGVSKSPRPGARVALDAGGEAEVLGRDGEFYRLRFHVAEPLEQWLQRAGELPLPPYIQRTPGAGDAERYQTVFAREAGAVAAPTAGLHFDEPLLQALNARGVQFGHVTLHVGAGTFQPVRADDLSQHVMHSEWLNVGAGLVEQIRRTRAAGGRVIAVGTTVVRALESAAKDGALRPYAGETRLFILPGYRIRSVDALITNFHLPESTLLMLVSAFAGKPRVFEAYAHAIAQRYRFFSYGDAMLLFPREEGRA

SEQ ID NO: 73687 - protein, 350 aa, Vulgatibacter incomptus
  misc_feature (1)..(350): tr|A0A0K1PB21|A0A0K1PB21_9DELT S-adenosylmethionine:tRN A ribosyltransferase-isomerase OS=Vulgatibacter incompt us OX=1391653 GN=queA PE=3 SV=1
MKTSDFDFELPEELIAQAPLAERDASRLLVLPRNGGAPTHASFRDLPGWLRPGDLLVLNDAKVIPARLRGAKEASGGKVELLLCDPLASLGDRAVWRCMGGSSKPLRPGAWLRFEAAGGMLRAEIVAVGEGGFVDVAFDEAPDALLDRVEELGELPLPPYMKRAPEASDRDRYQTIYARHRGAVAAPTAGLHFTDEVFSALRERGVERTAVTLHVGPGTFLPVRADSVEEHRMHAERYEISQDAVDAIARTREAGGRVIAVGTTALRTLESAAEETGRIRAGAGVSSLFVTPGFRFRVVDGLLTNFHLPRSTLVMLVAALAGRERLLAAYTEAVERRYRFYSYGDAMLVS

SEQ ID NO: 73688 - protein, 341 aa, Waddlia chondrophila
  misc_feature (1)..(341): tr|D6YW17|D6YW17_WADCW S-adenosylmethionine:tRNA ribosy ltransferase-isomerase OS=Waddlia chondrophila (strain ATCC VR-1470 / WSU 86-1044) OX=716544 GN=queA PE=3 SV=1
MLDKLESYQFDLPEDLIAKVPVTPRDHSRLMVIDRSSGKIEEIPFYELPQFLGDGDRIVFNNTKVIPARLIGRKETGGQVELLLLEEKTEGVWLTMARPARKLKKGTKVIVSDRLCAEMIEELDEGMRLVRFDYEGLFWEVLAAHGEMPLPPYLQRDELPKLDRERYQTIYAKHAGAVAAPTAGLHFTKTLLEELTEKGVDIVEITLHVGLGTFRPVTAKTITEHKMHEERYWITQEAASRLNRPAKREICVGTTCCRALESAVNEQGNVFSGEGRTDIFIRPGYQFKKVTSLLTNFHLPGSTLMMLVSAFAGYDLTMNAYKKAVLDKFRFFSYGDAMLIL

SEQ ID NO: 73689 - protein, 341 aa, Waddlia chondrophila; identical to SEQ ID NO: 73688
  misc_feature (1)..(341): tr|F8LDD4|F8LDD4_9BACT S-adenosylmethionine:tRNA ribosy ltransferase-isomerase OS=Waddlia chondrophila 2032/99 OX=765953 GN=queA PE=3 SV=1

SEQ ID NO: 73690 - protein, 346 aa, Waddliaceae bacterium
  misc_feature (1)..(346): tr|A0A2E3LYH8|A0A2E3LYH8_9BACT S-adenosylmethionine:tRN A ribosyltransferase-isomerase OS=Waddliaceae bacterium OX=2026802 GN=queA PE=3 SV=1
MTKDLFSIDAYHYDLPEELIAQHPCSPRHDSRLLIVDRKKESFREIRFMDLCDEMQEGDSFVFNNTKVIPARLFAKRSTGAKIQIFLHRHLGQADWEVLVKPARKVIVGETLFLDGDMEAEVIGAADDGVRHLRFSQPERLEEFLHQHGQIPLPHYIRGGQESPEDRENYQTLYAKHSGAVAAPTAGLHFSEEMLQRLREKKVYQTEVTLHVGLGTFKPVQSDDIRQHNMHNELFILDENAVRELGQRDPNRRQIVVGTTSCRALESAVDSNGMFHAGSYETDIFIYPGYQFRYVEALLTNFHLPKSTLLMLISAFAGYDLVMEAYRYAVKERFRFFSYGDAMLLL

SEQ ID NO: 73691 - protein, 351 aa, Weeksella virosa
  misc_feature (1)..(351): tr|F0P126|F0P126_WEEVC S-adenosylmethionine:tRNA ribosy ltransferase-isomerase OS=Weeksella virosa (strain ATCC 43766 / DSM 16922 / JCM 21250 / NBRC 16016 / NCTC 1163 4 / CL345/78) OX=865938 GN=queA PE=3 SV=1
MKMKTSDFDFKLPDELLAERPSEHRDEARLMVIHRDTGKIEHRLFKDLIEYFDEGDVMIRNNTKVFPARLMGNKEKTGAKIEVFLLRELDPETRLWDVLVDPARKIRIGNKLFFDEDDTLVAEVVDNTTSRGRTLRFLFDGSYEEFRIKLKEIGDTPLPKYIKRDADEEDAERYQTIYAKEEGAVAAPTAGLHFSKHLLKRLEIKGVDFAEVTLHIGLGTFMPVEVEDLSKHKMESEQVIIPQESADLVNKAIDAKKRVCAIGTTSMRSIESSVSADGHLNAFNGWTNKFIYPPYDFSIANCMVTNFHTPKSTLLMMISAFAGHELIMKAYDEAIKEGYKFYSYGDAMLIL

SEQ ID NO: 73692 - protein, 348 aa, Weissella bombi
  misc_feature (1)..(348): tr|A0A1C4BQ93|A0A1C4BQ93_9LACT S-adenosylmethionine:tRN A ribosyltransferase-isomerase OS=Weissella bombi OX=15 05725 GN=queA PE=3 SV=1
MAENFTSLSDFDYELPQELIAQTPLKKRDGSRLLEMNADTGELHDRHFYDIIDYLNPGDALVMNNSRVLPARLYGERPDTGGHVEVLLLRQDQDDVWETLVKPARKYPVGQKITFGDGRLTAEVVEELEHGGRMVKFHYDGIFLEILEELGEMPLPPYIKEKLEDQERYQTVYSKVNGSAAAPTAGLHWTPELLQKVADKGIKLVELTLHVGLGTFRPVEEDNIDDHKMHSEFYQLSEEAAQTLNEVRANGGRIVATGTTSIRTLETIGAKFDGELHADSGWTDIFIKPGFQWHVVDAFITNFHLPKSTLVMLVAAFTGRDNILNAYKHAVDEKYRFFSFGDAMFIHR

SEQ ID NO: 73693 - protein, 348 aa, Weissella cibaria
  misc_feature (1)..(348): tr|A0A0D1LHM4|A0A0D1LHM4_9LACT S-adenosylmethionine:tRN A ribosyltransferase-isomerase OS=Weissella cibaria OX= 137591 GN=queA PE=3 SV=1
MTEEHYTLEDFDYDLPHELIAQTPLERRDGSRLLELNAVTGEVHDRHFYDILDYLNPGDALVMNNSRVLPARLYGERPGTGGHVEVLLLRQDHGDVWETLVKPAKKYPVGQEITFGDGQLTAVVTEELEHGGRMIEFKYDGIFLEILESLGEMPLPPYIKEKLDDKERYQTVYSKVNGSAAAPTAGLHWTPELLQKAADKGVKLVELTLHVGLGTFRPVEEENIEDHKMHSEFYQLSAEAAQTLNDVKANGGLIIATGTTSIRTLETIGSKFNGELREDSGWTDIFIKPGYKWTVVDAFITNFHLPKSTLVMLVAAFTGRENILNAYQHAIAEQYRFFSFGDAMFVHK

SEQ ID NO: 73694 - protein, 348 aa, Weissella cibaria
  misc_feature (1)..(348): tr|A0A0D1LX08|A0A0D1LX08_9LACT S-adenosylmethionine:tRN A ribosyltransferase-isomerase OS=Weissella cibaria OX= 137591 GN=queA PE=3 SV=1
MTEEHYTLEDFDYDLPHELIAQTPLERRDGSRLLELNAVTGEVHDRHFYDILDYLNPGDALVMNNSRVLPARLYGERPGTGGHVEVLLLRQDHGDVWETLVKPAKKYPVGQEITFGDGQLTAVVTEELEHGGRMIEFKYDGIFLEILESLGEMPLPPYIKEKLDDKERYQTVYSKVNGSAAAPTAGLHWTPELLQKAADKGVKLVELTLHVGLGTFRPVEEENIEDHKMHSEFYQLSAEAAQTLNDVKANGGRIIATGTTSIRTLETIGSKFNGELREDSGWTDIFIKPGYKWTVVDAFITNFHLPKSTLVMLVAAFTGRENILNAYQHAIAEQYRFFSFGDAMFVHK

SEQ ID NO: 73695 - protein, 348 aa, Weissella confusa
  misc_feature (1)..(348): tr|A0A5F1S7C8|A0A5F1S7C8_WEICO S-adenosylmethionine:tRN A ribosyltransferase-isomerase OS=Weissella confusa OX= 1583 GN=queA PE=3 SV=1
MTEQHYTLEDFDYDLPHELIAQTPLKQRDCSRLLELNAETGEVHDRHFYDILDYLNPGDALVMNNSRVLPARLYGERPGTGGHVEVLLLRQDHGDVWETLVKPAKKYPVGQEIVFGDGALKAVVTEELEHGGRMIEFKYDGIFLEILESLGEMPLPPYIKEKLDDKERYQTVYSKVNGSAAAPTAGLHWTPELLQKAADKGVKLVELTLHVGLGTFRPVEEENIEDHKMHSEFYQLSAEAAQTLNDVKANGGRIVATGTTSIRTLETIGSKFNGELREDSGWTDIFIKPGYKWTVVDAFITNFHLPKSTLVMLVAAFTGRENILNAYQHAISEGYRFFSFGDAMYVHK

SEQ ID NO: 73696 - protein, 348 aa, Weissella confusa
  misc_feature (1)..(348): tr|A0A0R2F6V0|A0A0R2F6V0_WEICO S-adenosylmethionine:tRN A ribosyltransferase-isomerase OS=Weissella confusa OX= 1583 GN=queA PE=3 SV=1
MTEQHYTLEDFDYDLPHELIAQTPLKQRDGSRLLELNAETGEVHDRHFYDILDYLNPGDALVMNNSRVLPARLYGERPGTGGHVEVLLLRQDHGDVWETLVKPAKKYPVGQEIVFGDGALKAVVTEELEHGGRMIEFKYDGIFLEILESLGEMPLPPYIKEKLDDKERYQTVYSKVNGSAAAPTAGLHWTPELLQKAADKGVKLVELTLHVGLGTFRPVEEENIEDHKMHSEFYQLSAEAAQTLNDVKANGGRIVATGTTSIRTLETIGSKFNGELREDSGWTDIFIKPGYKWTVVDAFITNFHLPKSTLVMLVAAFTGRENILNAYQHAISEGYRFFSFGDAMYVHK

SEQ ID NO: 73697 - protein, 349 aa, Weissella halotolerans
  misc_feature (1)..(349): tr|A0A0R2FVJ2|A0A0R2FVJ2_9LACT S-adenosylmethionine:tRN A ribosyltransferase-isomerase OS=Weissella halotoleran s DSM 20190 OX=1123500 GN=queA PE=3 SV=1
MTEPEHYTLEDFDYNLPEELIAQTPLAKRDTSRLLVLNAETGEMQDKHFYDILDYLQPGDALVMNNSRVLPARLYGTKADTGGHVEVLLLRQDHGDVWETLVKPGKKLHKGQEIVFGDGQLKAVIVDELEHGGRMIEFKYDGIFLEILEQLGEMPLPPYIKEKLADQERYQTVYSKVNGSAAAPTAGLHWTPELLEKVAAKGVKIVELTLHVGLGTFRPVEESDIDKHKMHSEFYQLSAQAARTLNDVREQGGRIIATGTTSIRTLETIGTKFNGHLQADSGWTDIFIKPGYQWQVVDAFITNFHLPKSTLVMLVAAFTGRERILNAYQHAIAERYRFFSFGDAMFVHK

SEQ ID NO: 73698 - protein, 348 aa, Weissella hellenica
  misc_feature (1)..(348): tr|A0A5B8TQX7|A0A5B8TQX7_WEIHE S-adenosylmethionine:tRN A ribosyltransferase-isomerase OS=Weissella hellenica O X=46256 GN=queA PE=3 SV=1
MAENFTSLSDFDYELPQELIAQTPLKKRDGSRLLEMNADTGELHDRHFYDIIDYLNPGDALVMNNSRVLPARLYGERPETGGHVEVLLLRQDQDDVWETLVKPAKKYLVGQKITFGDGRLTAEVIAELDHGGRMIKFHYDGIFLEILEELGEMPLPPYIKEKLEDQERYQTVYSKVNGSAAAPTAGLHWTPELLQKVADKGIKLVELTLHVGLGTFRPVEEDNIDDHKMHSEFYQLSQEAAQTLNEVKANGGRIVATGTTSIRTLETIGAKFDGELKADSGWTEIFIKPGFQWRVVDAFITNFHLPKSTLVMLVAAFTGRDNILNAYEHAVKEQYRFFSFGDAMFIHH

SEQ ID NO: 73699 - protein, 348 aa, Weissella hellenica
  misc_feature (1)..(348): tr|A0A4Y4G541|A0A4Y4G541_WEIHE S-adenosylmethionine:tRN A ribosyltransferase-isomerase OS=Weissella hellenica O X=46256 GN=queA PE=3 SV=1
MAENFTSLSDFDYELPQELIAQTPLKRRDGSRLLEMNADTGVLHDRHFYDIIDYLNPGDALVMNNSRVLPARLYGERPETGGHVEVLLLRQDQDDVWETLVKPAKKYVVGQKITFGDGRLTAEVISELEHGGRMIKFHYEGIFLEILEELGEMPLPPYIKEKLEDQERYQTVYSKVNGSAAAPTAGLHWTPELLQKVADKGIKLVELTLHVGLGTFRPVEEDNIDDHKMHSEFYQLSQEAAQTLNQVKANGGRIVATGTTSIRTLETIGAKFDGELKADSGWTEIFIKPGFQWRVVDAFITNFHLPKSTLVMLVAAFTGRDNILNAYEHAVKEQYRFFSFGDAMFIHH

SEQ ID NO: 73700 - protein, 348 aa, Weissella jogaejeotgali
  misc_feature (1)..(348): tr|A0A1L6RC57|A0A1L6RC57_9LACT S-adenosylmethionine:tRN A ribosyltransferase-isomerase OS=Weissella jogaejeotga li OX=1631871 GN=queA PE=3 SV=1
MTETYTSLNDFDYDLPHELIAQTPLEKRDGSRLLELNADTGELHDRHFYDIIDYLNPGDALVMNNSRVLPARLYGVRPETGGHVEVLLLRQDQDDVWETLVKPARKYPVGQKIVFGDGRLTAEVTEELEHGGRMIKFHYDGIFLEILEELGEMPLPPYIKEKLEDQERYQTVYSKVNGSAAAPTAGLHWTPELLQKVADKGIKLIELTLHVGLGTFRPVEEDNIDDHKMHSEFYQLSEEAAQTLNEVRANGGRIVATGTTSIRTLETIGAKFDGTLHADSGWTDIFIKPGFKWQVVDAFITNFHLPKSTLVMLVAAFTGRDNILNAYKHAVTEKYRFFSFGDAMFIHH

SEQ ID NO: 73701 - protein, 348 aa, Weissella kandleri
  misc_feature (1)..(348): tr|A0A0R2JKY5|A0A0R2JKY5_9LACT S-adenosylmethionine:tRN A ribosyltransferase-isomerase OS=Weissella kandleri OX =1616 GN=queA PE=3 SV=1
MSLPEYTLDDFDYDLPQELIAQTPLKQRDSSRLLTLNADTGAMEDRHFYDILDYLNPGDAIVMNNSRVLPARLHGIRPDTGGNVEVLMLRQDHGDVWETLVKPARKYPVGAQISFGNGELTATVVEELEHGGRMVEFHYDGIFLEVLESLGEMPLPPYIKEKLDDQERYQTVYSKVNGSAAAPTAGLHWTPELLAKVEAKGVKLVELTLHVGLGTFRPVETNNLNEHKMHSEFYQLSQAAADTLNEVHANGGRIIATGTTSIRTLETIGSKFNGVLQADSGWTDIFIKPGYQWAVVDAFITNFHLPKSTLVMLVAAFTGRENILNAYQHAIEERYRFFSFGDAMFIYR

SEQ ID NO: 73702 - protein, 348 aa, Weissella koreensis
  misc_feature (1)..(348): tr|F8HYT3|F8HYT3_WEIKK S-adenosylmethionine:tRNA ribosy ltransferase-isomerase OS=Weissella koreensis (strain K ACC 15510) OX=1045854 GN=queA PE=3 SV=1
MNLSNYTLDDFDYDLPVELIAQTPLEKRDTSRLLALNADTGMLEDRHFYDILEYLKPGDAIVMNNSRVLPARLHGIRPETGGHVEVLMLRQDHGDVWETLVNPARKYPIGAEISFGNGELTATVTEELEHGGRMVEFHYNGIFLEILESLGEMPLPPYIKEKLEDQERYQTVYSKVNGSAAAPTAGLHWTPELLQKVADKGVKLVELTLHVGLGTFRPVETNNLEDHKMHSEFYQLNQSAADTLNDVRANGGRIIATGTTSIRTLETIGSKFNGELKADSGWTDIFIKPGYQWTTVDAFITNFHLPKSTLVMLVAAFTGRENILNAYQHAIEEQYRFFSFGDAMFIHH

SEQ ID NO: 73703 - protein, 348 aa, Weissella koreensis
  misc_feature (1)..(348): tr|J0MIJ5|J0MIJ5_9LACT S-adenosylmethionine:tRNA ribosy ltransferase-isomerase OS=Weissella koreensis KCTC 3621 OX=1123721 GN=queA PE=3 SV=1
MNLSNYTLDDFDYDLPVELIAQTPLEKRDTSRLLALNADTGMLEDRHFYDILEYLKPGDAIVMNNSRVLPARLHGIRPETGGHVEVLMLRQDHGDVWETLVNPARKYPVGAEISFGNGELTATVTEELEHGGRMVEFHYNGIFLEILESLGEMPLPPYIKEKLEDQERYQTVYSKVNGSAAAPTAGLHWTPELLQKVADKGVKLVELTLHVGLGTFRPVETNNLEDHKMHSEFYQLSQAAADTLNDVRANGSRIIATGTTSIRTLETIGSKFNGELKADSGWTDIFIKPGYQWTTVDAFITNFHLPKSTLVMLVAAFTGRENILNAYQHAIEEQYRFFSFGDAMFIHH

SEQ ID NO: 73704 - protein, 350 aa, Weissella minor
  misc_feature (1)..(350): tr|A0A0R2JG99|A0A0R2JG99_9LACT S-adenosylmethionine:tRN A ribosyltransferase-isomerase OS=Weissella minor OX=16 20 GN=queA PE=3 SV=1
MTDDVKNYTLDDFDYDLPEELIAQTPLKERDTSRLLVLDANTGATDDQHFYDIINYLNPGDALVMNNSRVLPARLYGVRPDTGGHVEVLLLRQDHDDVWETLIKPARKYRVGQTISFGDGLLEGVVTEELEHGGRMVEFHYDGIFLEILEQLGEMPLPPYIKEKLDDKERYQTVYSKVNGSAAAPTAGLHWTPELLEKVAAKGVKIVELTLHVGLGTFRPVEEENLDDHKMHSEFYQLSQEAADTLNEVHANGGRIIATGTTSIRTLETIGSKFDGQLEADSGWTDIFIRPGYKWTVVDAFITNFHLPKSTLVMLVASFTGRENILNAYQHAIEEHYRFFSFGDAMYVHK

SEQ ID NO: 73705 - protein, 348 aa, Weissella oryzae
  misc_feature (1)..(348): tr|A0A069CSX2|A0A069CSX2_WEIOS S-adenosylmethionine:tRN A ribosyltransferase-isomerase OS=Weissella oryzae (str ain DSM 25784 / JCM 18191 / SG25) OX=1329250 GN=queA PE =3 SV=1
MEPTHYTLEDFDYDLPHELIAQTPLKQRDSSRLLALNAVTGAYEDKHFYDIIDYLNPGDAVVMNNSRVLPARLYGERPETGGGVEVLLLRQDHGDVWETLVKPARKYPVGQEIVFGDGQLKAVVTEELEHGGRMIEFKYDGIFLEILEQLGEMPLPPYIKEKLEDQERYQTVYSKVNGSAAAPTAGLHWTPELLQKVADKGIKLVELTLHVGLGTFRPVEEDNIEDHKMHSEFYQLSDEAAATLNEVRANGGRIIATGTTSIRTLETIGSKFAGELKADSGWTDIFIKPGYQWTVVDAFITNFHLPKSTLVMLVAAFTGRENILNAYQHAIDERYRFFSFGDAMFVHK

SEQ ID NO: 73706 - protein, 348 aa, Weissella paramesenteroides
  misc_feature (1)..(348): tr|C5RA07|C5RA07_WEIPA S-adenosylmethionine:tRNA ribosy ltransferase-isomerase OS=Weissella paramesenteroides A TCC 33313 OX=585506 GN=queA PE=3 SV=1
MTENYTSLNDFDYELPHELIAQTPLERRDGSRLLELNADTGELHDRHFYDIIDYLNPGDALVMNNSRVLPARLYGVRPETGGHVEVLLLRQEKDDVWETLVKPARKYPVGQKIVFGDGQLTAEVIEELEHGGRMIKFHYDGIFLEILEELGEMPLPPYIKEKLADQERYQTVYSKVNGSAAAPTAGLHWTPELLQKVADKGIKLVELTLHVGLGTFRPVEEDNIDDHKMHSEFYQLSEEAAQTLNEVRANGGRIVATGTTSIRTLETIGAKFDGELHADSGWTDIFIKPGFEWRVVDAFITNFHLPKSTLVMLVAAFTGRDNILNAYKHAVAEKYRFFSFGDAMFIHH

SEQ ID NO: 73707 - protein, 348 aa, Weissella paramesenteroides; identical to SEQ ID NO: 73706
  misc_feature (1)..(348): tr|A0A4Q7IUR8|A0A4Q7IUR8_WEIPA S-adenosylmethionine:tRN A ribosyltransferase-isomerase OS=Weissella paramesente roides OX=1249 GN=queA PE=3 SV=1

SEQ ID NO: 73708 - protein, 348 aa, Weissella soli
  misc_feature (1)..(348): tr|A0A288Q8J3|A0A288Q8J3_9LACT S-adenosylmethionine:tRN A ribosyltransferase-isomerase OS=Weissella soli OX=155 866 GN=queA PE=3 SV=1
MTEQNYQLSDFDYDLPQELIAQTPLKQRDASRLLVLNALTGEYEDKHFYDILDYVQPGDAIVMNNSRVLPARLHGTRPETGGHVEVLMLRQDHGDVWEVLLKPARKYHIGQEISFGNGELTATVVGELEHGGRYVEFHYEGIFLEILESLGEMPLPPYIKEKLEDQERYQTVYSKVNGSAAAPTAGLHWTPELLKAVEDKGVKLVELTLHVGLGTFRPVEEENIEDHKMHSEFYQLTQAAADTLNEVRQNGGRIIATGTTSIRTLETIGSKFDGELQEDSGWTDIFIKPGYQWTIVDAFITNFHLPKSTLVMLVAAFTGRERILNAYQHAVAEKYRFFSFGDAMFIHK

SEQ ID NO: 73709 - protein, 344 aa, Weissella sp.
  misc_feature (1)..(344): tr|A0A4P6YVB5|A0A4P6YVB5_9LACT S-adenosylmethionine:tRN A ribosyltransferase-isomerase OS=Weissella sp. 26KH-42 OX=2506420 GN=queA PE=3 SV=1
MGYQLEDFDYDLPHELIAQTPLKQRDSSRLLVLDHETGAYEDKHFYDILAELNPGDAVVMNNSRVLPARLHGEKPETHGHVEVLLLNNTEGDTWETLIKPAKKFPVGQEIKFGNGELTAIVTEELEHGGRMVEFHYDGIFLEILEALGEMPLPPYIKEKLADQERYQTVYSKVNGSAAAPTAGLHWTPELLAKVEAKGVKLVELTLHVGLGTFRPVEEENIEDHKMHSEFYQLSQEAADTLNEVHANGGRVIATGTTSIRTLETIGTKFNGKLQADSGWTEIFIKPGYQWTTVDAFITNFHLPKSTLVMLVAAFTGRENILNAYQHAIDEKYRFFSFGDAMFVK

SEQ ID NO: 73710 - protein, 348 aa, Weissella sp.
  misc_feature (1)..(348): tr|A0A139QIZ8|A0A139QIZ8_9LACT S-adenosylmethionine:tRN A ribosyltransferase-isomerase OS=Weissella sp. DD23 OX =1777865 GN=queA PE=3 SV=1
MTEEHYTLEDFDYDLPHELIAQTPLERRDGSRLLELNAVTGEVHDRHFYDILDYLNPGDALVMNNSRVLPARLYGERPGTGGHVEVLLLRQDHGEVWETLVKPAKKYPVGQEIAFGDGQLTAVVTEELEHGGRMIEFKYDGIFLEILESLGEMPLPPYIKEKLDDKERYQTVYSKVNGSAAAPTAGLHWTPELLQKAADKGVKLVELTLHVGLGTFRPVEEENIEDHKMHSEFYQLSAEAAQTLNDVKANGGRIIATGTTSIRTLETIGSKFNGELREDSGWTDIFIKPGYKWTVVDAFITNFHLPKSTLVMLVAAFTGRENILNAYRHAIAEQYRFFSFGDAMFVHK

SEQ ID NO: 73711 - protein, 348 aa, Weissella thailandensis
  misc_feature (1)..(348): tr|A0A512PUG8|A0A512PUG8_9LACT S-adenosylmethionine:tRN A ribosyltransferase-isomerase OS=Weissella thailandens is OX=89061 GN=queA PE=3 SV=1
MTETYTSLNDFDYDLPHELIAQTPLEKRDGSRLLELNADTGELHDRHFYDIIDYLNPGDALVMNNSRVLPARLYGVRPETGGHVEVLLLRQDQDDVWETLVKPARKYPVGQKIVFGDGRLTAEVTEELEHGGRMIKFHYDGIFLEILEELGEMPLPPYIKEKLEDQERYQTVYSKVNGSAAAPTAGLHWTPELLQKVVGKGIKLIELTLHVGLGTFRPVEEDNIDDHKMHSEFYQLSEEAAQTLNEVRANGGRIVATGTTSIRTLETIGAKFDGTLHADSGWTDIFIKPGFKWQVVDAFITNFHLPKSTLVMLVAAFTGRDNILNAYKHAVTEKYRFFSFGDAMFIHH

SEQ ID NO: 73712 - protein, 348 aa, Weissella thailandensis; identical to SEQ ID NO: 73700
  misc_feature (1)..(348): tr|G0UHJ3|G0UHJ3_9LACT S-adenosylmethionine:tRNA ribosy ltransferase-isomerase OS=Weissella thailandensis fsh4- 2 OX=1056112 GN=queA PE=3 SV=1

SEQ ID NO: 73713 - protein, 350 aa, Weissella viridescens
  misc_feature (1)..(350): tr|A0A0R2H8Q2|A0A0R2H8Q2_WEIVI S-adenosylmethionine:tRN A ribosyltransferase-isomerase OS=Weissella viridescens OX=1629 GN=queA PE=3 SV=1
MTEEIPNYTLDDFDYDLPEELIAQTPLKDRDTSRLLVMNAETGDMQDKHFYDIIEYLNPGDALVMNNSRVLPARLYGVRPDTGGHVEVLLLRQDHGDVWETLIKPAKKYRVGQKIDFGDGKLEGVVTEELEHGGRMVEFHYDGIFLEILEELGEMPLPPYIKEKLDDQERYQTVYSKVNGSAAAPTAGLHWTPELLKKVEEKGVKIVELTLHVGLGTFRPVEEENLDDHKMHSEFYQLSQEAADTLNEVHANGGRIVATGTTSIRTLETIGTKFDGKLEADSSWTDIFIRPGYKWTVVDAFITNFHLPKSTLVMLVASFTGREHILNAYQHAIDERYRFFSFGDAMYIYK

SEQ ID NO: 73714 - protein, 53 aa, Weissella viridescens
  misc_feature (1)..(53): tr|A0A380P8C7|A0A380P8C7_WEIVI S-adenosylmethionine:tRN A ribosyltransferase-isomerase OS=Weissella viridescens OX=1629 GN=queA_3 PE=3 SV=1
MDAFITNFHLPKSTLVMLVASFTGREHILNAYQHAIDERYRFFSFGDAMYIYK

SEQ ID NO: 73715 - protein, 344 aa, Wenxinia marina
  misc_feature (1)..(344): tr|A0A0D0QCD0|A0A0D0QCD0_9RHOB S-adenosylmethionine:tRN A ribosyltransferase-isomerase OS=Wenxinia marina DSM 2 4838 OX=1123501 GN=queA PE=3 SV=1
MRLSDFDFDLPEELIATRPARPRSSARLLHAEGGRIADRRVADLPQILRPGDLLVLNDTKVIPARLTGIRRRGEAEARIEVTLAAPRGDGRWSALVKPLRKWAEGETVVFSPRLSAVMEGREGDMAVIRLAAEGDLDAALAEAGAMPLPPYIAAKRAADEADVADYQTVWAARAGAVAAPTASLHFDQELLAALDARGVERTHVTLHVGAGTFLPVKVDDVSEHRMHSEWGEVGAEAAAAMARAKQEGRRVIPVGTTALRLIESSGGAEWRGDTDIFITPGYAFRVADALMTNFHLPKSTLMMLVSALMGPERIRQIYAHAIAARYRFFSYGDGSLLVPDGSSR

SEQ ID NO: 73716 - protein, 357 aa, Wenxinia saemankumensis
  misc_feature (1)..(357): tr|A0A1M6GQR8|A0A1M6GQR8_9RHOB S-adenosylmethionine:tRN A ribosyltransferase-isomerase OS=Wenxinia saemankumens is OX=1447782 GN=queA PE=3 SV=1
MKLSDFDFDLPEDLIATRPARPRSSARMLVADGAAILDRHAYDLPAFLRPGDRLVLNDTRVIPARLSGTRTRGEAVSRIEATLLEPRADGTWAALLKPLRKLREGETVRFSERLSAVLEARDEGQARLRFSLAGEDFDAALAEAGAMPLPPYIAARRPADEADKEDYQTIWAERSGAVAAPTASLHFDAPLMAALAARGVETTRVTLHVGAGTFLPVKVDDISQHRMHAEWGEVTPRAAEEIAATKASGGRVIPVGTTALRLIESAGADGAIAPFEGTTDIFITPGFRFRVADGLVTNFHLPKSTLMMLVSALMGAERIRAVYDHAIAARYRFFSYGDASLLLPGGIGAPLDGKAAP

SEQ ID NO: 73717 - protein, 349 aa, Wenyingzhuangia fucanilytica
  misc_feature (1)..(349): tr|A0A1B1Y8B0|A0A1B1Y8B0_9FLAO S-adenosylmethionine:tRN A ribosyltransferase-isomerase OS=Wenyingzhuangia fucan ilytica OX=1790137 GN=queA PE=3 SV=1
MKLSAFHFDLPDELIAKHPAEYRDESRLMVLNRKEQTIEHKQFKDVIDYFDDGDLMILNNTKVFPARMYGNKEKTGARIEVFLLRELNAENRLWDVLVDPARKIRIGNKLFFGEDDSLVAEVIDNTTSRGRTLRFLYDGSYEEFREKLEELGETPIPKHLERDVEEEDAERFQTIYAKEEGAVAAPTAGLHFSKHLMKRLEIKGVDFSELTLHIGLGTFNPVEVEDLSKHKMDSEQMMVSEETCDAVNKAIDSKRRVCAVGTTVMRAIESTVSSNGRLNPYDGWTNKFIFPPYDFSIANAMITNFHPSKSTLMMQVAAFAGYDFLMKAYKEAIKEGYKFSTYGDAMLII

SEQ ID NO: 73718 - protein, 349 aa, Wenyingzhuangia marina
  misc_feature (1)..(349): tr|A0A1M5TAP8|A0A1M5TAP8_9FLAO S-adenosylmethionine:tRN A ribosyltransferase-isomerase OS=Wenyingzhuangia marin a OX=1195760 GN=queA PE=3 SV=1
MKLSAFHFDLPDELIAKHPAEYRDESRLMVLNRKEQTIEHKQFKDVIDYFDDGDLMILNNTKVFPARMYGNKEKTGARIEVFLLRELNAENRLWDVLVDPARKIRIGNKLFFGEDDSLVAEVIDNTTSRGRTLRFLYDGSYEEFRQKLEDLGETPIPKHLERDVEEEDAERFQTIYAKEEGAVAAPTAGLHFSKHLMKRLEIKGVDFSEITLHIGLGTFNPVEVEDLSKHKMDSEQMMVSEATCEEVNNAIDNKRRVCAVGTTVMRAIESTVSSNGRLNPYDGWTNKFIFPPYDFSIANAMITNFHPSKSTLMMQVAAFAGYDFLMKAYKEAIKEGYKFSTYGDAMLII

SEQ ID NO: 73719 - protein, 353 aa, Wenzhouxiangella marina
  misc_feature (1)..(353): tr|A0A0K0XXY4|A0A0K0XXY4_9GAMM S-adenosylmethionine:tRN A ribosyltransferase-isomerase OS=Wenzhouxiangella mari na OX=1579979 GN=queA PE=3 SV=1
MLFVFDIGHGLKLRMDVADFHFDLPEHLIAQVPLADRSASRLLHLDRSLGTLADRRFADLPELLGPDDLLVFNNTRVIPARLFAQKQTGGRVEVMIERMLGSQSALAQLRANRKPQPGMHLEVGDEGLLRLGEREGEFWRVDIASGPDWAALLERHGHMPLPPYIQREDDAVDRERYQTVYGEEPGAVAAPTAGLHFDQPLLDALARRGVRRGWCTLHVGAGTFQPVRVERVEDHEMHAEWLRVDETLVEQVSETRERGGRVIAVGTTSARSLETAAANGELAPFAGDSRLFIYPGYQFRVVDALITNFHLPGSTLLMMISALAGRETILDAYAHAIEQEYRFFSYGDAMFID

SEQ ID NO: 73720 - protein, 339 aa, Wenzhouxiangella sediminis
  misc_feature (1)..(339): tr|A0A3E1KBR7|A0A3E1KBR7_9GAMM S-adenosylmethionine:tRN A ribosyltransferase-isomerase OS=Wenzhouxiangella sedi minis OX=1792836 GN=queA PE=3 SV=1
MKVSDFRFDLPERLIAQYPLRERSASRLLHLERESGRWHDRRFADLPDLLEPGDLLVFNNTRVIPARLWARKESGGRVEIMIERVVDEREAVVQLRVNRKPRKGARLVVDDHAELEVLGREDEFWRLGVVAGPGWSALLDAVGHMPLPPYIEREDEASDAERYQTVYARVPGAVAAPTAGLHFDEDIFARLDEKGVEQAECTLHVGAGTFQPVRVEEVSEHRMHAEWLSVSADLVAAVNAAKSRGGRVVAVGTTAVRSLETAASSGELAPFEGDSRLFIHPGYRFRAVDAMVTNFHLPGSTLLMLVSAFAGRENVLAAYRHAVEAEYRFFSYGDAMFIS

SEQ ID NO: 73721 - protein, 339 aa, Wenzhouxiangella sp.
  misc_feature (1)..(339): tr|A0A372BW35|A0A372BW35_9GAMM S-adenosylmethionine:tRN A ribosyltransferase-isomerase OS=Wenzhouxiangella sp. 15181 OX=2301224 GN=queA PE=3 SV=1
MKVSDFQFDLPEQLIAQYPLPERSASRLLHLERESGRRHDRQFADLPGLLAPGDLLVFNNTRVIPARLWARKESGGRVEIMVERVVDDREAVVQLRANRKVSFGTRLFVDGEAELEVLGREESFWRLGIVDGPGWSALLEAAGHMPLPPYIERPDEAMDAERYQTVYARVPGAVAAPTAGLHFDERIFERLDDMGVARAECTLHVGAGTFQPVRVDEVTEHRMHAEWLSVSPELVAAVQAARSRGGRVVAVGTTAVRALETAAAEGELAPFAGDSRLFIYPGYEFRVVDAMITNFHLPGSTLLMLVSAFAGRENVLAAYRHAVEQEYRFFSYGDAMFIG

SEQ ID NO: 73722 - protein, 390 aa, Westiellopsis prolifica
  misc_feature (1)..(390): tr|A0A4Q9J9W5|A0A4Q9J9W5_9CYAN S-adenosylmethionine:tRN A ribosyltransferase-isomerase OS=Westiellopsis prolifi ca IICB1 OX=1970206 GN=queA PE=3 SV=1
MQEQLAKTNSHLISKQTSENSELDFSLAGYDYELPTELIAQNPAVPRDSSRLLVVNSQNVGTETAPQHYIFRDLPQILRPGDLLVMNNTRVLPARLYGHKLTGAEVEVLLLEERQHNRWLALVKPGKRFKRGSQIVFTAKVNTDGDHPTTPVPYHSLTATVIATDAATGGRLLQFELPEEVSLLQLLDAFGEIPLPPYITTTEAQSEQYQTVYAQNPGAVAAPTAGLHFTPELLQKLREQNINQAFVTLHVGVGTFRPVEVENVTTHTMHEEWIEVPQNTVEQIRATKAAGGRIIAVGTTVVRALEGAATKGELQPFCGKTNLFIYPGYQWRVVEGMITNFHLPRSSLLMLVSALIGRQRLLNLYQEAIASQYRFYSFGDAMLILPEATI

SEQ ID NO: 73723 - protein, 349 aa, Williamwhitmania taraxaci
  misc_feature (1)..(349): tr|A0A1G6P0K8|A0A1G6P0K8_9BACT S-adenosylmethionine:tRN A ribosyltransferase-isomerase OS=Williamwhitmania tara xaci OX=1640674 GN=queA PE=3 SV=1
MKLSQFKYNLPIELIAKHPVEHRDESRLMVLNRATGKIEHRMFKEIIEYFDEGDVMVFNNTKVFPARLYGNKEKTGAEIEVFLLRELNREQRLWDVLVDPARKIRIGNKLYFGEDDLLVAEVIDNTTSRGRTLRFLFDGDYEEFKATLYKLGETPLPKFIRRNVVPEDRERYQTIYAKHEGAVAAPTAGLHFSRELLKRLEIKGVNNAEITLHVGLGNFRTVDVEDLTKHKMDSEQINISDEAVSLVNKAKESRKHVCAVGTTVLRTLETSVTTDGYLKPYDGWTNKFIFPPYEVLVANRMISNFHLSQSTLLMMVCAFGGFDRVMAAYGEAVKEKYRFGTYGDAMLIL

SEQ ID NO: 73724 - protein, 404 aa, Williamwhitmania taraxaci
  misc_feature (1)..(404): tr|A0A1G6HWL1|A0A1G6HWL1_9BACT S-adenosylmethionine:tRN A ribosyltransferase-isomerase OS=Williamwhitmania tara xaci OX=1640674 GN=SAMN05216323_101357 PE=3 SV=1
MPVRLIPANIEDYNYDLPDCRIAKFPEQKRDHSNLLVFNKGVIGSDQFYNLPNYLSGKILIFNNTKVIKARLLFKRVTGATIEVFCLEPMQPADYQNMFSATGSVDWKCLVGNIKRWKEDELSLNVDIDGSQVRLTAQMIERLDEGVIIRFSWNDDTVCFGQVLEAAGAIPIPPYLNRSEQVIDSDRYQTVYSKWEGSVAAPTAGLHFTDKVIADIITKGNSIAELTLHVGAGTFKPVKAKSIDEHEMHSEHFSITVSTLELLLANMGNIVAVGTTSVRTIESLYWLGVKILTNENSPDLMHLSQWDAYTLPDSYTSTEALTAILNHLKSVGLSQLVGSTQILIAPGYTFKLINALITNFHQPKSTLLLLVSALIGTEWKDVYAYAMDHNFRFLSYGDSSLLIP

SEQ ID NO: 73725 - protein, 349 aa, Winogradskyella arenosi
  misc_feature (1)..(349): tr|A0A368ZNF1|A0A368ZNF1_9FLAO S-adenosylmethionine:tRN A ribosyltransferase-isomerase OS=Winogradskyella areno si OX=533325 GN=queA PE=3 SV=1
MKLSHFNFELPDELLAEHPAEHRDEARLMVLNRAEQTIEHKQFKDIIDYFDEGDVMIMNDTKVFPARLFGNKEKTGARIEVFLLRELNQEQRLWDVLVDPARKIRIGNKLYFGDDETLVAEVIDNTTSRGRTLRFLYDGSYADFRAKLTELGETPLPKYINREVEPEDEERYQTIYAKNEGAVAAPTAGMHFSKHLLKRLEIKGIKTAEVTLHVGLGTFNPVEVEDLSKHKMDSEEIIINKQAAEIVNDAIENKKRVCAVGTTSMRTIESSVSSNGRLNEFEGWTNKFIFPPYDFSIANCMITNFHTPKSTLLMMTSAFAGHDFIKRAYEEAVKEKYKFYSYGDAMLII

SEQ ID NO: 73726 - protein, 349 aa, Winogradskyella aurantia
  misc_feature (1)..(349): tr|A0A265UPA0|A0A265UPA0_9FLAO S-adenosylmethionine:tRN A ribosyltransferase-isomerase OS=Winogradskyella auran tia OX=1915063 GN=queA PE=3 SV=1
MKLSHFNFNLPPELLAEHPAEHRDESRLMVLNREKQTIEHKLFKDVIDYFDEGDVMILNNTKVFPARLFGNKEKTGARIEVFLLRELNQDQRLWDVLVDPARKIRIGNKLYFGEDETLVAEVIDNTTSRGRTLRFLYDGSYNDFRRKLTELGETPLPKYIKRDVEPEDEDRYQTIFAKNEGAVAAPTAGLHFSKHLLKRLEIKGVEMAEVTLHVGLGTFNPVEVEDLSKHKMDSEEIVIDERAAAIVNKGIENKKRVCAVGTTSMRTIESSVSSNGRLNPYDGWTNKFIFPPYEFSIANSMITNFHTPKSTLLMMISAFAGHEFVKHAYEVAVKEKYRFYSYGDAMLII

SEQ ID NO: 73727 - protein, 349 aa, Winogradskyella epiphytica
  misc_feature (1)..(349): tr|A0A2V4WV76|A0A2V4WV76_9FLAO S-adenosylmethionine:tRN A ribosyltransferase-isomerase OS=Winogradskyella epiph ytica OX=262005 GN=queA PE=3 SV=1
MKLSHFNFDLPDELLAEHPAEHRDEARLMVLNREKQTIEHKLFKDIIDYFDEGDVMIMNDTKVFPARLFGNKEKTGARIEVFLLRELNQDQRLWDVLVDPARKIRIGNKLYFGEDETLVAEVIDNTTSRGRTLRFLYDGSYSDFRTKLTELGETPLPKYIKREVEPEDEERYQTIYAKHEGAVAAPTAGLHFSKHLLKRLEIKGVETADVTLHVGLGTFNPVEVEDLSKHKMDSEEIVISKQAADIVNRGIENKKRVCAVGTTSMRTVESSVSSNGRLNEFEGWTNKFIFPPYEFSIANCMITNFHTPKSTLLMMTSAFGGYDFVKRAYEEAVKEKYKFYSYGDAMLII

SEQ ID NO: 73728 - protein, 349 aa, Winogradskyella eximia
  misc_feature (1)..(349): tr|A0A3D9H2X2|A0A3D9H2X2_9FLAO S-adenosylmethionine:tRN A ribosyltransferase-isomerase OS=Winogradskyella eximi a OX=262006 GN=queA PE=3 SV=1
MKLSHFSFDLPDELLAEHPAEHRDESRLMVLNRAKQTIEHKQFKDIIDYFDEGDVMIMNDTKVFPARLYGNKEKTGARIEVFLLRELNQEQRLWDVLVDPARKIRIGNKLYFGDDETLVAEVIDNTTSRGRTLRFLYDGSYADFRTKLTELGETPLPKYINREVEPEDEERYQTIYAKNEGAVAAPTAGLHFSKHLLKRLEIKGVKTAEVTLHVGLGTFNPVEVEDLSKHKMDSEEIIITKAAADIVNEGIEKKKRVCAVGTTSMRTIESSVSSNGRLNEFDGWTNKFIFPPYEFSIANCMITNFHTPKSTLLMMTSAFAGHDFMKKAYEEAVKEKYKFYSYGDAMLII

SEQ ID NO: 73729 - protein, 349 aa, Winogradskyella jejuensis
  misc_feature (1)..(349): tr|A0A1M5PHK0|A0A1M5PHK0_9FLAO S-adenosylmethionine:tRN A ribosyltransferase-isomerase OS=Winogradskyella jejue nsis OX=1089305 GN=queA PE=3 SV=1
MKLSHFNFDLPEELLAEHPAEHRDESRLMVLDRANQTIEHKMFKDVIDYFDEGDVMILNNTKVFPARLYGNKEKTGARIEVFLLRELNQDQRLWDVLVDPARKIRIGNKLYFGDDETLVAEVIDNTTSRGRTLRFLYDGSYNDFRNKLTELGETPLPKYIKREVEPEDEERYQTIYAAKEGAVAAPTAGLHFSKHLLKRLEIKGVERAEVTLHVGLGTFNPVEVEDLSKHKMDSEEIEIKQAAADIINNGIANKKRICAVGTTSMRTIESSVSSSGTLNPYTGWTNKFIFPPYDFSIANCMITNFHTPKSTLLMMISAFAGHDFMKEAYAEAIKEKYKFYSYGDAMLII

SEQ ID NO: 73730 - protein, 349 aa, Winogradskyella pacifica
  misc_feature (1)..(349): tr|A0A3D9LKX4|A0A3D9LKX4_9FLAO S-adenosylmethionine:tRN A ribosyltransferase-isomerase OS=Winogradskyella pacif ica OX=664642 GN=queA PE=3 SV=1
MKLSHFSFDLPDELLAEHPAEHRDESRLMVLDRAKQTIEHKQFKDIIDYFDEGDVMIMNDTKVFPARLFGNKEKTGARIEVFLLRELNQDQRLWDVLVDPARKIRIGNKLYFGDDETLVAEVIDNTTSRGRTLRFLYDGSYTDFRTKLTQLGETPLPKYINREVEPEDEERYQTIYAKNEGAVAAPTAGLHFSKHLLKRLEIKGVKTAEVTLHVGLGTFNPVEVEDLSKHKMDSEEIVIKKSAADIVNEGIEKKKRVCAVGTTSMRTIESSVSSNGRLNEFEGWTNKFIFPPYEFSIANCMITNFHTPKSTLLMMTSAFAGHDFMKKAYEEAVKEKYKFYSYGDAMLII

SEQ ID NO: 73731 - protein, 349 aa, Winogradskyella psychrotolerans
  misc_feature (1)..(349): tr|S7VTK7|S7VTK7_9FLAO S-adenosylmethionine:tRNA ribosy ltransferase-isomerase OS=Winogradskyella psychrotolera ns RS-3 OX=641526 GN=queA PE=3 SV=1
MKLSHFHFDLPDELLAERPAEHRDESRLMVLDRAKQTIEHKQFKDIIDYFDEGDVMIMNDTKVFPARLFGNKEKTGARIEVFLLRELNQDQRLWDVLVDPARKIRIGNKLYFGDDETLVAEVIDNTTSRGRTLRFLYDGSYTDFRTKLTQLGETPLPKYINREVEPEDEERYQTIYAKNEGAVAAPTAGLHFSKHLLKRLEIKGVKTAEVTLHVGLGTFNPVEVEDLSKHKMDSEEIVIKKSAADIVNEGIEKKKRVCAVGTTSMRTIESSVSSNGRLNEFEGWTNKFIFPPYEFSIANCMITNFHTPKSTLLMMTSAFAGHDFMKKAYEEAVKEKYKFYSYGDAMLII

SEQ ID NO: 73732 - protein, 349 aa, Winogradskyella sp.
  misc_feature (1)..(349): tr|A0A1Y0MG77|A0A1Y0MG77_9FLAO S-adenosylmethionine:tRN A ribosyltransferase-isomerase OS=Winogradskyella sp. P C-19 OX=754417 GN=queA PE=3 SV=1
MKLSHFSFELPEELLAEHPAEHRDESRLMVLDRANQTIEHKMFKDIIDYFDEGDVMILNNTKVFPARLYGNKEKTGARIEVFLLRELNQDQRLWDVLVDPARKIRIGNKLYFGEDETLVAEVIDNTTSRGRTLRFLYDGSYSDFRTKLTELGQTPLPKYINRDVEPEDEERYQTIYATNEGAVAAPTAGLHFSKHLLKRLEIKGIERAEVTLHVGLGTFNPVEVEDLSKHKMDSEEIEIKQSAADIINTAQKNKKRICAVGTTSMRTIESSVSSSGTLNPYEGWTNKFIFPPYDFSIANCMITNFHTPKSTLLMMVSAFAGHDFMKEAYAEAVKEKYKFYSYGDAMLII

SEQ ID NO: 73733 - protein, 349 aa, Winogradskyella sp.
  misc_feature (1)..(349): tr|A0A368MIV0|A0A368MIV0_9FLAO S-adenosylmethionine:tRN A ribosyltransferase-isomerase OS=Winogradskyella sp. K YW1333 OX=2282123 GN=queA PE=3 SV=1
MKLSHFNFDLPEELLAEHPAEHRDESRLMVLNREKQTIEHKLFKDIIDYFDEGDVMILNNTKVFPARLFGNKEKTGARIEVFLLRELNQDQRLWDVLVDPARKIRIGNKLYFGEDESLVAEVIDNTTSRGRTLRFLYDGSYMDFRRKLNELGQTPLPKYIKRDVEPEDEERYQTIFAKNEGAVAAPTAGLHFSKHLLKRLEIKGVDMAEVTLHVGLGTFNPVEVEDLSKHKMDSEEISIDERSATIVNRGIENKKRVCAVGTTSMRTIESSVSSSGRLNPYEGWTNKFIFPPYDFSIANSMITNFHTPKSTLLMMVSAFAGHDFIKKAYDEAVKEKYRFYSYGDAMLII

SEQ ID NO: 73734 - protein, 349 aa, Winogradskyella thalassocola
  misc_feature (1)..(349): tr|A0A1G8K390|A0A1G8K390_9FLAO S-adenosylmethionine:tRN A ribosyltransferase-isomerase OS=Winogradskyella thala ssocola OX=262004 GN=queA PE=3 SV=1
MKLSHFHFDLPDELLAERPAEHRDESRLMVLDRAKQTIEHKQFKDIIDYFDEGDVMIMNDTKVFPARLFGNKEKTGARIEVFLLRELNQDQRLWDVLVDPARKIRIGNKLYFGDDETLVAEVIDNTTSRGRTLRFLYDGSYSDFRTKLTQLGETPLPKYINREVEPEDEERYQTIYAKNEGAVAAPTAGLHFSKHLLKRLEIKGIKTAEVTLHVGLGTFNPVEVEDLSKHKMDSEEIVIKQSAADIVNNAIENKKRVCAVGTTSMRTIESSVSSNGRLNEFEGWTNKFIFPPYDFSIANCMITNFHTPKSTLLMMTSAFAGHDFMKKAYEEAVKEKYRFYSYGDAMLII

SEQ ID NO: 73735 - protein, 349 aa, Winogradskyella wandonensis
  misc_feature (1)..(349): tr|A0A4R1KR07|A0A4R1KR07_9FLAO S-adenosylmethionine:tRN A ribosyltransferase-isomerase OS=Winogradskyella wando nensis OX=1442586 GN=queA PE=3 SV=1
MKLSHFNFDLPEELLAEHPAEHRDESRLMVLDRANQTIEHKMFKDVIDYFDEGDVMILNNTKVFPARLYGNKEKTGARIEVFLLRELNQEQRLWDVLVDPARKIRIGNKLYFGDDETLVAEVIDNTTSRGRTLRFLYDGSYNDFRNKLNELGETPLPKYIKRDVEPEDEERYQTIYAAKEGAVAAPTAGLHFSKHLLKRLEIKGVERAEVTLHVGLGTFNPVEVEDLSKHKMDSEEIEIKQSAADIINRGIANKKRVCAVGTTSMRTIESSVSSSGTLNPYSGWTNKFIFPPYDFSIANSMITNFHTPKSTLLMMISAFAGHDFMKEAYAQAVKEKYRFYSYGDAMLII

SEQ ID NO: 73736 - protein, 343 aa, Woeseia oceani
  misc_feature (1)..(343): tr|A0A193LEC3|A0A193LEC3_9GAMM S-adenosylmethionine:tRN A ribosyltransferase-isomerase OS=Woeseia oceani OX=154 8547 GN=queA PE=3 SV=1
MQLADFNYDLPDALIARYPEAERRASRLLLVDPASNSLSDRRFAELPTLLHANDLLVFNDTRVIKARLVGSKASGGRVEILVERQLDETDVLAHVRASKSPKAGGRLLFADNGQAEVLDRDGALFHLRFDRPVAPYLDAFGEMPLPPYLERRAEASDTERYQTVYARQPGAVAAPTAGLHFDQAMLAETAAKGVQQTYVTLHVGAGTFQNLRAEQVAENRLHSERVELSEQVVRAVAETRERQGRVIAVGTTSVRALEFAARDGQLKPCSGETDLFIRPGYRWHVVDAMLTNFHLPQSSLLMLVAAFAGTRRVLGAYQHAIEQRYRFFSYGDAMLLTGRGADQ

SEQ ID NO: 73737 - protein, 338 aa, Woeseia sp.
  misc_feature (1)..(338): tr|A0A2E6ECR6|A0A2E6ECR6_9GAMM S-adenosylmethionine:tRN A ribosyltransferase-isomerase OS=Woeseia sp. OX=198063 6 GN=queA PE=3 SV=1
MFLSDFDYELPDKLIARYPAPKRSGSRLLVVGPTLDDRVFSDLPQLLNNDDLLVCNNTRVVRARLVGKKETGGSVEILVERLLENNEVSAQVRASKSPTAGSIIVLPGDCAVTVLSRLDDMFRLRFSAPVTPYLEQHGKIPLPPYLGRGEVPADSERYQTVYARAAGAVAAPTAGLHFDQRLLDEIKRCGVRQAFITLHVGAGTFQPLRHDFVHDNSLHSERCFIEHKVCKAVRTARQSGNRVIAVGTTSVRALEAASINGGLSPYAGETDLFITPGYQFQSVDAILTNFHLPKSSLLMLVAAFGGHRRIMAAYEHAVSKGYRFFSYGDAMLLLPEKV

SEQ ID NO: 73738 - protein, 338 aa, Woeseia sp.
  misc_feature (1)..(338): tr|A0A2E6ZJF1|A0A2E6ZJF1_9GAMM S-adenosylmethionine:tRN A ribosyltransferase-isomerase OS=Woeseia sp. OX=198063 6 GN=queA PE=3 SV=1
MLISDFNYNLPNELIARHPTSDRRDSRFLVVEDNISDRRFVDLPNLIRPNDLFVFNDTRVIKARLSARKDTGGKVEILIERITNSSSALVHLKSNKSPKLGINLILEDDVKAKILSRKKDLFELQFTTDIASFIEVHGKVPLPPYIDRSADISDDDRYQTVYAGDPGAIAAPTAGLHFDNKMLEEIKGAGANLSWLTLHVGAGTFQSLREEQIRDNKLHSERVEVSEECCKAVNKAKSSGGRIIAVGTTSVRALECASKNGMMKSFSGETDMFIYPGYNFQTVDAMITNFHLPKSSLLMLVAAFAGKNRILDAYKHAVSEKYRFFSYGDAMFLTPENT

SEQ ID NO: 73739 - protein, 342 aa, Woeseiaceae bacterium
  misc_feature (1)..(342): tr|A0A2E5CIS3|A0A2E5CIS3_9GAMM S-adenosylmethionine:tRN A ribosyltransferase-isomerase OS=Woeseiaceae bacterium OX=2026806 GN=queA PE=3 SV=1
  misc_feature (236)..(237): Xaa can be any naturally occurring amino acid
  misc_feature (257)..(257): Xaa can be any naturally occurring amino acid
  misc_feature (263)..(263): Xaa can be any naturally occurring amino acid
  misc_feature (266)..(266): Xaa can be any naturally occurring amino acid
  misc_feature (274)..(274): Xaa can be any naturally occurring amino acid
  misc_feature (281)..(281): Xaa can be any naturally occurring amino acid
  misc_feature (295)..(295): Xaa can be any naturally occurring amino acid
  misc_feature (308)..(308): Xaa can be any naturally occurring amino acid
  misc_feature (322)..(322): Xaa can be any naturally occurring amino acid
  misc_feature (341)..(342): Xaa can be any naturally occurring amino acid
MYISDYDYDLPNELIAKYPLDNRSDSRLMILDCERKEIIDTSFRKFYEYTKSNDLLVFNDTKVINARINGKKDTGGRVEVLIERILTETQANVFIKASKSPKIGSSLFFPKNYIAEILNKSGGTYKVEFSVPINEVISNIGSIPIPPYLNRESKDIDNRRYQTIYAKKYGAVAAPTAGLHFDEEMLNRIRPSSISLAYITLHIGAGTFRPLKQENIDNNQLHSEYFEIEKKTIEAXXQAKNKNGRVIAIGTTSARAXEAHSTXKSXESWKGETXIFIRPGXRFQVVDALLTNFHXPKSSLLMLISALXNKEFIMNAYNYAVXKKYRFYSYGDAMLILPKGXX

SEQ ID NO: 73740 - protein, 347 aa, Woeseiaceae bacterium
  misc_feature (1)..(347): tr|A0A2D9M274|A0A2D9M274_9GAMM S-adenosylmethionine:tRN A ribosyltransferase-isomerase OS=Woeseiaceae bacterium OX=2026806 GN=queA PE=3 SV=1
  misc_feature (9)..(10): Xaa can be any naturally occurring amino acid
  misc_feature (18)..(18): Xaa can be any naturally occurring amino acid
  misc_feature (28)..(29): Xaa can be any naturally occurring amino acid
  misc_feature (35)..(35): Xaa can be any naturally occurring amino acid
  misc_feature (42)..(42): Xaa can be any naturally occurring amino acid
  misc_feature (49)..(49): Xaa can be any naturally occurring amino acid
  misc_feature (60)..(60): Xaa can be any naturally occurring amino acid
  misc_feature (100)..(100): Xaa can be any naturally occurring amino acid
  misc_feature (115)..(115): Xaa can be any naturally occurring amino acid
  misc_feature (131)..(131): Xaa can be any naturally occurring amino acid
  misc_feature (144)..(144): Xaa can be any naturally occurring amino acid
  misc_feature (191)..(193): Xaa can be any naturally occurring amino acid
  misc_feature (195)..(195): Xaa can be any naturally occurring amino acid
  misc_feature (199)..(199): Xaa can be any naturally occurring amino acid
  misc_feature (201)..(201): Xaa can be any naturally occurring amino acid
  misc_feature (206)..(206): Xaa can be any naturally occurring amino acid
  misc_feature (228)..(228): Xaa can be any naturally occurring amino acid
  misc_feature (230)..(230): Xaa can be any naturally occurring amino acid
  misc_feature (233)..(233): Xaa can be any naturally occurring amino acid
  misc_feature (252)..(252): Xaa can be any naturally occurring amino acid
  misc_feature (288)..(288): Xaa can be any naturally occurring amino acid
  misc_feature (294)..(294): Xaa can be any naturally occurring amino acid
  misc_feature (305)..(305): Xaa can be any naturally occurring amino acid
  misc_feature (311)..(311): Xaa can be any naturally occurring amino acid
  misc_feature (315)..(315): Xaa can be any naturally occurring amino acid
MKVDDFEFXXPHALIAQXPVQTRDQARXXVLDRAXGISTHTXVSLLADXFQPGDVLALNXTKVFPARLYGHRIPSGGSVKCLLMREVNPEHWDALVHPGXKLGVGEKMLFEGNGXQLFGEVVSRSAFGRRXVRLWSDQGDPWEXINVIGHIPLPPYIKRPDDQRDRDRYQTVYARTRGSVAAPTAGLHFTXXXFXSLAXRXVIRAXLTLHVGYGTFKPLRTDRVEDHXIXAEXFEISEETAHVINRALDENXRVIAVGTTTTRALETSVRHGGGRIVPGKGVSDLFIXPGFSFXAVSGIMTNFHXPKSSLXMLVXAFAGRDCLLAAYDEAVRMNYRFYSYGDAMLIV

SEQ ID NO: 73741 - protein, 340 aa, Wohlfahrtiimonas chitiniclastica
  misc_feature (1)..(340): tr|L8XYE4|L8XYE4_9GAMM S-adenosylmethionine:tRNA ribosy ltransferase-isomerase OS=Wohlfahrtiimonas chitiniclast ica SH04 OX=1261130 GN=queA PE=3 SV=1
MKDKISDYDYHLPESLIAQFPKEDRESSRLLVAKGDEIEDKIFKDIIDYIEPGDLLVINNTRVLPARVFAHKETGGAVEILVERLLSETSFLAQTRASKSPKEGQIIYVEDQPVFKMVARDDSFFIFETVDGSAVFPILEKMGHMPLPPYIVRDDSDFDKERYQTVFSKEKGAVAAPTAGLHFTKELMHAIEEKGASFVEVTLHVGAGTFKPVREEALDQHVMHKEWISVPQSAIDRILATKAAGKRVIAVGTTVCRSLETAALDGTLKAFEGDTNIFIKPGFEFHVIDALITNFHLPKSTLMVLVSTFMGYERIQKIYQHAVDDQYRFFSYGDAMILMP

SEQ ID NO: 73742 - protein, 340 aa, Wohlfahrtiimonas chitiniclastica; identical to SEQ ID NO: 73741
  misc_feature (1)..(340): tr|A0A165HAG8|A0A165HAG8_9GAMM S-adenosylmethionine:tRN A ribosyltransferase-isomerase OS=Wohlfahrtiimonas chit iniclastica OX=400946 GN=queA PE=3 SV=1

SEQ ID NO: 73743 - protein, 340 aa, Wohlfahrtiimonas sp.
  misc_feature (1)..(340): tr|A0A256C4S8|A0A256C4S8_9GAMM S-adenosylmethionine:tRN A ribosyltransferase-isomerase OS=Wohlfahrtiimonas sp. G9077 OX=1980118 GN=queA PE=3 SV=1
MKDKISDYDYHLPESLIAQFPKEDRESSRLLVAKGDEIEDKIFKDIIDYIEPGDLLVINNTRVLPARVFAHKETGGAVEILVERLLSDTSFLAQTRASKSPKEGQIIYVEDQPVFKMVARDDSFFIFETVDGSAVFPILEKMGHMPLPPYIVRDDSDFDKERYQTVFSKEKGAVAAPTAGLHFTKELMQAIEEKGASFVEVTLHVGAGTFKPVREEALDQHVMHKEWISVPQSAVDRILATKAAGKRVIAVGTTVCRSLETAALDGTLKAFEGDTNIFIKPGFEFHVIDALITNFHLPKSTLMVLVSTFMGYDRIQKIYQHAVNDQYRFFSYGDAMILMP

SEQ ID NO: 73744 - protein, 343 aa, Wolinella succinogenes
  misc_feature (1)..(343): tr|Q7M9J7|Q7M9J7_WOLSU S-adenosylmethionine:tRNA ribosy ltransferase-isomerase OS=Wolinella succinogenes (strai n ATCC 29543 / DSM 1740 / LMG 7466 / NCTC 11488 / FDC 6 02W) OX=273121 GN=queA PE=3 SV=1
MKSNDPFSLLTYDYELPEELIASHPIHPKNQARLLVYNRKDGSILHTHFSEFERFIPQEALIVFNDTKVIKARFFGKKESGGGVELLYHKPLGVERFWVQIKGRVKLGQTLLLAEGWRAQILALGEGGFREVSFWDERGVKVELAQLLLFLERQGHVPLPPYIKRTDTALDEVEYQSVFAKHEGAIAAPTASLHFEETDMVRLKERFDHAFVTLHVGAGTFLGVESEDIRNHSMHKERYFISESSAQKIKQASQILAIGTTAARTIEYYVRTSKKEGECDLFLHPGNPPLKTTALLTNFHLPQSTLLMLVSAFITPKECQRVYAQALKERYRFFSYGDGMLIL

SEQ ID NO: 73745 - protein, 362 aa, Xanthobacter autotrophicus
  misc_feature (1)..(362): sp|A7IN97|QUEA_XANP2 S-adenosylmethionine:tRNA ribosylt ransferase-isomerase OS=Xanthobacter autotrophicus (str ain ATCC BAA-1158 / Py2) OX=78245 GN=queA PE=3 SV=1
MRVDAFDFDLPEEHIALRPAEPRDAARMLVVRPGGAPELSDLKVRDLPDFITANDALVVNDTRVIPAALEGVRERDGGSAVRIEANLIKRLDASRWQAFAKPGKRLRVGDRVRFGGEGSACLLGALDAQIAAKEDDGSVILAFDLAGTALDEAVTAVGHMPIPPYIAARRAEDDRDRADYQTLFARVSGSVAAPTASLHFTPELMARIAATGASMHTVTLHVGAGTFLPVKAEDTTGHRMHAEWGEVSADTAAALNAVKAKGGRIFTVGSTSTRLIESATGEDGTIRPFVGETDIFITPGYRFRAVDGMLTNFHLPRSTLVMLVAAFVGHEAQKRAYAHAIAAGYRFYSYGDACLLLPEGGP

SEQ ID NO: 73746 - protein, 362 aa, Xanthobacter tagetidis
  misc_feature (1)..(362): tr|A0A3L7A0Z3|A0A3L7A0Z3_9RHIZ S-adenosylmethionine:tRN A ribosyltransferase-isomerase OS=Xanthobacter tagetidi s OX=60216 GN=queA PE=3 SV=1
MRVDAFDFELPEDRIALRPAEPRDAARLLVVRPGGAPELEDRGVRDLPSFLKAGDALVVNDTRVIPAALEGARARDGGAPVRIEATLVKRIGPARWRAFAKPGKRLKAGDRIRFGGEGSACLLGTLDATVEAKEEDGSVLLAFDLSGPALDEAIAQVGHMPIPPYIAARRHEDDRDREDYQTLFARVSGSVAAPTASLHFTPDLLARIAAAGVERHTVTLHVGPGTFLPVKADDTSGHRMHAEWGEVTRDTADALNAVKARGGRILTVGSTSTRLIESAAGEGGLIRPFVGETDIFITPGYRFKAIDGMLTNFHLPRSTLVMLVAALIGHDTQKRAYAHAIAQGYRFYSYGDACLLLPEGGA

SEQ ID NO: 73747 - protein, 358 aa, Xanthobacteraceae bacterium
  misc_feature (1)..(358): tr|A0A521W165|A0A521W165_9RHIZ S-adenosylmethionine:tRN A ribosyltransferase-isomerase OS=Xanthobacteraceae bac terium OX=2021379 GN=queA PE=3 SV=1
MRTDLFDFALPPDRIALRPMSPRDAARLLVVRPGLPFSDRIVRDLPGLLEPGDRLVINDTKVIAAQLTGRRVGRDTEPRIEATLIKRLDGSRWQALVKPAKKLAAGDRLRFGAEGRVCLLGSLDATVEDKGEAGEVTLAFDFHGPVLDQAIADVGSPPLPPYIAGKRAPDADDIADYQTMFARHEGAVAAPTAGLHFTPGLTAALEERGIALSRVTLHVGAGTFLPVKVEDTADHPMHGEWGEVSAQTARELNATRAEGGRIVAVGTTSLRILESAAGEDGAVRPFSGETAIFITPGYAFRTADVLMTNFHLPRSTLFMLVSAFAGIERMKEAYAHAIAAGYRFYSYGDACLLFRAAA

SEQ ID NO: 73748 - protein, 349 aa, Xanthomarina gelatinilytica
  misc_feature (1)..(349): tr|M7ND23|M7ND23_9FLAO S-adenosylmethionine:tRNA ribosy ltransferase-isomerase OS=Xanthomarina gelatinilytica O X=1137281 GN=queA PE=3 SV=1
MKLSHFNFNLPDELLAEYPAENRDESRLMVLNREKQTIEHKMFKDLIDYFDKDDVMILNNTKVFPARLFGNKEKTGARIEVFLLRELNEEQRLWDVLVDPARKIRIGNKLYFGEGESLVAEVIDNTTSRGRTLRFLYDGSYRDFRVKLRELGETPLPKYIKREVEPEDEERYQTIFAKNEGAVAAPTAGLHFSKHLLKRLEIKGVNLAEVTLHVGLGTFNPVEVEDLSKHKMDSEEIIINKEAVETINTGIKNKRRVCAVGTTAMRAIESSVSSSGTLNEFDGWSNKFIFPPYDFSIANSMITNFHTPKSTLLMMVSAFAGHDFIKKAYEEAIKEKYKFYSYGDAMLII

SEQ ID NO: 73749 - protein, 349 aa, Xanthomarina sp.
  misc_feature (1)..(349): tr|A0A2D8D073|A0A2D8D073_9FLAO S-adenosylmethionine:tRN A ribosyltransferase-isomerase OS=Xanthomarina sp. OX=1 931211 GN=queA PE=3 SV=1
  misc_feature (239)..(239): Xaa can be any naturally occurring amino acid
  misc_feature (301)..(301): Xaa can be any naturally occurring amino acid
  misc_feature (322)..(322): Xaa can be any naturally occurring amino acid
MKLSHFNFNLPDELLAEYPAENRDESRLMVLNREKQTIEHKMFKDLIDYFDKDDVMILNNTKVFPARLFGNKEKTGARIEVFLLRELNEEQRLWDVLVDPARKIRIGNKLYFGEGESLVAEVIDNTTSRGRTLRFLYDGSYRDFRVKLRELGETPLPKYIKREVEPEDEERYQTIFAKNEGAVAAPTAGLHFSKHLLKRLEIKGVNLAEVTLHVGLGTFNPVEVEDLSKHKMDSEEIIXNKEAVETINTGIKNKRRVCAVGTTAMRAIESSVSSSGTLNEFDGWSNKFIFPPYDFSIANSXITNFHTPKSTLLMMVSAFAGXDFIKKAYEEAIKEKYKFYSYGDAMLII

SEQ ID NO: 73750 - protein, 343 aa, Xanthomonadaceae bacterium
  misc_feature (1)..(343): tr|A0A2A3VJA0|A0A2A3VJA0_9GAMM S-adenosylmethionine:tRN A ribosyltransferase-isomerase OS=Xanthomonadaceae bact erium NML93-0792 OX=2032566 GN=queA PE=3 SV=1
MKKSDFHFDLPEALIAQAPLAERSASRLLLVPPGEGAFDDRHVRDLPDLLQPGDLLVFNDTRVIPARLFGQKASGGRVEILIERLLPGNEARAQIGASKAPKPGGRIVLDGGGEAEVLARDDGFYHLRFHVDDALESWLLKAGRMPLPPYIRREPGQDDAERYQTVFAREVGAVAAPTAGLHFDDALLTRLRDRGVQFGHVTLHVGAGTFQPMRVDDIREHRMHSEWLNVGAELVAQIRRTREAGGRVIAVGTTVVRALESASVDGELHPFAGETRIFIFPGYRIRSVDALVTNFHLPESTLLMLVSAFAGKDRILAAYNHAVRARYRFFSYGDAMLLWSGHS

SEQ ID NO: 73751 - protein, 356 aa, Xanthomonadaceae bacterium
  misc_feature (1)..(356): tr|A0A1E4LB20|A0A1E4LB20_9GAMM S-adenosylmethionine:tRN A ribosyltransferase-isomerase OS=Xanthomonadaceae bact erium SCN 69-48 OX=1660171 GN=queA PE=3 SV=1
MRGFLAAPAPLKTSDFHYDLPQELIAQAPLPERSASRLLHVPPGDAPFADLHVRDLPSLLQPGDLLVFNDTRVIPARLFGAKATGGRVEILIERLLPNNEARVQLGVSKPPQVGSRVALDAGGEAEVLARLDDGFWRLRFHVDGPLEAWLQHAGQLPLPPYIERRPDAADAERYQTVFARETGAVAAPTAGLHFDEALLDALRARGIEFGHVTLHVGAGTFQPVRVDDVHNHRMHSEWINVGAELVAKVRRTRAAGGRVIAVGTTVVRALESAMVDGELLPFAGDTSIFIFPGYKIRSIDALMTNFHLPESTLLMLVSAFAGKQRMFAAYEHAVRQRYRFFSYGDAMLLWPQESVT

SEQ ID NO: 73752 - protein, 370 aa, Xanthomonadales bacterium
  misc_feature (1)..(370): tr|A0A259R4C0|A0A259R4C0_9GAMM S-adenosylmethionine:tRN A ribosyltransferase-isomerase OS=Xanthomonadales bacte rium 14-68-21 OX=1970612 GN=queA PE=3 SV=1
MNRQPGRGRVRRCRYNGRLPPSDVAALKKSDFHYDLPEELIAQAPLAERSASRLLVVPPAPAALEDRHVRDLPELLQPGDLLVFNDTRVIPARLFGHKASGGRVEILIERLLGGQQARAQVGASKSPKPGSRIQLDAGGEAEVLGRDGEFYLLRFDVPESLESWLVHAGRLPLPPYIHREPGADDRERYQTVFARQVGAVAAPTAGLHFDEALLERLRARGVGFGHITLHVGAGTFQPVRVDDLSRHVMHREWLNVGAELVQQVRRTRAAGGRVIGVGTTVVRALESAMHEGELHPFAGETQIFITPGYRIRSVDAMVTNFHLPESTLLMMISAFAGRQRVFDAYAHAIAGRYRFFSYGDAMLLFPQPDA

SEQ ID NO: 73753 - protein, 353 aa, Xanthomonadales bacterium
  misc_feature (1)..(353): tr|A0A1Q4FR91|A0A1Q4FR91_9GAMM S-adenosylmethionine:tRN A ribosyltransferase-isomerase OS=Xanthomonadales bacte rium 63-13 OX=1895867 GN=queA PE=3 SV=1
MKKSDFHFDLPPELIAQQPLAERSASRLLLLDAERASMADRQLRELPELLRAGDLLVFNDTRVLPARLFGRKESGGAVEILIERVSGTHEATAQLGVSKKPKEGAAIELADGSLARVLGRQGEFFRLRFESPEPLEKLLLKLGRMPLPPYIERTADALDSERYQTVFAREPGAVAAPTAGLHFDQSLLDRLANRGIESGHITLHVGAGTFQPMRAEKLEDHTMHREWLNVGAELVDRIHHTRARGGRVIAVGTTVVRALESASHDGVLEPFAGETQIFIFPGYRFSSIDALLTNFHLPESTLLMLVSAFAGREFILDAYRHAVEQHYRFFSYGDAMLVWPLGAGSRESGIGNG

SEQ ID NO: 73754 - protein, 371 aa, Xanthomonas albilineans
  misc_feature (1)..(371): tr|D2UE23|D2UE23_XANAP S-adenosylmethionine:tRNA ribosy ltransferase-isomerase OS=Xanthomonas albilineans (stra in GPE PC73 / CFBP 7063) OX=380358 GN=queA PE=3 SV=1
MPSGDGVAGYNARPWFCDPPALKKSDFHYDLPDDLIAQAPLAERSASRLLWVPPAPAPFQDRQVRDLPQLLRVGDLLIFNDTRVIPARLFGQKQTGGRVEILIERLLGGQCARAQLGVSKSPQVGARIALDAGGEAEVLSRDGAFYQLQFHVDGTLEHWLQQAGRLPLPPYIRREPGLEDRERYQTVFAREAGAVAAPTAGLHFDVPLLQALHERGVEVGHITLHVGAGTFQPVRVEALEQHQMHHEWLNVGASLVEQVRRTRAAGGRVIAVGTTVVRALESASKDGELYPFAGETQLFILPGYRIRSVDAMVTNFHLPESTLLMMVAAFAGRERIFAAYRHAIAQRYRFFSYGDAMLLWSAQATLAEVES

SEQ ID NO: 73755 - protein, 356 aa, Xanthomonas alfalfae
  misc_feature (1)..(356): tr|A0A1S1XFP5|A0A1S1XFP5_9XANT S-adenosylmethionine:tRN A ribosyltransferase-isomerase OS=Xanthomonas alfalfae OX=366650 GN=queA PE=3 SV=1
MKKSDFHYELPEELIAQAPLAERAASRLLVVPPAPAAFGDRQVRDLPELLQPGDLLIFNDTRVIPARLFGQKASGGRVEILIERLLGEREARVQIGASKSPKAGSVIALDAGGQAEVLGRDGEFYLLRFQIPTPLEHWLLEAGRLPLPPYIRREPGVEDRERYQTVFAREVGAVAAPTAGLHFDEPLLARLRERGVEFGHVTLHVGAGTFQPVRVDKLDQHVMHTEWLNVGAALVEQVRRTRARGGRVIAVGTTVVRSLESAWRKTEAAPEGELQPFAGETQIFILPGYRIRSVDAMVTNFHLPESTLMMMVCAFAGRERIFAAYHHAIAQRYRFFSYGDAMLLWGGESGVGNGES

SEQ ID NO: 73756 - protein, 356 aa, Xanthomonas arboricola
  misc_feature (1)..(356): tr|A0A2S6ZUB2|A0A2S6ZUB2_9XANT S-adenosylmethionine:tRN A ribosyltransferase-isomerase OS=Xanthomonas arboricol a pv. arracaciae OX=487851 GN=queA PE=3 SV=1
MKKSDFNYSLPDELIAQAPLAERAASRLLVVPPAPQALVDRQVRDLPDLLQPGDLLIFNDTRVIPARLFGQKASGGRVEILIERLLGEREARVQIGASKSPKAGSLIALDAGGQAEVLGRDGEFYLLRFEIPTPLEHWLLEAGRLPLPPYIRREPGVEDRERYQTVFAREVGAVAAPTAGLHFDEALLARLRERGVEFGHVTLHVGAGTFQPVRVDALDQHVMHTEWLNVGAALVEQVRRTRARGGRVIAVGTTVVRSLESAWRTTDAAPEGELLPFAGETQIFILPGYRIRSVDAMVTNFHLPESTLLMMVSAFAGRERIFAAYQHAIEQRYRFFSYGDAMLLWSRDWGVGSGDS

SEQ ID NO: 73757 - protein, 356 aa, Xanthomonas arboricola
  misc_feature (1)..(356): tr|A0A2S6Z4C7|A0A2S6Z4C7_9XANT S-adenosylmethionine:tRN A ribosyltransferase-isomerase OS=Xanthomonas arboricol a pv. populi OX=487823 GN=queA PE=3 SV=1
MKKSDFHYSLPDELIAQAPLAERAASRLLVVPPSPQALVDRQVRDLPELLQPGDLLIFNDTRVIPARLFGQKASGGRVEILIERLLGERQARVQIGASKSPKAGSLIALDAGGQAEVLGRDGEFYLLRFEIPTPLEHWLPEAGQLPLPPYIRREPGMEDRERYQTVFAREVGAVAAPTAGLHFDEALLAQLRERGVEFGHVTLHVGAGTFQPVRVDALDQHVMHTEWLNVGAALVEQVRRTRARGGRVIAVGTTVVRSLESAWRKTDAAPDGELLPFAGETQIFILPGYRIRSVDAMVTNFHLPESTLLMMVSAFAGRERIFAAYQHAIEQRYRFFSYGDAMLLWGRESGIGNGES

SEQ ID NO: 73758 - protein, 356 aa, Xanthomonas axonopodis
  misc_feature (1)..(356): tr|A0A2S6XZ17|A0A2S6XZ17_9XANT S-adenosylmethionine:tRN A ribosyltransferase-isomerase OS=Xanthomonas axonopodi s pv. begoniae OX=473403 GN=queA PE=3 SV=1
MKKSDFHYDLPDELIAQAPLAERAASRLLVVPPSPQALADRQVRDLPELLQPGDLLIFNDTRVIPARLFGQKASGGRVEILIERLLGEREARVQIGASKSPKAGSVIALDAGGQAEVLGRDGEFYLLRFQIPTPLEHWLLEAGRLPLPPYIRREPGVEDRERYQTVFAREVGAVAAPTAGLHFDEPLLARLRERGVEFGHVTLHVGAGTFQPVRVDKLDQHVMHKEWLNVGAALVEQVRRTRARGGRVIAVGTTVVRSLESAWRITEAAPEGELQPFAGETQIFILPGYCIRSVDAMVTNFHLPESTLMMMVSAFAGRERIFAAYHHAIAQRYRFFSYGDAMLLWGRESGIGNGES

SEQ ID NO: 73759 - protein, 356 aa, Xanthomonas axonopodis
  misc_feature (1)..(356): sp|Q8PJL6|QUEA_XANAC S-adenosylmethionine:tRNA ribosylt ransferase-isomerase OS=Xanthomonas axonopodis pv. citr i (strain 306) OX=190486 GN=queA PE=3 SV=1
MKKSDFHYDLPDELIAQAPLAERAASRLLVVPPSPQALADRQVRDLPELLQPGDLLIFNDTRVIPARLFGQKASGGRVEILIERLLGERQARVQIGASKSPKAGSLIALDAGGQAEVLGRDGEFYLLRFEIPTPLEHWLLEAGRLPLPPYIRREPGVEDRERYQTVFAREVGAVAAPTAGLHFDEPLLARLRERGVEFGHVTLHVGAGTFQPVRVDKLDQHVMHKEWLNVGAALVEQVRRTRARGGRVIAVGTTVVRSLESAWRKTEAAPEGELQPFAGETQIFILPGYRIRSVDAMVTNFHLPESTLMMMVSAFAGRERIFAAYHHAIAQRYRFFSYGDAMLLWGRESGLGNGES

SEQ ID NO: 73760 - protein, 389 aa, Xanthomonas bromi
  misc_feature (1)..(389): tr|A0A1C3NQZ8|A0A1C3NQZ8_9XANT S-adenosylmethionine:tRN A ribosyltransferase-isomerase OS=Xanthomonas bromi OX= 56449 GN=queA PE=3 SV=1
MVKRWRCCDSPFPTLHSRPQLQCPAHQPTQPAALKKSDFHYDLPDELIAQVPLAERAASRLLVVPPSPQALADRQVRDLPELLQPGDLLIFNDTRVIPARLFGQKASGGRVEILIERLLGEREARVQIGASKSPKAGSLIALDAGGQAEVLGRDGEFYLLRFEIPTPLEHWLLEAGRLPLPPYIRREPGIEDRERYQTVFAREVGAVAAPTAGLHFDEPLLARLRERGVEFGHVTLHVGAGTFQPVRVDKLDQHVMHKEWLNVGAALVEQVRRARARGGRVIAVGTTVVRSLESAWRTTDAAPEGELQPFAGETQIFILPGYRIRSVDAMVTNFHLPESTLMMMVSAFAGRERIFEAYQHAIAQRYRFFSYGDAMLLWGREWGIGSGES

SEQ ID NO: 73761 - protein, 356 aa, Xanthomonas campestris
  misc_feature (1)..(356): sp|Q8P867|QUEA_XANCP S-adenosylmethionine:tRNA ribosylt ransferase-isomerase OS=Xanthomonas campestris pv. camp estris (strain ATCC 33913 / DSM 3586 / NCPPB 528 / LMG 568 / P 25) OX=190485 GN=queA PE=3 SV=1
MKKSDFHYDLPEELIAQAPLAERAASRLLVVPPTPAAFSDRQVRDLPELLQPGDLLIFNDTRVIPARLFGQKASGGRVEILIERLLGGQQARAQIGASKSPKAGSVIALDAGGQAEVLGRDGEFYLLRFDIPAPLEHWLLDAGRLPLPPYIRREPGLDDRERYQTVFAREVGAVAAPTAGLHFDEALLARLRERGVEFGHVTLHVGAGTFQPVRVDALDKHVMHTEWLNVGAALVEQVRRTRARGGRVIAVGTTVVRSLESAWRKTDDAPHGELQSFAGETQIFILPGYRIRSVDAMVTNFHLPESTLLMMVSAFAGCDRIFAAYAHAIAQRYRFFSYGDAMLLWSREWGIGNGES

SEQ ID NO: 73762 - protein, 356 aa, Xanthomonas campestris
  misc_feature (1)..(356): sp|Q3BS36|QUEA_XANC5 S-adenosylmethionine:tRNA ribosylt ransferase-isomerase OS=Xanthomonas campestris pv. vesi catoria (strain 85-10) OX=316273 GN=queA PE=3 SV=1
MKKSDFHYELPEELIAQAPLAERAASRLLVVPPAPAAFGDRQVRDLPELLQPGDLLIFNDTRVIPARLFGQKASGGRVEILIERLLGEREARVQIGASKSPKAGSVIALDAGGQAEVLGRDGEFYLLRFQIPTPLEHWLLEAGRLPLPPYIRREPGVEDRERYQTVFAREVGAVAAPTAGLHFDEPLLARLRERGVEFGHVTLHVGAGTFQPVRVDKLDQHVMHKEWLNVGATLVEQVRRTRARGGRVIAVGTTVVRSLESAWRKTEAAPEGELQPFAGETQIFILPGYRIRSVDAMVTNFHLPESTLMMMVCAFAGRERIFAAYHHAIAQRYRFFSYGDAMLLWGGESGVGNGES

SEQ ID NO: 73763 - protein, 356 aa, Xanthomonas cannabis
  misc_feature (1)..(356): tr|A0A0B2CGI2|A0A0B2CGI2_9XANT S-adenosylmethionine:tRN A ribosyltransferase-isomerase OS=Xanthomonas cannabis pv. cannabis OX=1885894 GN=queA PE=3 SV=1
MKKSDFHYDLPDELIAQAPLAERAASRLLVVPPAPEAFSDRQVRDLPELLQPGDLLIFNDTRVIPARLFGQKASGGRVEILIERLLGEREARVQIGASKSPKAGSLIALDAGGQAEVLGRDGEFYLLRFEIPTPLEHWLLEAGRLPLPPYIRREPGIEDRERYQTVFAREVGAVAAPTAGLHFDEALLARLRARGVEFGHVTLHVGAGTFQPVRVDALEQHVMHKEWLNVGAALVEQVRRTRERGGRVIAVGTTVVRSLESAWRKTDAAPDGELLPFAGETQIFILPGYRIRSVDAMVTNFHLPESTLMMMVSAFAGRERIFAAYQHAIAQRYRFFSYGDAMLLWGRDWGFGSGDS

SEQ ID NO: 73764 - protein, 356 aa, Xanthomonas citri
  misc_feature (1)..(356): tr|A0A2H1SNX1|A0A2H1SNX1_XANCI S-adenosylmethionine:tRN A ribosyltransferase-isomerase OS=Xanthomonas citri pv. fuscans OX=366649 GN=queA PE=3 SV=1
MKKSDFHYDLPDELIAQAPLAERAASRLLVVPPSPQALADRQVRDLPELLQPGDLLIFNDTRVIPARLFGHKASGGRVEILIERLLGERQARVQIGASKSPKAGSLIALDAGGQAEVLGRDGEFYLLRFEIPTPLEHWLLEAGRLPLPPYIRREPGVEDRERYQTVFAREVGAVAAPTAGLHFDEPLLARLRERGVEFGHVTLHVGAGTFQPVRVDKLDQHVMHTEWLNVGAALVEQVRRTRARGGRVIAVGTTVVRSLESAWRTTEAAPEGELQPFAGETQIFILPGYRIRSVDAMVTNFHLPESTLMMMVSAFAGRERIFAAYHHAIAQRYRFFSYGDAMLLWGGESGVGNGES

SEQ ID NO: 73765 - protein, 356 aa, Xanthomonas citri
  misc_feature (1)..(356): tr|A0A220WGK5|A0A220WGK5_XANCI S-adenosylmethionine:tRN A ribosyltransferase-isomerase OS=Xanthomonas citri pv. vignicola OX=473426 GN=queA PE=3 SV=1
MKKSDFHYDLPDELIAQAPLAERAASRLLVVPPSPQALADLQVRDLPELLQPGDLLIFNDTRVIPARLFGHKASGGRVEILIERLLGERQARVQIGASKSPKAGSLIALDAGGQAEVLGRDGEFYLLRFEIPTPLEHWLLEAGRLPLPPYIRREPGVEDRERYQTVFAREVGAVAAPTAGLHFDEPLLARLRERGVEFGHVTLHVGAGTFQPVRVDKLDQHVMHTEWLNVGAALVEQVRRTRARGGRVIAVGTTVVRSLESAWRTTEAAPEGELQPFAGETQIFILPGYRIRSVDAMVTNFHLPESTLMMMVSAFAGRERIFAAYHHAIAQRYRFFSYGDAMLLWGRDWGFGSGDS

SEQ ID NO: 73766 - protein, 356 aa, Xanthomonas codiaei
  misc_feature (1)..(356): tr|A0A2S7C893|A0A2S7C893_9XANT S-adenosylmethionine:tRN A ribosyltransferase-isomerase OS=Xanthomonas codiaei O X=56463 GN=queA PE=3 SV=1
MKKSDFHYDLPDELIAQAPLAERAASRLLVVPPLPQALADRQVRDLPELLQPGDLLIFNDTRVIPARLFGQKASGGRVEILIERLLGEREARVQIGASKSPKAGSLIALDAGGQAGVLGRDGEFYLLRFDIPLPLQQWLPEAGRLPLPPYIRREPGVEDRERYQTVFAREVGAVAAPTAGLHFDEALLARLRERGVEFGHVTLHVGAGTFQPVRVDRLDQHVMHTEWLNVGAALVEQVRRTRARGGRVIAVGTTVVRSLESAWRITDAAPEGELQPFAGETQIFILPGYRIRSVDAMVTNFHLPESTLLMMVSAFAGRERIFEAYRHAIAQRYRFFSYGDAMLLWGRDWGLGSGDS

SEQ ID NO: 73767 - protein, 356 aa, Xanthomonas cucurbitae
  misc_feature (1)..(356): tr|A0A2S7DUA7|A0A2S7DUA7_9XANT S-adenosylmethionine:tRN A ribosyltransferase-isomerase OS=Xanthomonas cucurbita e OX=56453 GN=queA PE=3 SV=1
MKKSDFNYALPEDLIAQAPLAERAASRLLVVPPAPAAFSDRQVRDLPELLQPGDLLIFNDTRVIPARLFGQKASGGRVEILIERLLGEREARVQIGASKSPKAGSLIALDAGGQAEVLGRDGEFYLLRFDIPVPLQQWLPEAGRLPLPPYIRREPGVEDRERYQTVFAREVGAVAAPTAGLHFDEALLARLRERGVEFGHVTLHVGAGTFQPVRVDRLDQHVMHTEWLNVGAALVEQVRRTRARGGRVVAVGTTVVRSLESAWRITDAAPEGELQPFAGETRIFILPGYRIRSVDAMVTNFHLPESTLLMMVSAFAGRERIFAAYQHAIAQRYRFFSYGDAMLLWGGESGIGNGES

SEQ ID NO: 73768 - protein, 356 aa, Xanthomonas cynarae
  misc_feature (1)..(356): tr|A0A2S7ATE0|A0A2S7ATE0_9XANT S-adenosylmethionine:tRN A ribosyltransferase-isomerase OS=Xanthomonas cynarae O X=109214 GN=queA PE=3 SV=1
MKKSDFHYDLPDELIAQAPLAERAASRLLVVPPSPQALVDRQVRDLPELLQPGDLLIFNDTRVIPARLFGQKASGGRVEILIERLLGEREARVQIGASKSPKAGSLIALDAGGQAEVLGRDGEFYLLRFDIPAPLEQWLPEAGQLPLPPYIRREPGVEDRERYQTVFAREVGAVAAPTAGLHFDEALLAQLRERGVEFGHVTLHVGAGTFQPVRVDALDKHVMHTEWLNVGAALVEQVRRTRARGGRVIAVGTTVVRSLESAWRKTDAAPDGELLPFAGETQIFILPGYRIRSVDAMVTNFHLPESTLLMMVSAFAGRERIFAAYQHAIAQRYRFFSYGDAMLLWGREWGIGNGES

SEQ ID NO: 73769 - protein, 356 aa, Xanthomonas dyei
  misc_feature (1)..(356): tr|A0A2S7BZR6|A0A2S7BZR6_9XANT S-adenosylmethionine:tRN A ribosyltransferase-isomerase OS=Xanthomonas dyei OX=7 43699 GN=queA PE=3 SV=1
MKKSDFNYSLPDELIAQAPLAERAASRLLVVPKAPADFSDRQVRDLPELLQPGDLLIFNDTRVIPARLFGQKASGGRVEILIERLLGERQARVQIGASKSPKAGSLIALDAGGQAEVLGRDGEFYLLRFDIPLPLEQWLPEAGRLPLPPYIRREPGLEDRERYQTVFAREVGAVAAPTAGLHFDEALLARLRERGVEFGHVTLHVGAGTFQPVRVDALDQHVMHKEWLNVGAALVEQVRRTRARGGRVIAVGTTVVRSLESAWRTTDAAPDGELLPFAGETQIFILPGYRIRSVDAMVTNFHLPESTLLMMVSAFAGRERIFAAYAHAIAQRYRFFSYGDAMLLWGRDWGIGNGES

SEQ ID NO: 73770 - protein, 356 aa, Xanthomonas euvesicatoria
  misc_feature (1)..(356): tr|A0A4U0TFT4|A0A4U0TFT4_XANEU S-adenosylmethionine:tRN A ribosyltransferase-isomerase OS=Xanthomonas euvesicat oria pv. citrumelonis OX=189396 GN=queA PE=3 SV=1
MKKSDFHYELPEALIAQAPLAERAASRLLVVPPAPAAFGDRQVRDLPELLQPGDLLIFNDTRVIPARLFGQKASGGRVEILIERLLGEREARVQIGASKSPKAGSVIALDAGGQAEVLGRDGEFYLLRFQIPTPLEHWLLEAGRLPLPPYIRREPGVEDRERYQTVFAREVGAVAAPTAGLHFDEPLLARLRERGVEFGHVTLHVGAGTFQPVRVDKLDQHVMHTEWLNVGAALVEQVRRTRARGGRVIAVGTTVVRSLESAWRKTEAAPEGELQPFAGETQIFILPGYRIRSVDAMVTNFHLPESTLMMMVCAFAGRERIFAAYHHAIAQRYRFFSYGDAMLLWGGESGVGNGES

SEQ ID NO: 73771 - protein, 356 aa, Xanthomonas euvesicatoria; identical to SEQ ID NO: 73755
  misc_feature (1)..(356): tr|A0A2S7EA45|A0A2S7EA45_XANEU S-adenosylmethionine:tRN A ribosyltransferase-isomerase OS=Xanthomonas euvesicat oria pv. citrumelonis OX=189396 GN=queA PE=3 SV=1

SEQ ID NO: 73772 - protein, 356 aa, Xanthomonas floridensis
  misc_feature (1)..(356): tr|A0A1A9MBT6|A0A1A9MBT6_9XANT S-adenosylmethionine:tRN A ribosyltransferase-isomerase OS=Xanthomonas floridens is OX=1843580 GN=queA PE=3 SV=1
MKKSDFRYDLPDALIAQAPLAERAASRLLVVPPEPAAFSDRQVRDLPELLQPGDLLIFNDTRVIPARLFGQKASGGRVEILIERLLGEREARVQIGASKSPKAGSLIALDAGGQAEVLGRDGEFYLLRFDIPVPLHQWLPEAGRLPLPPYIRREPGVEDRERYQTVFAREVGAVAAPTAGLHFDEALLARLRERGVEFGHVTLHVGAGTFQPVRVDRLDQHVMHTEWLNVGAALVEQVRRTRARGGRVIAVGTTVVRSLESAWRTTDAAPEGELQPFAGETQIFILPGYRIRSVDAMVTNFHLPESTLLMMVSAFAGRERIFEAYHHAIAQRYRFFSYGDAMLLWGRESGIGNGES

SEQ ID NO: 73773 - protein, 356 aa, Xanthomonas fragariae
  misc_feature (1)..(356): tr|A0A1Y6H552|A0A1Y6H552_9XANT S-adenosylmethionine:tRN A ribosyltransferase-isomerase OS=Xanthomonas fragariae OX=48664 GN=queA PE=3 SV=1
MKKSDFHYALPDDLIAQAPLAERAASRLLVVPPSPRALVDRQVRDLPALLQPGDLLIFNDTRVIPARLFGQKASGGRVEILIERLLGEREARVQIGASKSPKAGSLIALDAGGQAEVLGRDDAFYLLRFDIPTPLEHWLLEAGRLPLPPYIRREPGVEDRERYQTVFARAVGAVAAPTAGLHFDEALLAQLRERGVEFGHVTLHVGAGTFQPVRVDKLDQHVMHKEWLNVGAGLVEQVRRTRARGGRVIAVGTTVVRSLESAWRVTDTAPEGELLPFAGETQIFILPGYRIRSVDAMVTNFHLPESTLLMMVSAFAGRERIFEAYQHAIAQRYRFFSYGDAMLLWGRESGVGNGES

SEQ ID NO: 73774 - protein, 356 aa, Xanthomonas gardneri
  misc_feature (1)..(356): tr|F0C170|F0C170_9XANT S-adenosylmethionine:tRNA ribosy ltransferase-isomerase OS=Xanthomonas gardneri ATCC 198 65 OX=925777 GN=queA PE=3 SV=1
MKKSDFHYDLPDELIAQAPLAERAASRLLVVPPSPQALVDRQVRDLPELLQPGDLLIFNDTRVIPARLFGQKASGGRVEILIERLLGEREARVQIGASKSPKAGSLIALDAGGQAEVLGRDGEFYLLRFDIPTTLEQWLPEAGQLPLPPYIRREPGVEDRERYQTVFAREVGAVAAPTAGLHFDEALLAQLRERGVEFGHVTLHVGAGTFQPVRVDALDQHVMHKEWLNVGAALVEQVRRTRARGGRVIAVGTTVVRSLESAWRKTDAAPDGELLPFAGETQIFILPGYRIRSVDAMVTNFHLPESTLLMMVSAFAGRERIFAAYQHAIAQRYRFFSYGDAMLLWGREWGIGNGES

SEQ ID NO: 73775 - protein, 356 aa, Xanthomonas gardneri
  misc_feature (1)..(356): tr|A0A1L5Y1X0|A0A1L5Y1X0_9XANT S-adenosylmethionine:tRN A ribosyltransferase-isomerase OS=Xanthomonas gardneri OX=90270 GN=queA PE=3 SV=1
MKKSDFNYSLPDELIAQAPLAERAASRLLVVPPAPQALVDRQVRDLPELLQPGDLLIFNDTRVIPARLFGQKASGGRVEILIERLLGEREARVQIGASKSPKAGSLIALDAGGQAEVLGRDGEFYLLRFDIPAPLEQWLQEAGQLPLPPYIRREPGVEDRERYQTVFAREVGAVAAPTAGLHFDEALLAQLRERGVEFGHVTLHVGAGTFQPVRVDALDKHVMHKEWLNVGAALVEQVRRTRARGGRVIAVGTTVVRSLESAWRKTDAAPDGELLPFAGETQIFILPGYRIRSVDAMVTNFHLPESTLLMMVSAFAGRERIFAAYQHAIAQRYRFFSYGDAMLLWGREWGIGNGES

SEQ ID NO: 73776 - protein, 356 aa, Xanthomonas hortorum
  misc_feature (1)..(356): tr|V7ZC63|V7ZC63_9XANT S-adenosylmethionine:tRNA ribosy ltransferase-isomerase OS=Xanthomonas hortorum pv. caro tae str. M081 OX=863365 GN=queA PE=3 SV=1
MKKSDFNYSLPDELIAQAPLAERAASRLLVVPPSPQALVDRQVRDLPELLQPGDLLIFNDTRVIPARLFGQKASGGRVEILIERLLGEREARVQIGASKSPKAGSLIALDAGGQAEVLGRDGEFYVLRFDIPSPLQQWLPEAGQLPLPPYIRREPGVEDRERYQTVFAREVGAVAAPTAGLHFDEALLAQLRERGVEFGHVTLHVGAGTFQPVRVDALDQHVMHTEWLNVGAALVEQVRRTRARGGRVIAVGTTVVRSLESAWRKTDAAPDGELLPFAGETQIFILPGYRIRSVDAMVTNFHLPESTLLMMVSAFAGRERIFEAYQHAIAQRYRFFSYGDAMLLWGRDWGVGIGDS

SEQ ID NO: 73777 - protein, 356 aa, Xanthomonas hortorum
  misc_feature (1)..(356): tr|A0A2S7E0V2|A0A2S7E0V2_9XANT S-adenosylmethionine:tRN A ribosyltransferase-isomerase OS=Xanthomonas hortorum pv. hederae OX=453603 GN=queA PE=3 SV=1
MKKSDFNYSLPDELIAQAPLAERAASRLLVVPPSPQALVDRQVRDLPELLQPGDLLIFNDTRVIPARLFGQKASGGRVEILIERLLGEREARVQIGASKSPKAGSLIALDAGGQAEVLGRDGEFYLLRFDIPSPLQQWLPEAGQLPLPPYIRREPGVEDRERYQTVFAREVGAVAAPTAGLHFDEALLAQLRERGVEFGHVTLHVGAGTFQPVRVDALDQHVMHTEWLNVGAALVEQVRRTRARGGRVIAVGTTVVRSLESAWRKTDAAPDGELLPFAGETQIFILPGYRIRSVDAMVTNFHLPESTLLMMVSAFAGRERIFEAYQHAIEQRYRFFSYGDAMLLWGRDWEVGIGDS

SEQ ID NO: 73778 - protein, 350 aa, Xanthomonas hyacinthi
  misc_feature (1)..(350): tr|A0A2S7F1E5|A0A2S7F1E5_9XANT S-adenosylmethionine:tRN A ribosyltransferase-isomerase OS=Xanthomonas hyacinthi OX=56455 GN=queA PE=3 SV=1
MKKSDFRYELPEELIAQAPLAERSASRLLLVPPAPAPFADRQVRDLPQLLQPGDLLVFNDTRVIPARLFGHKSSGGRVEILIERLLGGQRARAQLGVSKSPRAGVRIALDAGGEAEVLGRDGEFYHLQFHVADTLEAWLQQAGRLPLPPYIRREPGLDDRERYQTVFARQAGAVAAPTAGLHFDAPLLEALQARGVSVGHVTLHVGAGTFQPVRVEALAQHVMHREWLNVGASLVEQVRRTRAAGGRVIAVGTTVVRALESASKDGALHPFAGETQIFILPGYRIRSVDAMVTNFHLPESTLLMMVSAFAGRERMFAAYRHAIAQRYRFFSYGDAMLLWGGETGMGNGES

SEQ ID NO: 73779 - protein, 356 aa, Xanthomonas melonis
  misc_feature (1)..(356): tr|A0A2S7DEF0|A0A2S7DEF0_9XANT S-adenosylmethionine:tRN A ribosyltransferase-isomerase OS=Xanthomonas melonis O X=56456 GN=queA PE=3 SV=1
MKKSDFHYDLPDELIAQAPLAERAASRLLVVPPAPAAFDDRQVRDLPELLQPGDLLIFNDTRVIPARLFGQKASGGRVEILIERLLGEREARVQIGASKSPKAGSLIALDAGGQAEVLGRDGEFYLLRFDIPAPLQQWLPEAGRLPLPPYIRREPGLEDRERYQTVFAREVGAVAAPTAGLHFDEALLARLRERGVEFGHVTLHVGAGTFQPVRVDRLDQHVMHTEWLNVGAALVEQVRHTRARGGRVIAVGTTVVRSLESAWRKTEAAPEGELQPFAGETQIFILPGYRIRSVDAMVTNFHLPESTLLMMVSAFAGRERIFEAYRHAIAQRYRFFSYGDAMLLWSRDWGLGSGDP

SEQ ID NO: 73780 - protein, 356 aa, Xanthomonas nasturtii
  misc_feature (1)..(356): tr|A0A3E1KL96|A0A3E1KL96_9XANT S-adenosylmethionine:tRN A ribosyltransferase-isomerase OS=Xanthomonas nasturtii OX=1843581 GN=queA PE=3 SV=1
MKKSDFHYDLPDELIAQAPLAERAASRLLVVPPSPQALADHQVRDLPELLQPGDLLIFNDTRVIPARLFGQKASGGRVEILIERLLGERQARVQIGASKSPKAGSLIALDAGGQAEVLGRDGEFYLLRFEIPTPLEHWLLEAGRLPLPPYIRREPGIEDRERYQTVFAREVGAVAAPTAGLHFDEALLARLRERGVEFGHVTLHVGAGTFQPVRVDSLDQHVMHKEWLNVGAALVEQVRRTRERGGRVIAVGTTVVRSLESAWRKTDAAPDGELLPFAGETQIFILPGYRIRSVDAMVTNFHLPESTLLMMVSAFAGRERIFAAYQHAIAQRYRFFSYGDAMLLWGRDWGFGSGDS

SEQ ID NO: 73781 - protein, 356 aa, Xanthomonas oryzae
  misc_feature (1)..(356): sp|Q5GZY2|QUEA_XANOR S-adenosylmethionine:tRNA ribosylt ransferase-isomerase OS=Xanthomonas oryzae pv. oryzae ( strain KACC10331 / KXO85) OX=291331 GN=queA PE=3 SV=2
MKKSDFHYDLPEELIAQAPLAERAASRLLVVPPSPQALADRRARDLPELLQPGDLLIFNDTRVIPARLFGQKASGGRVEILIERLLGERQARVQIGASKSPKAGSLIALDAGGQAEVLGRDGAFYLLRFEIPTPLEHWLLEAGRLPLPPYIRREPGVEDRERYQTVFAREVGAVAAPTAGLHFDEALLARLRERGVEFGHVTLHVGAGTFQPVRVDKLDQHVMHKEWLNVGAALVEQVRRTRARGGRVIAVGTTVVRSLESAWRTTDAAPEGELQPFAGETQIFILPGYRIRSVDAMVTNFHLPESTLMMMVSAFAGRERIFEAYHHAIAQRYRFFSYGDAMLLWSRAWGLGSGDS

SEQ ID NO: 73782 - protein, 367 aa, Xanthomonas oryzae
  misc_feature (1)..(367): tr|A0A5C2EU69|A0A5C2EU69_9XANT S-adenosylmethionine:tRN A ribosyltransferase-isomerase OS=Xanthomonas oryzae pv . oryzicola OX=129394 GN=queA PE=3 SV=1
MCGYSVNDPAALKKSDFHYDLPEELIAQAPLAERAASRLLVVPPSPQALADRQVRDLPELLQPGDLLIFNDTRVIPARLFGQKASGGRVEILIERLLGERQARVQIGASKSPKAGSLIALDAGGQAEVLGRDGAFYLLRFEIPTPLEHWLLAAGRLPLPPYIRREPGVEDRERYQTVFAREVGAVAAPTAGLHFDEALLARLRERGVEFGHVTLHVGAGTFQPVRVDKLDQHVMHKEWLNVGAALVEQVRRTRARGGRVIAVGTTVVRSLESAWRTTDAAPEGELQPFAGETQIFILPGYRIRSVDAMVTNFHLPESTLMMMVSAFAGRERIFESYHHAIAQRYRFFSYGDAMLLWSRAWGLGSGDS

SEQ ID NO: 73783 - protein, 356 aa, Xanthomonas perforans
  misc_feature (1)..(356): tr|A0A0G8VW83|A0A0G8VW83_9XANT S-adenosylmethionine:tRN A ribosyltransferase-isomerase OS=Xanthomonas perforans OX=442694 GN=queA PE=3 SV=1
MKKSDFHYELPEELIAQAPLAERAASRLLVVPPAPAAFGDRQVRDLPELLQPGDLLIFNDTRVIPARLFGQKASGGRVEILIERLLGEREARVQIGASKSPKAGSVIALDAGGQAEVLGRDGEFYLLRFQIPTPLEHWLLEAGRLPLPPYIRREPGVEDRERYQTVFAREVGAVAAPTAGLHFDEPLLARLRERGVEFGHVTLHVGAGTFQPVRVDKLDQHVMHTEWLNVGAALVEQVRRTRARGGRVIAVGTTVVRSLESAWRKTEAAPEGELQPFAGETQIFILPGYRIRSVDAMVTNFHLPESTLMMMVCAFAGRERIFAAYHHAIAQRYRFFSYGDAMLLWGGESGVGNRES

SEQ ID NO: 73784 - protein, 356 aa, Xanthomonas phaseoli
  misc_feature (1)..(356): tr|A0A1V9HCS7|A0A1V9HCS7_9XANT S-adenosylmethionine:tRN A ribosyltransferase-isomerase OS=Xanthomonas phaseoli pv. dieffenbachiae OX=92828 GN=queA PE=3 SV=1
MKKSDFHYDLPDELIAQAPLAERAASRLLVVPPSPQALADRQVRDLPELLQPGDLLIFNDTRVIPARLFGQKASGGRVEILIERLLGEREARVQIGASKSPKAGSVIALDAGGQAEVLGRDGEFYLLRFQIPTPLEHWLLEAGRLPLPPYIRREPGVEDRERYQTVFAREVGAVAAPTAGLHFDQPLLARLRERGVEFGHVTLHVGAGTFQPVRVDKLDQHVMHKEWLNVGAALVEQVRRTRARGGRVIAVGTTVVRSLESAWRTTEAAPEGELQPFAGETQIFILPGYRIRSVDAMVTNFHLPESTLMMMVSAFAGRERIFEAYHHAIAQRYRFFSYGDAMLLWGRESGIGNGES

SEQ ID NO: 73785 - protein, 356 aa, Xanthomonas pisi
  misc_feature (1)..(356): tr|A0A2S7CSX4|A0A2S7CSX4_9XANT S-adenosylmethionine:tRN A ribosyltransferase-isomerase OS=Xanthomonas pisi OX=5 6457 GN=queA PE=3 SV=1
MKKSDFQYDLPDELIAQAPLAERAASRLLVVPPSPQAFADRQVRDLPELLQPGDLLIFNDTRVIPARLFGQKASGGRVEILIERLLGEREARVQIGASKSPKAGSLIALDAGGQAEVLGRDGEFYLLRFEIPLPLEQWLPEAGRLPLPPYIRREPGVEDRERYQTVFAREVGAVAAPTAGLHFDEELLARLRARGVEFGHVTLHVGAGTFQPVRVDALDQHVMHKEWLNVGAALVEQVRRTRARGGRVIAVGTTVVRSLESAWRPTDAAREGELLPFAGETQIFILPGYRIRSVDAMVTNFHLPESTLLMMVSAFAGRERIFEAYHHAIAQRYRFFSYGDAMLLWGRDWGVGSGDS

SEQ ID NO: 73786 - protein, 356 aa, Xanthomonas prunicola
  misc_feature (1)..(356): tr|A0A2N3RHK4|A0A2N3RHK4_9XANT S-adenosylmethionine:tRN A ribosyltransferase-isomerase OS=Xanthomonas prunicola OX=2053930 GN=queA PE=3 SV=1
MKKSDFHYELPEELIAQAPLAERAASRLLVVPPSPQALADRQVRDLPELLQPGDLLIFNDTRVIPARLFGQKASGGRVEILIERLLGEREARVQIGASKSPKAGSLIALDAGGQAEVLGRDGEFYLLRFEIPTPLEHWLLAAGRLPLPPYIRREPGVEDRERYQTVFAREVGAVAAPTAGLHFDEELLARLRERGVEFGHVTLHVGAGTFQPVRVDKLDQHVMHKEWLNVGAALVEQVRRTRARGGRVIAVGTTVVRSLESAWRATDAAPDGELLPFAGETQIFILPGYRIRSVDAMVTNFHLPESTLMMMVSAFAGRERIFEAYHHAIAQRYRFFSYGDAMLLWGRESEIGNGES

SEQ ID NO: 73787 - protein, 349 aa, Xanthomonas sacchari
  misc_feature (1)..(349): tr|A0A2P5Z927|A0A2P5Z927_9XANT S-adenosylmethionine:tRN A ribosyltransferase-isomerase OS=Xanthomonas sacchari OX=56458 GN=queA PE=3 SV=1
MKKSDFHYDLPEDLIAQEPLAERSASRLLLVPPAPALFADRHVRDLPELLRAGDLLIFNDTRVIPARLFGQKSTGGRVEILIERLLGGQRARAQLGVSKSPKAGAHIALDAGGEAEVLGRDGEFYQLQFHVDGALEHWLQQAGRLPLPPYIRREPGLDDRERYQTVFAREAGAVAAPTAGLHFDAPLLQALQQRGVEVGHVTLHVGAGTFQPVRVEALEQHQMHREWLNVGASLVEQVRRTRAAGGRVIAVGTTVVRALESASKDGELHPFAGETQIFILPGYRIRSVDAMVTNFHLPESTLLMMVSAFAGRERIFAAYRHAIAQRYRFFSYGDAMLLWSSETPAERVG

SEQ ID NO: 73788 - protein, 349 aa, Xanthomonas sacchari
  misc_feature (1)..(349): tr|A0A5D1A572|A0A5D1A572_9XANT S-adenosylmethionine:tRN A ribosyltransferase-isomerase OS=Xanthomonas sacchari OX=56458 GN=queA PE=3 SV=1
MKKSDFHYDLPEDLIAQEPLAERSASRLLLVPPAPAAFADRHVRDLPELLRAGDLLIFNDTRVIPARLFGQKSTGGRVEILIERLLGGQRARAQLGVSKSPKAGARIALDAGGEAEVLGRDGEFYQLQFHVDGALEHWLQQAGRLPLPPYIRREPGLDDRERYQTVFAREAGAVAAPTAGLHFDAPLLQALQQRGVEVGHVTLHVGAGTFQPVRVEALEQHQMHREWLNVGASLVEQVRRTRAAGGRVIAVGTTVVRALESASKDGELHPFAGETQIFILPGYRIRSVDAMVTNFHLPESTLLMMVSAFAGRERIFAAYRHAIAQRYRFFSYGDAMLLWSSETPADRVG

SEQ ID NO: 73789 - protein, 356 aa, Xanthomonas sp.
  misc_feature (1)..(356): tr|A0A0Q5J353|A0A0Q5J353_9XANT S-adenosylmethionine:tRN A ribosyltransferase-isomerase OS=Xanthomonas sp. Leaf1 48 OX=1736275 GN=queA PE=3 SV=1
MKKSDFNYSLPDELIAQAPLAERAASRLLVVPKAPADFSDRQVRDLPELLQPGDLLIFNDTRVIPARLFGQKASGGRVEILIERLLGEREARVQIGASKSPKAGSLIALDAGGQAEVLGRDGEFYLLRFEIPLPLEQWLPEAGRLPLPPYIRREPGLEDRERYQTVFAREVGAVAAPTAGLHFDEQLLARLRERGVEFGHVTLHVGAGTFQPVRVDALDQHVMHKEWLNVGAALVEQVRRTRARGGRVIAVGTTVVRSLESAWRKTDAAPDGELLPFAGETQIFILPGYRIRSVDAMVTNFHLPESTLLMMVSAFAGRERIFAAYAHAIAQRYRFFSYGDAMLLWGRDWGIGNGES

SEQ ID NO: 73790 - protein, 346 aa, Xanthomonas sp.; identical to SEQ ID NO: 68380
  misc_feature (1)..(346): tr|A0A0P7GN35|A0A0P7GN35_9XANT S-adenosylmethionine:tRN A ribosyltransferase-isomerase OS=Xanthomonas sp. Mitac ek01 OX=1732019 GN=queA PE=3 SV=1

SEQ ID NO: 73791 - protein, 350 aa, Xanthomonas theicola
  misc_feature (1)..(350): tr|A0A2S6ZDA8|A0A2S6ZDA8_9XANT S-adenosylmethionine:tRN A ribosyltransferase-isomerase OS=Xanthomonas theicola OX=56464 GN=queA PE=3 SV=1
MKKSDFRYDLPEELIAQAPLAKRSASRLLLVPPAPAPFADRQVRDLPQLLQPGDLLVFNDTRVIPARLFGHKRSGGRVEILIERLLGGQRARAQLGVSKSPKAGARIALDAGGEAEVLDRDGAFYVLQFRVPDTLESWLQRAGRLPLPPYIRREPGLDDRERYQTVFARQAGAVAAPTAGLHFDAPLLEALQARGVGVGHVTLHVGAGTFQPVRAEALEQHVMHREWLNVGAGLVEQVRRTRAAGGRVIAVGTTVVRALESASRDGELLPFAGETQIFILPGYRIRSVDAMVTNFHLPESTLLMMVSAFAGRERIFAAYRHAIAQCYRFFSYGDAMLLWSGEWGMGNGEP

SEQ ID NO: 73792 - protein, 361 aa, Xanthomonas translucens
  misc_feature (1)..(361): tr|A0A0K2ZEV1|A0A0K2ZEV1_XANCT S-adenosylmethionine:tRN A ribosyltransferase-isomerase OS=Xanthomonas transluce ns pv. arrhenatheri LMG 727 OX=1195923 GN=queA PE=3 SV= 1
MTGHLYCDAPALKKSDFRYELPEELIAQAPLAERSASRLLLVPAAPAPFADRQVRDLPELLQPGDLLVFNDTRVIPARLFGNKSSGGRVEILIERLLGGQRARAQLGVSKSPKAGARIALDAGGEAEVLDRDGEFYVLEFHVPDTLEAWLQQAGRLPLPPYIRREPGLDDRERYQTVFARQAGAVAAPTAGLHFDAPLLEALQARGVGVGHVTLHVGAGTFQPVRVEALAQHVMHREWLNVGASLVEQVRRTRAAGGRVIAVGTTVVRALESASTDGELHPFAGETQIFILPGYRIRSVDAMVTNFHLPESTLLMMVSAFAGRERIFDAYRHAIEQRYRFFSYGDAMLLWGGETGMGNGAS

SEQ ID NO: 73793 - protein, 350 aa, Xanthomonas translucens
  misc_feature (1)..(350): tr|A0A514ED77|A0A514ED77_XANCT S-adenosylmethionine:tRN A ribosyltransferase-isomerase OS=Xanthomonas transluce ns pv. cerealis OX=152263 GN=queA PE=3 SV=1
MKKSDFRYELPEELIAQAPLAERSASRLLLVPPAPAPFADRHVRDLPGLLQPGDLLVFNDTRVIPARLFGHKRSGGRVEILIERLLGGQRARAQLGVSKSPKAGARIALDTGGEAEVLGRDGEFYVLQFHVPDTLEAWLQQAGRLPLPPYIRREPGLDDRERYQTVFARQAGAVAAPTAGLHFDAPLLEALQARGVGVGHVTLHVGAGTFQPVRVEALAQHVMHREWLNVGASLVEQVRRTRAAGGRVIAVGTTVVRALESASKDGELHPFAGETQIFILPGYRIRSVDAMVTNFHLPESTLLMMVSAFAGRERIFDAYRHAIEQRYRFFSYGDAMLLWGGESGMGNGES

SEQ ID NO: 73794 - protein, 356 aa, Xanthomonas vasicola
  misc_feature (1)..(356): tr|A0A2P5ZJN6|A0A2P5ZJN6_XANVA S-adenosylmethionine:tRN A ribosyltransferase-isomerase OS=Xanthomonas vasicola OX=56459 GN=queA PE=3 SV=1
MKKSDFNYSLPEELIAQAPLAERAASRLLVVPPSPQALADRQVRDLPELLQPGDLLIFNDTRVIPARLFGQKASGGRVEILIERLLGEREARVQIGASKSPKAGSLIALDAGGQAEVLGRDGEFYLLRFEIPTPLERWLLEAGRLPLPPYIRREPGVEDRERYQTVFAREVGAVAAPTAGLHFDEPLLAQLRERGVEFGHVTLHVGAGTFQPVRVDKLDQHVMHKEWLNVGAALVEQVRRTRARGGRVIAVGTTVVRSLESAWRKTDAAPEGELQPFAGETQIFILPGYRIRSVDAMVTNFHLPESTLMMMVSAFAGRERIFEAYHHAIAQRYRFFSYGDAMLLWSRESGVGNGES

SEQ ID NO: 73795 - protein, 356 aa, Xanthomonas vesicatoria
  misc_feature (1)..(356): tr|F0BB50|F0BB50_9XANT S-adenosylmethionine:tRNA ribosy ltransferase-isomerase OS=Xanthomonas vesicatoria ATCC 35937 OX=925775 GN=queA PE=3 SV=1
MKKSDFNYALPEELIAQAPLAERAASRLLVVSPAPAAFSDRQVRDLPELLQPGDLLIFNDTRVIPARLFGQKASGGRVEILIERLLGEREARVQIGASKSPKAGSLIALDAGGQAEVLGRDGEFYLLRFEIPLPLEQWLPEAGRLPLPPYIRREPGLEDRERYQTVFAREVGAVAAPTAGLHFDEDLLARLRERGIEFGHVTLHVGAGTFQPVRVDALDQHVMHKEWLNVGAALVEQVRRTRARGGRVIAVGTTVVRSLESAWRTTEAAPEGELLPFAGETQIFILPGYRIRSVDAMVTNFHLPESTLLMMVSAFAGRERIFEAYQHAIAQRYRFFSYGDAMLLWGRESGIGNGES

SEQ ID NO: 73796 - protein, 356 aa, Xanthomonas vesicatoria
  misc_feature (1)..(356): tr|A0A1L5QPA6|A0A1L5QPA6_9XANT S-adenosylmethionine:tRN A ribosyltransferase-isomerase OS=Xanthomonas vesicator ia OX=56460 GN=queA PE=3 SV=1
MKKSDFNYALPEELIAQAPLAERAASRLLVVPPAPAAFSDRQVRDLPELLQPGDLLIFNDTRVIPARLFGQKASGGRVEILIERLLGEREARVQIGASKSPKAGSLIALDAGGEAEVLGRDGEFYLLRFEIPLPLEQWLPEAGRLPLPPYIRREPGLEDRERYQTVFAREVGAVAAPTAGLHFDEDLLARLRERGIEFGHVTLHVGAGTFQPVRVDALDQHVMHKEWLNVGAALVEQVRRTRARGGRVIAVGTTVVRSLESAWRTTEAAPEGELLPFAGETQIFILPGYRIRSVDAMVTNFHLPESTLLMMVSAFAGRERIFEAYQHAIAQRYRFFSYGDAMLLWGRESGIGNGES

SEQ ID NO: 73797 - protein, 379 aa, Xenococcus sp.
  misc_feature (1)..(379): tr|L8M510|L8M510_9CYAN S-adenosylmethionine:tRNA ribosy ltransferase-isomerase OS=Xenococcus sp. PCC 7305 OX=10 2125 GN=queA PE=3 SV=1
MSKDLLLSNYSYNLPPELIAQTPVSPRDSSRLLVVNSPSTHHHSIFSTLPDWLLPGDLLVLNNTRVIPARLFGAKSTGAAVEVLLLEETETNCWLALVKPGKRFKLGTKILFTPQHNQTNGNINTQTLKGNPRDLTLHQKGARLSATVVAKDEVTGGRILRFDCDSPESFWQLLSEFGEVPLPPYITSRESQPLQYQTVFAQKDGAVAAPTAGLHFTHELLDKLQSKGIDQTYITLHVGVGTFRPVEVEKITEHQMHQEWIEVSEETTRKIKETKARGGRIIAVGTTAVRALEGAAQSSLVDEGNELQAFRGKTNLFIYPGYDWQIVDGLITNFHLPGSSLLMLVSALTGRERLFSLYQDAIANRYRFYSFGDAMLILS

SEQ ID NO: 73798 - protein, 340 aa, Xenophilus sp.
  misc_feature (1)..(340): tr|A0A254VRH6|A0A254VRH6_9BURK S-adenosylmethionine:tRN A ribosyltransferase-isomerase OS=Xenophilus sp. AP218F OX=2014876 GN=queA PE=3 SV=1
MQLSDFDYHLPEALIAQHPPATRGASRLLHVAGRELGDLAFSDFLALVNAGDVLVFNDTRVIRARLFGEKASGGKVEALIERVLDEHTALAHVRSSKSPKPGSRLIFAGRWEAEMVERQDSLFKLRFLAEDNVFDILEASGKLPLPPYIERSAEGEDDERYQTVYARERGAVAAPTAGLHFTDEMLAALAAKGVELAYVTLHVGAGTFQPVKVENVAEHKMHSEIYEIPAQTVERIAAARARGGKVLAVGTTSVRALESAARSGELTAGRGETDIFITPGYRFRVVDRLLTNFHLPKSTLLMLVSAFAGYEEMRAAYAHAVAREYRFFSYGDAMLLERKD

SEQ ID NO: 73799 - protein, 361 aa, Xenorhabdus beddingii
  misc_feature (1)..(361): tr|A0A1Y2STW9|A0A1Y2STW9_9GAMM S-adenosylmethionine:tRN A ribosyltransferase-isomerase OS=Xenorhabdus beddingii OX=40578 GN=queA PE=3 SV=1
MRVADFTFELPEELIAHYPQPQRSACRLLSLDGETGELTHGIFTDVLDKLETGDLLVFNNTRVIPARLFGRKATGGKLEVLVERMLDNKRVLAHVRASKAPKAGAALILGEDVLGENRGIKATMLARHDTLFEIRFDDDRDVLTILDQIGHMPLPPYIARPDEDADRELYQTVYNERPGAVAAPTAGLHFDEPLLAALREKGIEMAFVTLHVGAGTFQPVRVETIEDHVMHAEYAEVPQNVVDAVLACKARGNKVIAVGTTSVRSLESAARACQDGIIAPFFDDTQIFIYPGFEYQVVDALITNFHLPESTLIMLVSAFAGYKNTMSAYQSAVTEKYRFFSYGDAMFISRNRMASKETVSK

SEQ ID NO: 73800 - protein, 355 aa, Xenorhabdus bovienii
  misc_feature (1)..(355): tr|A0A077P127|A0A077P127_XENBV S-adenosylmethionine:tRN A ribosyltransferase-isomerase OS=Xenorhabdus bovienii str. oregonense OX=1398202 GN=queA PE=3 SV=1
MRVADFTFELPEELIAHYPQPQRSGCRLLALDGETGGLTHGIFTDVLDKLEAGDLLVFNNTRVIPARLFGRKATGGKLEVLVERMLDNKRVLAHVRASKALKEGAELLLGEDESIRATMLARHDTLFEIRFDDDRDVLTILDEIGHMPLPPYIARPDEESDRELYQTVYSERPGAVAAPTAGLHFDEPLLAALREKGIDMAFVTLHVGAGTFQPVRVETIEDHIMHAEYAEVPQNVVDAVLACKARGNKVVAVGTTSVRSLESAARASQNGLISPFFDDTQIFIYPGFEYQVVDALITNFHLPESTLIMLVSAFAGYKNTMNAYKEAVAEKYRFFSYGDAMFINRNPMAAKEKVS

SEQ ID NO: 73801 - protein, 355 aa, Xenorhabdus bovienii
  misc_feature (1)..(355): tr|D3V0X4|D3V0X4_XENBS S-adenosylmethionine:tRNA ribosy ltransferase-isomerase OS=Xenorhabdus bovienii (strain SS-2004) OX=406818 GN=queA PE=3 SV=1
MRVADFTFELPEELIAHYPQPQRSGCRLLALDGKTGGLTHGIFTDVLDKLEAGDLLVFNNTRVIPARLFGRKATGGKLEVLVERMLDNKRVLAHVRASKALKEGAELLLGEDESIRATMLARHDTLFEIRFDDDRDVLTILDEIGHMPLPPYIARPDEESDRELYQTVYSERPGAVAAPTAGLHFDEPLLAALREKGVDMAFVTLHVGAGTFQPVRVETIEDHIMHAEYAEVPQNVVDAVLACKARGNKVVAVGTTSVRSLESAARACQNGLIEPFFDDTQIFIYPGFEYQVVDALITNFHLPESTLIMLVSAFAGYQNTMNAYKEAVAEKYRFFSYGDAMFIHRNPMATKEKVS

SEQ ID NO: 73802 - protein, 370 aa, Xenorhabdus budapestensis
  misc_feature (1)..(370): tr|A0A2D0J1K9|A0A2D0J1K9_XENBU S-adenosylmethionine:tRN A ribosyltransferase-isomerase OS=Xenorhabdus budapeste nsis OX=290110 GN=queA PE=3 SV=1
MRVADFTFELPEELIAHYPQPQRSGCRLLSLDGETGELAHGIFTDVLDKLETGDLLVFNNTRVIPARLFGRKATGGKLEVLVERMLDNKRVLAHVRASKAPKEGAELILGEDKALGENILGANNGIKATMLARHDALFEIRFDDERDVLTILDEIGHMPLPPYIARPDEEADRELYQTVYNERPGAVAAPTAGLHFDEPLLAALREKGVEMAFVTLHVGAGTFQPVRVETIEDHVMHAEYAEVPQNVVDAVLACKARGNKVVAVGTTSVRSLESAARACQDGLIAPFFDDTQIFIYPGFEYQVVDALITNFHLPESTLIMLVSAFAGYKNTMGAYKAAVAEKYRFFSYGDAMFINRNSLAAKELWLQKKQ

SEQ ID NO: 73803 - protein, 369 aa, Xenorhabdus cabanillasii
  misc_feature (1)..(369): tr|A0A3D9U9Z4|A0A3D9U9Z4_9GAMM S-adenosylmethionine:tRN A ribosyltransferase-isomerase OS=Xenorhabdus cabanilla sii OX=351673 GN=queA PE=3 SV=1
MRVADFTFELPEELIAHYPQSQRSGCRLLSLNGETGELTHGIFTDVLDKLEAGDLLVFNNTRVIPARLFGRKATGGKLEVLVERMLDNKRVLAHVRASKAPKEGTELILGEDKSLGDNTFGANNGIKATMLARHDALFEIRFDDERDVLTILDEIGHMPLPPYIARPDEEADRELYQTVYNERPGAVAAPTAGLHFDEPLLAALREKGVEMAFVTLHVGAGTFQPVRVETIEDHVMHAEYAEVPQNVVDAVLACKARGNKVVAVGTTSVRSLESAARACQDDLIAPFFDDTQIFIYPGFEYQVVDALITNFHLPESTLIMLVSAFAGYKNTMGAYKAAVAEKYRFFSYGDAMFINRNSLAAKELWLQKK

SEQ ID NO: 73804 - protein, 369 aa, Xenorhabdus cabanillasii
  misc_feature (1)..(369): tr|W1IZN7|W1IZN7_9GAMM S-adenosylmethionine:tRNA ribosy ltransferase-isomerase OS=Xenorhabdus cabanillasii JM26 OX=1427517 GN=queA PE=3 SV=1
MRVADFTFELPEELIAHYPQSQRSGCRLLSLNGETGELTHGIFTDVLDKLEAGDLLVFNNTRVIPARLFGRKATGGKLEVLVERMLDNKRVLAHVRASKAPKEGAELILGEDKSLGDNTFGANNGIKATMLARHDALFEIRFDDERDVLTILDEIGHMPLPPYIARPDEEADRELYQTVYNERPGAVAAPTAGLHFDEPLLAALREKGVEMAFVTLHVGAGTFQPVRVETIEDHVMHAEYAEVPQNVVDAVLACKARGNKVVAVGTTSVRSLESAARACQDGLIAPFFDDTQIFIYPGFEYQVVDALITNFHLPESTLIMLVSAFAGYKNTMGAYKAAVAEKYRFFSYGDAMFINRNSLAAKELWLQKK

SEQ ID NO: 73805 - protein, 366 aa, Xenorhabdus doucetiae
  misc_feature (1)..(366): tr|A0A068QRR6|A0A068QRR6_9GAMM S-adenosylmethionine:tRN A ribosyltransferase-isomerase OS=Xenorhabdus doucetiae OX=351671 GN=queA PE=3 SV=1
MRVADFTFELPEELIAHYPQPQRSACRLLSLDGETGKLSHGIFTDVLDKLEAGDLLVFNNTRVIPARLFGRKATGGKLEVLVERMLDDKRVLAHIRASKAPKEGTELILGGDVLGEDALGEARSIKATMLARHDTLFEIRFDDERDVLTILDQIGHMPLPPYIARPDEDADRELYQTVYSERPGAVAAPTAGLHFDEPLLAALREKGVEMAFVTLHVGAGTFQPVRVETIEDHVMHAEYAEVPQEVVDAILACKARGNNVVAVGTTSVRSLESAARACQDGIIAPFFGDTQIFIYPGFEYQVVDALITNFHLPESTLIMLVSAFAGYQNTMSAYKEAVAEKYRFFSYGDAMFINRNRMAAKEMVSK

SEQ ID NO: 73806 - protein, 357 aa, Xenorhabdus eapokensis
  misc_feature (1)..(357): tr|A0A1Q5TVY8|A0A1Q5TVY8_9GAMM S-adenosylmethionine:tRN A ribosyltransferase-isomerase OS=Xenorhabdus eapokensi s OX=1873482 GN=queA PE=3 SV=1
MRVADFTFELPEELIAHYPQPQRSACRLLSLDGETGNLTHGVFTDVLDKLEAGDLLVFNNTRVIPARLFGRKATGGKLEVLVERMLDDKRVLAHVRASKAPKEGTELILGETQDIKATMLARHDTLFEIRFDDERDVLTILEQIGHMPLPPYIARPDEAADRELYQTVYNERPGAVAAPTAGLHFDEPLLAALREKGIEMAFVTLHVGAGTFQPVRVETIEDHVMHAEYAEVPQDVVDAVLACKARGNRVIAVGTTSVRSLESAARACQDGMIAPFFDDTQIFIYPGFEYQVVDALITNFHLPESTLIMLVSAFAGYKNTMNAYKEAVAEKYRFFSYGDAMFINRNKMAVKERVSEE

SEQ ID NO: 73807 - protein, 357 aa, Xenorhabdus ehlersii
  misc_feature (1)..(357): tr|A0A2D0IQ68|A0A2D0IQ68_9GAMM S-adenosylmethionine:tRN A ribosyltransferase-isomerase OS=Xenorhabdus ehlersii OX=290111 GN=queA PE=3 SV=1
MRVADFTFELPEELIAHYPQPQRSACRLLSLDGETGKLTHGVFTDVLDKLEAGDLLVFNNTRVIPARLFGRKATGGKLEVLVERMLDDKRVLAHVRASKTPKEGTELILGETQNIKATMLARHDTLFEIRFDDERDVLTILDQIGHMPLPPYIARPDEDADRELYQTVYNERPGAVAAPTAGLHFDEPLLAALREKGIEMAFVTLHVGAGTFQPVRVETIEDHVMHAEYAEVPQDVVDAVLACKARGNRVIAVGTTSVRSLESAARACQDGVIAPFFDDTQIFIYPGFEYQVVDALITNFHLPESTLIMLVSAFAGYKNTMNAYKEAVAEKYRFFSYGDAMFINRNKMAVKERVSEE

SEQ ID NO: 73808 - protein, 366 aa, Xenorhabdus hominickii
  misc_feature (1)..(366): tr|A0A2G0Q8L8|A0A2G0Q8L8_9GAMM S-adenosylmethionine:tRN A ribosyltransferase-isomerase OS=Xenorhabdus hominicki i OX=351679 GN=queA PE=3 SV=1
MRVADFTFELPEELIAHYPQSQRSGCRLLSLNGETGELTHGIFTDVLNKLEAGDLLVFNNTRVIPARLFGRKTTGGKLEVLVERMLDNKRVLAHVRASKAPKEGAELILGEDVLGKEVLGEERSIKATMLARHDTLFEIRFDDDRDVLAILDEIGHIPLPPYIARPDEDADRELYQTVYSERPGAVAAPTAGLHFDEPLLAALREKGVEMAFVTLHVGAGTFQPVRVETIEDHVMHAEYAEVPQNVVDAVLACKARGNKVIAVGTTSVRSLESAARACQDGVIAPFFDDTQIFIYPGFEYQVVDALITNFHLPESTLIMLVSAFAGYKNTMNAYKEAVTEKYRFFSYGDAMFINRNTVASKETLSK

SEQ ID NO: 73809 - protein, 366 aa, Xenorhabdus innexi
  misc_feature (1)..(366): tr|A0A1N6N1B1|A0A1N6N1B1_9GAMM S-adenosylmethionine:tRN A ribosyltransferase-isomerase OS=Xenorhabdus innexi OX =290109 GN=queA PE=3 SV=1
MRVADFTFELPEELIAHYPQPQRSGCRLLSLDGETGELTHGIFTDVLNKLEAGDLLVFNNTRVIPARLFGRKATGGKLEVLVERMLDDKRVLAHVRASKAPKEGAELLLGEDKASGDIKVVKATMLARHEALFEIRFDDERDVLTVLNEIGHMPLPPYIARPDEESDKELYQTVYNERPGAVAAPTAGLHFDEPLLAALREKGVEMAFVTLHVGAGTFQPVRVETIEDHVMHAEYAEVPQDVVDAVLACKARGNKVVAVGTTSVRSLESAARACQNGLIAPFFDDTQIFIYPGFEYQVVDTLITNFHLPESTLIMLVSAFAGYKNTMRAYKEAVTEKYRFFSYGDAMFINRNSMAAKEMVAEEKIA

SEQ ID NO: 73810 - protein, 357 aa, Xenorhabdus ishibashii
  misc_feature (1)..(357): tr|A0A2D0KI73|A0A2D0KI73_9GAMM S-adenosylmethionine:tRN A ribosyltransferase-isomerase OS=Xenorhabdus ishibashi i OX=1034471 GN=queA PE=3 SV=1
MRVADFTFELPEELIAHYPQPQRSACRLLSLDGETGNLTHGVFTDVLDKLEAGDLLVFNNTRVIPARLFGRKATGGKLEVLVERMLDDKRVLAHVRASKAPKEGTELILGETQDIKATMLARHDTLFEIRFDDERDVLTILEQIGHMPLPPYIARPDEDADRELYQTVYNERPGAVAAPTAGLHFDEPLLAALREKGIEMAFVTLHVGAGTFQPVRVETIEDHVMHAEYAEVPQDVVEAVLACKARGNRVIAVGTTSVRSLESAARACQNGLIAPFFDDTQIFIYPGFEYQVVDALITNFHLPESTLIMLVSAFAGYKNTMNAYKEAVAEKYRFFSYGDAMFINRNKIAAKERVSEE

SEQ ID NO: 73811 - protein, 367 aa, Xenorhabdus japonica
  misc_feature (1)..(367): tr|A0A1I4YK37|A0A1I4YK37_9GAMM S-adenosylmethionine:tRN A ribosyltransferase-isomerase OS=Xenorhabdus japonica OX=53341 GN=queA PE=3 SV=1
MRVADFTFELPEELIAHYPQPQRSACRLLSLNGETGKLTHGIFTDVLDKLEAGDLLVFNNTRVIPARLFGRKATGGKLEVLVERMLDNKRVLAHVRASKAPKEGAELILGEDVLGETQSIKATMLARHDTLFEIRFDDERDVLTILDQIGHMPLPPYIARPDEDADRELYQTVYSERPGAVAAPTAGLHFDEPLLAALRKKGVEMAFVTLHVGAGTFQPVRVETIEDHVMHAEYAEVPQNVVDAVLACKARGNRVIAVGTTSVRSLESAARACQDGIISPFFDDTQIFIYPGFEYQVVDALITNFHLPESTLIMLVSAFAGYKNTMNAYKEAVAEKYRFFSYGDAMFINRNTVPSKELAASDAAVSK

SEQ ID NO: 73812 - protein, 366 aa, Xenorhabdus khoisanae
  misc_feature (1)..(366): tr|A0A0J5FV59|A0A0J5FV59_9GAMM S-adenosylmethionine:tRN A ribosyltransferase-isomerase OS=Xenorhabdus khoisanae OX=880157 GN=queA PE=3 SV=1
MRVADFTFELPEELIAHYPQPQRSACRLLSLDGETGTLTHGVFTDVLDKLEAGDLLVFNNTRVIPARLFGRKATGGKLEVLVERMLDNKRVLAHVRASKAPKEGAELILGEDVLGEDRSIKATMLARHDTLFEIRFDDDRDVLTILDQIGHMPLPPYIARPDEDADRELYQTVYSERPGAVAAPTAGLHFDEPLLAALREKGIEMAFVTLHVGAGTFQPVRVETIEDHVMHAEYAEVPQNVVDAVLACKARGNKVVAVGTTSVRSLESAARACQNGIIASFFDDTQIFIYPGFEYQVVDALITNFHLPESTLIMLVSAFAGYKNTMSAYKEAVTEKYRFFSYGDAMFISRNMMASKEMVSKEAVLK

SEQ ID NO: 73813 - protein, 374 aa, Xenorhabdus koppenhoeferi
  misc_feature (1)..(374): tr|A0A1I7JLE7|A0A1I7JLE7_9GAMM S-adenosylmethionine:tRN A ribosyltransferase-isomerase OS=Xenorhabdus koppenhoe feri OX=351659 GN=queA PE=3 SV=1
MHVADFTFELPEELIAHYPQPQRSGCRLLSLDGETGKLTHGIFTDVLDKLEVGDLLIFNNTRVIPARLFGRKATGGKLEVLVERILDNKRVLAHVRASKAPKEGAELILGEDVLGEDVLGEDVLGEDRSIKATMLARHDTLFEIRFDNYRDVLTILDQIGHMPLPPYITRPDEDADRELYQTVYNERPGAVAAPTAGLHFDEPLLAALREKGVEMAFVTLHVGAGTFQPVRVETIEDHTMHAEYAEVPQEVVDAVLACKARGNKVIAVGTTSVRSLESAAKACQDGIIAPFFDDTRIFIYPGFEYQVVDVLITNFHLPESTLIMLVSAFAGYKNTMNAYKEAVTEKYRFFSYGDAMFINRNILASTELISKIAV

SEQ ID NO: 73814 - protein, 357 aa, Xenorhabdus kozodoii
  misc_feature (1)..(357): tr|A0A2D0L1P6|A0A2D0L1P6_9GAMM S-adenosylmethionine:tRN A ribosyltransferase-isomerase OS=Xenorhabdus kozodoii OX=351676 GN=queA PE=3 SV=1
MRVADFTFELPEELIAHYPQPQRSACRLLSLDGETGKLTHGIFTDVLDKLEAGDLLVFNNTRVIPARLFGRKATGGKLEVLVERVLDNKRVLAHVRASKAPKEGAELILGETESIKATMLARHDTLFEIRFDDERDVLAILDQIGHMPLPPYIARPDEDADRELYQTVYSERPGAVAAPTAGLHFDEPLLAALRDKGIEMAFVTLHVGAGTFQPVRVETIEHHVMHAEYAEVPQDVVDAVLACKARGNRVIAVGTTSVRSLESAAKACQDGIIAPFFDDTQIFIYPGFEYQIVDALITNFHLPESTLIMLVSAFAGYQNTMHAYKEAVAEKYRFFSYGDAMFINRNPMAVKERVSKA

SEQ ID NO: 73815 - protein, 361 aa, Xenorhabdus mauleonii
  misc_feature (1)..(361): tr|A0A1I3QFA8|A0A1I3QFA8_9GAMM S-adenosylmethionine:tRN A ribosyltransferase-isomerase OS=Xenorhabdus mauleonii OX=351675 GN=queA PE=3 SV=1
MRVADFTFELPEELIAHYPQPQRSGCRLLSLDGETGKLTHGIFTDVLDKLEAGDLLVFNNTRVIPARLFGRKATGGKLEVLVERMLDNKRVLAHVRASKAPKEGAELILGEDVIGEEQSIKATMLARHDTLFEIRFDDERDVLTILEQVGHMPLPPYIARPDEDADRELYQTVYSERPGAVAAPTAGLHFDEPLLAALKEKGVEMSFVTLHVGAGTFQPVRVETIEDHVMHAEYAEVPQDVVDAVLACKARGNKVVAVGTTSVRSLESAARACQDGVIAPFFDDTQIFIYPGFEYQVVDALITNFHLPESTLIMLVSAFAGYKNTMNAYKEAVAEKYRFFSYGDAMFINRNEAASKEMISK

SEQ ID NO: 73816 - protein, 366 aa, Xenorhabdus miraniensis
  misc_feature (1)..(366): tr|A0A2D0JNG2|A0A2D0JNG2_9GAMM S-adenosylmethionine:tRN A ribosyltransferase-isomerase OS=Xenorhabdus miraniens is OX=351674 GN=queA PE=3 SV=1
MRVADFTFELPDELIAHYPQPQRSACRLLSLDGETGKLTHGVFTDVLDKLEAGDLLVFNNTRVIPARLFGRKATGGKLEVLVERMLDNKRVLAHVRASKAPKEGAELILGEDVLGEAQSIKATMLARHDTLFEIRFDDDRDVLTILDQIGHMPLPPYIARPDEDADRELYQTVYSERPGAVAAPTAGLHFDEPLLAALREKGIEMAFVTLHVGAGTFQPVRVETIENHVMHAEYAEVPQNVVDAVLACKARGNKVVAVGTTSVRSLESAARACQNGIIAPFFDDTQIFIYPGFEYQVVDALITNFHLPESTLIMLVSAFAGYKNTMSAYKEAVTEKYRFFSYGDAMFISRNMMASKEMASKEAVLK

SEQ ID NO: 73817 - protein, 359 aa, Xenorhabdus nematophila
  misc_feature (1)..(359): tr|N1NR25|N1NR25_XENNE S-adenosylmethionine:tRNA ribosy ltransferase-isomerase OS=Xenorhabdus nematophila F1 OX =1306162 GN=queA PE=3 SV=1
MRVADFTFELPEELIAHYPQPQRSGCRLLSLDGETGELTHGIFTDVLDKLEAGDLLVFNNTRVIPARLFGRKATGGKLEVLVERMLDNKRVLAHVRASKAPKEGAELILGEDVLGEDRSIKATMLARHDTLFEIRFDDDRDVLTILDQIGHMPLPPYIARPDEDADRELYQTVYSERPGAVAAPTAGLHFDEPLLAALREKGVEMAFVTLHVGAGTFQPVRVETIEDHVMHAEYAEVPQDVVDAVLACKARGNRVIAVGTTSVRSLESAAKACQGEIIAPFFDDTRIFIYPGFEYQVVDALITNFHLPESTLIMLVSAFAGYKNTMNAYKEAVTEKYRFFSYGDAMFINRNSIASQEMV

SEQ ID NO: 73818 - protein, 359 aa, Xenorhabdus nematophila; identical to SEQ ID NO: 73817
  misc_feature (1)..(359): tr|A0A0A8NTU4|A0A0A8NTU4_XENNE S-adenosylmethionine:tRN A ribosyltransferase-isomerase OS=Xenorhabdus nematophi la str. Websteri OX=1437826 GN=queA PE=3 SV=1

SEQ ID NO: 73819 - protein, 372 aa, Xenorhabdus poinarii
  misc_feature (1)..(372): tr|A0A068R1T6|A0A068R1T6_9GAMM S-adenosylmethionine:tRN A ribosyltransferase-isomerase OS=Xenorhabdus poinarii G6 OX=1354304 GN=queA PE=3 SV=1
MRVTDFTFELPEELIAHYPQPQRSACRLLSLHGETGELTHGVFTDVLDKLEAGDLLVFNNTRVIPARLFGRKATGGKLEVLVERMLDDKRVLAHVRASKAPKEGTELILGEDILGEAKGIKATMLARHDALFEIRFDDERDVLTILDQIGHMPLPPYIARPDEDADRELYQTVYSERPGAVAAPTAGLHFDEPLLAALREKGIEMAFVTLHVGAGTFQPVRVETIEDHVMHAEYAEVPQHVVDAVLACKARGNRVIAVGTTSVRSLESAAKACKDGLIAPFFGDTQIFIYPGFEYQVIDALITNFHLPESTLIMLVSAFAGYKNTMNAYREAVAEKYRFFSYGDAMFIHRNARASTEWVNPTERLSAASVAK

SEQ ID NO: 73820 - protein, 370 aa, Xenorhabdus sp.
  misc_feature (1)..(370): tr|A0A2D0L8A4|A0A2D0L8A4_9GAMM S-adenosylmethionine:tRN A ribosyltransferase-isomerase OS=Xenorhabdus sp. KJ12. 1 OX=1851571 GN=queA PE=3 SV=1
MRVADFTFELPEELIAHYPQPQRSGCRLLSLDGETGELTHGIFTDVLNKLEAGDLLVFNNTRVIPARLFGRKATGGKLEVLVERMLDDKRVLAHVRASKAPKEGTELILGEDKAPDGNQIVKATMLARHDALFEIRFDDKRDVLTILDEIGHMPLPPYIARPDEESDKELYQTVYNERPGAVAAPTAGLHFDEPLLAALREKGVEMAFVTLHVGAGTFQPVRVDTIEDHIMHAEYAEVPQNVVDAVLACKARGNKVVAVGTTSVRSLESAARACQDGLIAPFFDDTQIFIYPGFEYQVVDTLITNFHLPESTLIMLVSAFAGYKNTMSAYKEAVTEKYRFFSYGDAMFINRNSIAAKEMVEVATDIDQSE

SEQ ID NO: 73821 - protein, 357 aa, Xenorhabdus sp.
  misc_feature (1)..(357): tr|A0A0M0TA59|A0A0M0TA59_9GAMM S-adenosylmethionine:tRN A ribosyltransferase-isomerase OS=Xenorhabdus sp. GDc32 8 OX=742178 GN=queA PE=3 SV=1
MRVADFTFELPEELIAHYPQPQRSACRLLSLDGETGKLAHGVFTDVLEKLEAGDLLVFNNTRVIPARLFGRKATGGKLEVLVERMLDSKRVLAHVRASKAPKEGAELILGEAQSIKATMLARHDTLFEIRFDDERDVLTILDQIGHMPLPPYIARPDEDADRELYQTVYSERPGAVAAPTAGLHFDEPLLAALRAKGIEMAFVTLHVGAGTFQPVRVETIEDHVMHAEYAEVPQDVVDAVLACKARGNRVIAVGTTSVRSLESAARACQDGIIAPFFDDTQIFIYPGFEYQVVDALITNFHLPESTLIMLVSAFAGYKNTMNAYKEAVAKEYRFFSYGDAMFINRNKMAAKERVLKE

SEQ ID NO: 73822 - protein, 370 aa, Xenorhabdus stockiae
  misc_feature (1)..(370): tr|A0A2D0KSE6|A0A2D0KSE6_9GAMM S-adenosylmethionine:tRN A ribosyltransferase-isomerase OS=Xenorhabdus stockiae OX=351614 GN=queA PE=3 SV=1
MRVADFTFELPEELIAHYPQPQRSGCRLLSLDGETGELTHGIFTDVLNKLEAGDLLVFNNTRVIPARLFGRKATGGKLEVLVERMLDDKRVLAHVRASKAPKEGTELILGEDKALDGNQIVKATMLARHDALFEICFDDERDVLTILDEIGHMPLPPYIARPDEESDKELYQTVYNERPGAVAAPTAGLHFDEPLLAALREKGVEMAFVTLHVGAGTFQPVRVDTIEDHIMHAEYAEVPQNVVDAVLACKARGNKVVAVGTTSVRSLESAARACQDGLIAPFFDDTQIFIYPGFEYQVVDTLITNFHLPESTLIMLVSAFAGYKNTMSAYKEAVTEKYRFFSYGDAMFINRNSIAAKEMVEVATDIDQSE

SEQ ID NO: 73823 - protein, 361 aa, Xenorhabdus szentirmaii
  misc_feature (1)..(361): tr|W1J0A3|W1J0A3_9GAMM S-adenosylmethionine:tRNA ribosy ltransferase-isomerase OS=Xenorhabdus szentirmaii DSM 1 6338 OX=1427518 GN=queA PE=3 SV=1
MRVADFTFELPEELIAHYPQPQRSGCRLLSLNGETGKLTHGIFTDVLNKLEAGDLLVFNNTRVIPARLFGRKATGGKLEVLVERMLDNKRVLAHVRASKAPKEGAELILGEDVLGEGQSVKATMLARHDTLFEIRFDDERDVLAILDQIGHMPLPPYIARPDEDADRELYQTVYSERPGAVAAPTAGLHFDESLLAALNEKGVEMAFVTLHVGAGTFQPVRVETIEDHVMHAEYAEVPQNVVDAVLACKVRGNRVIAVGTTSVRSLESAARACQDGIIAPFFDDTQIFIYPGFEYQVVDALITNFHLPESTLIMLVSAFAGYKNTMNAYKEAVEEKYRFFSYGDAMFISRNMQASKETVSK

SEQ ID NO: 73824 - protein, 357 aa, Xenorhabdus thuongxuanensis
  misc_feature (1)..(357): tr|A0A1Q5TQR0|A0A1Q5TQR0_9GAMM S-adenosylmethionine:tRN A ribosyltransferase-isomerase OS=Xenorhabdus thuongxua nensis OX=1873484 GN=queA PE=3 SV=1
MRVADFTFELPEELIAHYPQPQRSACRLLSLDGETGKLTHGVFTDVLDKLEAGDLLVFNNTRVIPARLFGRKATGGKLEVLVERMLDDKRVLAHVRASKAPKEGTELILGETQDIKATMLARHDTLFEIRFDDERDVLTILEQIGHMPLPPYIARPDEAADRELYQTVYNERPGAVAAPTAGLHFDEPLLAALREKGIEMAFVTLHVGAGTFQPVRVETIEDHVMHAEYAEVPQDVVDAVLACKARGNRVIAVGTTSVRSLESAARACQGGMLAPFFDDTQIFIYPGFEYQVVDALITNFHLPESTLIMLVSAFAGYKNTMNAYKEAVAEKYRFFSYGDAMFINRNKIAAKERVLEE

SEQ ID NO: 73825 - protein, 378 aa, Xenorhabdus vietnamensis
  misc_feature (1)..(378): tr|A0A1Y2SIV6|A0A1Y2SIV6_9GAMM S-adenosylmethionine:tRN A ribosyltransferase-isomerase OS=Xenorhabdus vietnamen sis OX=351656 GN=queA PE=3 SV=1
MRVADFTFELPEELIAHYPQPQRSACRLLSLDGETGKLTHGVFTDVLDKLEAGDLLVFNNTRVIPARLFGRKATGGKLEVLVERMLDNKRVLAHVRASKAPKEGAELILGEDVLGKAQCIKATMLTRHDTLFEIRFDDERDVLTILDQIGHMPLPPYIARPDEDADRELYQTVYSERPGAVAAPTAGLHFDEPLLAVLREKGIEMAFVTLHVGAGTFQPVRVETIEDHVMHAEYAEVPKGVVDAVLACKARGNRVIAVGTTSVRSLESAAKACQDGMITPFFDDTQIFIYPGFEYQVVDALITNFHLPESTLIMLVSAFAGYKNTMSAYKEAVAEKYRFFSYGDAMFINRNTVASKELVESKELMALEEQVSEETISK

SEQ ID NO: 73826 - protein, 345 aa, Xinfangfangia sp.
  misc_feature (1)..(345): tr|A0A3P5XB23|A0A3P5XB23_9RHOB S-adenosylmethionine:tRN A ribosyltransferase-isomerase OS=Xinfangfangia sp. CIP 111625 OX=2483812 GN=queA PE=3 SV=1
MRLSDFDFHLPEALIATRPARPRTSARLLLAEGDGIRDLHVRDLTDLLRPGDLMVLNNTKVIPARLTGTRARGEALAKIEVTLLEPQAKGGWRALAKPLRKLKEGEEIVFSDRLSALVAEKGETDLRLEFSLSGEDFDAALNEAGQMPLPPYIAAKRPADAQDATDYQTVFARHSGAVAAPTASLHFDQDLLEALRAKGVSFTEVTLHVGAGTFLPVKVEDVASHKMHAEWGQVGAGAAQAIRETKRAGGRVIPVGTTALRLIETAARETGEIAPWQGWTDIFIRPGFPFRVSDALMTNFHLPKSTLLMLVSALMGKDRIGKIYDHAIRNGYRFFSYGDSSLLIP

SEQ ID NO: 73827 - protein, 346 aa, Xylella fastidiosa
  misc_feature (1)..(346): tr|A0A439EVF1|A0A439EVF1_XYLFS S-adenosylmethionine:tRN A ribosyltransferase-isomerase OS=Xylella fastidiosa su bsp. sandyi OX=671135 GN=queA PE=3 SV=1
MKKSDFHYDLPEELIAQGPLPERSASRLMLVPSAPEQFQDCYVRDLPELLQPGDLLVFNDTRVIPARLFGRKVSGGRVEVLIERFLGTHQAVVQLRTSRSLKVGNRILLDAGGHAEVLGRDGEFYLLSFDVESPLEQWLSDVGQLPLPPYIHREPDEYDRERYQTVFARAVGAVAAPTAGLHFDESLLARLRARGVEFGYITLHVGAGTFQPVRVALLQEHVMHSEWFKVGAELVEQVRSARARGGRVIAVGTTVVRSLESAMRHGELQPFVGETQIFIFPGYCIRSVDAMVTNFHLPESTLLMLVAAFAGRTRILDAYYHAVQQRYRFFSYGDAMLLFPRNAGEQ

SEQ ID NO: 73828 - protein, 347 aa, Xylella fastidiosa
  misc_feature (1)..(347): sp|Q9PDR5|QUEA_XYLFA S-adenosylmethionine:tRNA ribosylt ransferase-isomerase OS=Xylella fastidiosa (strain 9a5c ) OX=160492 GN=queA PE=3 SV=1
MLKKSDFHYDLPEELIAQGPLPERSASRLMLVPSAPEQFQDCYVRDLPELLQPGDLLVFNDTRVIPARLFGRKVSGGRVEILIERFLGTHQAVVQLRTSRSLKVGNRILLDAGGHAGVLGRDGDFYLLSFDVESPLEQWLSDVGQLPLPPYIHREPDEYDRERYQTVFARAVGAVAAPTAGLHFDESLLARLRARGVEFGYITLHVGAGTFQPVRVALLQQHVMHSEWFKVGAELVEQVRSARARGGRVIAVGTTVVRSLESAMRHGELQPFVGETQIFIFPGYCIRSVDAMVTNFHLPESTLLMLVAAFAGRTRILDAYYHAVQQRYRFFSYGDAMLLFPRNAGEQ

SEQ ID NO: 73829 - protein, 346 aa, Xylella taiwanensis
  misc_feature (1)..(346): tr|Z9JKN5|Z9JKN5_9GAMM S-adenosylmethionine:tRNA ribosy ltransferase-isomerase OS=Xylella taiwanensis OX=144477 0 GN=queA PE=3 SV=1
MKKSDFHYNLPEDLIAQAPLPERSASRLMLVPPIPERLQDCYVRDLPELLQPGDLLVFNDTRVIPARLFGKKVSGGRVEILIERLLGAQQVAAQLRTSRPPKVGNRILLDAGGRVEVLGRDGEFYLLGFEVDLPLEQWLSDVGQLPLPPYIRREPEQNDRERYQTVFARAAGAVAAPTAGLHFDESLLARLRARGIKFGYITLHVGAGTFQPVRVALLQQHVMHSEWFNVGAELVEQVRSTRARGGRVIAVGTTVVRSLESAMRNGELQPFVGETRIFIFPGYCIRSVDAMVTNFHLPESTLLMLVAAFAGRTRVLEAYRHAVQEHYRFFSYGDAMLLFPRNAGEQ

SEQ ID NO: 73830 - protein, 375 aa, Xylophilus ampelinus
  misc_feature (1)..(375): tr|A0A318SFX0|A0A318SFX0_9BURK S-adenosylmethionine:tRN A ribosyltransferase-isomerase OS=Xylophilus ampelinus OX=54067 GN=queA PE=3 SV=1
MPSPAPAAPRDFTVADFDFALPASLIAQHPAAERSGSRLLDGTGDAPADRAFRDLPGLLRAGDLLVFNDTRVVKARLFGEKPTGGKAELLVERVLQGPEIVAHVKVSKKPPVGTTLRMVGGFGATLLGRWPAEDGPLFRLRLDGPAGETPYDLMERHGHVPLPPYIERDQQHEGVADAAEDERRYQTVFARAPGAVAAPTAALHFDDAVLAALEARGVRRAAVTLHVGAGTFQPVKVERIADHRMHHERYDVPAATRQAIADCRARGGRVVAVGTTTVRTLESWAGSGEPEGDTDIFITPGFRFRVVDVLLTNFHLPRSTLMMLVSAFAGYERVMGLYRHAVAEEYRFFSYGDAMLLRRSRQARAPVPGMPGHAG

SEQ ID NO: 73831 - protein, 363 aa, Xylophilus sp.
  misc_feature (1)..(363): tr|A0A0Q4FYQ6|A0A0Q4FYQ6_9BURK S-adenosylmethionine:tRN A ribosyltransferase-isomerase OS=Xylophilus sp. Leaf22 0 OX=1735686 GN=queA PE=3 SV=1
MPSSASSAPATPRDFTVADFDFDLPPSLIAQYPAAERSGSRLLDGTGDAPADRAFRELPGLLRAGDLLLFNDTRVVKARLFGEKPTGGKAELLVERVLQGQEIVAHVKVSKKPPVGTTLRMAGGFGATLLGRWPKEDGPLFRFRLDGTAGETPYDLMERHGHVPLPPYIERDQQHEDASDTDEDARRYQTVFARVPGAVAAPTAALHFDDAVLAQLEACGVRRAAVTLHVGAGTFQPVKVERIADHHMHHERYDVPAATQQAIADCRARGGRVVAVGTTTVRTLESWARSGQAAGDTDIFITPGFRFQVVDVLLTNFHLPKSTLMMLVSAFAGYERVMGLYRHAVAQEYRFFSYGDAMLLERR

SEQ ID NO: 73832 - protein, 349 aa, Yangia pacifica
  misc_feature (1)..(349): tr|A0A2U8HD83|A0A2U8HD83_9RHOB S-adenosylmethionine:tRN A ribosyltransferase-isomerase OS=Yangia pacifica OX=31 1180 GN=queA PE=3 SV=1
MQLSDFDFPLPEDLIATRPAHPRSSARLLVAEGETITDAIVRDLTDWLRPGDRLVLNDTKVIPARLSGLRHRSGAQGETEARIEITLLEPRADGLWAALVKPLKKLREGETVVLSERLSATLEAREEGQGLFRFNLSGEDFDAALAEAGAMPLPPYIAAKRAADEQDKEDYQTVWARASGAVAAPTASLHFDVPLLAALKERGVEFTHVTLHVGAGTFLPVKVDDVTTHKMHGEWGEVTDVAAAEIAATKAAGGRVIPVGTTALRLIETAARGTGLIAPWRGVTDIFIYPGFDFHVADALMTNFHLPKSTLMMLVAAFMGKARMDRVYAHALAERYRFFSYGDASLLIP

SEQ ID NO: 73833 - protein, 349 aa, Yangia pacifica
  misc_feature (1)..(349): tr|A0A1I6NW35|A0A1I6NW35_9RHOB S-adenosylmethionine:tRN A ribosyltransferase-isomerase OS=Yangia pacifica OX=31 1180 GN=queA PE=3 SV=1
MQLSDFDFPLPEDLIATRPAHPRSSARLLVAEGETITDAVVRDLTDWLHPGDRLVLNDTKVIPARLSGLRHRSSAQGETEARIEITLLEPRAGGLWAALVKPLKKLREGETVVLSERLSATLEAREEGQGLFRFNLTGEDFDAALAEAGAMPLPPYIAAKRAADEQDKEDYQTVWARTSGAVAAPTASLHFDEALLAALTARGVEFTHVTLHVGAGTFLPVKVDDVTTHKMHGEWGEVTETAAAEIAATKAAGGRVIPVGTTALRLIETAARGTGAIAPWTGVTDIFIYPGFQFHVADALMTNFHLPKSTLMMLVAAFMGKARMDRVYAHALAERYRFFSYGDASLLIP

SEQ ID NO: 73834 - protein, 349 aa, Yangia sp.
  misc_feature (1)..(349): tr|A0A1B1PLG5|A0A1B1PLG5_9RHOB S-adenosylmethionine:tRN A ribosyltransferase-isomerase OS=Yangia sp. CCB-MM3 OX =1792508 GN=queA PE=3 SV=1
MQLSDFDFPLPEDLIATRPAHPRSSARLLVAEGTRITDAIVRDLTDWLQPGDRLVLNDTKVIPARLSGLRHRSSAQGETEARIEVTLLEPRAGGLWSALVKPLKKLREGETVVFSDQLSATLEAREDGQGLLRFNLTGEDFDAALAEAGAMPLPPYIAAKRAADAQDKEDYQTVWAKNSGAVAAPTASLHFDDALLAALKARGVEFTHVTLHVGAGTFLPVKVDDVTTHKMHGEWGEVTEAAASEIAATKAAGGRVIPVGTTALRLIETAARDTGAIAPWSGVTDIFIYPGFTFHVADALMTNFHLPKSTLMMLVAAFMGKERMDRVYAHAIAERYRFFSYGDASLLIP

SEQ ID NO: 73835 - protein, 349 aa, Yangia sp.
  misc_feature (1)..(349): tr|A0A2A3JTY8|A0A2A3JTY8_9RHOB S-adenosylmethionine:tRN A ribosyltransferase-isomerase OS=Yangia sp. SAOS 153D OX=1779329 GN=queA PE=3 SV=1
MQLSDFDFPLPEDLIATRPAHPRSSARLLVAEGETITDAIVRDLTDWLRPGDRLVLNDTKVIPARLSGLRHRSSAQGETEARIEITLLEPRAGGLWAALVKPLKKLREGETVVLSERLSATLEAREEGQGLFRFNLTGEDFDAALAEAGAMPLPPYIAAKRAADEQDKEDYQTVWARTSGAVAAPTASLHFDAPLLAALKDRGIEFTHVTLHVGAGTFLPVKVDDVTTHKMHGEWGEVTDSAAAEIAATKAAGGRVIPVGTTALRLIETAARESGAIAPWTGVTDIFIYPGFEFHVADALMTNFHLPKSTLMMLVAAFMGKARMDRVYAHALAERYRFFSYGDASLLIP

SEQ ID NO: 73836 - protein, 356 aa, Yersinia aldovae
  misc_feature (1)..(356): tr|A0A0T9UGZ1|A0A0T9UGZ1_YERAL S-adenosylmethionine:tRN A ribosyltransferase-isomerase OS=Yersinia aldovae OX=2 9483 GN=queA PE=3 SV=1
MRVADFSFELPESLIAHYPQPQRSGCRLLSLDGPTGTLTHGIFTDLLDKLLPGDLLVFNNTRVIPARLFGRKASGGKLEVLVERVLDDHRVLAHVKASKAPKPGAELLLGDDESIQATMLARHDTLFELRFDDERDVFTILNAVGHMPLPPYIDRPDEDADRELYQTVYSQRPGAVAAPTAGLHFDEPMLAALREKGIEMAFVTLHVGAGTFQPVRVDTIEEHIMHSEYAEVPQDVVDAVLACKARGNRVVAVGTTSVRSLESAAKATDNGLIAPFFGDTKIFIYPGYHYQVVDALITNFHLPESTLIMLVSAFAGYKNTMNAYQQAVAEQYRFFSYGDAMFISRNPRAPQETVNP

SEQ ID NO: 73837 - protein, 356 aa, Yersinia bercovieri
  misc_feature (1)..(356): tr|A0A2G4U2P2|A0A2G4U2P2_YERBE S-adenosylmethionine:tRN A ribosyltransferase-isomerase OS=Yersinia bercovieri O X=634 GN=queA PE=3 SV=1
MRVADFSFELPESLIAHYPQSQRSGCRLLSLDGPTGTLTHGIFTDLLDKLEPGDLLVFNNTRVIPARLFGRKASGGKLEVLVERVLDDHRVLAHVKASKSPKPGTELLLGDDESIRATMLARHDTLFELRFDDERDVFTILNAVGHMPLPPYIDRPDEDADRELYQTVYSERPGAVAAPTAGLHFDEPMLAALREKGIEMAFVTLHVGAGTFQPVRVDTIEEHIMHSEYAEVPQQVVDAVLACKARGKRVVAVGTTSVRSLESAAKATENGLIAPFFGDTRIFIYPGYEYQVVDALVTNFHLPESTLIMLVSAFAGYKNTMNAYQQAVAEQYRFFSYGDAMFISRNPRAPQETVHP

SEQ ID NO: 73838 - protein, 362 aa, Yersinia enterocolitica
  misc_feature (1)..(362): sp|A1JNT4|QUEA_YERE8 S-adenosylmethionine:tRNA ribosylt ransferase-isomerase OS=Yersinia enterocolitica serotyp e O:8 / biotype 1B (strain NCTC 13174 / 8081) OX=393305 GN=queA PE=3 SV=1
MRVADFSFELPESLIAHYPQPQRSGCRLLSLDGPTGALTHGIFTDLLDKLVPGDLLVFNNTRVIPARLFGRKASGGKLEVLVERVLDDHRVLAHVKASKAPKPGTELLLGDDESIHATMLARHDTLFELRFDDERDVFTILDAVGHMPLPPYIDRPDEDADRELYQTVYSQRLGAVAAPTAGLHFDEPMLAALREKGIEMAFVTLHVGAGTFQPVRVETIEDHIMHSEYAEVPQEVVDAVLACKARGNRVVAVGTTSVRSLESAAKSSDNGLIAPFFGDTKIFIYPGYHYQVVDALITNFHLPESTLIMLVSAFAGYKNTMNAYQQAVAEQYRFFSYGDAMFISRNPQASTEMISLNSTDNQ

SEQ ID NO: 73839 - protein, 362 aa, Yersinia enterocolitica
  misc_feature (1)..(362): tr|F4N3F2|F4N3F2_YEREN S-adenosylmethionine:tRNA ribosy ltransferase-isomerase OS=Yersinia enterocolitica W2270 3 OX=913028 GN=queA PE=3 SV=1
MRVADFSFELPESLIAHYPQPQRSGCRLLSLDGPTGALTHGIFTDLLDKLVPGDLLIFNNTRVIPARLFGRKASGGKLEVLVERVLDDHRVLAHVKASKAPKPGTELLLGDDESIHATMLARHDTLFELRFDDERDVFTILDAVGHMPLPPYIDRPDEDADRELYQTVYSQRLGAVAAPTAGLHFDEPMLAALREKGIEMAFVTLHVGAGTFQPVRVETIEDHIMHSEYAEVPQEVVDAVLACKARGNRVVAVGTTSVRSLESAAKASDNGLIAPFFGDTKIFIYPGYHYQVVDALITNFHLPESTLIMLVSAFAGYKNTMNAYQQAVAEQYRFFSYGDAMFISRNPQASTEMISLNSTDNQ

SEQ ID NO: 73840 - protein, 356 aa, Yersinia entomophaga
  misc_feature (1)..(356): tr|A0A3S6EYF7|A0A3S6EYF7_YERET S-adenosylmethionine:tRN A ribosyltransferase-isomerase OS=Yersinia entomophaga OX=935293 GN=queA PE=3 SV=1
MRVADFSFELPESLIAHYPQPQRSGCRLLSLDGPSGELTHGIFTDLLDKLEAGDLLVFNNTRVIPARLFGRKASGGKLEVLVERVLDDHRVLAHVRASKAPKPGAELLLGDNESIRATMLARHDTLFELRFDEEQDVFSILNAIGHMPLPPYIDRPDEDADRELYQTVYSERPGAVAAPTAGLHFDEPLLAALREKGIEMAFVTLHVGAGTFQPVRVESIEEHIMHSEYAEVPPEVVDAVLACKARGKRVVAVGTTSVRSLESAAKACENGLIAPFFGDTRIFIYPGYQYQVVDALVTNFHLPESTLIMLVSAFAGYKNTMNAYQQAVAEQYRFFSYGDAMFISRNPLAPQETVNQ

SEQ ID NO: 73841 - protein, 356 aa, Yersinia frederiksenii
  misc_feature (1)..(356): tr|A0A0B6FJ94|A0A0B6FJ94_YERFR S-adenosylmethionine:tRN A ribosyltransferase-isomerase OS=Yersinia frederikseni i Y225 OX=1454377 GN=queA PE=3 SV=1
MRVADFSFELPESLIAHYPQPQRSGCRLLSLDGPTGTLTHGIFTDLLDKLVPGDLLVFNNTRVIPARLFGRKASGGKLEVLVERVLDDHRVLAHVKASKAPKPGTELLLGDDESIRATMLARHDTLFELRFDDERDVFTILNAVGHMPLPPYIDRPDEDADRELYQTVYSQRPGAVAAPTAGLHFDEPMLAALREKGIEMAFVTLHVGAGTFQPVRVDTIEEHIMHSEYAEVPQEVVDAVLACKARGNRVVAVGTTSVRSLESAAKACDNGLIAPFFGDTRIFIYPGYQYQIVDALITNFHLPESTLIMLVSAFAGYKNTMNAYQQAVAEQYRFFSYGDAMFISRNPRAPQEPVTP

SEQ ID NO: 73842 - protein, 356 aa, Yersinia frederiksenii
  misc_feature (1)..(356): tr|A0A0T9UII5|A0A0T9UII5_YERFR S-adenosylmethionine:tRN A ribosyltransferase-isomerase OS=Yersinia frederikseni i OX=29484 GN=queA PE=3 SV=1
MRVADFSFELPESLIAHYPQPQRSGCRLLSLDGPTGRLTHGIFTDLLDKLEPGDLLVFNNTRVIPARLFGRKASGGKLEVLVERVLDDSRVLAHVKASKAPKPGAELLLGDDESIRATMVARHDTLFELRFDDERDVFTILNLVGHMPLPPYIDRPDEDADRELYQTVYSQRPGAVAAPTAGLHFDEPLLAALREKGIEMAFVTLHVGAGTFQPVRVDTIEEHIMHSEYAEVPQEVVDAVLACKARGNRVVAVGTTSVRSLESAAKATENGLISPFFGDTRIFIYPGYHYQVVDALVTNFHLPESTLIMLVSAFAGYKNTMNAYQQAVAEQYRFFSYGDAMFISRNPRAPEETVNP

SEQ ID NO: 73843 - protein, 362 aa, Yersinia hibernica
  misc_feature (1)..(362): tr|A0A481QEI5|A0A481QEI5_9GAMM S-adenosylmethionine:tRN A ribosyltransferase-isomerase OS=Yersinia hibernica OX =2339259 GN=queA PE=3 SV=1
MRVADFSFELPESLIAHYPQPQRSGCRLLSLDGPTGTLTHGIFTDLLDKLVPGDLLVFNNTRVIPARLFGRKASGGKLEVLVERVLDDHRVLAHVKASKAPKPGAELLLGDDESIQATMLARHDTLFELRFDDERDVLTILNAVGHMPLPPYIDRPDEDADRELYQTVYSQRPGAVAAPTAGLHFDEPMLAALRDKGIEMAFVTLHVGAGTFQPVRVDTIEDHIMHSEYAEVPQEVVDAVLACKARGNRVVAVGTTSVRSLESAANATDDGLIAPFFGDTRIFIYPGYHYQVVDALITNFHLPESTLIMLVSAFAGYKNTMNAYQQAVAEQYRFFSYGDAMFISRNPQASTEMISQEEAGNQ

SEQ ID NO: 73844 - protein, 356 aa, Yersinia intermedia
  misc_feature (1)..(356): tr|A0A0H5LVC7|A0A0H5LVC7_YERIN S-adenosylmethionine:tRN A ribosyltransferase-isomerase OS=Yersinia intermedia O X=631 GN=queA PE=3 SV=1
MRVADFSFELPESLIAHYPQPQRSGCRLLSLDGPTGALTHGIFTDLLDKLEAGDLLVFNNTRVIPARLFGRKASGGKLEVLVERVLDDHRVLAHVKASKSPKPGTELLLGDDESIRATMLARHDTLFELRFDDERDVFTILNAVGHMPLPPYIDRPDEDADRELYQTVYSERPGAVAAPTAGLHFDEPMLAALREKGIEMAFVTLHVGAGTFQPVRVDTIEDHIMHSEYAEVPQEVVDAVLACKARGKRVVAVGTTSVRSLESAANAAENDLIAPFFDDTCIFIYPGYQYQVVDALVTNFHLPESTLIMLVSAFAGYKNTMNAYQQAVAEQYRFFSYGDAMFISRNPRAPQETVNP

SEQ ID NO: 73845 - protein, 356 aa, Yersinia intermedia
  misc_feature (1)..(356): tr|A0A0T9M6Q2|A0A0T9M6Q2_YERIN S-adenosylmethionine:tRN A ribosyltransferase-isomerase OS=Yersinia intermedia O X=631 GN=queA PE=3 SV=1
MRVADFSFELPESLIAHYPQPQRSGCRLLSLDGPTGTLTHGIFTDLLDKLTPGDLLVFNNTRVIPARLFGRKASGGKLEVLVERVLDDHRVLAHVKASKAPKPGAELLLGDDESIRATMLARHDTLFELRFDDERDVFTILNAVGHMPLPPYIDRPDEDADRELYQTVYSERPGAVAAPTAGLHFDEPMLAALRAKGIEMAFVTLHVGAGTFQPVRVDTIEEHIMHSEYAEVPQDVVDAVLACKARGNRVVAVGTTSVRSLESAAKAAQNSLIAPFFGDTRIFIYPGYHYQVVDALVTNFHLPESTLIMLVSAFAGYKNTMNAYQQAVAEQYRFFSYGDAMFISRNPRAPQETVNP

SEQ ID NO: 73846 - protein, 356 aa, Yersinia kristensenii
  misc_feature (1)..(356): tr|A0A0T9NXP2|A0A0T9NXP2_YERKR S-adenosylmethionine:tRN A ribosyltransferase-isomerase OS=Yersinia kristensenii OX=28152 GN=queA PE=3 SV=1
MRVADFSFELPESLIAHYPQPQRSGCRLLSLDGPTGTLTHGIFTDLLDKLVPGDLLVFNNTRVIPARLFGRKASGGKLEVLVERVLDDHRVLAHVKASKAPKPGTELLLGDDESIRATMLARHDTLFELRFDDERDVFTILNAVGHMPLPPYIDRPDEDADRELYQTVYSQRPGAVAAPTAGLHFDEPMLAALREKGIEMAFVTLHVGAGTFQPVRVDTIEEHIMHSEYAEVPQEVVDAVLACKARGNRVVAVGTTSVRSLESAAKACDSGLIAPFFGDTRIFIYPGYQYQIVDALITNFHLPESTLIMLVSAFAGYKNTMNAYQQAVAEQYRFFSYGDAMFISRNPRAPQEPVTP

SEQ ID NO: 73847 - protein, 356 aa, Yersinia kristensenii; identical to SEQ ID NO: 73841
  misc_feature (1)..(356): tr|A0A0T9NAL5|A0A0T9NAL5_YERKR S-adenosylmethionine:tRN A ribosyltransferase-isomerase OS=Yersinia kristensenii OX=28152 GN=queA PE=3 SV=1

SEQ ID NO: 73848 - protein, 356 aa, Yersinia massiliensis
  misc_feature (1)..(356): tr|A0A2R4NSZ1|A0A2R4NSZ1_9GAMM S-adenosylmethionine:tRN A ribosyltransferase-isomerase OS=Yersinia massiliensis OX=419257 GN=queA PE=3 SV=1
MRVADFSFELPESLIAHYPQPQRSGCRLLSLDGPTGALTHGIFTDLLDKLEAGDLLVFNNTRVIPARLFGRKASGGKLEVLVERVLDDHRVLAHVKASKSPKPGTELLLGDDESIRATMLARHDTLFELRFDDERDVFTILNAVGHMPLPPYIDRPDEDADRELYQTVYSERPGAVAAPTAGLHFDEPMLAALRDKGIEMAFVTLHVGAGTFQPVRVDTIEDHIMHSEYAEVPQEVVDAVLACKARGKRVVAVGTTSVRSLESAANAAENGLIAPFFGDTCIFIYPGYQYQVVDALVTNFHLPESTLIMLVSAFAGYKNTMNAYQQAVAEQYRFFSYGDAMFISRNPRAPQETVNP

SEQ ID NO: 73849 - protein, 356 aa, Yersinia massiliensis
  misc_feature (1)..(356): tr|A0A0T9PK48|A0A0T9PK48_9GAMM S-adenosylmethionine:tRN A ribosyltransferase-isomerase OS=Yersinia massiliensis OX=419257 GN=queA PE=3 SV=1
MRVADFSFELPESLIAHYPQPQRSGCRLLSLDGPTGALTHGIFTDLLDKLEAGDLLVFNNTRVIPARLFGRKASGGKLEVLVERVLDDHRVLAHVKASKSPKPGTELLLGDDESIRATMLARHDTLFELRFDDERDVFTILNAVGHMPLPPYIDRPDEDADRELYQTVYSERPGAVAAPTAGLHFDEPMLAALREKGIEMAFVTLHVGAGTFQPVRVDTIEDHIMHSEYAEVPQEVVDAVLACKARGKRVVAVGTTSVRSLESAANAAENDLIAPFFGDTCIFIYPGYQYQVVDALVTNFHLPESTLIMLVSAFAGYKNTMNAYQQAVAEQYRFFSYGDAMFISRNPRAPQETVNP

SEQ ID NO: 73850 - protein, 367 aa, Yersinia mollaretii
  misc_feature (1)..(367): tr|C4S7U4|C4S7U4_YERMW S-adenosylmethionine:tRNA ribosy ltransferase-isomerase OS=Yersinia mollaretii (strain A TCC 43969 / DSM 18520 / CIP 103324 / CNY 7263 / WAIP 20 4) OX=349967 GN=queA PE=3 SV=1
MKWKAMRVADFSFELPESLIAHYPQAQRSGCRLLSLDGPTGALTHGIFTDLLDKLEPGDLLVFNNTRVIPARLFGRKASGGKLEVLVERVLDDHRVLAHVKASKSPKPGTELLLGDDESIRATMLARHETLFELRFDDERDVFTILNAVGHMPLPPYIDRPDEDADRELYQTVYSERLGAVAAPTAGLHFDEPMLAALREKGIEMAFVTLHVGAGTFQPVRVDTIEEHVMHSEYAEVPQEVVDAVLACKARGKRVVAVGTTSVRSLESAANATEKGLIAPFFGDTCIFIYPGYEYQVVDALVTNFHLPESTLIMLVSAFAGYKNTMNAYQQAVAEQYRFFSYGDAMFITRNPQAGIELPPLNGADNQ

SEQ ID NO: 73851 - protein, 362 aa, Yersinia mollaretii
  misc_feature (1)..(362): tr|A0A0U1I320|A0A0U1I320_YERMO S-adenosylmethionine:tRN A ribosyltransferase-isomerase OS=Yersinia mollaretii O X=33060 GN=queA PE=3 SV=1
MRVADFSFELPESLIAHYPQAQRSGCRLLSLDGPTGALTHGIFTDLLDKLEPGDLLVFNNTRVIPARLFGRKASGGKLEVLVERVLDDHRVLAHVKASKSPKPGTALLLGDDESIQATMLARHDTLFELRFDDERDVFAILNAVGHMPLPPYIDRPDEDADRELYQTVYSERLGAVAAPTAGLHFDEPMLAALREKGIEMAFVTLHVGAGTFQPVRVDTIEEHVMHSEYAEVPQEVVDAVLACKARGKRVVAVGTTSVRSLESAANATEKGLIAPFFGDTCIFIYPGYEYQVVDALVTNFHLPESTLIMLVSAFAGYKNTMNAYQQAVAEQYRFFSYGDAMFITRNPQAGIELTSLNGADNQ

SEQ ID NO: 73852 - protein, 356 aa, Yersinia nurmii
  misc_feature (1)..(356): tr|A0A0T9L789|A0A0T9L789_9GAMM S-adenosylmethionine:tRN A ribosyltransferase-isomerase OS=Yersinia nurmii OX=68 5706 GN=queA PE=3 SV=1
MRVADFSFELPESLIAHYPQPQRSGCRLLSLDGPSGELTHGIFTDLLDKLEAGDLLVFNNTRVIPARLFGRKASGGKLEVLVERVLDDHRVLAHVRASKAPKPGAELLLGDDESIRATMLARHDTLFELRFDEEQDVFSILNAIGHMPLPPYIDRPDEDADRELYQTVYSERPGAVAAPTAGLHFDEPLLAALREKGIEMAFVTLHVGAGTFQPVRVESIEEHIMHSEYAEVPQEVVDAVLACKARGKRVVAVGTTSVRSLESAAKACENGLIAPFFGDTRIFIYPGYQYQVVDALVTNFHLPESTLIMLVSAFAGYKNTMNAYRQAVAEQYRFFSYGDAMFISRNPLAPQETVNQ

SEQ ID NO: 73853 - protein, 356 aa, Yersinia pekkanenii
  misc_feature (1)..(356): tr|A0A0T9NJ87|A0A0T9NJ87_9GAMM S-adenosylmethionine:tRN A ribosyltransferase-isomerase OS=Yersinia pekkanenii O X=1288385 GN=queA PE=3 SV=1
MRVADFSFALPESLIAHYPQPQRSGCRLLSLDGPTGALTHGIFTDLLDKLVPGDLLVFNNTRVIPARVFGRKASGGKLEVLVERVLDDHRVLAHVKASKSPKPGSELLLGDDESIRATMLARHDTLFELRFEDERDVFTILNAVGHMPLPPYIDRPDEDADRELYQTVYSQRPGAVAAPTAGLHFDEPMLAALREKGIEMAFVTLHVGAGTFQPVRVETLEEHIMHSEYAEVPQEVVDAVLACKARGNRVVAVGTTSVRSLESAAKAAENALIAPFFGDTRIFIYPGYHYQVVDALVTNFHLPESTLIMLVSAFAGYKNTMNAYQQAVAEQYRFFSYGDAMFISRNLQAPQERVNP

SEQ ID NO: 73854 - protein, 356 aa, Yersinia pestis
  misc_feature (1)..(356): sp|Q8ZC32|QUEA_YERPE S-adenosylmethionine:tRNA ribosylt ransferase-isomerase OS=Yersinia pestis OX=632 GN=queA PE=3 SV=1
MRVADFSFELPEALIAHYPQPQRSGCRLLSLDGPTGTLTHGIFTDLLDKLAPGDLLVFNNTRVIPARLFGRKASGGKLEVLVERVLDDHRVLAHVKASKAPKPGAELLLGDDESIRATMLARHDTLFELRFDDERDVFTILNAVGHMPLPPYIDRPDEDADRELYQTVYSQRPGAVAAPTAGLHFDEPMLAALQEKGIEMAFVTLHVGAGTFQPVRVDTIEDHIMHSEYAEVPQEVVDAVLACKARGKRVVAVGTTSVRSLESAAKAAENGLIAPFFGDTRIFIYPGYHYQVVDALVTNFHLPESTLIMLVSAFAGYKNTMNAYQQAVAEQYRFFSYGDAMFISRNPRAPQEKVSP

SEQ ID NO: 73855 - protein, 356 aa, Yersinia pestis; identical to SEQ ID NO: 73854
  misc_feature (1)..(356): sp|A9R352|QUEA_YERPG S-adenosylmethionine:tRNA ribosylt ransferase-isomerase OS=Yersinia pestis bv. Antiqua (st rain Angola) OX=349746 GN=queA PE=3 SV=1

SEQ ID NO: 73856 - protein, 356 aa, Yersinia pseudotuberculosis; identical to SEQ ID NO: 73854
  misc_feature (1)..(356): tr|A0A3G5KJ39|A0A3G5KJ39_YERPU S-adenosylmethionine:tRN A ribosyltransferase-isomerase OS=Yersinia pseudotuberc ulosis OX=633 GN=queA PE=3 SV=1

SEQ ID NO: 73857 - protein, 356 aa, Yersinia pseudotuberculosis
  misc_feature (1)..(356): sp|B1JIF0|QUEA_YERPY S-adenosylmethionine:tRNA ribosylt ransferase-isomerase OS=Yersinia pseudotuberculosis ser otype O:3 (strain YPIII) OX=502800 GN=queA PE=3 SV=1
MRVADFSFELPEALIAHYPQPQRSGCRLLSLDGPTGTLTHGIFTDLLDKLAPGDLLVFNNTRVIPARLFGRKASGGKLEVLVERVLDDHRVLAHVKASKAPKPGAELLLGDDENIRATMLARHDTLFELRFDDERDVFTILNAVGHMPLPPYIDRPDEDADRELYQTVYSQRPGAVAAPTAGLHFDEPMLATLQEKGIEMAFVTLHVGAGTFQPVRVDTIEDHIMHSEYAEVPQEVVDAVLACKARGKRVVAVGTTSVRSLESAAKAAENGLIAPFFGDTRIFIYPGYHYQVVDALVTNFHLPESTLIMLVSAFAGYKNTMNAYQQAVAEQYRFFSYGDAMFISRNPRAPQEKVSP

SEQ ID NO: 73858 - protein, 356 aa, Yersinia rohdei
  misc_feature (1)..(356): tr|A0A0U1HR70|A0A0U1HR70_YERRO S-adenosylmethionine:tRN A ribosyltransferase-isomerase OS=Yersinia rohdei OX=29 485 GN=queA PE=3 SV=1
MRVADFSFELPESLIAHYPQPQRSGCRLLSLDGPTGKLTHGIFTDLLDKLEPGDLLVFNNTRVIPARLFGRKASGGKLEVLVERVLDDSRVLAHVKASKAPKPGTELLLGDDESIRATMVARHDTLFELRFDDERDVFAILNAVGHMPLPPYIDRPDEDADRELYQTVYSERPGAVAAPTAGLHFDEPLLAALREKGIEMAFVTLHVGAGTFQPVRVDTIEEHIMHSEYAEVPQEVVDAVLACKARGKRVVAVGTTSVRSLESAAKATENGLIAPFFGDTCIFIYPGYDYQVVDALVTNFHLPESTLIMLVSAFAGYKNTMNAYQQAVTEQYRFFSYGDAMFISRNPRAPQETVNP

SEQ ID NO: 73859 - protein, 356 aa, Yersinia ruckeri
  misc_feature (1)..(356): tr|A0A085U572|A0A085U572_YERRU S-adenosylmethionine:tRN A ribosyltransferase-isomerase OS=Yersinia ruckeri OX=2 9486 GN=queA PE=3 SV=1
MRVADFSFELPESLIAHYPQPQRSGCRLLSLDGPTGTLTHGIFTDLLDKLEAGDLLVFNNTRVIPARLFGRKASGGKLEVLVERVLDDHRVLAHVKASKAPKPGTEMLLGDDESIRATMLARHDTLFELRFDEEQDVFSILNAVGHIPLPPYIDRPDEEADRELYQTVYSQRPGAVAAPTAGLHFDEPMLAALRNKGIEMAFVTLHVGAGTFQPVRVESIEEHIMHSEYAEVPQEVVDAVLACKARGKRVVAVGTTSVRSLESAANASEDGVIAPFYGDTRIFIYPGYHYQVVDALVTNFHLPESTLIMLVSAFAGYKNTMNAYQQAVVEKYRFFSYGDAMFISRNPLAPQETVNQ

SEQ ID NO: 73860 - protein, 356 aa, Yersinia similis
  misc_feature (1)..(356): tr|A0A0T9QST7|A0A0T9QST7_9GAMM S-adenosylmethionine:tRN A ribosyltransferase-isomerase OS=Yersinia similis OX=3 67190 GN=queA PE=3 SV=1
MRVADFSFELPEALIAHYPQPQRSGCRLLSLDGPTGTLTHGIFTDLLDKLEPGDLLVFNNTRVIPARLFGRKASGGKLEVLVERVLDDHRVLAHVKASKAPKAGAELLLGDDESIRATMLARHDTLFELRFDDERDVFTILNAVGHMPLPPYIDRPDEDADRELYQTVYSQRPGAVAAPTAGLHFDEPLLAALREKGIEMAFVTLHVGAGTFQPVRVDTIEDHIMHSEYAEVPQEVVDAVLACKARGKRVVAVGTTSVRSLESAAKAAENGLIAPFFGDTRIFIYPGYHYQVVDALVTNFHLPESTLIMLVSAFAGYKNTMNAYQQAVAEQYRFFSYGDAMFISRNPRAPQERVNP

SEQ ID NO: 73861 - protein, 356 aa, Yersinia wautersii
  misc_feature (1)..(356): tr|A0A0E8XFA0|A0A0E8XFA0_9GAMM S-adenosylmethionine:tRN A ribosyltransferase-isomerase OS=Yersinia wautersii OX =1341643 GN=queA PE=3 SV=1
MRVADFSFELPEALIAHYPQPQRSGCRLLSLDGLTGTLTHGIFTDLLDKLAPGDLLVFNNTRVIPARLFGRKASGGKLEVLVERVLDDHRVLAHVKASKAPKPGAELLLGDDESIRATMLARHDTLFELRFDDERDVFTILNAVGHMPLPPYIDRPDEDADRELYQTVYSQRPGAVAAPTAGLHFDEPMLAALREKGIEMAFVTLHVGAGTFQPVRVDTIEDHIMHSEYAEVPQEVVDAVLACKARGKRVVAVGTTSVRSLESAAKAAENGLIAPFFGDTRIFIYPGYHYQVVDALVTNFHLPESTLIMLVSAFAGYKNTMNAYQQAVAEQYRFFSYGDAMFISRNPRAPQEKVSP

SEQ ID NO: 73862 - protein, 356 aa, Yersiniaceae bacterium
  misc_feature (1)..(356): tr|A0A2N5EQS2|A0A2N5EQS2_9GAMM S-adenosylmethionine:tRN A ribosyltransferase-isomerase OS=Yersiniaceae bacteriu m 2016Iso3 OX=2060066 GN=queA PE=3 SV=1
MRVADFSFELPESLIAHYPQAQRSGCRLLSLDGPSGDLTHGVFTDLLETLEPGDLLVFNNTRVIPARMFGRKVSGGKIEVLVERVLDDHRVLAHVRASKAPKEGAELLLGDDESISATMVARHDALFELRFNDERDVFSVLNAVGHMPLPPYIDRPDEDADRELYQTVYSAKPGAVAAPTAGLHFDEPLLAALKEKGVEMAFVTLHVGAGTFQPVRVESIEDHIMHAEYAEVPQEVVDAVLACKARGKRVVAVGTTSVRSLESAAQATQDGLIAPFFGDTKIFIYPGYEYQVIDALITNFHLPESTLIMLVSAFAGYTQTMNAYHTAVAEQYRFFSYGDAMFITRNPLAPQQAAGR

SEQ ID NO: 73863 - protein, 356 aa, Yersiniaceae bacterium
  misc_feature (1)..(356): tr|A0A2N5EAU1|A0A2N5EAU1_9GAMM S-adenosylmethionine:tRN A ribosyltransferase-isomerase OS=Yersiniaceae bacteriu m 2016Iso4 OX=2060068 GN=queA PE=3 SV=1
MRVADFSFELPESLIARYPQAQRSGCRLLSLDGPSGDLTHGVFTDLLETLEAGDLLVFNNTRVIPARMFGRKVSGGKIEVLVERVLDDHRVLAHVRASKAPKPGAELLLGDDESISATMVARHDALFELRFNDERDVFSVLNAAGHMPLPPYIDRPDDEADRELYQTVYSAKPGAVAAPTAGLHFDEPLLAALKEKGIEMAFVTLHVGAGTFQPVRVESIEDHIMHAEYAEVPQEVVDAVLDCKARGKRVVAVGTTSVRSLESAAQAAQDGLIAPFFGDTKIFIYPGYEYQVIDALITNFHLPESTLIMLVSAFAGYTQTMNAYHTAVAEQYRFFSYGDAMFITRNPLAAQQAAGR

SEQ ID NO: 73864 - protein, 356 aa, Yokenella regensburgei
  misc_feature (1)..(356): tr|A0A2X2QAQ7|A0A2X2QAQ7_9ENTR S-adenosylmethionine:tRN A ribosyltransferase-isomerase OS=Yokenella regensburge i OX=158877 GN=queA PE=3 SV=1
MRVADFSFELPDSLIAHYPQPERSGCRLLSLDGPTGALTHGTFTDLLDKLNPGDLLVFNNTRVIPARLFGRKASGGKIEVLVERMLDDKRILAHIRASKAPKPGAELLLGDDESINATMVARHDALFEVEFNDERPVLDILNAIGHMPLPPYIDRPDEDADRELYQTVYSQKPGAVAAPTAGLHFDEPLLAKLREKGIEMAFVTLHVGAGTFQPVRVDTIEDHIMHSEYAEVPQDVVDAVLAAKARGSRVIAVGTTSVRSLESAAQAAKDALIAPFFGDTQIFIFPGYQYQVIDALVTNFHLPESTLIMLVSAFAGYQHTMNAYKAAVEQQYRFFSYGDAMFITYNPQAISERVGE

SEQ ID NO: 73865 - protein, 217 aa, Yokenella regensburgei
  misc_feature (1)..(217): tr|A0A484XB84|A0A484XB84_9ENTR S-adenosylmethionine:tRN A ribosyltransferase-isomerase OS=Yokenella regensburge i OX=158877 GN=queA_2 PE=3 SV=1
MRVADFSFELPDSLIAHYPQPERSGCRLLSLDGPTGALTHGTFTDLLDKLNPGDLLVFNNTRVIPARLFGRKASGGKIEVLVERMLDDKRILAHIRASKAPKPGAELLLGDDESINATMVARHDALFEVEFNDERPVLDILNAIGHMPLPPYIDRPDEDADRELYQTVYSQKPGAVAAPTAGLHFDEPLLAKLREKGIEMAFRDAARGGGNLPAGAR

SEQ ID NO: 73866 - protein, 355 aa, Yoonia litorea
  misc_feature (1)..(355): tr|A0A1I6MBJ1|A0A1I6MBJ1_9RHOB S-adenosylmethionine:tRN A ribosyltransferase-isomerase OS=Yoonia litorea OX=112 3755 GN=queA PE=3 SV=1
MKLSDFDFDLPERLIATRPARPRSSARLLLAQGGMIEDRIVNQLPDILRPGDRLILNDTKVIPARLSGLRHRSGEAGDTAARIEVTLLEPQSDGAWTALIKPLKKVRDGEVIVFSDDLSASVEGRRDGQGVLRFNLTGDDFDAALAAAGSMPLPPYIEAKRKADEADKQDYQTYWAKRAGAVAAPTASLHFDGPLLDALEQRGVAFTHVTLHVGAGTFLPVKVDDISEHKMHAEWGEVTSQAAEEMNATRAAGGRIIPVGTTAMRLIESAAKDGKMQPWVGPTDIFITPGFEFQMSDGLMTNFHLPKSTLMMLVSALMGVNTIRAIYAHAIADEYRFFSYGDSSLLLPQPADKSL

SEQ ID NO: 73867 - protein, 350 aa, Yoonia maricola
  misc_feature (1)..(350): tr|A0A2M8WKV0|A0A2M8WKV0_9RHOB S-adenosylmethionine:tRN A ribosyltransferase-isomerase OS=Yoonia maricola OX=42 0999 GN=queA PE=3 SV=1
MKLSEFDFDLPEALIATRPARPRSSARLLLAQGDEIADRVVNQLPDILQSGDRLILNDTKVIPARLFGLRQRSGDAGKTAAKMDVTLLEPRADGSWAALIKPLKKVRDGEVIVFSDDLEAEVIGRADGQGYLAFNLKGDDFDAALNAVGAMPLPPYIAGKRPADEADKQDYQTYWARNTGAVAAPTASLHFDGPLLDALAARGVAFTHVTLHVGAGTFLPVKVDDVREHKMHAEWGEVTPQAAAEMNATKAAGNRVIPVGTTALRLIESAVQGGVMQAWKGPTDIFITPGFTFQMADGLMTNFHLPKSTLMMLVSALMGTDTIRAIYDHAVAQNYRFFSYGDSSLLLPAD

SEQ ID NO: 73868 - protein, 351 aa, Yoonia maritima
  misc_feature (1)..(351): tr|A0A2T0W1H8|A0A2T0W1H8_9RHOB S-adenosylmethionine:tRN A ribosyltransferase-isomerase OS=Yoonia maritima OX=14 35347 GN=queA PE=3 SV=1
MKLSDFDFELPEELIATRPARPRSSAKLLLADRDGVADRVVSDLVDILKLGDRLVLNDTKVIPARLTGQRFRDGEHGLTSSKIEVTLLEPRSSGDWAALVKPLRKIRDGETIVFSEVLSATVTGRADGQAFLQFNLTGDNFDAALADVGAMPLPPYIAAKRPADEADKEDYQTYWARNAGAVAAPTASLHFDGPLLDALRARGVEFTHVTLHVGAGTFLPVKVDDVRDHKMHSEWGEVTEQAVDEINATKAAGGRIIPVGTTALRLIETAAKSGTLKPWVGPTDIFITPGFQFQVTDGLMTNFHLPKSTLMMLVSALMGVQRVKDIYSHAIGTGYRFFSYGDASLLLPTKP

SEQ ID NO: 73869 - protein, 355 aa, Yoonia rosea
  misc_feature (1)..(355): tr|A0A1R3WFD4|A0A1R3WFD4_9RHOB S-adenosylmethionine:tRN A ribosyltransferase-isomerase OS=Yoonia rosea OX=28709 8 GN=queA PE=3 SV=1
MKLSEFDFDLPEELIATRPARPRSSARLLLAQGTAIEDRIVNQLPDILQPGDRLILNDTKVIPARLFGVRHRSGEAGETAARMDVTLLEPRADGAWSALIKPLKKVRDGEVIVFSDELSAEVVGRGDGQGYLQFNLKGDDFDAALNAVGAMPLPPYIAGKRPADEADKQDYQTYWARHSGAVAAPTASLHFDGPLLAALAARGVEFTHVTLHVGAGTFLPVKVDDVRDHKMHAEWGEVTPQAAAEMNATKAAGHRVIPVGTTALRLIESAVQDGKMQPWTGPTDIFITPGFRFQMADGLMTNFHLPKSTLMMLVSALMGTDNIRAIYDHAIAESYRFFSYGDSSLLLPEQEGAND

SEQ ID NO: 73870 - protein, 354 aa, Yoonia sediminilitoris
  misc_feature (1)..(354): tr|A0A2T6KRE7|A0A2T6KRE7_9RHOB S-adenosylmethionine:tRN A ribosyltransferase-isomerase OS=Yoonia sediminilitori s OX=1286148 GN=queA PE=3 SV=1
MKLSDFDFDLPERLIATRPARPRSSARLLLAQGDRIDDLVVTDLRKILRPGDRLVLNDTKVIPARLFGLRHRTGEAGATSAQMDVTLLEPRADGTWSALIKPLRKVRDGETIVFSDDLSATVTGRNDGQATLRFSLTGDDFDKALAEVGAMPLPPYIAAKRPADAADKEDYQTYWARRSGAVAAPTASLHFDGPLLDDLAARGVAFTKVTLHVGAGTFLPVKVDDVRDHKMHAEWGEVTPQAAAEINATKAAGGRIIPVGTTALRLIESAAIDGQITPWEGPTDIFITPGFEFQITDGLMTNFHLPKSTLMMLVSALMGVDRIKAIYDHAIAQNYRFFSYGDSSLLLPEAEDQA

SEQ ID NO: 73871 - protein, 354 aa, Yoonia tamlensis
  misc_feature (1)..(354): tr|A0A1I6G4V7|A0A1I6G4V7_9RHOB S-adenosylmethionine:tRN A ribosyltransferase-isomerase OS=Yoonia tamlensis OX=3 90270 GN=queA PE=3 SV=1
MKLSDFDFDLPEQLIATRPARPRTSARLLLADSAGIADHRVADLVDLLQPGDRLVLNDTKVIPARLTGMRHRDGEAGPTSAKIEVTLLEPRATGDWAALVKPLRKIRDGEVIVFSDVLSATLTARADGQAHLQFNLQGDDFDAALAAVGAMPLPPYIAAKRPADEADKQDYQTYWARHAGAVAAPTASLHFDGPLLDALRARGVAFTHVTLHVGAGTFLPVKVDDVRDHKMHAEWGEVTQTAVDEITATKAAGGRVIPVGTTALRLIETAAKEGTLKPWVGPTDIFITPGFTFQVTDGLMTNFHLPKSTLMMLVSALMGVERVKDIYAHAITTGYRFFSYGDASLLLPANVKKA

SEQ ID NO: 73872 - protein, 351 aa, Yoonia vestfoldensis
  misc_feature (1)..(351): tr|A0A1Y0EB00|A0A1Y0EB00_9RHOB S-adenosylmethionine:tRN A ribosyltransferase-isomerase OS=Yoonia vestfoldensis OX=245188 GN=queA PE=3 SV=1
MKLSDFDFDLPEALIATRPARPRSSARLLLAQGDQIADRIVTDLVDILQPGDRLVLNDTKVIPARLTGTRARIGEAGETAAKIEVTLLEPQAGGDWSALVKPLKKVRDGEVIVFSAALSATLVSRADGQARLAFNLTGDDFDAALNAVGAMPLPPYIEAKRPSDAADMDDYQTYWAKHAGAVAAPTASLHFDGPLLQALAARGVTMSYVTLHVGAGTFLPVKVDDVRDHKMHAEWGEVTDKAAAEINATKAAGKRVIPVGTTALRLIESAAKEGQLQPWTGPTDIFITPGFAFQIADGLMTNFHLPKSTLMMLVSAMMGMDRIKAIYAHAIAERYRFFSYGDSSLLLPDRA

SEQ ID NO: 73873 - protein, 351 aa, Yoonia vestfoldensis
  misc_feature (1)..(351): tr|A3V485|A3V485_9RHOB S-adenosylmethionine:tRNA ribosy ltransferase-isomerase OS=Yoonia vestfoldensis SKA53 OX =314232 GN=queA PE=3 SV=1
MKLSDFDFDLPEALIATRPARPRSSARLLLAQGDRIADQIVTDLVDILQPGDRLVLNDTKVIPARLNGTRARSGEAGDTSARIEVTLLEPRADGSWSALVKPLKKLRDGEVVVFSADLSATMTGRGDGQAYLQFNLTGDDFDAALNAVGAMPLPPYIAAKRAADAADMDDYQTYWAKHAGAVAAPTASLHFDGPLLQALAARGVTMSYVTLHVGAGTFLPVKVDDVSEHKMHAEWGEVTATAAAQINATKAAGKRVIPVGTTALRLIESAAKGGQLQPWTGPTDIFITPGFTFQIADGLMTNFHLPKSTLMMLVSALMGMDRIKAIYAHAIAERYRFFSYGDASLLLPDRA

SEQ ID NO: 73874 - protein, 362 aa, Youhaiella tibetensis
  misc_feature (1)..(362): tr|A0A5B9DPL0|A0A5B9DPL0_9RHIZ S-adenosylmethionine:tRN A ribosyltransferase-isomerase OS=Youhaiella tibetensis OX=1447062 GN=queA PE=3 SV=1
MRVDDFDFELPNDLIALHPAEPRDSARMLVVEPGRGMEDRVVTDLVDILQPGDVLVANDTKVLPADLRGIRVRGENRSSVAFNLHKRVDARTWKAFARPAKRLAEGDRLELGNGEQEPLLATLSEKGEGGEVTLTFDLSGAELDEAIKSHGAMPLPPYIGAKRDLEERDKSDYQTVYARHDGAVAAPTAGLHFTESLLERLAAKGVAFERVTLHVGAGTFLPVKVDDVKDHKMHAEWGVIDEDTVSRILAAKARGGRIVAVGTTSLRLLESAARATGTLAPFSDDTDIFITPGFRFRVVDVLMTNFHLPRSTLFMLVSAFAGFETMHAAYRHAIENHYRFYSYGDSSLLFRADLPSDAGTNQ

SEQ ID NO: 73875 - protein, 341 aa, Youngiibacter fragilis
  misc_feature (1)..(341): tr|V7I4U8|V7I4U8_9CLOT S-adenosylmethionine:tRNA ribosy ltransferase-isomerase OS=Youngiibacter fragilis 232.1 OX=994573 GN=queA PE=3 SV=1
MKVNDFYYDLPEELIAQHPLEKRDSSRLMVLDRLSGEISHKVFSDLPEYLVEGDVLVMNDTRVIPARLIGSKEGSGGKIEFLLLKRIDKDTWEALAKPGRRAKPGARFTFGDGLLTAEVVEVHDDGNRIIRFIYEGVFEEILDRLGEMPLPPYITEKLLDRERYQTVYSREEGSSAAPTAGLHFTPELLERIREKDVETVFLTLHVGLGTFRPVKVEDIDAHVMHSEYFSISRETAERINAAKSEGRRVISVGTTSTRTLETVADENGFVSEASGWTDIFIYPGVKLKCVDALITNFHLPESTLIMLVSALAGKEKTMEAYRTAVGMKYRFFSFGDSMFIK

SEQ ID NO: 73876 - protein, 350 aa, Youngimonas vesicularis
  misc_feature (1)..(350): tr|A0A4V3UZ43|A0A4V3UZ43_9RHOB S-adenosylmethionine:tRN A ribosyltransferase-isomerase OS=Youngimonas vesicular is OX=1294297 GN=queA PE=3 SV=1
MKLSDFDFDLPDHLIATRPAKPRSSARLLVAEGDAITDARVTDILRWLRPGDRLVLNDTKVLPARLSGTRSRMGAEGLTQAKIEVTLLEPRAHGHWAALLKPLKKIREGEEIVFSPDLTARLEAKEDGQGVLSFNLNGADFDAALQGAGQMPLPPYIAAKRAADTQDKTDYQTVWARALGAVAAPTASLHFDEPLLQQIRALGVEISFVTLHVGAGTFLPVKVEDVTTHKMHAEWGEVTAEAAAEIAATKAAGGRVIPVGTTALRLIESAARDGQIRPWQGETDIFIYPGFTFHVADALMTNFHLPKSTLMMLVSALMGPERIRAIYDHAVTEGYRFFSYGDASLLIPPR

SEQ ID NO: 73877 - protein, 347 aa, Zavarzinia compransoris
  misc_feature (1)..(347): tr|A0A317DZ74|A0A317DZ74_9PROT S-adenosylmethionine:tRN A ribosyltransferase-isomerase OS=Zavarzinia compransor is OX=1264899 GN=queA PE=3 SV=1
MKVADFDFALPADRIAVRPAVPREAARLLRVTADGLADFTVGDLPALLRRGDLLVLNDTKVIPARLEGLIGAGRVELNLIRAVDGRTWDCLARPGKRFRPGAVVRFGDRLAATVRAKDPEGTITLEFDRAGADLMAALDAVGTMPLPPYIARKRTPDAQDRADYQPVFAAREGAVAAPTASLHLTPDLLARLEAMGVERTMVTLHVGAGTFLPVKVEDTRDHRMHAEWGEVTAAAAEAIGRARREGRRVIAVGTTALRLIESAAAPDGTLSPYAGWTDIFITPGYRFRAVDVLMTNFHLPKSTLFMLVSALAGTERMKAAYAHAVEAGYRFYSYGDASLIDRLEVPA

SEQ ID NO: 73878 - protein, 346 aa, Zavarzinia sp.
  misc_feature (1)..(346): tr|A0A317E5Q1|A0A317E5Q1_9PROT S-adenosylmethionine:tRN A ribosyltransferase-isomerase OS=Zavarzinia sp. HR-AS OX=2211142 GN=queA PE=3 SV=1
MKVADFDFDLPPELIAVRPASPRESARLLRVRESGMADLTIADLPGELRAGDLLVLNDTKVIPARLEGTIGEAHVELNLIRAVDSRTWECLARPGRRFRPGVTVVFGDLTARVLVKDPEGTITLEFDRAGPDLMAALDVVGTMPLPPYIARKRAPDAQDRTDYQTAFAAREGAVAAPTASLHLTPELLARLGAMGVERAMVTLHVGAGTFLPVKVEDTADHKMHAEWGEVGAAAAEAINRARAEGRRVVAVGTTALRLIESAARDRDRVEPFADWTDIFITPGFRFRAADLLLTNFHLPKSTLVMLVSAFAGFDRVKAAYGHAIDKGYRFYSYGDACLFDRVEPKA

SEQ ID NO: 73879 - protein, 350 aa, Zeaxanthinibacter enoshimensis
  misc_feature (1)..(350): tr|A0A4R6TQ96|A0A4R6TQ96_9FLAO S-adenosylmethionine:tRN A ribosyltransferase-isomerase OS=Zeaxanthinibacter eno shimensis OX=392009 GN=queA PE=3 SV=1
MKLSHFNFELPKELLAEYPSENRDESKLMVVHRKSGKIEHKMFKDLIDYFDEGDVMVLNNTKVFPARLYGNKEKTGARIEVFLLRELNEEQRLWDVLVDPARKIRIGNKLYFGEDESLVAEVIDNTTSRGRTLRFLYDGSYTDFRRKLRELGETPLPKYIKREVEPEDENRYQTIYAKYEGAVAAPTAGLHFSKHLLKRLEIKGIDFAELTLHVGLGTFNPVEVEDLSKHKMDSEELVIDEKATEIVNNAKKNKRRICAVGTTAMRGLESAVSSEHMLNTFEGWTNKFIFPPYDFSIANAMVTNFHLPKSTLLMMVSAFMGHDLMKRAYKEAILEGYRFYSYGDAMLIID

SEQ ID NO: 73880 - protein, 344 aa, Zetaproteobacteria bacterium
  misc_feature (1)..(344): tr|A0A1J4YPK7|A0A1J4YPK7_9PROT S-adenosylmethionine:tRN A ribosyltransferase-isomerase OS=Zetaproteobacteria ba cterium CG1_02_53_45 OX=1805427 GN=queA PE=3 SV=1
MQISDFDFELPEHLIAKKPLGQRDASRLLCLSESDDSLVDGLIRDLANYVKPGDVWVLNDTKVIPARLVGQKPSGGKVEVLLLEPSDQPNVWLAWGKANKPMKPGTLIEFADGFSARVLKRDGKNIEVLLMAEDVGAAIEAYGHMPLPPYIDRPDTEEDKARYQTVFAKHAGAVAAPTAGLHLTHELMAAMQQAGASFAHVTLHVGPGTFQPVQVDDVNQHVMHEEGYIVPKETADAVNQAKAEGRRVVAVGTTSLRTLEAASVQGKLQAGSGRTSIFIYPGYHFNIVDALLTNFHLPKSTLIMLVAALAGRDRVMDAYAFAKGHAYRFYSYGDAMFVPRLKQL

SEQ ID NO: 73881 - protein, 339 aa, Zetaproteobacteria bacterium
  misc_feature (1)..(339): tr|A0A2M7H9Y4|A0A2M7H9Y4_9PROT S-adenosylmethionine:tRN A ribosyltransferase-isomerase OS=Zetaproteobacteria ba cterium CG12_big_fil_rev_8_21_14_0_65_55_1124 OX=197412 7 GN=queA PE=3 SV=1
MRVSDFDYRLPDELIAKQPLAEREGSRLLVLGETIEDRMIRDLPQLVRPGDVWVVNDTRVIPARLLGQKDSGGQVEILLLEPCQEANVWLAWGKANKPLRPGTRVNIGPDFSAEVLRRDGKEVKVRLLAPDVAAAIEACGHMPLPPYINRPDNEADKQRYQTVFARHAGAVAAPTAGLHMSLELMAAMREAGAEFAHVTLHVGPGTFQPVQVEHTEDHPMHEEAYIVSQETAEQINAARAEGRRIVAVGTTSLRTLEAAGESGVLCAGSGRTRLFITPGYDFRVTDALLTNFHLPRSTLLMLVCALGGQEKVMQAYRHAIEAAYRFYSYGDAMFVARGE

SEQ ID NO: 73882 - protein, 357 aa, Zhengella mangrovi
  misc_feature (1)..(357): tr|A0A2G1QI02|A0A2G1QI02_9RHIZ S-adenosylmethionine:tRN A ribosyltransferase-isomerase OS=Zhengella mangrovi OX =1982044 GN=queA PE=3 SV=1
MRVDLFDFELPETSIALRPAEPRDAARMLVVRPGEGLEDCGVLDLADLLDPGDALVFNDTRVIPAQLEGLRVRDGGEARVSATLHMRTGPDRWKAFLKPGKRVKAGDRIRFGHAGSACFLGTLDATAGDKGEGGDVELVFDLSGPALDEALHAVGHVPLPPYIASKRAEDDRDRSDYQTIYAREEGAVAAPTAGLHFTPRLMERLDARGIERHFVTLHVGAGTFLPVKADDTGEHRMHAEIGHVSAGAAEALNAVKARGGRIVSVGTTSLRLLESAADEAGRLDAWSGPTDIFITPGYRFRFIDVLMTNFHLPRSTLFMLVSAFSGLETMHAAYDHAIASGYRFYSYGDSSLLFRKD

SEQ ID NO: 73883 - protein, 348 aa, Zhizhongheella caldifontis
  misc_feature (1)..(348): tr|A0A2S5SVP3|A0A2S5SVP3_9BURK S-adenosylmethionine:tRN A ribosyltransferase-isomerase OS=Zhizhongheella caldif ontis OX=1452508 GN=queA PE=3 SV=1
MPHTYTLSDFDFALPPELIAQHPTPERSASRLLDGRAWPPVDRIFRELPALLAPGDLLVFNDTRVIKARLYGAKASGGAVEALIERVLPGHEVWAHLRASKSPRAGSIVRFAGAFDAEVLGRGGPDDGLFHLRFPEDPLVLLDRHGHVPLPPYITHADSEDDERRYQTVFAAKPGAVAAPTAALHFDEGVLAALRERRIGTAHVTLHVGAGTFQPVRTENLAEHKMHSEWFEVSADTVAAIERTRAAGGRIVAVGTTTLRALESAAISGQLVAGSRDTDIFITPGFTFRVVDRLVTNFHLPKSTLMMLVSAFAGHAHIMALYRHAVEQRYRFFSYGDAMLLARISAHD

SEQ ID NO: 73884 - protein, 355 aa, Zhongshania aliphaticivorans
  misc_feature (1)..(355): tr|A0A127MAM6|A0A127MAM6_9GAMM S-adenosylmethionine:tRN A ribosyltransferase-isomerase OS=Zhongshania aliphatic ivorans OX=1470434 GN=queA PE=3 SV=1
MRRSDFNFELPESLIAYYPMPERDASRLLVLNSQQQCEHRQFKALPDYLRAGDLLVFNNTRVIPARLFATKESGGRIEILVERIVDEYRVLAHVRSSKSPKAGATLWLAANNTDAPGTESVAVLGRHDALFELEFAEPVLTVLSRLGHMPLPPYIEREDAAEDRERYQTVYASRDGAVAAPTAGLHFTENLIQQCVAKGVELAFVTLHVGAGTFQPVRADDIRDHQMHAEYIEVPEEVAEQVRATRVRGGRVVAVGTTSVRSLESASQSGEIAAFAGDSRIFIYPGYQFRSVDMMVTNFHLPESTLIMLVSAFAGQAAVLNAYREAVAEQYRFFSYGDAMLVFPATNTEITGNTV

SEQ ID NO: 73885 - protein, 354 aa, Zhongshania sp.
  misc_feature (1)..(354): tr|A0A3N0C761|A0A3N0C761_9GAMM S-adenosylmethionine:tRN A ribosyltransferase-isomerase OS=Zhongshania sp. DSW25 -10 OX=2304603 GN=queA PE=3 SV=1
MRRSDFNFELPDSLIAYYPMPERDGSRLLVLGENQACEHRQFKNLPSYLRAGDLLVFNNTRVIPARLFALKSTGGRIEILIERLLDEHKVLAHVRSSKSPKAGAELQLCASAESSAGDDVATVLGRHDALFELRFASPVLEVLDRIGHMPLPPYIEREDAADDRERYQTVYASRDGAVAAPTAGLHFTDALMQECRDVGVDIAFVTLHVGAGTFQPVRADDIRDHQMHAEYIEVSDEVCEKVKATRERGGRVVAVGTTSVRSLESASQSGEIAPFSGDSRIFIYPGYQFRSVDAIVTNFHLPESTLIMLISAFAGRDAVLAAYREAVAEQYRFFSYGDAMLVFPSSNTETGSVL

SEQ ID NO: 73886 - protein, 354 aa, Zhongshania sp.
  misc_feature (1)..(354): tr|A0A2S4HGY4|A0A2S4HGY4_9GAMM S-adenosylmethionine:tRN A ribosyltransferase-isomerase OS=Zhongshania sp. ZX-21 OX=2067667 GN=queA PE=3 SV=1
MRRSDFNFELPDSLIAYYPMPERDGSRLLVLGENQACEHRQFKNLPSYLRAGDLLVFNNTRVIPARLFALKSTGGRIEILIERLLDEHKVLAHVRSSKSPKAGAELQLCASAESSAGDDVATVLGRHDALFELRFASPVLEVLDRIGHMPLPPYIEREDAADDRERYQTVYASRDGAVAAPTAGLHFTDALMQECRDVGVDIAFVTLHVGAGTFQPVRADDIRDHQMHAEYIEVSDEVCEKVKATRERGGRVVAVGTTSVRSLESASQSGEIAPFSGDSRIFIYPGYQFRSVDAIVTNFHLPESTLIMLISAFAGRDAVLAAYREAVAEQYRFFSYGDAMLVFPSSITETGSVL

SEQ ID NO: 73887 - protein, 349 aa, Zhouia amylolytica
  misc_feature (1)..(349): tr|A0A1I6RHY6|A0A1I6RHY6_9FLAO S-adenosylmethionine:tRN A ribosyltransferase-isomerase OS=Zhouia amylolytica OX =376730 GN=queA PE=3 SV=1
MKLSHFNFDLPKDLLAEYPSESRDEARLMVVHRETGEIEHKLFKDLIDYFDEGDVMVLNNTKVFPARLFGNKEKTGARIEVFLLRELNADQRLWDVLVDPARKIRIGNKLYFGEDESLVAEVIDNTTSRGRTLRFLYDGSYDEFRQKLSELGETPLPKYIKRDVEPEDEERYQTIYAKHEGAVAAPTAGLHFSKHLLKRLEIKGIDFAEVTLHVGLGTFNPVEVEDLSKHKMDSEELYIDDKSVDTVNSAKAKKHKVCAVGTTVMRGLESSVSSARTLNTFQGWTNKFIFPPYEFSIADCMITNFHTPKSTLLMMVSAFAGHDLMMKAYKEAVKEKYKFYSYGDAMLIL

SEQ ID NO: 73888 - protein, 349 aa, Zhouia amylolytica
  misc_feature (1)..(349): tr|W2ULE5|W2ULE5_9FLAO S-adenosylmethionine:tRNA ribosy ltransferase-isomerase OS=Zhouia amylolytica AD3 OX=128 6632 GN=queA PE=3 SV=1
MKLSHFNFDLPKDLLAEYPSESRDEARLMVVHRETGEIEHKLFKDLIDYFDEGDVMVLNNTKVFPARLFGNKEKTGARIEVFLLRELNADQRLWDVLVDPARKIRIGNKLYFGEDESLVAEVIDNTTSRGRTLRFLYDGSYDEFRQKLSELGETPLPKYIKRDVEPEDEERYQTIYAKHEGAVAAPTAGLHFSKHLLKRLEIKGIDFAEVTLHVGLGTFNPVEVEDLSKHKMDSEELYIDDKSVDTVNSAKAKKHKVCAVGTTVMRGLESSVSSERTLNTFQGWTNKFIFPPYEFSIADCMITNFHTPKSTLLMMVSAFAGHDLMMKAYKEAVKEKYKFYSYGDAMLIL

SEQ ID NO: 73889 - protein, 349 aa, Zobellella denitrificans
  misc_feature (1)..(349): tr|A0A231MXS0|A0A231MXS0_9GAMM S-adenosylmethionine:tRN A ribosyltransferase-isomerase OS=Zobellella denitrific ans OX=347534 GN=queA PE=3 SV=1
MQVRDFHFELPDELIARHPMPERTASRLLQLDGNSGALVHGRFGDILNLVNPGDLLVFNNTRVIPARLFGHKASGGKVEVLVERVLDDKRVLAHVRASKSPKPGAELILEPDVRATMLARHDALFEIEFNDPRTVLEILEAVGHMPLPPYIDRPDTEADKERYQTVYNEKPGAVAAPTAGLHFDEPLLAELKAKGVELAFITLHVGAGTFQPVRVDNVLEHKMHAEYIEVPAEVVAQIEATRARGGRVIAVGTTSVRSLESAARASLGKGEPLAPFYGDTDIFIYPGYRFQLVDAMVTNFHLPESTLIMLVSAFAGHDHIMAAYRAAVAERYRFFSYGDAMFITRQSQG

SEQ ID NO: 73890 - protein, 353 aa, Zobellella endophytica
  misc_feature (1)..(353): tr|A0A2P7R3Z7|A0A2P7R3Z7_9GAMM S-adenosylmethionine:tRN A ribosyltransferase-isomerase OS=Zobellella endophytic a OX=2116700 GN=queA PE=3 SV=1
MQVRDFSFELPDELIARHPMPERAASRLLQLDGNSGEITHGRFGQILDLVNPGDLLVFNNTRVIPARLFGQKASGGKLEVLVERVLDDKRVLAHLRASKSPRPGTALLLEPDVSATMLARHDALFEIEFNDPRPVLEILEAVGHMPLPPYIDRPDTEADKERYQTVYNEKPGAVAAPTAGLHFDQPLLAALKEKGAELAFITLHVGAGTFQPVRVDKVIEHKMHAEYIEVPPEVVAQIEATRARGGRVIAVGTTSVRSLESAARASLARGEPLAPFYGDTDIFIYPGYRFQLVDAMVTNFHLPESTLIMLVSAFAGHGHIMDAYRAAVAERYRFFSYGDAMFITRQQGLGTGE

SEQ ID NO: 73891 - protein, 353 aa, Zobellella taiwanensis
  misc_feature (1)..(353): tr|A0A2P7QGA8|A0A2P7QGA8_9GAMM S-adenosylmethionine:tRN A ribosyltransferase-isomerase OS=Zobellella taiwanensi s OX=347535 GN=queA PE=3 SV=1
MQVRDFHFELPDELIARHPTAERTASRLLQLDGNSGALVHGRFGDILNLVNPGDLLVFNNTRVIPARLFGHKASGGKVEVLVERVLDDKRVLAHVRASKSPKPGAELILEPDVRATMLARHDALFEIAFNDPRTVLEILEAVGHMPLPPYIDRPDTEADKERYQTVYNEKPGAVAAPTAGLHFDEPLLAELQAKGVELAFITLHVGAGTFQPVRVDNVLEHKMHAEYIEVPAEVVAQIDATRARGGRVIAVGTTSVRSLESAARASLGKGEPLAPFYGDTDIFIYPGYRFQLVDAMITNFHLPESTLIMLVSAFAGHDHIMAAYRAAVAERYRFFSYGDAMFITKQLGLGTGE

SEQ ID NO: 73892 - protein, 349 aa, Zobellia galactanivorans
  misc_feature (1)..(349): tr|G0L9W4|G0L9W4_ZOBGA S-adenosylmethionine:tRNA ribosy ltransferase-isomerase OS=Zobellia galactanivorans (str ain DSM 12802 / CCUG 47099 / CIP 106680 / NCIMB 13871 / Dsij) OX=63186 GN=queA PE=3 SV=1
MKLSHFHFELPDNLLAEYPAENRDESKLMVIHRETGKIEHKMFKDLINYFDEGDVMVLNNTKVFPARLYGNKEKTGARIEVFLLRELNEEQRLWDVLVDPARKIRIGNKLYFGEDETLVAEVIDNTTSRGRTLRFLYDGSYIDFRRKLRELGQTPLPKYIKRDVEPEDEERYQTIYAKHEGAVAAPTAGLHFSKHLLKRLEIKGVDFAEVTLHVGLGTFNPVEVEDLSKHKMDSEELVIDEKATEIVNNAKLKKKRICAVGTTVMRGLESAVSSEHTLNTFDGWTNKFIFPPYDFSIANCMVTNFHLPKSTLLMMVSAFVGHDLMKKAYKEAILEQYKFYSYGDAMLII

SEQ ID NO: 73893 - protein, 349 aa, Zobellia uliginosa
  misc_feature (1)..(349): tr|A0A1N7N5Q2|A0A1N7N5Q2_9FLAO S-adenosylmethionine:tRN A ribosyltransferase-isomerase OS=Zobellia uliginosa OX =143224 GN=queA PE=3 SV=1
MKLSHFHFELPDNLLAEYPAENRDESKLMVIHRETGKIEHKMFKDLINYFDEGDVMVLNNTKVFPARLYGNKEKTGARIEVFLLRELNEEQRLWDVLVDPARKIRIGNKLYFGEDETLVAEVIDNTTSRGRTLRFLYDGSYIDFRRKLRELGQTPLPKYIKRDVEPEDEERYQTIYAKHEGAVAAPTAGLHFSKHLLKRLEIKGVDFAEVTLHVGLGTFNPVEVEDLSKHKMDSEELVIDERATEIVNNAKLKKKRICAVGTTVMRGLESAVSSEHTLNTFDGWTNKFIFPPYDFSIANCMVTNFHLPKSTLLMMVSAFIGHDLMKKAYKEAILEQYKFYSYGDAMLII

SEQ ID NO: 73894 - protein, 342 aa, Zoogloea ramigera
  misc_feature (1)..(342): tr|A0A4Y4CWW5|A0A4Y4CWW5_ZOORA S-adenosylmethionine:tRN A ribosyltransferase-isomerase OS=Zoogloea ramigera OX= 350 GN=queA PE=3 SV=1
MAWTLDDFDYPLPQELIAQAPLARRTDSRLLRVSPQLADLHFSDLPSLLAPGDLLVFNDTRVIHARLFGTKDTGGQVEVMIERPLGPHEALAQIRASKSPKPGTRLRLEDALDVEVLGRAGEFFHLRFPDGDDLIALLERHGRLPLPPYIERAAGDTDESRYQTVYARNPGSVAAPTAGLHFDEALLARLAEHGVNTAYVTLNVGAGTFQPVRVHDLSEHKMHTEAYFVPQATVDAIAATKAAGKRVVCVGTTSMRALESAARSGNLVAGEAESDLFILPGYQFQVADALVTNFHLPKSTLLMLVSALAGVDVIRRAYAHAVAARYRFFSYGDAMFLTRDSA

SEQ ID NO: 73895 - protein, 342 aa, Zoogloea sp.
  misc_feature (1)..(342): tr|A0A5C7K9W2|A0A5C7K9W2_9RHOO S-adenosylmethionine:tRN A ribosyltransferase-isomerase OS=Zoogloea sp. OX=49181 GN=queA PE=3 SV=1
MAWTLDDFDYLLPDELIAQAPLDRRTDSRLLRVQPSLADLHFADLPSLLAPGDLLVFNDTRVLHARLFGTKDTGGQVEVMIERPLGGHEALAQVRASKSPKPGSRLHLEGALDVEVLGRAGEFFHLRFPDTDDLVALLERHGRLPLPPYIERAAGNTDESRYQTVYARDPGSVAAPTAGLHFDEALLARLAGLGINSAFVTLNVGAGTFQPVRVHDLSEHQMHTEAYFVPEATVDAIAATRAAGRRVVCVGTTSMRALESAARSGPLRAGKAESDLFILPGYDFQVADALITNFHLPKSTLLMLVSAFSGMDTIRHAYAHAIKQRYRFFSYGDAMFLTRTAP

SEQ ID NO: 73896 - protein, 349 aa, Zoogloeaceae bacteirum
  misc_feature (1)..(349): tr|A0A2S0QV20|A0A2S0QV20_9RHOO S-adenosylmethionine:tRN A ribosyltransferase-isomerase OS=Zoogloeaceae bacteiru m Par-f-2 OX=2080469 GN=queA PE=3 SV=1
MPLTLDDFDYHLPPELIAQTPLAERSASRLLAVDNGEPVDLRFTDLPTRLRAGDLLVFNDTRVIHARLHGHKDSGGQVEVLVERAIGAHEALAQVRASKSPRAGSRLHLAEAFEVEVLGRVGEFFHLRFPADEDLFALLERHGKLPLPPYIRRAAGDTDESRYQTVYAREPGSVAAPTAGLHFDDALLDRLKASGVKLAWLTLHVGAGTFQPVRVNDLGKHRMHAERYVLPAETVTAIAETRAAGGRVIAVGTTSMRALEAAAQDGPLVAGAGETDLFILPGFHFQVVDGLITNFHLPKSTLLMLVSAFAGLQTIRRAYAHAVAQRYRFFSYGDAMFLTRNPDAEHDAV

SEQ ID NO: 73897 - protein, 344 aa, Zooshikella ganghwensis
  misc_feature (1)..(344): tr|A0A4P9VJX1|A0A4P9VJX1_9GAMM S-adenosylmethionine:tRN A ribosyltransferase-isomerase OS=Zooshikella ganghwens is OX=202772 GN=queA PE=3 SV=1
MRVKDFSFELPAEQIARYPTDQRSSSRLMVVDGSSGAIEHKSFVDIADYMQPGDLLVLNDTKVIPARLYGTKATGGKVEVLVERILEDQHSVLAHVRASKAAKPGTLLCFDEGIQAEMLRREGDLFVLRFLGEQPVLALLDKIGHIPLPPYIDRDDAQIDRERYQTIYSRTAGAVAAPTAGLHFDQALFDKLAAKGVEKAFVTLHVGAGTFQPVRVETIAEHKMHSEYLEVSQAVCDQIAATKARGGRVIAVGTTTVRSLETASRSGYVQPYHGETDIFIYPGYQFQCVDLMVTNFHLPESTLLMLVSAFAGYEHIMQAYQIAVAEQYRFFSYGDAMLLSRRNA

SEQ ID NO: 73898 - protein, 349 aa, Zunongwangia atlantica
  misc_feature (1)..(349): tr|A0A1Y1T9H3|A0A1Y1T9H3_9FLAO S-adenosylmethionine:tRN A ribosyltransferase-isomerase OS=Zunongwangia atlantic a 22II14-10F7 OX=1185767 GN=queA PE=3 SV=1
MKLSNFNFELPPELLAEYPAENRDEARLMVLNRKEQTIEHKQFKDLINYFDPEDVMVLNNTKVFPARLYGNKEKTGARIEVFLLRELNAETKLWDVLVDPARKIRIGNKLYFGDDESLVAEVIDNTTSRGRTLRFLYDGSYEDFRRKLKELGETPLPKYIKRDVQPEDQERYQTIYAKEEGAVAAPTAGLHFSKHLLKRLEIKGINFAEVTLHVGLGTFSPVEVEDLSKHKMDSEEAFVKADAVNTINKAKAEKRKVCAVGTTVMRVLESSVSSNQTLNEFGGWTNKFIFPPYDFSIANCMVTNFHTPKSTLLMMISAFAGHDFMMRAYEEAVKEKYRFYTYGDAMLIL

SEQ ID NO: 73899 - protein, 351 aa, Zunongwangia mangrovi
  misc_feature (1)..(351): tr|A0A1I1EZ75|A0A1I1EZ75_9FLAO S-adenosylmethionine:tRN A ribosyltransferase-isomerase OS=Zunongwangia mangrovi OX=1334022 GN=queA PE=3 SV=1
MGMKLSNFNFELPPELLAEYPAENRDEARLMVLNRKEQTIEHKQFKDLINYFDPEDVMVLNNTKVFPARLYGNKEKTGARIEVFLLRELNPETKLWDVLVDPARKIRIGNKLYFGEDESLVAEVIDNTTSRGRTLRFLYDGSYEDFRRKLKELGETPLPKYIKRDVQPEDQERYQTIYAKEEGAVAAPTAGLHFSKHLLKRLEIKGINFAEVTLHVGLGTFSPVEVEDLSKHKMDSEEAFVKADAVDTINRAKSEKRKVCAVGTTVMRVLESSVSSNQTLNEFGGWTNKFIFPPYDFSIANCMVTNFHTPKSTLLMMISAFAGHDFMMRAYEEAVKEKYRFYTYGDAMLIL

SEQ ID NO: 73900 - protein, 351 aa, Zunongwangia profunda
  misc_feature (1)..(351): tr|D5BJY3|D5BJY3_ZUNPS S-adenosylmethionine:tRNA ribosy ltransferase-isomerase OS=Zunongwangia profunda (strain DSM 18752 / CCTCC AB 206139 / SM-A87) OX=655815 GN=que A PE=3 SV=1
MGMKLSNFNFELPPELLAEYPAENRDEARLMVLNRKEQTIEHKQFKDLIDYFDPEDVMVLNNTKVFPARLYGNKEKTGARIEVFLLRELNAETKLWDVLVDPARKIRIGNKLYFGDDESLVAEVIDNTTSRGRTLRFLYDGSYEDFRRKLKELGETPLPKYIKRDVQPEDQERYQTIYAKEEGAVAAPTAGLHFSKHLLKRLEIKGVNFAEVTLHVGLGTFSPVEVEDLSKHKMDSEEAFVKGDAVHTINKAKTEKRKVCAVGTTVMRVLESSVSSNQTLNEFGGWTNKFIFPPYDFSIANCMVTNFHTPKSTLLMMISAFAGHDFMMRAYEEAVKEKYRFYTYGDAMLIL

SEQ ID NO: 73901 - protein, 349 aa, Zunongwangia profunda
  misc_feature (1)..(349): tr|A0A3D5J457|A0A3D5J457_9FLAO S-adenosylmethionine:tRN A ribosyltransferase-isomerase OS=Zunongwangia profunda OX=398743 GN=queA PE=3 SV=1
MKLSNFNFELPPELLAEYPAENRDEARLMVLNRKEQTIEHKQFKDLIDYFDPEDVMVLNNTKVFPARLYGNKEKTGARIEVFLLRELNAETKLWDVLVDPARKIRIGNKLYFGDDESLVAEVIDNTTSRGRTLRFLYDGSYEDFRRKLKELGETPLPKYIKRDVQPEDQERYQTIYAKEEGAVAAPTAGLHFSKHLLKRLEIKGVNFAEVTLHVGLGTFSPVEVEDLSKHKMDSEEAFVKGDAVHTINKAKTEKRKVCAVGTTVMRVLESSVSSNQTLNEFGGWTNKFIFPPYDFSIANCMVTNFHTPKSTLLMMISAFAGHDFMMRAYEEAVKEKYRFYTYGDAMLIL

SEQ ID NO: 73902 - protein, 349 aa, Zunongwangia sp.; identical to SEQ ID NO: 73901
  misc_feature (1)..(349): tr|A0A2E0P1Z8|A0A2E0P1Z8_9FLAO S-adenosylmethionine:tRN A ribosyltransferase-isomerase OS=Zunongwangia sp. OX=1 965325 GN=queA PE=3 SV=1

SEQ ID NO: 73903 - protein, 362 aa, Zymobacter palmae
  misc_feature (1)..(362): tr|A0A348HHJ0|A0A348HHJ0_9GAMM S-adenosylmethionine:tRN A ribosyltransferase-isomerase OS=Zymobacter palmae OX= 33074 GN=queA PE=3 SV=1
MGDHRPRDTLLSSEWQAMQRSDFHFDLPEALIARYPSASRTDCRLLCVDGTSGQLAHTRFPALLDHLNPGDVMVFNDTRVIPARLFGQKASGGKVEMLLERLLDSHRALVHLRSSKSPKPGTRLHFEGGIEAEVEGRDDALFILHFLNEEALVPLLEQHGHMPLPPYITREDELSDRERYQTVYARNEGAVAAPTAGLHFDDAMMQQLRDKGIETAFVTLHVGAGTFQPVREDNITDHVMHSEWLNVSEETCDIVNAAHARGNRVIAVGTTSVRCLETASQNGTLRPFIGDTTIFIYPGYRWQCVDALVTNFHLPESTLLMLVSAFAGYDATMRAYQEAVEQQYAFFSYGDAMFLTRKPEAE

SEQ ID NO: 73904 - protein, 342 aa, Zymomonas mobilis
  misc_feature (1)..(342): tr|A0A2R9NU13|A0A2R9NU13_ZYMMB S-adenosylmethionine:tRN A ribosyltransferase-isomerase OS=Zymomonas mobilis sub sp. mobilis NRRL B-12526 OX=1194424 GN=queA PE=3 SV=1
MRVDLFDFELPTESIALRPAVPRESARLLQVTSQGMDDYHVADLPNLLQEGDLLIFNDTRVIPAYLEGKKNQARISANMIKREGLRQWQAFVRNAKRLKSDDIVDFGQDVSARVVHRNDDGSVLFEFLGNEPVEILLERAGNMPLPPYIAHKRPADQQDRQDYQTIFAEKEGAVAAPTASLHFTEELLQRLEEKGVKHTKVTLHVGAGTFLPMKVDDSDDHVMHSEWGQISAETANVINETKKQGGRVIATGTTSLRLIESAADETGLVHPFSDETDIFITPGYRFRVIDGLMTNFHLPKSTLFMLVSALMGREKMLAAYQHAIDTGYRFYSYGDSSLLLPK

SEQ ID NO: 73905 - protein, 342 aa, Zymomonas mobilis
  misc_feature (1)..(342): sp|Q5NP84|QUEA_ZYMMO S-adenosylmethionine:tRNA ribosylt ransferase-isomerase OS=Zymomonas mobilis subsp. mobili s (strain ATCC 31821 / ZM4 / CP4) OX=264203 GN=queA PE= 3 SV=1
MRVDLFDFELPTESIALRPAVPRESARLLQVTSQEMDDYHVADLPNLLQEGDLLIFNDTRVIPAYLEGKKNQARISANMIKREGLRQWQAFVRNAKRLKSDDIVDFGQDVSARVVHRNDDGSVLFEFLGNEPVEILLERAGNMPLPPYIAHKRPADQQDRQDYQTIFAEKEGAVAAPTASLHFTEELLQRLEEKGVKHTKVTLHVGAGTFLPMKVEDSDDHVMHSEWGQISAETANAINETKKQGGRVIATGTTSLRLIESAADETGLVHPFSDETDIFITPGYRFRVIDGLMTNFHLPKSTLFMLVSALMGREKMLAAYQHAIDTGYRFYSYGDSSLLLPK

SEQ ID NO: 73906 - protein, 356 aa, Escherichia coli; identical to SEQ ID NO: 62661
  misc_feature (1)..(356): sp|P0A7F9|QUEA_ECOLI S-adenosylmethionine:tRNA ribosylt ransferase-isomerase OS=Escherichia coli (strain K12) O X=83333 GN=queA PE=1 SV=1

SEQ ID NO: 73907 - protein, 356 aa, Escherichia coli; identical to SEQ ID NO: 62661
  misc_feature (1)..(356): sp|A7ZIF7|QUEA_ECO24 S-adenosylmethionine:tRNA ribosylt ransferase-isomerase OS=Escherichia coli O139:H28 (stra in E24377A / ETEC) OX=331111 GN=queA PE=3 SV=1

SEQ ID NO: 73908 - protein, 313 aa, Abditibacterium utsteinense
  misc_feature (1)..(313): tr|A0A2S8SSG6|A0A2S8SSG6_9BACT Epoxyqueuosine reductase OS=Abditibacterium utsteinense OX=1960156 GN=B1R32_109 57 PE=4 SV=1
MSHQFAIQIKERARELGFAACGIAAAAPPQPTFDLEKWLSSGFHAGMDWMKRPESIAKRADIREVFPGAQSVIVLALNYRTDAPFDEEKHGKIARYARGLDYHDIFKARGNELLSWIQSQQPCAGRMYSDSAPILEHAWAQRAGIGWVGKNTLVMSRELGSYFLLGELVLDIELPPDAPYVQSFCGTCTACLDACPTDAFSAPRVLDANKCISYHTIENREVAPIELRENFQDNVFGCDICQQVCPWNRKNEAKVSAEPQLWTRDLPGIEEWTNIPQEEFSARLKGSPIKRAKRRGMRRNAARALKNRKSHKK

SEQ ID NO: 73909 - protein, 363 aa, Abyssibacter profundi
  misc_feature (1)..(363): tr|A0A363UNV7|A0A363UNV7_9GAMM Epoxyqueuosine reductase OS=Abyssibacter profundi OX=2182787 GN=queG PE=3 SV=1
MRVKTQPPNATPSPEVLAGRIRDWATELGFDGVGITGFDLAEDVEHLHQWLREGRHGSMDYMARHTDLRADPARLQPEAIRCISVRMNYRTQSADAMQACLDDPDRAYVSRYALGRDYHKLMRGRLKQLARRLQEAAPEALSRPFVDSAPVLEKALGRDARLGWIGKHSLLLHRDAGSWFFLGEILTNVALPVDDDPPVKNLCGSCTACMEICPTQAITGPQQLDARRCIAYLTIEHKGSIPEGLRKPMGNRIFGCDDCQLVCPWNRYAQATREPDFAPRHGLDTARLVDLFAWSEDEFLSRTEGMPIRRTGYAGWRRNIAVALGNATASDESRQALRGALDDPSPLVREHVQWALQQLEAAD

SEQ ID NO: 73910 - protein, 381 aa, Abyssicoccus albus
  misc_feature (1)..(381): tr|A0A3N5BPD9|A0A3N5BPD9_9STAP Epoxyqueuosine reductase OS=Abyssicoccus albus OX=1817405 GN=EDD62_1005 PE=4 SV =1
MNYYQLKRDIVDYAHSIGIDDIGFTSAEPFEELRPKLEEYYAKGYDSGFEVGTIDERINPKLSLPSAQSIIAIAVGYPNKLKDAPRSTKNERRGIFARASWGQDYHTLLNDRLNKLEAYIKHRVPEVECMNMVDTGVLSDRAVAERAGLGFTGRNGFVINPKLGTWTYLGEMLINLPFPSDNPIIDSCGDCTICVDRCPTGALLGEGGLNSKKCISFQTQLKGMMDVHYRKKIGNRLYGCDTCQQVCPLNKGINTTHEDIEVEPDVVKPLLIPLLRMSNREFKETYGHLAGAWRGKKPIQRNAMIALANFKDDSAIPELKKVISEDVRPMIVATAYWAIAEIEGISSIEFIERALQKETEQIVLDELNDILNTLRREQYAD

SEQ ID NO: 73911 - protein, 309 aa, Acaryochloris sp.
  misc_feature (1)..(309): tr|A0A2W1K6C6|A0A2W1K6C6_9CYAN Epoxyqueuosine reductase OS=Acaryochloris sp. RCC1774 OX=1764569 GN=queG_1 PE=3 SV=1
MDFCPDLVKQQALDIGFHKVGISAVQPRDTATLQSWLAQGYQAEMAWMQDPRRQDIEQVMPGVRSVISVALNYYASQERPQGKQYAKISRYGWGRDYHRVLTKRLKAFSAWLESQGEGIRTRYYVDTGPVQDKVWAERAGLGWIGKHSNLISRDYGSWIFLGEILTNLELEPDTPHTQHCGTCTRCLEACPTQAITEPFVVDANRCIAYHTIENRSETLPQEVADNLQGWVAGCDICQDVCPWNQRFAKETDIPDFQPYPWNVGPTLAELATVSEEERDRKFPASALRRITRKMLQRNAQASLDNPVQK

SEQ ID NO: 73912 - protein, 386 aa, Accumulibacter phosphatis
  misc_feature (1)..(386): tr|C7RVF3|C7RVF3_ACCPU Epoxyqueuosine reductase OS=Accu mulibacter phosphatis (strain UW-1) OX=522306 GN=queG P E=3 SV=1
MIRAMQESHSQTGGDVGPADERAENYAYAALARRIKDWGQELGFAAIGIAGIDVTAATPWLRRWLALGRHGEMHYMAKHAGLRGAPERLVPGTLSVISARLAYWPAAADARQVLADGDQAYVSRYALGRDYHKTVRQRLQKLADRIRQAVAALDHGEPFACRVFSDSAPVLETEFASRSGIAWRGKHTLSLTRGGSWHFLGEIYTNLPLPHDAAVADHCGDCRRCLEACPTAAIVAPYEVDARRCISYLTIELPGAIPVALRPLVGNRIYGCDDCQLYCPWNRFARLGDRDFAVRNGLDAVPLAELFAWSEDDFGQRLAGSPIRRIGHARWLRNIAVALGNAASSPAIIAALRSRLQDPSLLVREHVDWALAQHAARDQPAAPAGR

SEQ ID NO: 73913 - protein, 229 aa, Acetanaerobacterium elongatum
  misc_feature (1)..(229): tr|A0A1H0DFN5|A0A1H0DFN5_9FIRM Epoxyqueuosine reductase QueG (Queuosine biosynthesis) OS=Acetanaerobacterium e longatum OX=258515 GN=SAMN05192585_12827 PE=4 SV=1
MEQQIKELVLSLGADVCGIAGIGRFESAPEGFHPKDIYPDCKSVVVFGVALPKGLAKVEPRLVYGHYNDICKPQADRIALFAAKAIEERFKTFAVPVPSDNPYEYWDAEKLEGRGLISMKHAACLAGLGTFGKSTLLLNCQYGSLLTLGAVLTALDLASDPMADSICIAGCTRCIDSCPVQALDGKGGVNQAKCRRNTYGKNARGFNTVDCNRCRTVCPMRFGTQQQES

SEQ ID NO: 73914 - protein, 294 aa, Acetoanaerobium noterae
  misc_feature (1)..(294): tr|A0A1T5C4K8|A0A1T5C4K8_9FIRM Epoxyqueuosine reductase OS=Acetoanaerobium noterae OX=745369 GN=SAMN02745120_2 001 PE=4 SV=1
MIDIINQENIDQYTIINVNSIKDSLDKFSFYLEERKLLGVQLDLEEQNLGSRLKLDINNKPASSIICIFFPYLTESHSFDSNISVSAQGIDYHIWAKDKLKRIVQKLQIKYPNSTFSIQVDNGPLNERFFALESGLGYKGINNMVINEVYGSYGFIGLIVTDLVLKEKRLPKKNCINCGKCIEYCPGKALNYKNGFIGQRCASYLTQKKTELSDSEIAILKKSNKVYGCDICQIVCPHNRDIKKSQEIDDVMKRLNLNDIASLSNKEFKKNYGNRAFAWRGKNILVRNFNIIGD

SEQ ID NO: 73915 - protein, 294 aa, Acetoanaerobium sticklandii
  misc_feature (1)..(294): tr|E3PXQ5|E3PXQ5_ACESD Putative iron-sulfur cluster pro tein OS=Acetoanaerobium sticklandii (strain ATCC 12662 / DSM 519 / JCM 1433 / NCIMB 10654) OX=499177 GN=CLOST_ 1098 PE=4 SV=1
MIDIINQENIDQYTIINVNSIKDSLDKFSFYLEERKLLGAQLDLEEQNLVSRLKLDINNKPASSIICIFFPYLTESHSFDSNISVSAQGIDYHIWAKDKLKRIVQKLQIKYPNSTFSIQVDNGPLNERFFALESGLGYKGINNMVINEVYGSYGFIGLIVTDLVLKEKRLPKKNCINCGKCIEYCPGKALNYKKGFIGQRCASYLTQKKTELSDSEIAILKKSNKVYGCDICQIVCPHNRDIKKSQEINDVIKRLNLNDIASLSNKEFKKKFGNRAFAWRGKNILVRNFNIIGD

SEQ ID NO: 73916 - protein, 372 aa, Acetobacter aceti
  misc_feature (1)..(372): tr|A0A1U9KK13|A0A1U9KK13_ACEAC Epoxyqueuosine reductase OS=Acetobacter aceti OX=435 GN=queG PE=3 SV=1
MSSSSSTVMLRLAERMETKARELGFHAFGICDAEIGTETGVRLRDMLAQGHHGTMTWMAERVESRAHPNGLWPEARSVISLGLSYAPEGDPLATLSEKGCGNISVYARNRDYHDIIKGMLKHLAQYLVAETRRVELKAEVKVFVDTAPVPEKPLAERAGLGWQGKHTNLVSRDHGSWLLLGEIYTTLALPPTAHRAGRCGSCSRCLAVCPTNAFPAPYQLDARRCISYLTIEYAGPIPLEFREAMGNHIYGCDDCLSACPWNRFAEESHVMKLKAREDLIAPSLSDLAALDDAGFRSLFSGSPIKRIGRNRFVRNVLIAIGNSGDSTMTQAAETLCHDPDPVVAEAAAWAMDRLTKQVAGTVSSMASAGGRP

SEQ ID NO: 73917 - protein, 367 aa, Acetobacter aceti
  misc_feature (1)..(367): tr|A0A0D6MRU9|A0A0D6MRU9_ACEAC Epoxyqueuosine reductase OS=Acetobacter aceti NBRC 14818 OX=887700 GN=queG PE=3 SV=1
MSSSPTLMHRLVERLETKARELGFYAFGICAADIGEETGDRLRDMIAQGHHSTMTWMAERVESRAHPNGLWPEARSVISLGLSYAPEGDPLATLADKACGNISIYARNRDYHDIIKGMLKHLAQYLVAETRRAQLEAEVKVFVDTAPVPEKPLAEQAGLGWQGKHTNLVSRDHGSWLLLGEIYTTLELPPTPHRAGQCGSCSRCLEVCPTSAFPSPYRLDARRCISYLTIEHAGPIPHEFREAMGNHIYGCDDCLSACPWNRFAEESRVMKLKAREDLIAPRLSELAALDDAGFRTLFSGSPIKRIGRNRFVRNVLIAIGNSGDEGMGPIAERLRDDADPVVAEAADWAVKRLAQTVSSPMPARPGL

SEQ ID NO: 73918 - protein, 366 aa, Acetobacter ascendens
  misc_feature (1)..(366): tr|A0A1Y0V213|A0A1Y0V213_9PROT Epoxyqueuosine reductase OS=Acetobacter ascendens OX=481146 GN=queG PE=3 SV=1
MTAPSAHPSQPAAPAAKLAEKIRIKALELGFDAIGFCPAHLGPEVRARLKDFLAEGYHGEMGWLADRTEQRSQPIALWPEARSVIALGLNYAPAQNPLSTLQNRTCGNISVYARHRDYHDIVKGMLKHLAQFVVREARMMLNTAPDVKVFVDTAPVAEKPLAAQAGLGWQGKHTNLVSRQHGSWLFLGEIYTTLELPTSADSGGSCGSCTRCLNACPTQAFPAPYQMDARKCISYLTIEHAGPIPTPLRKAIGTHIYGCDDCLAVCPWNRFAQISRHIKLQPRPDLIAPELATLSQLDDAAFRTMFAGSPIKRIGRNRFIRNVLIAIGNSGHPELLPYAQSLRQDPDTVVAEAADWATQCLMGDAA

SEQ ID NO: 73919 - protein, 366 aa, Acetobacter ascendens
  misc_feature (1)..(366): tr|A0A1D8QY67|A0A1D8QY67_9PROT Epoxyqueuosine reductase OS=Acetobacter ascendens OX=481146 GN=queG PE=3 SV=1
MTAPSAHPSQPAAPAAKLAEKIRIKALELGFDAIGFCPAHLGPEVRARLKDFLAEGYHGEMGWLADRTEQRNQPIALWPEARSVIALGLNYAPAENPLSTLQNRTCGNISVYARHRDYHDIVKGMLKHLAQFVVREARMMLNTAPDVKVFVDTAPVAEKPLAAQAGLGWQGKHTNLVSRQHGSWLFLGEIYTTLELPTSADSGGSCGSCTRCLNACPTQAFPAPYQMDARKCISYLTIEHAGPIPTPLRKAIGTHIYGCDDCLAVCPWNRFAQISRHIKLQPRPDLIAPELATLSQLDDAAFRTMFSGSPIKRIGRNRFIRNVLIAIGNSGHPELLPYAQSLLQDPDTVVAEAADWATQCLMGDAA

SEQ ID NO: 73920 - protein, 387 aa, Acetobacter cerevisiae
  misc_feature (1)..(387): tr|A0A149UVJ8|A0A149UVJ8_9PROT Epoxyqueuosine reductase OS=Acetobacter cerevisiae OX=178900 GN=queG PE=3 SV=1
MSCLSGAEKLAARIREKALALGFDAIGFCPAHLGPEVRDRLTDFLANGYHGEMGWLADRADQRTQPTTLWPEARTVIALGLSYAPEGDPPATLSQPDRGNISVYARHRDYHDLIKGMLKHLAQFVVREGTLEAERSLAAAQRRNTQSNQHNTPDQHPAEEPRPQPPGVKVFVDTAPVAEKPLAEQAGLGWQGKHTNLVSRSHGSWLFLGEIYTTLALPTSPPSGGGCGSCTRCLTACPTQAFPAPYSMDARRCISYLTIEYAGPIPLDLRPAIGTHIYGCDDCLAVCPWNRFAQASRQIKLQPRPDLIAPDLASLSQLDDAAFRLKFSGSPIKRIGRNRFVRNVLIAMGNSGLAELRPHAHRLTQDPDSVVAEAAQWAVARLEGLPA

SEQ ID NO: 73921 - protein, 387 aa, Acetobacter cerevisiae
  misc_feature (1)..(387): tr|A0A149V985|A0A149V985_9PROT Epoxyqueuosine reductase OS=Acetobacter cerevisiae OX=178900 GN=queG PE=3 SV=1
MSSLSGAEKLAARIREKALALGFDAIGFCPAHLGPEVRDRLTDFLANGYHGEMGWLADRADQRTQPTTLWPEARTVIALGLSYAPEGDPLATLSQPDRGNISVYARHRDYHDLIKGMLKHLAQFVVREGTLEAARALTAAQRQNSQTSQHNPPDQHRAEELRPQPPDVKVFVDTAPVAEKPLAEQAGLGWQGKHTNLVSRSHGSWLFLGEIYTTLALPTSPPSGGGCGSCTRCLTACPTQAFPAPYSMDARRCISYLTIEYAGPIPLDLRPAIGTHIYGCDDCLAVCPWNRFAQASRQIKLQPRPDLIAPDLASLSQLDDAAFRLKFSGSPIKRIGRNRFVRNVLIAMGNSGLAELCPHAHRLTQDPDSVVAEAAQWAVTRLEGLPA

SEQ ID NO: 73922 - protein, 365 aa, Acetobacter cibinongensis
  misc_feature (1)..(365): tr|A0A1Z5YZA9|A0A1Z5YZA9_9PROT Epoxyqueuosine reductase OS=Acetobacter cibinongensis OX=146475 GN=queG PE=3 SV =1
MAEAPAHPLHKLADRIRDKALALGFDAIGFCPATLGPEVRERLTDFLAKGYHGDMGWLADRTTQRTHPQALWPEARSVIALGVSYAPEGDALATLAKTECGNISVYARHRDYHDLIKGMLKHLAQFVVKEGQTTLSTTGTGEPPQVKVFVDTAPVAEKPLAEQAGLGWQGKHTNLVSRSHGSWLFLGEIYTTLELPQSAPSGGQCGSCTRCLTACPTQAFPAPYQMDARRCISYLTIEHAGPIPHALRAAMGTHIYGCDDCLAVCPWNRFATVSRQIKLQPRPDLIAPELADLVQLDDTAFRQRFSGSPIKRIGRDRFIRNVLTAIGNSGRQELIPLASALCHDPNPVVAEAAEWAVTRLEGHTP

SEQ ID NO: 73923 - protein, 365 aa, Acetobacter cibinongensis
  misc_feature (1)..(365): tr|A0A0D6N2F3|A0A0D6N2F3_9PROT Epoxyqueuosine reductase OS=Acetobacter cibinongensis 4H-1 OX=1231339 GN=queG P E=3 SV=1
MAEAPAHPLHKLADRIRDKALALGFDAIGFCPATLGPEVRERLTDFLAKGYHGDMGWLADRTTQRTHPQALWPEARSVIALGVSYAPEGDALATLAKTECGNISVYARHRDYHDLIKGMLKHLAQFVVKEGQTTLSATRTGEPPQVKVFVDTAPVSEKPLAEQAGLGWQGKHTNLVSRSHGSWLFLGEIYTTLELPQSAPSGGQCGSCTRCLTACPTQAFPAPYQMDARRCISYLTIEHAGPIPHALRAAIGTHIYGCDDCLAVCPWNRFATVSRQIKLQPRPDLIAPELADLVQLDDTAFRQRFSGSPIKRIGRDRFIRNVLTAIGNSGRQELIPLASALCHDPNPVVAEAAEWAVTRLEGRTP

SEQ ID NO: 73924 - protein, 355 aa, Acetobacter fabarum
  misc_feature (1)..(355): tr|A0A269XYJ1|A0A269XYJ1_9PROT Epoxyqueuosine reductase OS=Acetobacter fabarum OX=483199 GN=queG PE=3 SV=1
MHPGSRLSARIRDKALELGFDAIGFCPATLGPEARVRLQDFLANGYHGEMGWLADRTKQRSQPTALWPEARTVIALGLSYAPEGDALATLQNPDCGNISVYARHRDYHDVLKGMLKHLAQFVVREGRLAHPATPEVKVFVDTAPVAEKPLADQAGLGWQGKHTNLVSRQHGSWLFLGEIYTTLDLPASPPSGGGCGSCTRCLNACPTQAFPAPYQMDARRCISYLTIEHAGPIPLPLRPLMGTHIYGCDDCLAVCPWNRFAKMASNIKLQPRADLIAPDLATLSQLDDAAFRALFSGSPIKRIGRNRFIRNVLVAMGNSGRAHLLPHARALTTDPDPVVRDAADWAMTQLESPTA

SEQ ID NO: 73925 - protein, 367 aa, Acetobacter ghanensis
  misc_feature (1)..(367): tr|A0A0U5F1K6|A0A0U5F1K6_9PROT Epoxyqueuosine reductase OS=Acetobacter ghanensis OX=431306 GN=queG PE=3 SV=1
MTKAKPPPPQPAAHPASRLAERIRNKALELGFDAIGFCPAALGPEVRERLQDFLANGYHGEMGWLAERTDQRSQPTALWPQARTVIALGTSYAPSNNALATLQQPDRGNISVYARHRDYHDVIKGMLKHLAQFVVREGKQAAPFGPDVKVFVDTAPVAEKPLAAQAGLGWQGKHTNLVSRQHGSWLFLGEIYTTLDLPTSPPSGGGCGSCSRCLTACPTQAFPTPYQMDARRCISYLTIEHAGPIPPDLRPMMGTHIYGCDDCLAVCPWNRFAKAAHLMKLQPRQDLIAPELATLSQLDDAAFRTLFSGSPVKRIGRNRFIRNVLIAIGNSGRPSLLPHAHTLCMDPDPVVRDAAFWAVASLERRMT

SEQ ID NO: 73926 - protein, 376 aa, Acetobacter indonesiensis
  misc_feature (1)..(376): tr|A0A252ATG8|A0A252ATG8_9PROT Epoxyqueuosine reductase OS=Acetobacter indonesiensis OX=104101 GN=queG PE=3 SV =1
MSDTPPLQPTLPETRSQKLAARIREKALALGFDAIGFCPAHLGPEVRNRLTDFLAQGYHGEMGWLADRADQRAHPQALWPEARSVIALGLSYAPEGDALATLRKPECGNISVYARHRDYHDLIKGMLKHLAQFVVKEGREALNVSAQSQQATDTPQVKVFVDTAPVAEKPLAAQAGLGWQGKHTNLVSRTQGSWLFLGEIYTTLDLPLSPPSGGSCGSCTRCLTACPTQAFPEPYKMDARRCISYLTIEHAGPIPLALRPAIGTHIYGCDDCLAVCPWNRFAQVSRQIKLQPRPDLIAPELATLSQLDDAAFRQMFSGSPIKRIGRNRFIRNVLIAIGNSKQPALLPHAQTLTSDADPIVAEAAQWAATRLIDLQA

SEQ ID NO: 73927 - protein, 376 aa, Acetobacter indonesiensis
  misc_feature (1)..(376): tr|A0A0D6N839|A0A0D6N839_9PROT Epoxyqueuosine reductase OS=Acetobacter indonesiensis 5H-1 OX=1231340 GN=queG P E=3 SV=1
MSDTPPLQPALSETRSQKLAARIREKALALGFDAIGFCPAHLGPEVRTRLTDFLVQGYHGEMGWLADRADQRAHPQALWPEARSVIALGLSYTPEGDALATLRKPECGNISVYARHRDYHDLIKGMLKHLAQFVVKEGRDALNVSAQSQHATDTPQVKVFVDTAPVAEKPLAAQAGLGWQGKHTNLVSRTQGSWLFLGEIYTTLDLPPSPPSGGSCGSCTRCLTACPTQAFPEPYKMDARRCISYLTIEHAGPIPLALRPAIGTHIYGCDDCLAVCPWNRFAQVSRQIKLQPRPDLIAPELATLSQLDDAAFRQMFSGSPIKRIGRNRFIRNVLIAIGNSKQPALLPHAQTLTSDADPIVAEAAQWATTRLMDQQA

SEQ ID NO: 73928 - protein, 391 aa, Acetobacter malorum
  misc_feature (1)..(391): tr|A0A149RER9|A0A149RER9_9PROT Epoxyqueuosine reductase OS=Acetobacter malorum OX=178901 GN=queG PE=3 SV=1
MPSQPGAEKLAARIREKALALGFDAIGFCPAHLGPEVRDRLTDFLANGYHGEMGWLADRADQRVQPTTLWPEARTVIALGVSYAPEGDPLATLSQPDRGNISVYARHRDYHDLIKGMLKHLAQFVVREGTREAERAFTAAQRQTGQTSQTGKPGLHAGEPGRSVAEAPPPGVKVFVDTAPVAEKPLAAQAGLGWQGKHTNLVSRSHGSWLFLGEIYTTLALPTSPPSGGGCGSCTRCLTACPTQAFPAPYSMDARRCISYLTIEYAGPIPLELRPAIGTHIYGCDDCLAVCPWNRFAQASRQIKLQPRPDLIAPDLASLSQLDDTAFRQKFSGSPIKRIGRNRFVRNVLIAIGNSGLAELRPHAHRLTQDPDNVVAEAARWAVARLDGLRV

SEQ ID NO: 73929 - protein, 372 aa, Acetobacter malorum
  misc_feature (1)..(372): tr|A0A1Y3G8L1|A0A1Y3G8L1_9PROT Epoxyqueuosine reductase OS=Acetobacter malorum OX=178901 GN=queG PE=3 SV=1
MPSQPGAEKLAARIREKALALGFDAIGFCPAHLGPEVRERLTDFLANGYHGEMGWLADRANQRTQPTTLWSEARTVIALGLSYAPEGDPLATLSQPDRGNISVYARHRDYHDLIKGMLKHLAQFVVREGRLEAERAAARGHENANPEPEAPGVKVFVDTAPVAEKPLAAQAGLGWQGKHTNLVSRSQGSWLFLGEIYTTLALPASPPSGGGCGSCTRCLTACPTQAFPAPYSMDARRCISYLTIEYAGPIPLELRPAIGTHIYGCDDCLAVCPWNRFAQTSRQIKLQPRPDLMAPDLASLSQLDDAAFRQKFSGSPIKRIGRNRFVRNVLIAIGNSGLAELRPHAQRLTQDTDSVVAEAARWALARLEGVPE

SEQ ID NO: 73930 - protein, 376 aa, Acetobacter nitrogenifigens
  misc_feature (1)..(376): tr|A0A511X755|A0A511X755_9PROT Epoxyqueuosine reductase OS=Acetobacter nitrogenifigens DSM 23921 = LMG 23498 O X=1120919 GN=queG PE=3 SV=1
MAAAFDPAGFLSADAKGPALIGRDARAAALADRLRDKAFALGFDAFGICDTALGGEARERLRAFLEAGRHGAMTWMTERTEARSHPNGLWPEARSVVALGLNYGPDGDALATLDRPDRGNISVYARNRDYHDIIKGLLKHLAQFLVAEARRRNLPAEVKVFVDTAPVPEKPLAERAGLGWQGKHTNLVSRTHGSWLLLGEIYTTLDLPPSSLSGGRCGSCTRCLATCPTDAFPAPYQLDARRCVSYLTIEHPGPIPHEFREAMGNRVYGCDDCLAVCPWNRFASASRQAKLQAREDLTAPRLAALAALDDTEFRTLFSGSPIKRIGRNRFVRNVMIAIGNSNEASLLPTAQARCDDGDPVVAEAARWACERLEGPG

SEQ ID NO: 73931 - protein, 363 aa, Acetobacter oeni
  misc_feature (1)..(363): tr|A0A511XMU9|A0A511XMU9_9PROT Epoxyqueuosine reductase OS=Acetobacter oeni OX=304077 GN=queG PE=3 SV=1
MVSGGFGARVPVSSSSLAERIRERAFALGFDAFGICDAETGPEAGERLRAFVADGRHGTMGWLAERVEARAHPQGLWPEARSVISVGMSYAPEGDPLATLGLPGAGNISVYARHRDYHDIIKGLLKHLAQFVVVESRRGGVEAGVKVFVDTAPVPEKPLAERAGLGWQGKHTNVVSRDHGSWLLLGEVYTTLVLPPTAHRAGQCGSCTRCLVACPTDAFPAPYEMDARRCISYLTIEHAGPVPEEFRVAMGNRIYGCDDCLAACPWNRFAAESRHLKLRAREDLVAPDLAELAVLDDSGFRRLFSGSPIKRIGRGRFVRNVLIAAGNSGDARLLEVVQGLCEDSDPVVAEAARWACGRLGAAE

SEQ ID NO: 73932 - protein, 368 aa, Acetobacter okinawensis
  misc_feature (1)..(368): tr|A0A252BYB1|A0A252BYB1_9PROT Epoxyqueuosine reductase OS=Acetobacter okinawensis OX=1076594 GN=queG PE=3 SV= 1
MTNPSPPPHATGTADPATHRLAERIRNKALELGFDAIGFCPASLGPEVRLRLQDFLANGYHGQMNWLADRAEQRSQPTALWPDARTVIALGTSYAPEGDALATLHKPGCGNISVYARHRDYHDVVKGMLKHLAQFVVREGRQATAAPEVKVFVDTAPVAEKPLAEKAGLGWAGKHTNLVSRQHGSWLFLGEIYTTLALPSSPPSGGGCGSCSRCLSACPTQAFPAPYQMDARRCISYLTIEHAGPIPVALRPLMGTHIYGCDDCLAVCPWNRFAKASQHIKLQPRAELIAPDLAELSQLDDPAFRTLFSGSPIKRIGRNRFVRNVLIAIGNSGLPALLPHAHTLSMDPDPVVRDAALWAIEQLEGRTT

SEQ ID NO: 73933 - protein, 365 aa, Acetobacter orientalis
  misc_feature (1)..(365): tr|A0A252BFM8|A0A252BFM8_9PROT Epoxyqueuosine reductase OS=Acetobacter orientalis OX=146474 GN=queG PE=3 SV=1
MTQAPAPALQNLADNIRNKASALGFDAIGFCPAHLGPEVRARLADFLAKGYHGEMGWLAERSAQRTHPQALWPEAQSVIALGVSYAPEGEALATLKRPECGNISVYARHRDYHDLIKGMLKHLAQYVVKEGQAALAKHGNTAPPQVKVFVDTAPVAEKPLAAQAGLGWQGKHTNLVSRTHGSWLFLGEIYTTLALPTSPPSGGQCGSCTRCLTACPTQAFPAPYTLNAKRCISYLTIEHAGPIPHDLRPAIGTHIYGCDDCLAVCPWNRFAKTSRHAKLQPRPDLLAPELAHLVQLDDTAFRQLFSGSPIKRIGRNRFIRNVLTAIGNSGKKDLLPYATALRQDPDPIVAEAATWAVTCLESLPP

SEQ ID NO: 73934 - protein, 365 aa, Acetobacter orientalis
  misc_feature (1)..(365): tr|A0A0D6NFZ0|A0A0D6NFZ0_9PROT Epoxyqueuosine reductase OS=Acetobacter orientalis 21F-2 OX=1231341 GN=queG PE= 3 SV=1
MTQAPAPALQNLADNIRNKALALGFDAIGFCPAHLGPEVRARLADFLAKGYHGEMGWLAERSAQRTHPQALWPEAQSVIALGVSYAPEGDALATLKRPECGNISVYARHRDYHDLIKGMLKHLAQYVVKEGQAALAKHGNAAPPQVKVFVDTAPVAEKPLAAQAGLGWQGKHTNLVSRTHGSWLFLGEIYTTLALPTTPPSGGQCGSCTRCLTACPTQAFPAPYTLNAQRCISYLTIEHAGPIPHDLRPAIGTHIYGCDDCLAVCPWNRFAKTSRHAKLQPRPDLLAPELAHLVQLDDTAFRQLFSGSPIKRIGRNRFIRNVLTAIGNSGKKDLLAYAAALRQDPDPIVAEAATWAVTCLESLPP

SEQ ID NO: 73935 - protein, 394 aa, Acetobacter orleanensis
  misc_feature (1)..(394): tr|A0A4Y3TKI3|A0A4Y3TKI3_9PROT Epoxyqueuosine reductase OS=Acetobacter orleanensis OX=104099 GN=queG PE=3 SV=1
MSKVDSAGQVDAMLPGAEKLAARIREKALALGFDAIGFCPAHLGPEVRERLTDFLAKGYHGEMGWLAERADQRTQPTTLWPDARTVIALGVSYAPEGDPLATLRLPDRGNISVYARHRDYHDLIKGMLKHLAQFVVREGTLAAERASATMQHHASRQDSAAHPTPNVPDIPPPGVKVFVDTAPVAEKPLAAQAGLGWQGKHTNLVSRSHGSWLFLGEIYTTLVLPASPPSGGGCGTCTRCLTACPTQAFPAPYQMDARRCISYLTIEHAGPIPLEFRPAIGTHIYGCDDCLAVCPWNRFAQVSRQIKLQPRPDLIAPDLTSLSQLDDAAFRQKFSGSPIKRIGRNRFVRNVLIAIGNSGLPDLLPHAHALTQDPDSVVAEAAQWAVTRLKACQP

SEQ ID NO: 73936 - protein, 366 aa, Acetobacter pasteurianus
  misc_feature (1)..(366): tr|A0A1A0DEE9|A0A1A0DEE9_ACEPA Epoxyqueuosine reductase OS=Acetobacter pasteurianus OX=438 GN=queG PE=3 SV=1
MTAPSAHPPQPAAPAAKLAEKIRIKALELGFDAIGFCPAHLGPEVRTRLKDFLAEGYHGEMGWLADRTEQRSQPTALWPEARSVIALGLNYAPAENPLSTLQNRTCGNISVYARHRDYHDVVKGMLKHLAQFVVREARMMLATAPDVKVFVDTAPVAEKPLAAQAGLGWQGKHTNLVSRQHGSWLFLGEIYTTLELPASAVSGGSCGSCTRCLNACPTQAFPAPYQMDARKCISYLTIEHAGPIPHPLRKAIGTHIYGCDDCLAVCPWNRFAQTSRHIKLQPRPDLIAPELAALSQLDDAAFRTMFSGSPIKRIGRNRFIRNVLIAIGNSGHPELLPYAHALRQDPDSMVAEAADWAMQCLTGDAA

SEQ ID NO: 73937 - protein, 366 aa, Acetobacter pasteurianus; identical to SEQ ID NO: 73936
  misc_feature (1)..(366): tr|A0A401WH34|A0A401WH34_ACEPA Epoxyqueuosine reductase OS=Acetobacter pasteurianus subsp. pasteurianus LMG 12 62 = NBRC 106471 OX=940265 GN=queG PE=3 SV=1

SEQ ID NO: 73938 - protein, 354 aa, Acetobacter peroxydans
  misc_feature (1)..(354): tr|A0A4Y3TX84|A0A4Y3TX84_9PROT Epoxyqueuosine reductase OS=Acetobacter peroxydans OX=104098 GN=queG PE=3 SV=1
MARLTERIRDKALALGFDAIGFCPAHLSPEVRARLADFLANGQHGSMGWLAERTAERAQPTALWPQARSVVCLGVSYAPETDPRIPLPPDRGTISVYARHRDYHDMIKGMLKHLAQFMIGEAAKLDHAAAEVKVFVDTAPVAEKPLAAQAGLGWQGKHTNLVSRQHGSWLFLGEVYTTLALTPSPPPAGGCGTCTRCLNACPTNAFPAPYQLDARRCISYLTIEHAGPIPLELRRGIGTRIYGCDDCLAVCPWNRFAQTSRHPKLQPRADLMAPELTRLSQLDDAAFRTLFSGSPIKRIGRNRFIRNVLMAIGNSGLPALRPAATALLNDPDPVVAEAAQWALAQPATPEAPAP

SEQ ID NO: 73939 - protein, 364 aa, Acetobacter persici
  misc_feature (1)..(364): tr|A0A1U9LHW5|A0A1U9LHW5_9PROT Epoxyqueuosine reductase OS=Acetobacter persici OX=1076596 GN=queG PE=3 SV=1
MPGAEKLAARIREKALALGFDAIGFCPAHLGPDVRARLTDFLAKGYHGEMGWLAERADQRTQPTTLWPDARTVIALGVSYAPEGDPLATLRQPDRGNISVYARHRDYHDLIKGMLKHLAQFVVREGTLEARRAFAAESPPPQPPGVKVFVDTAPVAEKPLAEQAGLGWQGKHTNLVSRSHGSWLFLGEIYTTLELPSSPPSGGGCGSCTRCLTACPTQAFPAPYQMDARRCISYLTIEHAGPIPLELRPGIGTHIYGCDDCLAVCPWNRFARTSRQIKLQPRADLIAPDLASLSALDDAAFRQKFSGSPIKRIGRNRFVRNVLIAIGNSGLPDLLPYAHRLTQDPDEVVAEAARWAVTRLETIP

SEQ ID NO: 73940 - protein, 364 aa, Acetobacter persici
  misc_feature (1)..(364): tr|A0A252AM48|A0A252AM48_9PROT Epoxyqueuosine reductase OS=Acetobacter persici OX=1076596 GN=queG PE=3 SV=1
MPGAEKLAARIREKALALGFDAIGFCPAHLGPDVRARLTDFLAKGYHGEMGWLADRADQRTQPTTLWPEARTVIALGVSYAPEGDPLATLRQPDRGNISVYARHRDYHDLIKGMLKHLAQFVVREGTLEARRAFAAESTPPQPPGVKVFVDTAPVAEKPLAEQAGLGWQGKHTNLVSRSHGSWLFLGEIYTTLELPSSPPSGGGCGSCTRCLTACPTQAFPAPYQMDARRCISYLTIEHAGPIPLELRPGIGTHIYGCDDCLAVCPWNRFARTSRQIKLQPRADLIAPDLASLSALDDATFRQKFSGSPIKRIGRNRFVRNVLIAIGNSGLPDLLPYAHRLTQDPDSVVAEAARWAVTRLETIP

SEQ ID NO: 73941 - protein, 366 aa, Acetobacter pomorum
  misc_feature (1)..(366): tr|A0A346DX51|A0A346DX51_9PROT Epoxyqueuosine reductase OS=Acetobacter pomorum OX=65959 GN=queG PE=3 SV=1
MIAPSAPALQPVAPAARLAEKIRIKALELGFDAIGFCPAHLGPEVRARLKDFLAEGYHGEMGWLADRTEQRSQPTALWPEARSVIALGLNYTPAENPLSTLHNRTCGNISVYARHRDYHDVVKGMLKHLAQFIVREARMVLDTAPDVKVFVDTAPVAEKPLATQAGLGWQGKHTNLVSRQHGSWLFLGEIYTTLELPASAHSGGSCGSCTRCLNACPTQAFPAPYQMDARKCISYLTIEHAGPIPLPLRKAIGTHIYGCDDCLAVCPWNRFAQISRHIKLQPRPDLIAPELATLSQLDDTAFRAMFSGSPIKRIGRNRFIRNVLIAIGNSGHPDLLPYAQALRQDPDAVVAEAADWAIQRLTGDAA

SEQ ID NO: 73942 - protein, 366 aa, Acetobacter pomorum
  misc_feature (1)..(366): tr|F1YUU4|F1YUU4_9PROT Epoxyqueuosine reductase OS=Acet obacter pomorum DM001 OX=945681 GN=yjeS PE=3 SV=1
MIAPSAPALQPVAPAARLAEKIRIKALELGFDAIGFCPAHLGPEVRARLKDFLAEGYHGEMGWLADRTEQRSQPTALWPEARSVIALGLNYTPAENPLSTLHNRTCGNISVYARHRDYHDVVKGMLKHLAQFIVREARMVLDTAPDVKVFVDTAPVAEKPLATQAGLGWQGKHTNLVSRQHGSWLFLGEIYTTLELPASAHSGGSCGSCTRCLNACPTQAFPAPYQMDARKCISYLTIEHAGPIPLPLRKAIGTHIYGCDDCLAVCPWNRFAQTSRHIKLQPRPDLIAPELATLSQLDDTAFRAMFSGSPIKRIGRNRFIRNVLIAIGNSGHPDLLPYAQALRQDPDAVVAEAADWAIQRLTGDAA

SEQ ID NO: 73943 - protein, 378 aa, Acetobacter senegalensis
  misc_feature (1)..(378): tr|A0A252EGT0|A0A252EGT0_9PROT Epoxyqueuosine reductase OS=Acetobacter senegalensis OX=446692 GN=queG PE=3 SV= 1
MEKLAARIREKALALGFDAIGFSPAHLGPEVRTRLTDFLANGYQGEMGWLAERTDQRTHPQDLWPDAHSVIALGLSYAPEGDALATLRQRDRGNISVYARHRDYHDLVKGMLKHLAQFVVKEGRETLAAAQAQAQAQAQAQAQAQAQAQAHPLPETPQVKVFVDTAPVSEKPLAEQAGLGWQGKHTNLVSRTHGSWLFLGEIYTTLALPASSPSGGSCGSCTRCLTACPTQAFPEPYKMDARRCISYLTIEHSGLIPHALRPAIGTHIYGCDDCLAVCPWNRFAQTSRQIKLQPRPDLIAPELATLSQLDNTSFRQMFSGSPIKRIGRNRFVRNVLIAIGNSGEPSLLPHAEKLLTDTDPVVAEAAQWATLRLKENGS

SEQ ID NO: 73944 - protein, 390 aa, Acetobacter senegalensis
  misc_feature (1)..(390): tr|A0A149TVW4|A0A149TVW4_9PROT Epoxyqueuosine reductase OS=Acetobacter senegalensis OX=446692 GN=queG PE=3 SV= 1
MEKLAARIRDKALALGFDAIGFSPAHLGPEVRTRLTDFLANGYQGEMGWLAERTDQRTHPQDLWPDAHSVIALGLSYAPEGDALATLRQRDRGNISVYARHRDYHDLVKGMLKHLAQFVVKEGRETLAAAQAQAQAQAQAQAQAQAQAQAQAQAQAQAQAQAHPLSETPQVKVFVDTAPVSEKPLAEQAGLGWQGKHTNLVSRTHGSWLFLGEIYTTLALPASPPSGGSCGSCTRCLTACPTQAFPEPYKMDARRCISYLTIEHSGPIPHALRPAIGTHIYGCDDCLAVCPWNRFAQTSRQIKLQPRPDLIAPELATLSQLDDASFRQMFSGSPIKRIGRNRFVRNVLIAIGNSGEPSLLPHAEKLLTDTDPAVAEAAQWATLRLKENGS

SEQ ID NO: 73945 - protein, 356 aa, Acetobacter sp.
  misc_feature (1)..(356): tr|A0A5B9GFP5|A0A5B9GFP5_9PROT Epoxyqueuosine reductase OS=Acetobacter sp. B6 OX=2500548 GN=queG PE=3 SV=1
MTAPAAKLAEKIRIKALELGFDAIGFCPAHLRPEVRARLKDFLAEGYHGEMGWLADRTEQRSQPTALWPEARSVIALGLNYAPAENPLNTLQNRTCGNISVYARHRDYHDVVKGMLKHLAQFVVREARMVLDTPPDVKVFVDTAPVAEKPLAAQAGLGWQGKHTNLVSRQHGSWLFLGEIYTTLELPTSADSGGSCGSCTRCLNACPTQAFPAPYQMDARKCISYLTIEHAGPIPAPLRKAIGTHIYGCDDCLAVCPWNRFAQASRHIKLQPRPDLIAPELATLSQLDDAAFRTMFSGSPIKRIGRNRFIRNVLIAIGNSGHPALLPYAQSLQQDPDSVVAEAANWATQCLMGEAT

SEQ ID NO: 73946 - protein, 359 aa, Acetobacter sp.
  misc_feature (1)..(359): tr|A0A5C1YRG5|A0A5C1YRG5_9PROT Epoxyqueuosine reductase OS=Acetobacter sp. KACC 21233 OX=2592655 GN=queG PE=3 SV=1
MTGQPPDNTRLAARIRDKAFALGFDAIGFCPAALGPEVGQRLRDFLDNGYHGEMGWLADRVEQRSQPTGLWPQARSIIALGVSYAPQGDPLATLQRPDCGNISVYARNRDYHDLVKGMLKHLAQFVVQAGRQQAGQTHDVKVFVDTAPVAEKPLAAQAGLGWQGKHTNLVSRQQGSWLFLGEIYTTLDLPPSPPSGGGCGSCTRCLQACPTDAFPSPYKLDARRCVAYLTIEHAGPIPEPLRPLIGTRIYGCDDCLAVCPWNRFARASTHTKLHPREELIAPQLAMLSQLDDAAFRTFFSGSPIKRIGRNRFMRNVLIAIGNSGLPELRPHAAALLTDPDPIVAEAAHWALHRLGELLE

SEQ ID NO: 73947 - protein, 366 aa, Acetobacter syzygii
  misc_feature (1)..(366): tr|A0A270BYW9|A0A270BYW9_9PROT Epoxyqueuosine reductase OS=Acetobacter syzygii OX=146476 GN=queG PE=3 SV=1
MTTDTPPPRHADPSPAASRLAARIRDKALELGFDAIGFCPATLGPEARTRLQDFLANGYHGEMSWLAERMEQRSQPTALWPEARTVIALGTSYAPEGNALATLQKPECGNISVYARHRDYHDVIKGMLKHLAQFVVREGKQATPTSPEVKVFVDTAPVAEKPLAAQAGLGWQGKHTNLVSRRHGSWLFLGEIYTTLALPASPPSGGGCGSCSRCLTACPTQAFPAPYQMDARRCISYLTIEHAGPIPTELRPLIGTHIYGCDDCLAVCPWNRFARTARHIKLQPRADLIAPDLATLSQLDDAAFRTLFSGSPIKRIGRNRFIRNVLIAIGNSRTPSLLPHARALCTDPDAIVRDAAHWSVAQLESI

SEQ ID NO: 73948 - protein, 379 aa, Acetobacter tropicalis
  misc_feature (1)..(379): tr|A0A094YFJ1|A0A094YFJ1_9PROT Epoxyqueuosine reductase OS=Acetobacter tropicalis OX=104102 GN=queG PE=3 SV=1
MAPLLPDPHTSSSQPSAHMEKLATRIRDKALALGFDAIGFCPAHLGPEVRDRLTDFLANGYQGEMDWLAERTEQRTHPQDLWREARSVIALGVSYAPEDDALATLRQPDRGNISVYARHRDYHDLIKGMLKHLAQFVVKEGRTALEVPTQAHPALETPQVKVFVDTAPVSEKPLAEKAGLGWQGKHTNLVSRAHGSWLFLGEIYTTLELPPSAPSGGSCGSCTRCLTACPTQAFPEPYKMDARRCISYLTIEHSGPIPHALRPAIGTHIYGCDDCLAVCPWNRFAQTSRQIKLHPRADLIAPELTTLSQLDDTAFRQMFSGSPIKRIGRNRFVRNVLIAIGNSRTPSLLPHAENLLTDPDPVVTDAAQWATLRLKEHQP

SEQ ID NO: 73949 - protein, 206 aa, Acetobacter tropicalis
  misc_feature (1)..(206): tr|F7VCR7|F7VCR7_9PROT Iron-sulfur cluster-binding prot ein OS=Acetobacter tropicalis NBRC 101654 OX=749388 GN= ATPR_1166 PE=4 SV=1
MAEQAGLGWQGKHTNLVSRTHGSWLFLGEIYTTLALPASPPSGGSCGSCTRCLTACPTQAFPEPYKMDARRCISYLTIEHSGPIPHALRPAIGTHIYGCDDCLAVCPWNRFAQTSRQIKLQPRPDLIAPELATLSQLDDASFRQMFSGSPIKRIGRNRFVRNVLIAIGNSGEPSLLPRAEKLLTDTDPVVAEAAQWATLRLKENGS

SEQ ID NO: 73950 - protein, 359 aa, Acetobacteraceae bacterium
  misc_feature (1)..(359): tr|A0A354UZV0|A0A354UZV0_9PROT Epoxyqueuosine reductase OS=Acetobacteraceae bacterium OX=1909293 GN=queG PE=3 SV=1
MGEDRRQAVKSASSPDPRAQIRDAALRLGFDAVGFARAHLGPEVRDRLSDFVQAGYHGDMGWLAERSEQRSHPQSLWPEAASVIALAMSYAPADDPLALTSQQDKGAISVYARNRDYHDLIKGKLKHLGQFLVSRFACDVKVFVDTAPVMEKPLAQQSGLGWQGKHTNLVSKSHGSWLLLGEIYTTLEIQPDAPGQDRCGTCSRCLTACPTQAFVGPYRLDATRCISYLTIEHKGPIPHDLRKAIGNRIYGCDDCLAVCPWNKFATPTSHEHLTGRDALKAPLLRDLAALDDAQFRTMFSGSPIKRIGRNRFIRNVLTAIGNSADPTLLPSAEALQNDPDPIVAEAAEWASTQLRHPSS

SEQ ID NO: 73951 - protein, 377 aa, Acetobacteraceae bacterium
  misc_feature (1)..(377): tr|A0A1E4LMC4|A0A1E4LMC4_9PROT Epoxyqueuosine reductase OS=Acetobacteraceae bacterium SCN 69-10 OX=1660159 GN= queG PE=3 SV=1
MPQSSAALVAELKARAKALGFDAFGIASPAARPDLRDKLGEALKRGWHGDMAWMAETAERRADPLALWDGTRSVIMLGVNYGPDRDPLEVLKQRDRGSISVYARNRDYHDIIKGRLKELAGLLARRSGAEVKVFVDTAPVMEKPLAEAAGLGWQGKHTVLVSREFGSWLFLGAIFTAAELPVDAPHEESCGSCRRCLDICPTNAFPAPFQLDARRCLAYLTVEHKGPIPREFRVAMGNRIYGCDDCLAVCPWNKFASASREAKLMARDEFNAPTLADLVLLDDAGFRALFAGSPIKRIGHARFLRNVLIAIGNSGDAALVPLAAARLGDAEPLIRGAAVWAVRRLAPVDEARRLALDFLPREDDTTVRNEWTAELSA

SEQ ID NO: 73952 - protein, 310 aa, Acetobacterium sp.
  misc_feature (1)..(310): tr|A0A2Z4I3J3|A0A2Z4I3J3_9FIRM tRNA epoxyqueuosine(34) reductase QueG OS=Acetobacterium sp. KB-1 OX=2184575 GN =queG PE=4 SV=1
MTEEKIRCLAKQLEIDLVGFFAVEPLTECLPHLLKRHQAGLSTGFEGGVPIERIDYRSAYPFAKAGIVIGVNNYQTFEGIVDGQLRGHFASVSWGEDYHRVLRRKMNELMQAINDERQNSGELPMNYQVFVDNSPLVDRGSAYRAGLGFFGKNNCLINHHFGSFFFIGQILVDTYITFTKPQLVENGCGTCRRCLDVCPNQALGEGFSLDPSRCISYLTQKKSLTPDEENRISTYLYGCDLCQQVCPYNQDLKKTREKAFWIEAETASPPLSEILMLTNRDYKIRYGKTASGWRGKKNLMRNAQLILKKA

SEQ ID NO: 73953 - protein, 314 aa, Acetobacterium sp.
  misc_feature (1)..(314): tr|A0A231NSY0|A0A231NSY0_9FIRM tRNA epoxyqueuosine(34) reductase QueG OS=Acetobacterium sp. MES1 OX=1899015 GN =BI182_10310 PE=4 SV=1
MTEKIIRVLAEQAGIDLIGFFSVEPLKECLPYLIRRHQEGFSTGFEGGEPEDRINYLKAYPDAKTGIVIGINNYQAFEEVADEKYRVQLASVSWGEDYHRVLKRRMTQLMERMNDIQRQTGGAQIEYRLFVDNSPLVDRGSAYRAGLGFYGKNNCLINDQLGSFFFIGQILIDSVIVFEPPLLLENGCGTCRRCLDACPHQALGEGFSLEPTKCISYLTQKKFLSTDEEVRLKTYLYGCDLCQKVCPHNQDLEETQEEAFLIDAKTASPPLDEILALTNKEFKIRFGKTACGWRGKKNLIRNAQLIKKNKKIYD

SEQ ID NO: 73954 - protein, 266 aa, Acetobacterium wieringae
  misc_feature (1)..(266): tr|A0A1F2PEQ2|A0A1F2PEQ2_9FIRM Epoxyqueuosine reductase OS=Acetobacterium wieringae OX=52694 GN=queG_6 PE=4 SV =1
MMNKKFVALITDYVKNYQEKKQTRTTWREPVIGVAAAADPLFPRLKEIIGPNHALPGELLPGARAVLVFFLPFSKSVVASNIAGEESSQEWDYACIETNQLINDLNRFLHDTIVSMGYHASLLPSTYNYDGEKLISDWSHRSVAYIAGIGKFGLHNMLITERGCCGRLGSVITDLELTSTLRTAEELCLYKINGSCQKCLKKCVNQAFTLAEGKVAFDRYRCNEQIYDKIVPEYPIGSGDACGKCMCGVPCSLGIPGKAKKSKSDS

SEQ ID NO: 73955 - protein, 228 aa, Acetobacterium wieringae
  misc_feature (1)..(228): tr|A0A1F2PKC0|A0A1F2PKC0_9FIRM Epoxyqueuosine reductase OS=Acetobacterium wieringae OX=52694 GN=queG_3 PE=4 SV =1
MKEAIRKKVLDLGADVCGFAGIERFIEAPAGFHPHDLYRDCQVVVVMGFALPKGLYEVKPDLLYGYFNNLTIPKIDQILMMAARIIEDTYNATAVPVPCDWPYDYWNSEEMEGRGLISMKHAAVNAGLGTMGKNTMLLNEAFGNRLTVGAILSDLKITSDSYAEPLCLEGCTRCLTSCPAQALNEGTVTQKLCRRNTYGTNAKGFETVLCNTCRSVCPVRFGKTTVIG

SEQ ID NO: 73956 - protein, 314 aa, Acetobacterium woodii
  misc_feature (1)..(314): tr|H6LC11|H6LC11_ACEWD Uncharacterized protein OS=Aceto bacterium woodii (strain ATCC 29683 / DSM 1030 / JCM 23 81 / KCTC 1655 / WB1) OX=931626 GN=Awo_c21850 PE=4 SV=1
MTEEQIRALAKKIDIDLIGFFSVEPLMECLPYLCKRENKGFSTGFEGAPAVERINFYKQFPLAKTGIVIGINNFQTFKKLDDDQERGHIASVSWGEDYHKVLKRRMNELMTAVNLELEKNGEACSEYKIFVDNSPLVDRGSAYRAGLGFFGKNNCLINAQFGSYFFIGQILWGYEVSISDVAPVENGCHDCRRCLDACPGQALGDGYELNPSKCISFLTQKKNLSPLEEGYVKKYLYGCDICQQVCPYNQNLQKTNEKSFWIEAEVASPKLIDVLELTNNSYKKAYHETASGWRGKKVFLRNAELVLKNKKKND

SEQ ID NO: 73957 - protein, 316 aa, Acetobacteroides hydrogenigenes
  misc_feature (1)..(316): tr|A0A4R2E712|A0A4R2E712_9BACT Epoxyqueuosine reductase OS=Acetobacteroides hydrogenigenes OX=979970 GN=queG P E=3 SV=1
MDALAQTSLSQTIRTLAASLGFDAVGFVRATRLDGEATHLRAWLDAGHHAGMAWMEGHFDKRVDPTLLVEGAKSVVVVLLSYKPAEVQPADAPQFAKYAYGDDYHEVIKAKLWELLAQIKEIEPEADGRPFVDSAPVLERAWAERAGLGWIGKNSLLLNRQLGSLTFIGTLMLNLELDYGTPVRPSCGTCTRCIDACPTGAIVAPKVVDARRCISYQTIENRGEIPADIQRLVGNRVFGCDACLDACPWNAKVIPNNHPELAPRKAILTYTAAQWQAVDEAQFAAIFRRSAVKRAKLSGFRRNLEVVVGNEEGNDS

SEQ ID NO: 73958 - protein, 372 aa, Acetohalobium arabaticum
  misc_feature (1)..(372): tr|D9QSE4|D9QSE4_ACEAZ Iron-sulfur cluster binding prot ein OS=Acetohalobium arabaticum (strain ATCC 49924 / DS M 5501 / Z-7288) OX=574087 GN=Acear_1904 PE=4 SV=1
MNLTTKIKEQGKKIGLDEVKITAAEPFPAVKDFLFKMKEEDKLSKFVKGDLDLITDPKQVLSTARSIIVTAISYQVDINQKPNLKEELRGKLSRFTWGEDYHNVLGKKLDQLIDFLNQQVPAVKTKKFVDTGPTVDRALARRAGIGWQGKNCSIIHPEYGSWIFIGGIITDLELKLDLPLENKCGDCQKCIEACPTGALEEPYLLNSSKCLGYVTLSRGYLKEEERQTMGTRLWGCDTCQEVCPYNQEAESGNHSEFQPQTIEVYPQLPDLLTLTDREYQEKFGPTAMNWRGKRPIQRNAAVIMGNLKNPKAIPYLIEGLKDSKPIVRAHSAWALGEIGVANVVADLEQALQIEQTKQVTEELRSAIQKLSS

SEQ ID NO: 73959 - protein, 319 aa, Acholeplasma brassicae
  misc_feature (1)..(319): tr|U4KNW3|U4KNW3_9MOLU Iron-sulfur cluster-binding prot ein OS=Acholeplasma brassicae OX=61635 GN=BN85309790 PE =4 SV=1
MKKRLQEAFSQSFDLVGFVNTSTYNQAVKNPVRWVLEPFNTMVVVGLSYPSNRKFRHTKETLVPSIYTFGRDYHEELKERLTAVCESLGYSYQIGVDSHPIDERLAFKLSGLGFQGKNQLMINNDFGSYFFIGIALFEFELPTFNQLEDDGCGSCTICQDACPTGALNQENGYEMEKCISFFNQEKKELTETEIKKNHSLFGCDICQTVCPKNIDILRPTHSGFMLNGNEQVEIVDLFRMPTKAFKEKYHNAAYLWRGKLILMRNAVTLLYKTRNTRYNDLIKESLLQFKDVKWYVNTVSKLLEELERMKINEVKPRII

SEQ ID NO: 73960 - protein, 303 aa, Acholeplasma hippikon
  misc_feature (1)..(303): tr|A0A449BIZ6|A0A449BIZ6_9MOLU Epoxyqueuosine reductase OS=Acholeplasma hippikon OX=264636 GN=queG PE=4 SV=1
MVFERLSEAFDFVGTIDVDRYLKKKFDHNLVGFESVFVVGLAYPNKYLRHEKDRLTASMYTYGYDYHDVLKELMHESLKDIDDEFKFLVDNHTIDERKCLEMTGLAFRGKNNLMINKDFGSFFFIGLVLTKKKYPEVIIENTLSCGECTICIKSCPVKALTNGFDWDKCMSGYNQEKRSLTDEEIDKNQYLLGCDICQRVCPFNKGVNSERIEAFREKPTSYVIINDLFDLSNKAFLEKYGKHAYTWRGKTILLRNALTILLRQKNTKYNDKIKETINDDRYPTWYKDDAKKILSKLESLEIK

SEQ ID NO: 73961 - protein, 302 aa, Acholeplasma laidlawii
  misc_feature (1)..(302): tr|A0A553IGN9|A0A553IGN9_ACHLA Epoxyqueuosine reductase OS=Acholeplasma laidlawii OX=2148 GN=FNV44_06510 PE=4 SV=1
MVYEKLKEAFDFVGTIDADRYQSIKFDYNLVGYESIFVVGLGYPNTYLKHENDKLTASMYTYGYDYHDVMRSMMHEALKELNVDYKALVDNHTINERKCLEMTGLAFHGKNNLMIHKDLGSFFFIGLVLTKEKYPEVIEENKLSCGDCTICIKACPVGALDNGFDWPTCISGYNQEKRALTDYEISKNALLMGCDICQRVCPYNKGVNSTRVEAFREKPTSYVIIQDLFDLTNKEFMEKYGKHAYTWRGKTLLLRNALTILLRQKNVAYNDLIRQTIIDPKYPDWYKEDAQNILNKLEKFDI

SEQ ID NO: 73962 - protein, 302 aa, Acholeplasma laidlawii; identical to SEQ ID NO: 73961
  misc_feature (1)..(302): tr|A9NE24|A9NE24_ACHLI Uncharacterized protein OS=Achol eplasma laidlawii (strain PG-8A) OX=441768 GN=ACL_1393 PE=4 SV=1

SEQ ID NO: 73963 - protein, 307 aa, Acholeplasma oculi
  misc_feature (1)..(307): tr|A0A061AI18|A0A061AI18_9MOLU Epoxyqueuosine reductase QueG OS=Acholeplasma oculi OX=35623 GN=queG PE=4 SV=1
MVYEKLKEAFDMVGVIDANRYLSKRFDANLIGYESIFVVGLGYPNAYLKHERDRLTASMYTYGFDYHDVMKTLMHETLKGLDIEYKALVDNHTINERKCLEMTGLAFHGKNNLMIHKELGSYFFIGLVLTKEKFPEVIVENNDSCGTCTICIKACPVKALDNGFDWDTCISGYNQAKRSLTEEEIAKNALLMGCDICQRVCPYNKDVNSTKTEAFHAKPTAYVLIDDLFDLSQKEFMNKYGKHAYTWRGKTILLRNALTILLRQKNTNYNSKIEASIHDDKYPSWYKKDAQYILSKLEKFDINESSE

SEQ ID NO: 73964 - protein, 324 aa, Acholeplasma sp.
  misc_feature (1)..(324): tr|A0A3A6NL10|A0A3A6NL10_9MOLU DUF1730 domain-containin g protein OS=Acholeplasma sp. OX=33015 GN=C4537_02410 P E=4 SV=1
MHIKRLYELFQSSFDLVGIIHTKRYLNEIKAMGREVPHVDYPTMVVLGLAYPMRILKHSNTHLVSSFYTHGSDYHTVLKERIHHVMKEIPYPYELGVDNHPHNERLAASLAGLGFFGKNQLMINNKLGSYFFLGIVFIDMNLEQEMTLFVDDDCGDCQICIQNCPTHALDHGYDMNLCMSYYNQAKRVITDDEMHANYLLFGCDICQRVCPKNVKKGTIIHPEFELSGKEMVSIMDLFTLSEKQFRENYQGMSYLWKGKTVLMRNTLMLLLKHKNTGYIHEIEETLVKYHAPWYQDTAKRVLKALKDLDEKGLMVKLWAIYPIR

SEQ ID NO: 73965 - protein, 323 aa, Acholeplasmataceae bacterium
  misc_feature (1)..(323): tr|A0A359M9Q3|A0A359M9Q3_9MOLU Uncharacterized protein OS=Acholeplasmataceae bacterium OX=1898209 GN=DEG42_064 60 PE=4 SV=1
MWSFLSMNQLELYQAFQTQFDVVGVIRTKKYLEKAKSLGIIVPECNYQTMVVLGLAYPKRTIKHTKTHLVPSFYTFGQDYHTVLKDRIKDVMKDLPYPYELGVDNHPHDERLAATLAGIGYFGKNQLIINSEYGTYMFLGIVFIDIELLNEIVLDIHDDCGTCTKCIDACPVKALSEKGFEINLCMSHYNQAKRVLSDGEIDSNYALFGCDICQMVCPKNINKGIKTHPEFELSGKELVSVIDLFTDSDQVFKKKYEDMSYLWKGKTILMRNALTILLKKKNTLYNDLIEQSLHKYKMPWYQDTATRVLEKLKKIHESCSESK

SEQ ID NO: 73966 - protein, 311 aa, Acholeplasmataceae bacterium
  misc_feature (1)..(311): tr|A0A356GKM8|A0A356GKM8_9MOLU 4Fe-4S ferredoxin-type d omain-containing protein OS=Acholeplasmataceae bacteriu m OX=1898209 GN=DEA30_10065 PE=4 SV=1
MDAQKLYDLFKSKFDAVGIIETKTYQEEAKKMNKIIPEVNYPTMVVLGLAYPKRMIKHTDTHVVPSFYTFGKDYHLILKARMEEVVKDLNCGYTLGVDNHPHDERLAAVLAGLGFYGKNQLIINPDYGTYMFLGIVFLDLKIDHQIILEIHDDCGTCRKCIDACPTHALDDGYDVEKCMSHFNQSKRNLLDDEIQANYSLFGCDICQMVCPKNINKGLKTHPEFMLSGKEAVSILDLFQDSEKAFKEKYKDMAYLWKGKTILMRNAVCLLYKHQNYAYNELIEASLKKLTTPWYVDTVSRLLKRMKNANQA

SEQ ID NO: 73967 - protein, 356 aa, Achromatium sp.
  misc_feature (1)..(356): tr|A0A0M1JEP8|A0A0M1JEP8_9GAMM Epoxyqueuosine reductase OS=Achromatium sp. WMS2 OX=1604835 GN=queG PE=3 SV=1
MDYSELIGKINAWARDLGLQQVGISSVDQVQAQLVEERLRAWLQRGWHGDMDFMARHGQMRTRPDELLPGTLRIISVRLDYLPMSSFELLAKLANPEVGYIACYAMGRDYHRLMRRRLEQLAQLIVTEVGPFAYRAYVDSAPVMEKPLAEQAGLGWIGKHTNLVNCKAGSWFFLGELYVNLPLPSSEPAVGHCGRCQACIKSCPTGAIVAPYKLDARRCIAYLTIEAPGCIPELLRPLIGNRIFGCDDCQLVCPWNHFAQITQEPDFLPRKYLQSPQLVDLFAWSESEFLRKMEGSSIRRLGWQRWLRNIAVALGNAPANASIVAALRTRADHPSELVREHVHWALEQQTVARRYD

SEQ ID NO: 73968 - protein, 355 aa, Achromatium sp.
  misc_feature (1)..(355): tr|A0A0M1JK33|A0A0M1JK33_9GAMM Epoxyqueuosine reductase OS=Achromatium sp. WMS3 OX=1604836 GN=queG PE=3 SV=1
MPKNKTFIDSYDIIQQIQNIATNLGLQQIGITDIELQNAAIQLTEWLEHGWHGQMQFMARHYQMRSHPAELLPGTKSIISAQLNYLSLPILTQTTKLTNPNTAYIANYALGRDYHRLFRKRLQQLAKQIINLTGPFKYRVYVDSAPVMEKPLAAKAGLGWIGKHTNLVNRNTGSWFFLGEIYTDLSLPTTMPASNHCGSCQTCIAACPTGAIIAPYKLDARRCIAYLTIEEPGVIPITLRSYIGNRIFGCDDCQHVCPWNRFAAFTTEPDFKPRSALHPAKLIDLFAWSEAEFLKYTEGSAIRRLGWIRWLRNIAIALGNAPPTPEIIAALQRRLIHPNALVQHHVEWALAQHIR

SEQ ID NO: 73969 - protein, 379 aa, Achromobacter sp.
  misc_feature (1)..(379): tr|A0A0M7MYS6|A0A0M7MYS6_9BURK Epoxyqueuosine reductase OS=Achromobacter sp. ATCC35328 OX=1806490 GN=queG PE=3 SV=1
MSEPLDLNQLAQKIKQWGLELGFQQVGITDTDLSESEPKLQAWLDKQYHGEMDWMARHGMLRARPHELLPGTLRVISVRMNYLPANAAFASTLKNPKLGYVSRYALGRDYHKLLRNRLKKLGEMIQQHCVSLNFRPFVDSAPILERPLAEKAGLGWTGKHSLILNREAGSFFFLGELLVDIPLPVDQPVEEGCGKCVACMTICPTGAIVEPYTVDARRCISYLTIELEGAIPEELRPLMGNRIYGCDDCQLICPWNRYSQLTTEEDFSPRKPLHAPELIELFAWNEEKFLKVTEGSAIRRIGHLRWLRNIAVALGNAPWDETILTALESRKGEHPLLDEHIAWAIAQQIERRNACIVEVQLPKKQRLVRVIEKGLPRDA

SEQ ID NO: 73970 - protein, 255 aa, Acidaminobacter hydrogenoformans
  misc_feature (1)..(255): tr|A0A1G5RZF0|A0A1G5RZF0_9FIRM Epoxyqueuosine reductase QueG (Queuosine biosynthesis) OS=Acidaminobacter hydro genoformans DSM 2784 OX=1120920 GN=SAMN03080599_01793 P E=4 SV=1
MRANDILENSIEQKIIDSLNELNRPDLFRSPVVAFSSAEDERYSKLKEIIGDWHLNPTELLPDAKSVISYFVPFTKEVAMEPNTVEHGSFLWSEAYQEINRHFDKMNQAVADYLTMLGYSTKTIQATHTYDPKDLKSMWSHRSAAAIAGLGAFGLNRLLITEKGSAGRFCTVITSAPLQANSKPLDNKCLYVKNGSCSLCLKICPVQALETESFKKFDCQDELNKNESLMTASTPLEIADTCGKCISVCPVAYIE

SEQ ID NO: 73971 - protein, 338 aa, Acidaminobacter hydrogenoformans
  misc_feature (1)..(338): tr|A0A1G5S517|A0A1G5S517_9FIRM Epoxyqueuosine reductase OS=Acidaminobacter hydrogenoformans DSM 2784 OX=112092 0 GN=SAMN03080599_02693 PE=4 SV=1
MISFQRLKAAAQTLGIPIIGTLEAMDMPVPERSLASKLKKGAISGFEPPLELVGKPEKVMPGVKSIIVIGLPYELFPGPAADPLAVCEVSAMAWGYDYHDRVKEKLAGLASWLRDHDSGETMVFCDTGPLNDRYLAFLAGLGTYGRNQLLIHERWGSAVVYGYLLTKATLESTGRLDAAPYSECGSCRLCQEACPSGALQGDYEFATTRCISNLTQQKRALTEKEMDWMGTSLYGCDICQRVCPKNKKREESRLLKSATPNRLNPFELFSLNKRGFQERFHHHGFAWRGLKTLQRNALINLYNSGNVQLLATLAVWEREGKMPAQLCELSRILETEKL

SEQ ID NO: 73972 - protein, 297 aa, Acidaminococcus fermentans
  misc_feature (1)..(297): tr|A0A1I5GY10|A0A1I5GY10_ACIFE Epoxyqueuosine reductase QueG (Queuosine biosynthesis) OS=Acidaminococcus ferme ntans OX=905 GN=SAMN02910455_00295 PE=4 SV=1
MDKQELKAFCRQLGLTEVGVAPSRLPVPDPLPEICPLAAGKGLERYDLTRLLPGCQGAVVVLFPYWQPPVSGSNLSLYCQLPDYHPVVRKYLEQIAGWMAARNPDSGQLAIVDTSPLAERDLAVQAGVGFLGDNGCLINPTYGSWCFIGAVLTTWPLEPDRPLERSCCHCGACARNCPGRCFREGTYGYRTCKSYLTQKKGELTEEEQAILRKTPLIFGCDHCQLICPHNRQVPETPLAEFRRDRLPRIAGQDLENLTNRQFRERYGSYAFSWRGKKILLRNLDLVEQNDKSGQESR

SEQ ID NO: 73973 - protein, 297 aa, Acidaminococcus fermentans; identical to SEQ ID NO: 73972
  misc_feature (1)..(297): tr|D2RM12|D2RM12_ACIFV 4Fe-4S ferredoxin-type domain-co ntaining protein OS=Acidaminococcus fermentans (strain ATCC 25085 / DSM 20731 / VR4) OX=591001 GN=Acfer_1758 P E=4 SV=1

SEQ ID NO: 73974 - protein, 319 aa, Acidaminococcus sp.
  misc_feature (1)..(319): tr|A0A415EJP5|A0A415EJP5_9FIRM Epoxyqueuosine reductase OS=Acidaminococcus sp. AM05-11 OX=2291997 GN=DW089_058 55 PE=4 SV=1
MEKNITGAAIHAAALEYGYDNCGVIPLSALEGYGERLREREAKIPESKAVYQGLSGFTRLQEDYPWAKSVLVCTNWLGKYRFPKELQGKYAKSFLLSADSLPDSPQRQQKLAFEAWLTEQGVRFLGGETHLPARILPLRYAAVAAGLGIFRKNNFFYGEKGSYYELEGYLLDVSCEYRESHNLRPCADTCKACQNACKTHALCGPYTMNPLSCVSFWTTFGGGQVPPHLTAEQFGSWICGCDACQDACPYNCRQDWQQGEPVPEVEAAKELLLPENLLQASPEALVEQVVPLMADHIRPEETGTLRTCAARCLENEARA

SEQ ID NO: 73975 - protein, 184 aa, Acidaminococcus sp.
  misc_feature (1)..(184): tr|R7LXY5|R7LXY5_9FIRM Uncharacterized protein OS=Acida minococcus sp. CAG:542 OX=1262687 GN=BN701_01074 PE=4 S V=1
MDTSPLAERDLAVQAGLGFLGDNDCLINDTWGSWCFIGAVLTTQPLEPDRPLERSCRHCGACARVCPGQCFQGGTYTYRTCKSYLTQKKGELTESEQAVLRKTPLIFGCDECQRVCPHNQQVPETPLAEFRRDRLLRLDRQDLANLTNRQFRERYGSYAFAWRGKKLLLRNLELVEQKEQQESQ

SEQ ID NO: 73976 - protein, 348 aa, Acidibacillus ferrooxidans
  misc_feature (1)..(348): tr|A0A162USV0|A0A162USV0_9BACL 4Fe-4S ferredoxin-type d omain-containing protein (Fragment) OS=Acidibacillus fe rrooxidans OX=1765683 GN=AYJ22_04750 PE=4 SV=1
MDHYDVTKEQLDLAAAALGLDLVGVVSARRLDELEPVLRRYYDEQRDSGFEHPFSELRLDPRALMPAVQTAIAIALPYHTASESLRHPTGRRHGAVSVYAQRTDYHRVLKDVLSRFSALLETCAARPAQFLPCVDTSPLVDRAYATAAGLGAIGKSGMLITKTYGTYVFLGVLLTDLRVEGADALHGALPWGTEVCGTCDLCLTACPTGALIAPYTLDAKRCLSYITQEHGIVPPEFRASLGRRVWGCDTCQTVCPRNEDRAAPSTFGPPVTPLAYPDLLEILTLSNRALMKRIGHTAAAWRGPAIWRRNAIVALGNARSVEAIPVLVTYLAHARPELRAMSAWALAQ

SEQ ID NO: 73977 - protein, 379 aa, Acidibacillus ferrooxidans
  misc_feature (1)..(379): tr|A0A101XT76|A0A101XT76_9BACL 4Fe-4S ferredoxin-type d omain-containing protein OS=Acidibacillus ferrooxidans OX=1765683 GN=ATW55_12555 PE=4 SV=1
MKGYDITRDQLDEIAAMLGLEHIGVVSARRLDELEPVLRRYYDEQRDSGFEHPFSESRLDPHALMPGVQSVLAIALPYHIASESLRHPTGRRHGSVSAYARHTDYHRVLKDVLLRLSAQLEACAAQPAQFLPCIDTSPLVDRAYAAAAGLGAIGKSGMLITKTHGTYVFLGVLLTDLRVEGAEGMRTALPGETDICGACDLCLTACPTGALLAPYTLDAKRCLSYVTQEHGIVPPEFRAPLGRRVWGCDTCQTVCPRNDDRVVPTAFGPPVAPLDFPDLLEILTLSNRALMKRIGHTAAAWRGPAIWRRNAIVALGNARNVEAVPVLITYLAHARPELRAMSAWALAKIDSESNRAAVRQAYEVETDEKARCEMAWALS

SEQ ID NO: 73978 - protein, 378 aa, Acidibacillus sulfuroxidans
  misc_feature (1)..(378): tr|A0A2U3D9Z8|A0A2U3D9Z8_9BACL tRNA epoxyqueuosine(34) reductase QueG OS=Acidibacillus sulfuroxidans OX=176568 4 GN=BM613_05370 PE=4 SV=1
MVYEISFASLRQIAYTSGVDVVGVTTADEFPDLAEKLYRYYREGRATGFEHPYSRLRIDPTALLPEAKSIVAIAVPYLTKATRALRRPKGLRGRVSFYAWGRDYHRVLTEQLQVIADALSRQVGREIAYQIAVDTSPLVDRAVAERAGIGWIGKNGMLITKEYGSFVFLGCLLTDILIEPNVSVDELDSCGDCNLCILACPTGALVEPYILDGQRCLSYLTQSKGIIPVQYRKSMGGQLWGCDICQNVCPKNKVSLLGQLEAFTPQADLSYPVLLHILKLSRRAFLREFGHTAAAWRGYYVWRRNAILALGNLRAKEAVPDLLPFLSDVRPEIRAVTAWALQQIDAGGTQPFVALAYAQEQDPLVKQDMEWANVPDVE

SEQ ID NO: 73979 - protein, 364 aa, Acidiferrobacter sp.
  misc_feature (1)..(364): tr|A0A2E8QP30|A0A2E8QP30_9GAMM Epoxyqueuosine reductase OS=Acidiferrobacter sp. OX=1872107 GN=queG PE=3 SV=1
  misc_feature (88)..(88): Xaa can be any naturally occurring amino acid
  misc_feature (168)..(168): Xaa can be any naturally occurring amino acid
  misc_feature (170)..(170): Xaa can be any naturally occurring amino acid
  misc_feature (189)..(189): Xaa can be any naturally occurring amino acid
  misc_feature (196)..(196): Xaa can be any naturally occurring amino acid
  misc_feature (242)..(242): Xaa can be any naturally occurring amino acid
  misc_feature (256)..(256): Xaa can be any naturally occurring amino acid
  misc_feature (269)..(269): Xaa can be any naturally occurring amino acid
  misc_feature (285)..(285): Xaa can be any naturally occurring amino acid
  misc_feature (292)..(292): Xaa can be any naturally occurring amino acid
  misc_feature (294)..(294): Xaa can be any naturally occurring amino acid
  misc_feature (296)..(296): Xaa can be any naturally occurring amino acid
  misc_feature (356)..(356): Xaa can be any naturally occurring amino acid
MKTLSDPALQQLSRDIRQWALDLGFDAVGISTGELSEAAAALQRWLKKGWQGEMDFMSAHVQERTQPDLLVPNTIRIISVRLGYWHDXDNSAHATLRDPEKAYIARYALGRDYHRPMRRRLQKLADQITEAIGPFSYRAFTDSAPVMEKPLGQAAGLGWIGKHTNLIXPXTGSWFFLGELYTDLPLPVXPPHTDHXGTCSRCSAVCPTGALDTPYELDARRCIAYLTIEHKTAIPESLRGLXGNRVFGCDDCQLVXPHNGSPGKGDALXAPRHGLDNPDLVEIFXWSLEQFXKXTXGSPLRRLGYERWMRNLAVALGNGRPSETATRALRSRLGEISDMVDEHILWALERLDARGXPAIGVQEY

SEQ ID NO: 73980 - protein, 364 aa, Acidiferrobacter sp.
  misc_feature (1)..(364): tr|A0A2D7VII5|A0A2D7VII5_9GAMM Epoxyqueuosine reductase OS=Acidiferrobacter sp. OX=1872107 GN=queG PE=3 SV=1
MKTLSDPALQQLSRDIRQWALDLGFDAVGISTGELSEAAAALQRWLKKGWQGEMDFMSAHVQERTQPDLLVPNTIRIISVRLGYWHDSDDSAHETLGDPEKAYIARYALGRDYHRPMRRRLQKLADQITEAIGPFSYRAFTDSAPVMEKPLGQAAGLGWIGKHTNLIDPQTGSWFFLGELYTDLPLPVDPPHTDHCGTCSRCSAVCPTGALDTPYELDARRCIAYLTIEHKTAIPESLRGLMGNRVFGCDDCQLVCPHNGSPGKGDALFAPRHGLDNPDLVEIFSWSLEQFEKYTNGSPLRRLGYERWMRNLAVALGNGRPSETATRALRSRLGEISDMVDEHILWALERLDARGIPAIGVQEY

SEQ ID NO: 73981 - protein, 364 aa, Acidiferrobacteraceae bacterium
  misc_feature (1)..(364): tr|A0A2E1WIK6|A0A2E1WIK6_9GAMM Epoxyqueuosine reductase OS=Acidiferrobacteraceae bacterium OX=2024893 GN=queG PE=3 SV=1
  misc_feature (356)..(356): Xaa can be any naturally occurring amino acid
MKTLSDPALQQLGRDIRQWALDLGFDAVGISTGELSEAAAALQSWLKKGWQGEMDFMSAHVQERAQPDLLVPNTIRIISVRLGYWHDSDDSAHETLRNPEKAYIARYALGRDYHRPMRRRLQKLADQITEAIGPFSYRAFTDSAPVMEKPLGQAAGLGWIGKHTNLIEPKTGSWFFLGELYTDLPLPVDPPHTDHCGTCSRCSAVCPTGALDTPYELDARRCIAYLTIEHKTAIPESLRGLIGNRVFGCDDCQLVCPHNGSPSKGDALFAPRHGLDNPDLVEIFSWSLEQFEKYTSGSPLRRLGYERWMRNLAVALGNGRPSETATRALRSRLGEISDMVDEHILWALERLDARGXPAIGVQEY

SEQ ID NO: 73982 - protein, 348 aa, Acidiferrobacteraceae bacterium
  misc_feature (1)..(348): tr|A0A2E9IE24|A0A2E9IE24_9GAMM Epoxyqueuosine reductase OS=Acidiferrobacteraceae bacterium OX=2024893 GN=queG PE=3 SV=1
MKDPDDLPLKIKHWGRALGFQSIGFSNTALGKAENELNGWLSQGFHGEMDYMEKHGIRRSRPAELIPGTKSVIICRMNYLSTTTGVAQKSLSNPEQGYIARYALGRDYHKTVKKRLAKLSSRIEAEVGECGHRVFSDSAPVLEKSLAEKAGLGWVGKHTNLLSKECSSWFFLGEIYTTLPLPPDQPVQPHCGDCSRCLEACPTTAIVAPYQLDARRCIAYLTIELHGSIPIEYRSSIGNRIYGCDDCQLVCPWNRFAQTSDEPDFLPRHQLDHSTLVELFSWSEELFLKRTEGSVFRRLGHIRWLRNIAVALGNAPPSDQIFNALKSRSQHPSEIVREHALWALDQHL

SEQ ID NO: 73983 - protein, 345 aa, Acidihalobacter ferrooxidans
  misc_feature (1)..(345): tr|A0A1P8UL17|A0A1P8UL17_9GAMM Epoxyqueuosine reductase OS=Acidihalobacter ferrooxidans OX=1765967 GN=queG PE= 3 SV=1
MTRLAARIKHWARELGFGACGITDTDLSEAHAHLHAWLAAGRHGEMDYMARHGSKRSHPAELVPGTLRVICVRMDYLPPAGAEADTVLNVPTAAYISRYALGRDYHKVMRKRLQRLAERIEAQVGPFGYRAFVDSAPVLEKPLAQKAGLGWIGKHTNLLARDAGSWFFLGELYTDLPLPVDAAGDAHCGHCQACLDICPTQAIVAPYQLDARRCISYLTIELHGAIPEPLRPLLGNRIYGCDDCQLVCPWNRFARPAAEPDFAPRDGLDAPRLIELFAWDEAEFLARTEGSAIRRIGHARWLRNIAVALGNAPRSPAVIAALRARTDHPDALVREHVAWALAQHG

SEQ ID NO: 73984 - protein, 366 aa, Acidihalobacter prosperus
  misc_feature (1)..(366): tr|A0A1D8K6F7|A0A1D8K6F7_9GAMM Epoxyqueuosine reductase OS=Acidihalobacter prosperus OX=160660 GN=queG PE=3 SV =1
MDSTTPDLARLAAEIKLWGRELGFGAVGIADIDLSDAEVRLLEWLARGFHGDMDYMARHGRKRSRPDELVPGTIRVISVRMDYLPPDSADPETVLNVPTAGYVSRYALGRDYHKVLRRRLQQLAERIQARIGPFGYRAFTDSAPVLEKPLAQKAGIGWVGKHTNLLAREAGSWFFLGELYTDLPLPTDWPVASHCGTCRACIDVCPTQAIVAPYRLDARRCISYLTIELKGAIPEDLRPLIGNRIYGCDDCQLVCPWNRYAQASAEADFAVRHDLDAPRLIELFAWSEAEFLARTEGSAIRRIGHERWLRNIAVALGNAPRSAGIAEALRRRADHPSAMVREHVAWALMNHDSTAKTGFMTIHRWV

SEQ ID NO: 73985 - protein, 360 aa, Acidihalobacter prosperus
  misc_feature (1)..(360): tr|A0A1A6C2K3|A0A1A6C2K3_9GAMM Epoxyqueuosine reductase OS=Acidihalobacter prosperus OX=160660 GN=queG PE=3 SV =1
MNAALPDPAALATRIKAWGRTLGFGAVGIAGIELERAEAHLLDWLARGFHGDMDYMARHGRKRSRPAELVPGTVRVISVRMDYLPPAGADPETVLNVPTAAYISRYALGRDYHKVMRRRLQRLADRIEAEIGAFGYRAFVDSAPVLEKPLAQQAGLGWIGKHTNLLAREAGSWFFLGELYTDLPLPVDGPVAAHCGSCSACIDICPTQAIVAPYRLDARRCISYLTIELKGSIPEPLRPLIGNRIYGCDDCQLVCPWNRFAHPAEAPDFAPRHGLDAVRLVELFAWSEADFLARTEGSAIRRIGHVRWLRNIAVALGNAPGSTAIVAALQARTDHASALVREHVHWALERHAKHAATGCT

SEQ ID NO: 73986 - protein, 295 aa, Acidimicrobiaceae bacterium
  misc_feature (1)..(295): tr|A0A351LZT7|A0A351LZT7_9ACTN tRNA epoxyqueuosine(34) reductase QueG OS=Acidimicrobiaceae bacterium OX=202489 4 GN=queG PE=4 SV=1
MGGGGGPPPPPRPAGGGAGRLRIAAYARHDHYATLRGHLERLADRIRSDGWTARVVADDNALVDRAAAVRAGIGWYGKNANVLLPGRGSWFVLGAVVTDALLSPSEQVEEGCGTCRRCLDGCPTGAIIQPGVVDARRCLAWLVQAPGSIPREFRRALGGRLYGCDDCQEVCPVGRSEVIADGTEDPAADVEAIDVLEADDADLLERFGRWYIAERDPRYLRRNALVALGNTADGSDPAVVRLLEAFLADPDPVLRSHATWAAAELGRRDLLGGLDDDEDPLVAEEMALIRGRVGT

SEQ ID NO: 73987 - protein, 383 aa, Acidimicrobiaceae bacterium
  misc_feature (1)..(383): tr|A0A1Z8YZ68|A0A1Z8YZ68_9ACTN tRNA epoxyqueuosine(34) reductase QueG OS=Acidimicrobiaceae bacterium TMED77 OX =1986623 GN=CBC37_02340 PE=4 SV=1
MKSPPSLSRIQKIGMSSGLDSVGIANAEIFKSTLQDLTKRKSKGLHAGMSFTYRNPERSTNPKLAMPECKSLIVGAKSYWEPSLEKSKTGSPTGRVALYARQDHYGALRVGLESIAEELVDAGYDARILIDDNALVDREAAYRAGIGWYGKNSNILIPKRGSWFVLGSVLTNAGYQPNKPLKDGCGSCTQCITSCPTDAIVSPGVLDANRCLAWLVQSEGDFPTEFRTALGDRIYGCDDCQEVCPTNKFEERLNNSFGLSSSESVISIHKIFESDDDSLLAEFGRWYIPKRDPRYLKRNALIVLGNSKMPPSSKTIKIVKKCLAGSDEMLRAHAVWTAKRLGLGKLLIGLEGDPSPSVQKELAQKVERNTHSQGEESDLAWIG

SEQ ID NO: 73988 - protein, 219 aa, Acidimicrobiales bacterium
  misc_feature (1)..(219): tr|A0A2W6DR86|A0A2W6DR86_9ACTN 4Fe-4S ferredoxin-type d omain-containing protein OS=Acidimicrobiales bacterium OX=2201156 GN=DLM54_05490 PE=4 SV=1
MVTDAPLAGASDVVGDQCGACTRCLAACPTGALIAPGILDARRCLAWLLEAPGWFPPAYRAALGGRIYGCDACQEACPPNRAAERHHPSPPADPHDQPEVDLVEMLACSDSDLLERFERWYIPRRQARYLRRNALVALGNVGNGTDDRVVEALEKSLSHPDPVVRGHAVWASAALGRDDLLAPLWEAEPDPDVRAELEATGGLLHDADGPTPSPGLAQA

SEQ ID NO: 73989 - protein, 395 aa, Acidimicrobiales bacterium
  misc_feature (1)..(395): tr|A0A524B0K3|A0A524B0K3_9ACTN tRNA epoxyqueuosine(34) reductase QueG OS=Acidimicrobiales bacterium mtb01 OX=1 967499 GN=queG PE=4 SV=1
MSSPRPDWCLTFGIVRPATPPPPDASSAEYTESILEFARSLGLDRVGVTHTGILERSRVALVDRRVRGLSDTMGFTFRDPIRSTDPDRAVAGSQSILVAALSYAADESDGTDEPGPLSARVARYARHDFYTPLRQSLQQVALRLRRDGFRAVVFADENDLVDREVAWRAGLAWWGKNANLLVPGAGSWFVLGSLVTTAPLRATAGPAPDGCGSCRRCLDDCPTGAIVAEGVVDARRCLAWLVQKPGIFPREFRVALGDRLYGCDDCQESCPPTVRLGRRVPARSGSGGPGAFVDVMEVLAADDAHLLERFGRWYLAERDPRWLRRNALVILGNIASTPVDEQVIGVLHRYLSHDDPMLRAHAVWAAGRLGRTDLVKFLVDDPDPDVRAELAEVGA

SEQ ID NO: 73990 - protein, 376 aa, Acidimicrobiia bacterium
  misc_feature (1)..(376): tr|A0A520XX27|A0A520XX27_9ACTN tRNA epoxyqueuosine(34) reductase QueG OS=Acidimicrobiia bacterium OX=2080302 G N=queG PE=4 SV=1
MEDRAAHDLLERLKSIGDANGGVGLGVCSVEPFVEVQAEMDRRLESGEAGRRRFTYTDPVISTDVRTTFRWSERLLVAAVSYLPTAGRPGPRSPNTGRIARFATSDQYVPLRELLAALSAELESAGFRAEPLADDNRLVDRAAAVRAGVAWWGKSTMALAPGFGPWMLLGSVVTDAPLPVSEPMVRDCGTCTACIPACPTGALDTEGVLDATRCISYWAQTPGMIPLAIREAWGDRLYGCDDCLEACPPGERWEADATTVAGRVDLLELLNRSNAELLAEYGHFYIPRRDPRFLRRNALVALGHSGTTEAEPVITGYLQSPVAVLRAHAAWALGSLGAAGAIPSLRQAAAVESDSLVKGEFVAALERLADPDRPVR

SEQ ID NO: 73991 - protein, 383 aa, Acidimicrobiia bacterium
  misc_feature (1)..(383): tr|A0A0R2Q6V9|A0A0R2Q6V9_9ACTN 4Fe-4S ferredoxin-type d omain-containing protein OS=Acidimicrobiia bacterium BA CL6 MAG-120924-bin43 OX=1655583 GN=ABR75_00080 PE=4 SV= 1
MRLSKKSPKFDVADHAACVAYTDHILSLGTAGGLDRVGVAPAQVMQRAHQALVERKAAGLHDTMQFTYRNPARSTDPQSAVANAKAMIVGAYSYASPVPDPQLQPSARVARYAWTEYYESLKVGLFAMRDELRSDGFKAVVFADDNSMVDREAAYLAGLGWFGKNANVLIEGAGSFFVLGSVITTAPLFINDKPVADGCGACRRCIDACPTQAIIEPGIVDAAKCLAWLIQKPGIFDRRYREALGDRMYGCDDCQEVCPPTIRLSLSKPLREDARPWINVLELLDMDDETLLARVDQWYIAERNPDWVRRNALLVLGNIGERTDPNVVGTIARYLEHSDPMLRAHAVWSAARLDLFDLIPMHDTAPLVVDELRNLPLARQQAI

SEQ ID NO: 73992 - protein, 298 aa, Acidimicrobium sp.
  misc_feature (1)..(298): tr|A0A356WG39|A0A356WG39_9ACTN tRNA epoxyqueuosine(34) reductase QueG (Fragment) OS=Acidimicrobium sp. OX=1872 112 GN=queG PE=4 SV=1
MQLADESGSTDKANYTNQILSLGRQAGLDHVGVASAEVLVRARQAINERKSQDLHNQMQFTYRNPERSTDPTKTLPSAKSVIVGAFSYSSSSLNFSDQSSATEIDLSARVAKYVWSDYYAQLRESLGKVAQKLKSDGHRAVVLADDNAIVDREVAYQAGLGWFGKNSNLLISGAGSYFVLGCIITSADLAVATQPVEDGCGACRRCIDNCPTEAIVAPGVIDANKCLAWLLQKPGVFDRNFRVALGDRIYGCDDCQEVCPPTIRFEKNSAGSNVSITSKELKAWVSVAKILTSDDASL

SEQ ID NO: 73993 - protein, 354 aa, Acidimicrobium sp.
  misc_feature (1)..(354): tr|A0A0R2PVA7|A0A0R2PVA7_9ACTN 4Fe-4S ferredoxin-type d omain-containing protein (Fragment) OS=Acidimicrobium s p. BACL19 MAG-120924-bin39 OX=1655566 GN=ABR58_03065 PE =4 SV=1
MHDDYTAELLRLVREAGADRVGVTTAEPLTRARAAIEARIASGMADDMQFTFRNPERSTTPTMAVPGARSIIVAARSYFVNDQAVSNDGIAQDSVIAGAVARYAWRDHYAPLRANDSAIVGAVARYAWRDHYAPLRDALRVAAKRLHQDGHRATVFADDNSIVDREVAYRAGLGWFGKNANLLVEGLGSWFVLGCVVTTAELQHTERVVADGCGACTRCIDACPTGAIVEPGVVDARKCLAWLIQKPGVFDLRYRDALGTRIYGCDECQEVCPPSRRGAIDRSVGDERSVVDALELLTAPDDEVMRIVGRWYVADRNPRWVRRNALIILGNSGAGEHDEVALALVRYLHGDDDL

SEQ ID NO: 73994 - protein, 353 aa, Acidiphilium cryptum
  misc_feature (1)..(353): tr|A5FY71|A5FY71_ACICJ Epoxyqueuosine reductase OS=Acid iphilium cryptum (strain JF-5) OX=349163 GN=queG PE=3 S V=1
MAEADLRAAIAARAAALGFDAIGIARARLPESVRDNLRAHLAAGHHGTMGWMEDRAAQRADPASLWPEAVSVISLGLSYAPDGDPLATLSRADRGNISVYARNRDYHDIIKGRLKHLAQFIAARGEGVKVFVDTAPVMEKPLAAAAGLGWQGKHTNLVSRRHGSWLLLGEIMTTLALPPDPPHPDRCGTCTACQAACPTDAFPAPYRLDARRCISYLTIEHKGPIPEEFRPAIGNRIYGCDDCLAACPWNKFAVAGREQKLAARDDLLAPRLADLAALDDAGFRALFAGSPIKRIGRARLARNVAIAIGNSADPALAPAAARLAADDDPVVAEAGRWAARRLAIGLAPARKPG

SEQ ID NO: 73995 - protein, 353 aa, Acidiphilium multivorum
  misc_feature (1)..(353): tr|F0IY76|F0IY76_ACIMA Epoxyqueuosine reductase OS=Acid iphilium multivorum (strain DSM 11245 / JCM 8867 / NBRC 100883 / AIU301) OX=926570 GN=queG PE=3 SV=1
MAEADLRAAIAARAAALGFDAIGIARARLPESVRDNLRAHLAAGHHGTMGWMEDRAAQRADPASLWPEAVSVISLGLSYAPDGDPLATLSRPDRGNISVYARNRDYHDIIKGRLKHLAQFIAARGEGVKVFVDTAPVMEKPLAAAAGLGWQGKHTNLVSRRHGSWLLLGEIMTTLALPPDPPHPDRCGTCTACQAACPTDAFPAPYRLDARRCISYLTIEHKGPIPEEFRPAIGNRIYGCDDCLAACPWNKFAAAGREQKLAARDDLLAPRLADLAALDDAGFRALFAGSPIKRIGRARLARNVAIAIGNSADPALAPAAARLAADDDPVVAEAGRWAARRLAIGLAPARKPG

SEQ ID NO: 73996 - protein, 347 aa, Acidiphilium rubrum
  misc_feature (1)..(347): tr|A0A1N6RPG9|A0A1N6RPG9_ACIRU Epoxyqueuosine reductase OS=Acidiphilium rubrum OX=526 GN=queG PE=3 SV=1
MAEAQSLKAAITTSAAALGFDAIGFTRATLTAQHRANLDAYLAAGHHGTMAWLAERTAQRADPATLWPEAVSVIALGLSYAPAGDPLATLARPDRGNISVYARNRDYHDIIKGKLKHLAQFITARAAAGIKVFVDTAPVMEKPLAAAAGLGWQGKHTNLVSRTHGSWLLLGEIMTTLDLPADAPHADRCGSCTKCQAACPTDAFPAPYQLDARRCISYLTIEHEGPIPQALRPAIGNRIYGCDDCLAVCPWNKFASLGREAKLTARADLIAPPLAALATLDDAGFRAHFAGGPIKRIGRRRFARNVAIAIGNSADPSLAPSAAHLATDADPTVAEAGKWALHQLQNL

SEQ ID NO: 73997 - protein, 353 aa, Acidiphilium sp.
  misc_feature (1)..(353): tr|A0A257R9P7|A0A257R9P7_9PROT Epoxyqueuosine reductase OS=Acidiphilium sp. 20-67-58 OX=1970291 GN=queG PE=3 S V=1
MAETDLRTAIAARAAALGFDAIGIARARLPESVRDNLRAHLAAGHNGTMGWMEDRATQRGDPASLWPEAVSVISLGLSYAPDGDPLATLSRPDRGNISVYARNRDYHDIIKGRLKHLAQFIAARGAGVKVFVDTAPVMEKPLAAAAGLGWQGKHTNLVSRRHGSWLLLGEIMTTLALPPDPPHADRCGTCTACQTACPTDAFPAPYRLDARRCISYLTIEHKGPIPEEFRAAIGNRIYGCDDCLAACPWNKFAAAGREQKLAARDDLRAPRLADLAALDDAAFRALFAGSPIKRIGRARLARNVAIAIGNAADPALAPATARLAADDDPVVAEAGRWAQRRLEIGLAPARKPG

SEQ ID NO: 73998 - protein, 353 aa, Acidiphilium sp.
  misc_feature (1)..(353): tr|F7S805|F7S805_9PROT Epoxyqueuosine reductase OS=Acid iphilium sp. PM OX=1043206 GN=queG PE=3 SV=1
MAEADLRAAIAARAAALGFDAIGIARARLPESVRDNLRAHLAAGHHGTMGWMEDRAAQRADPASLWPEAVSVISLGLSYAPDGDPLATLSRPDRGNISVYARNRDYHDIIKGRLKHLAQFIAARGEGVKVFVDTAPVMEKPLAAAAGLGWQGKHTNLVSRRHGSWLLLGEIMTTLALPPDPPHPDRCGTCTACQSACPTDAFPAPYRLDARRCISYLTIEHKGPIPEEFRPAIGNRIYGCDDCLAACPWNKFAAAGREQKLAARDDLLAPRLADLAALDDAGFRALFAGSPIKRIGRARLARNVAIAIGNSADPALAPAAARLAADDDPVVAEAGRWAARRLAIGLAPARKPG

SEQ ID NO: 73999 - protein, 379 aa, Acidipila dinghuensis
  misc_feature (1)..(379): tr|A0A4Q1S8U0|A0A4Q1S8U0_9BACT tRNA epoxyqueuosine(34) reductase QueG OS=Acidipila dinghuensis OX=1560006 GN=q ueG PE=4 SV=1
MRLRQEDVRRLAEEAGFTLGGVAAVPAADSAQSAEERQRFEQWIAAGSAGEMEYLKRRNESGDLLRSSVRAVFPWAKSVIVCAANYNGAAVRSLDPTSSDRGWIARYAWSGQPGSEDGQLRPSDYHKVLLKRLNGMEARLREECGAEFESRAFVDTGPIVERVYARYAGLGWTGKNTCLISQGKGSWHFLCVLLTSLEVEEEQLAVMAPDRCGSCTRCIDACPTDALTPYRMDASRCIAYLTIEKRGVIEAGDGAVDLREGIGRNVFGCDICQEVCPWNRKALPADDTELTTRQELVNPALDWLAAMTEADFGAWFYGSPVKRAKYEGFRRNLAIAMGNSRRQEYAMILRVWAQEEDAGLRSAAEWALQKLQAEIHTAS

SEQ ID NO: 74000 - protein, 376 aa, Acidipila rosea
  misc_feature (1)..(376): tr|A0A4R1LFM4|A0A4R1LFM4_9BACT Epoxyqueuosine reductase OS=Acidipila rosea OX=768535 GN=C7378_0652 PE=4 SV=1
MEAERGFQAVSALRLQNQVKALALEAGFADAGIAPVPVSGSKTDREHRARYREWVDAGRAGEMEYLKRTNEEGQLIRSSLRIAAPWARSVIVCAANYNSLAPRSVDPAPAGAGWIARYAWSGQEDGRPSDYHKVLLTRLRKLEVSLFQKLGSFESKCYVDTGPLVEREAARLAGIGWTGKNTCTLNQELGSWFFLGVILTSLPVPEDAATLPAADRCGSCTRCIDACPTNALIAPRQMDASRCISYLTIEKRGAIDEQLRGGMGRQVFGCDICQDVCPWNRKAPVAKDLQLRPRTALVNPALEWLASLDRDDFGKLFFGSPIKRARYEGLRRNVAIAMGNSGLPEYLPTLQEWASGTEEVLADAARWAIRQIENKG

SEQ ID NO: 74001 - protein, 330 aa, Acidipila rosea
  misc_feature (1)..(330): tr|A0A4R1L706|A0A4R1L706_9BACT Epoxyqueuosine reductase QueG OS=Acidipila rosea OX=768535 GN=C7378_2425 PE=4 S V=1
MSEPLNPRRPRRNTWQPKPEISSLLRVSGNPINGVGEGTPRRPSPFFWHPPDQHPWGELQIVARQNSRKCPGSAEAFQAASSYPELNAVSATRNDAPAETLTEEVRRFALSNEADDIGIAPMDPLYVFDGYAIDHPLVIVLALAHNYERLREVPSDETNGVGVCDVGDQYAKGTRSSYTLANWIRAQGYQADPYPGPSAGALVLIPPAIAAGLGELGKHGSLINPRFGAGVRLAGVTTDMPLIPTSPRRFGADDFCSTCQVCTQACPPGAITPKKQMVRGVERWYVDFDKCIPYFAEAASCGICIAECPWTRPAVRPKLLATMARRLGEG

SEQ ID NO: 74002 - protein, 387 aa, Acidipila sp.
  misc_feature (1)..(387): tr|A0A372ILH0|A0A372ILH0_9BACT tRNA epoxyqueuosine(34) reductase QueG OS=Acidipila sp. 4G-K13 OX=2303751 GN=qu eG PE=4 SV=1
MTADRAAAALSQPAGVSASIPRSWHSFLGDLAREAGFVLAGIAAAPEPGSSEDLQERRRYEEWIDAGSAGEMEYLKRRDETGRLVRSSVRVVFPWVRSVIVCAANYNSGQPHSIDNPPPGAGWIARYAQTGSDGRPADYHKVLLKRLEALRTLLEREAGPFESRCYIDTGPLVERVYARYAGIGWTGKNTCTLHEKLGSWLFLGVILTSLDVPQQHLSIPAADRCGSCTRCIDACPTQALTAPRQMDASRCIAYLTIEKRGEIPEELRSGIGRQVFGCDICQDVCPWNRRAPVSADPEFTPREALVNPALDWLAEMDEAGFGRWFYGSPVKRAKFAGFRRNIAIAMGNSGSRQYLPVLRGWLEDGDPVLADAARWAIHTLDTTEAGS

SEQ ID NO: 74003 - protein, 406 aa, Acidipila sp.
  misc_feature (1)..(406): tr|A0A3P0X9B9|A0A3P0X9B9_9BACT tRNA epoxyqueuosine(34) reductase QueG OS=Acidipila sp. EB88 OX=2305226 GN=queG PE=4 SV=1
MIESVQDQVRTRAIAHGFAIAGIAPLPRLGSADASTREDYFRDWIAQGHAGEMEYLKRQDALGRYLRSAVEVAVPWARSIVVCAAPYGGGPEHPLSTDPAPAGTGWIGRYAWSGRQAADGQLAPSDYHKVLLRRLKALEADLKESLGSLDDAGAEGFQSWAYVDTGPMIERAFSAMAGVGWTGKNVCTLNQELGSFFFLGVILLSTELAPEQRAELPADRCGSCTRCLDACPTDALVAPHQMNASRCIAYLTIEKRGSIDPALRAGMGRQIFGCDICQDVCPWNHRARRGAQPLTLVKDTELVPRALLINPSLAAMAALSEPEWEKLFFGSPVKRARYSGFRRNVAIAMGNSGDPALLPQLELLAAQEQDETLRETALWAIDRLHTLQGEPSSGRRLSLPHDHTAK

SEQ ID NO: 74004 - protein, 377 aa, Acidisarcina polymorpha
  misc_feature (1)..(377): tr|A0A2Z5FTB5|A0A2Z5FTB5_9BACT Epoxyqueuosine (OQ) redu ctase QueG OS=Acidisarcina polymorpha OX=2211140 GN=ACP OL_0356 PE=4 SV=1
MNPAASLSDLVAELAQEAGFAATGIAAVPDPASPEDYAELQNVEPWLASGRAGEMEYLKRRDEAGRLLRSSLRVALPWARSVIVCAANYNSGAPNSTEPAPSSRGWIARYAWTGKPSGDGQVRPSDYHKVLLHRLRSMETKLKDLYGDFQSRCYVDTGPIVERIYAKYAGIGWIGKNTCILNEQLGSWLFLGVIATSIEVSPASIAAVPEDRCGSCRRCIEACPTGALTDAYRMDASLCISYLTIEKRGEIPEQLRAQIGRQIFGCDICQDVCPWNRRAPLGRDVELSTRADLVNPALDWLAAIDESGFANLFHGSPVTRTKLSGLRRNVAIAMGNSRLRSFLPKLQEWSQAADTVLAATAAWAITQIESQPSTDGL

SEQ ID NO: 74005 - protein, 352 aa, Acidisphaera rubrifaciens
  misc_feature (1)..(352): tr|A0A0D6P549|A0A0D6P549_9PROT Epoxyqueuosine reductase OS=Acidisphaera rubrifaciens HS-AP3 OX=1231350 GN=queG PE=3 SV=1
MAGADHASHDPRAAIRARAHALGFQAVGFCAAALGAEASARLADFLAAGWHGGMGWMERRAAQRADPRALWPQARSVIALGLSYAPAEDPLAVLARPDRGNISVYARNRDYHEVFKGRLKTLAQFVVARYGPEVKVFVDTAPVMEKPLAARAGLGWQGKHTNLVSRRHGSWLFLGEIYTTLDLPEDAPHADRCGSCTRCLRACPTDAFPAPYRLDARRCISYLTIEHHGPIPEALRPAIGNRIYGCDDCLAACPWNRFAQAGREAKLQARPDLTAPALSELAALDDTGFRARFAGTAIKRIGRDRFARNVAVAIGNAGEPALLPAATRLAADADPVVAEAGAWAGARLAGRV

SEQ ID NO: 74006 - protein, 360 aa, Acidithiobacillales bacterium
  misc_feature (1)..(360): tr|A0A0S8L6M7|A0A0S8L6M7_9PROT Epoxyqueuosine reductase OS=Acidithiobacillales bacterium SM1_46 OX=1703384 GN= queG PE=3 SV=1
MATGRHALSDAQLATLADDIRGWAMALGFQAIGIADTDLSAAEQHLIEWLHAGRHGEMGYMERHGTRRSRPAELIPGTLRVLSARMDYWPGAARDAEAVLADDALGYISRYALGRDYHKVLRQRLQQLAVHIEDAIGPFRYRVFADSAPVLEKALAEKAGIGWIGKHTNLLEQRTGSWFFLGELYTDLPLPVDAPATNHCGTCQACIDICPTRAIVAPYQLDARRCISYLTIELRGAIPVGLRPMIGNRIYGCDDCQLVCPWNRFARSTAEGEYSPRHQLDAPQLLALFAWDESEFLARTEGSAIRRIGYECWLRNLAIAIGNGPHTPAAHAALHARADHPSPLVREHVAWALARHAGGA

SEQ ID NO: 74007 - protein, 360 aa, Acidithiobacillales bacterium
  misc_feature (1)..(360): tr|A0A0S8GMC6|A0A0S8GMC6_9PROT Epoxyqueuosine reductase OS=Acidithiobacillales bacterium SM23_46 OX=1703385 GN =queG PE=3 SV=1
MATGRHALSDAQLATLADDIRGWAMALGFQAIGIADTDLSAAEQHLIEWLHAGRHGEMGYMERHGTRRSRPAELIPGTLRVLSARMDYWPGAARDAEAVLADDALGYISRYALGRDYHKVLRQRLQQLAVHIEDAIGPFRYRVFADSAPVLEKALAEKAGIGWIGKHTNLLEQRTGSWFFLGELYTDLPLPVDAPATNHCGTCQACIDICPTRAIVAPYQLDARRCISYLTIELRGAIPVGLRPMIGNRIYGCDDCQLVCPWNRFARSTAEGEYSPRHQLDAPQLLALFAWDESEFLARTEGSAIRRIGYECWLRNLAIAIGNGPHTPAAHAALQARADHPSPLVREHVAWALARHAGGA

SEQ ID NO: 74008 - protein, 361 aa, Acidithiobacillus sp.
  misc_feature (1)..(361): tr|A0A2G2KGQ2|A0A2G2KGQ2_9PROT Epoxyqueuosine reductase OS=Acidithiobacillus sp. OX=1872118 GN=queG PE=3 SV=1
MPKIFSAKDLTSVKAQMKLWASELGFCMIGIAGTDLSQEEARLFEWLADGRHGDMHYMAKHGDRRTKPDAIHPGTIRVVSVRMDYFPDSATPPTEILQDSTRGYVSRYALGRDYHRLMRRKLQKLADLISGEVGPFRYRAFVDSGPVMEKPLAVKAGLGWLGKHTNLIDKESGSFFFLGELYTDLPLPLDDEQTDHCGDCNLCMTACPTGAIDRAYQLDARRCISYLTIELKGPIPADLRPLIGNRIFGCDDCQLVCPWNRFSKPVSTQDFQPRHSLDNAVLTDLFSWSESEFNTRLEGSPIRRIGYQRWLRNIAVALGNSKATNAVLAVLEEKKLVATPMVREHIEWAIAQLNDPPVSAD

SEQ ID NO: 74009 - protein, 337 aa, Acidithrix ferrooxidans
  misc_feature (1)..(337): tr|A0A0D8HJG9|A0A0D8HJG9_9ACTN Epoxyqueuosine reductase OS=Acidithrix ferrooxidans OX=1280514 GN=queG PE=4 SV= 1
MELYLELEAKSLELGLIGFGVAPIRRFRNVLVMLKDRKEIGLADSMEFTYRNPKRSTDPSAILDGARSMVTLGLSYYPSTEIAIEFSSPIAKYARSDFYSILRDRLETLAKLIRSKGFKAVVVMDSNALVDKEAAVRSGSGIYLKNSLLSIQGHGSFVVIGTIITDAEIERSPKRSRITGCGSCTSCIQACPTSAIGPNGTIDARLCISWVLQRPGGIDPALRSRIGVRIYGCDICQDVCPYNAKLKANEPHLDEVVSDLIAILGLGDQELLERFSHLYIYKRDVNILRRNALVGLGNSKALQLQELHRVLEVLRNYCESDDLILVEHAKWALDQLT

SEQ ID NO: 74010 - protein, 378 aa, Acidobacteria bacterium
  misc_feature (1)..(378): tr|A0A2V8YJN3|A0A2V8YJN3_9BACT tRNA epoxyqueuosine(34) reductase QueG OS=Acidobacteria bacterium OX=1978231 GN =queG PE=4 SV=1
MSQSADAIWIVEQAKGLGFDLCGVARADKFPELENTPDWLARGYAGEMKYLFDPRREDPRRAMPGVQSAIVCLLNYNSEHPFSTDAKFARRNGEARGWVSRYAWGDDYHSVLGERLEALNALLRERFSEPFEARVYVDTGPVQERVLAKYAGLGWLGKNTLLLNQTLGSYFFLGVILTTLDLEPTLGEKELPPPDLCGSCRQCLDACPTQAFVEPYVLDARKCISYLTIELRGSVPEELREPMGNHVFGCDICQDVCPWNRRAALSPLMQFQPRSLPSRQENATEASPDSQDDSLLLPRLERLLALDGENFRDFFRRSPIKRAKWRGLVRNACIAAGNSGMGPGSAGYARILDCLNRLAACGDSIVAESAQWALSRIQ

SEQ ID NO: 74011 - protein, 351 aa, Acidobacteria bacterium
  misc_feature (1)..(351): tr|A0A1F2V9J0|A0A1F2V9J0_9BACT tRNA epoxyqueuosine(34) reductase QueG OS=Acidobacteria bacterium RIFCSPLOWO2_1 2_FULL_67_14b OX=1797193 GN=A3J29_11635 PE=4 SV=1
MTAGAIKRQAQALGFDLCGVAPAASLPELAYLPEWLASGHAGEMVYLHKSAAARSDIRNFLPGARSVIVTGTVYNTDEGRRQKAEGGRATDSIRVARYARGRDYHVVLAERLEALVAWMRGQHVEPFEAAVFVDKHHVQERVYARHAGIGWIGKNTCVINPELGSWLFLSGIATDLALDADPPALDQCGACTLCLDACPTGALVDAHVLDATRCISYLTIEAEGAIPEERRAQIGHHAYGCDICQEVCPWNLAPPRSLDPAWQAVRRDGVSAASLWQRSDDELHQFVKGSAMTHLSLAGLRRNLATVIGNSGDAALLPALEGPGRGVKNAAHSAFTPAVAETVAWARERLK

SEQ ID NO: 74012 - protein, 372 aa, Acidobacteriales bacterium
  misc_feature (1)..(372): tr|A0A1Q7N0A0|A0A1Q7N0A0_9BACT tRNA epoxyqueuosine(34) reductase QueG OS=Acidobacteriales bacterium 13_1_40CM_ 3_55_5 OX=1803468 GN=AUI85_05095 PE=4 SV=1
MPPLSDITAFVKQAARDAGFGLAGIASVRDFPELDRFADWIDAGHAGDMEYLKARHEAGQLKRASLRSTIPWARSVIVCAINYNTAQPLSTQVNDSRRGWISRYAWGQEDYHNAVMKRLRLVEAALNQHCSDPRGQTTAKDSAVRDPLSAGQPQTRCYVDTGPVVERVYAKYAGVGWIGKNTCILNQKIGSWLFLGVILTSLELGADLPAPDRCGSCTRCIDACPTDALIAPYQLDSNKCISYLTIEKRGMIPEEIRGAMGRHVFGCDICQDVCPWNRKAPATTAAEFKPREGLVNPALDWLAEMSGEEFQQTFRGSPVRRAKRGGLRRNAAIAMGNSGDPRFKPVLDRLTEDEDPIVAEHARWAEQKLSLG

SEQ ID NO: 74013 - protein, 377 aa, Acidobacteriales bacterium
  misc_feature (1)..(377): tr|A0A1Q3QQK2|A0A1Q3QQK2_9BACT tRNA epoxyqueuosine(34) reductase QueG OS=Acidobacteriales bacterium 59-55 OX=1 895690 GN=BGO25_19350 PE=4 SV=1
MWAEDFHEWLQERAIEAGFDTAGVAPVYGAESEDGQVDAARFADWVDAGRAGEMEYLKRRNEQGVLLRAGVEVAMPWARSVVVCAVNYNGEGPLSIEPAGSETGWIARYAWSGRTVENPEDGERLAPSDYHDEMLGRLRGVEAALHERYGCETKCYVDTGPLVERAAAAKAGVGWIGKNACVINQGLGSWLLLGVIVTSLEVAEDVALEVAADRCGSCTRCIDACPTDALVGPRQMDASRCISYLTIEKKGTIAEEFREAMGRQVFGCDICQDVCPWNRKSPIATREGMLTRREMVNPELGWLAAMDAPAFRRWFKGSPVERTRKKRLHRNVAIAMGNSGEERFVPQLESWSAGEDEVLAESARWALGRIAEAVEKG

SEQ ID NO: 74014 - protein, 338 aa, Acidobacteriia bacterium
  misc_feature (1)..(338): tr|A0A317IVT1|A0A317IVT1_9BACT tRNA epoxyqueuosine(34) reductase QueG OS=Acidobacteriia bacterium OX=2081523 G N=queG PE=4 SV=1
MNSGDIRELARQCGFELAGVARAAPAPESAWYHAWVAAGFAGRMGYLADRRAALRDDPRNLLPSARSVICVGKLYNSPWPYSTQFSGPERAWISRYAWGEDYHSVLRCGLERLDKLLPEHESKICVDTAPLLERSYAQLAGLGWIGKNTCLINQQSGSWFFLGELLVSLDIEPDAPPPGRCGTCTRCIDACPTGAIVPGTLGYTVDSRLCISYFTIELRGEIPEAQRHKLGPHVFGCDICQDVCPWNRRAPASNDPAFQPRHFAPFLERLAGIPEEEFGGMFRGTPVTRSRYAGFLRNVAVAMGNSRDVRYKIPLQRLAAHTDAIVAEHARWALDQLR

SEQ ID NO: 74015 - protein, 405 aa, Acidobacteriia bacterium
  misc_feature (1)..(405): tr|A0A2N9LRX1|A0A2N9LRX1_9BACT 4Fe-4S ferredoxin-type d omain-containing protein OS=Acidobacteriia bacterium Sb A2 OX=2043162 GN=SBA2_270064 PE=4 SV=1
MIQAMLSGRTIKERAVGLGFDLAGIAPLDVWKDLEFSRRWVEKGFNGEMRYLENPKRFDPLMVLPSAKSVVCVGLVYNAPLPYSTETAGAASGPRAWISRYAWGRDYHEIMRAKLEQLRAAINESAPEVETRVYVDTGPVVERAFTRLSGIGWTGKNTCIINQEKGSWLFLGVILCSLELEPDLPAPDRCGSCTACLEACPTGALVEPYAMDASRCISYLTIELRGSIPNEFRSKVGSNVFGCDICQDVCPWNSSRQSAVISYQQTQSQHERPLDPREVARPATTAIQDFHPMIVEPDHARVSDGATSGQQATDNGPRTTEPVGFSLFNPPLEALASITEEGFRLNFAHSTIKRAKYRGWLRNLAVAMGNSSDERFVPWLERMARHPDPIVREHAAWALERLRGE

SEQ ID NO: 74016 - protein, 396 aa, Acidobacterium capsulatum
  misc_feature (1)..(396): tr|C1F530|C1F530_ACIC5 Putative iron-sulfur cluster bin ding protein OS=Acidobacterium capsulatum (strain ATCC 51196 / DSM 11244 / JCM 7670 / NBRC 15755 / NCIMB 13165 / 161) OX=240015 GN=ACP_3117 PE=4 SV=1
MRHEAWPSRVGQFAEEAGFDRAGVAAVPAPGSDEDRTERARFEQWIAAGHAGSMEYLKRRNEAGRLVRSSLREAVPWARSVVVCVTNYNREAPYSTDPAPEGSGWIARYAWSGSHGRPADYHKVLLKRLERVRERMSEEFGEFEARCYVDTGPVVERVYAQYAGLGWIGKNTCLLNQELGSWLFLGVILTSLELPASDAAVLAPDRCGSCTRCIDACPTGALIAPRQMDASRCISYLTIEHRGEVPLELREGIGRQIFGCDICQDVCPWNSRRRVPEQADKELAPRGELINPALAWLAEMDESAFGRYFYGSPVKRTRYSGFRRNLAIAMGNSGQAAFLPRLQAWARSGDATLAEASQWAINRIVQMGAERSGLSENEKPLNSSTGMNLRQDLPDA

SEQ ID NO: 74017 - protein, 396 aa, Acidobacterium sp.; identical to SEQ ID NO: 74016
  misc_feature (1)..(396): tr|A0A3D4VL46|A0A3D4VL46_9BACT tRNA epoxyqueuosine(34) reductase QueG OS=Acidobacterium sp. OX=1872119 GN=queG PE=4 SV=1

SEQ ID NO: 74018 - protein, 375 aa, Acidobacterium sp.
  misc_feature (1)..(375): tr|A0A2G4JGA6|A0A2G4JGA6_9BACT tRNA epoxyqueuosine(34) reductase QueG OS=Acidobacterium sp. OX=1872119 GN=queG PE=4 SV=1
MAASCRMCCVSWSEARNNVLTSASIKSRALTLGFEVCGVAPATALPELSFLPEWLARGYAGDMIYLHKSAHARADIRNFLPSARAVIVAGAIYNTEQPGAGIRDPGSVQIQVARYARGQDYHLVLAERLEQLVAWMREQQAGPFDTAIFVDKHHVQERVYAQHAGVGWIGKNSCVINLELGSFLFLCGIATSLPLEVDAPATDQCGACTLCIDSCPTGAIVDAHVLDATKCISYLTIEIDGAMPEAQRAQIGDHAYGCDICQEVCPWNLAPVLTADPAWAATPRHGASAAELWQRTDDELHQFVKGSAMTHLSLAGLRRNLATVIGNSGEGSLGPVLDRPGRGVKNAAHSAHTPVVEGAVAWAKKRLERQAPSLS

SEQ ID NO: 74019 - protein, 346 aa, Acidocella aminolytica
  misc_feature (1)..(346): tr|A0A0D6PJS8|A0A0D6PJS8_9PROT Epoxyqueuosine reductase OS=Acidocella aminolytica 101 = DSM 11237 OX=1120923 G N=queG PE=3 SV=1
MAGADLKTQIAAKAAELGFAATGFTCASLPPERLAQLQDFLSHGRHGTMGWMAERVAQRAHPQALWPEALSVISLGFSYAPEGGALDNLARPDVGNISVYARNRDYHDIIKGKLKHLAQFIATCGAGVKVFVDTAPVMEKPLAEQAGLGWQGKHTNLVSRRHGSWLFLGEIYTTLMLDPDAPAHDHCGGCTACQTVCPTQAFPAPYQLDARRCISYLTIEHNGPIPEEFRAAIGNRIYGCDDCLAVCPWNKFAEAGREVKLAAREDLTAPLLAELAQMDDAAFRKRFSGSPVKRIGRKRFVRNVAISIGNSGDVALLPVAAKLAGDDDLVVAEAGRWAEKTLGRPA

SEQ ID NO: 74020 - protein, 356 aa, Acidocella sp.
  misc_feature (1)..(356): tr|A0A257Q8F2|A0A257Q8F2_9PROT Epoxyqueuosine reductase OS=Acidocella sp. 20-57-95 OX=1970301 GN=queG PE=3 SV= 1
MPIAPAPAPVGRLAMTDIKPGIIARAQKLGFDAVGFTRATLSEQQRQGLRDYLAAGHHGSMSWMAARADERADPQTLWPEALSVISLGLSYAPDGDALATTRLAEAGNISVYARNRDYHDIIKGKLKHLAQFVAALGHDVKVFVDTAPVMEKPLAQLAGLGWQGKHTNLVSRQHGSWLLLGEVFTTLEIAPDAPHSDHCGSCHACMTACPTDAFPAAYKLDARRCISYLTIEYDGPIPEEFRKPMGNRIYGCDDCLAVCPWNKFAVAGHEAKLAERGDLTAPALAELARLDDAAFRAKFTSSPIKRIGRNRFVRNVAIAIGNSGVVSLIPAAESLAADADPVVAEAGAWAVASLQT

SEQ ID NO: 74021 - protein, 347 aa, Acidocella sp.
  misc_feature (1)..(347): tr|K5YUD4|K5YUD4_9PROT Epoxyqueuosine reductase OS=Acid ocella sp. MX-AZ02 OX=1214225 GN=queG PE=3 SV=1
MERFQNATLKTLIRDKAASLGFAATGFTRAALPPERLAYLQDFLAAGRHGGMGWMEERTEQRAHPQALWPEALSVITLGFSYAPPTDALANLTRPDIGNISVYARNRDYHDIIKGKLKHLAQFIAARGAGVKVFVDTAPVMEKPLAQQAGLGWQGKHTNLVSRAHGSWLFLGEIYTTLELEPDAPGRDLCGSCTACQEACPTAAFPAPYQLDARRCISYLTIEHDGPIPEEFRTAIGNRIYGCDDCLAVCPWNKFAKAGQELKLAARDDLTAPKLAALATLDDAGFRQKFSGSPIKRIGRNRFLRNVAIAVGNSGEFGMLPTAEQLAADDDPVVAQSGAWAAARLRG

SEQ ID NO: 74022 - protein, 359 aa, Acidovorax anthurii
  misc_feature (1)..(359): tr|A0A328ZC51|A0A328ZC51_9BURK Epoxyqueuosine reductase OS=Acidovorax anthurii OX=78229 GN=queG PE=3 SV=1
MQGWARELGFSQIGIAGVDLSSAEPGLMQWLAQGFHGEMHYMEAHGLRRARPAELVPGTVSVITARMDYLPHATLDRGAAREGEEGGAGWQAVEFARLERPREGIVSVYARGRDYHKVLRARLQKLADRIAAAIGPFGHRVFTDSAPVLEAELARRSGQGWRGKHTLVLNREAGSMFFLGEIYVDLPLAPSEPVTAHCGSCQACIDVCPTQAIVAPHRVDARRCISYLTIEHAGPIPEAMRPLMGNRVYGCDDCQLACPWNKFAQPSRLPDFDERPDLAGRPLAEWFAWDEPTFLRRTEGGPIRRIGHERWLRNVAVALGNALRATHDPTLRAALASRAEDPSALVREHVAWALGEKAP

SEQ ID NO: 74023 - protein, 365 aa, Acidovorax avenae
  misc_feature (1)..(365): tr|F0Q1A0|F0Q1A0_ACIAP Epoxyqueuosine reductase OS=Acid ovorax avenae (strain ATCC 19860 / DSM 7227 / JCM 20985 / NCPPB 1011) OX=643561 GN=queG PE=3 SV=1
MQGWARELGFSQIGVAGVDLSSAEPGLMQWLAQGFHGDMHYMQSHGLKRARPAELVPGTVSVITVRMDYLPRQTLERTAEREGAPAGWQAAELARLDRPREGIVSVYARGRDYHKVLRARLQKLADRVAGVVGPFGHRVFTDSAPVLEAELARRSGQGWRGKHTLVLHREAGSMFFLGEIYVDLPLAPSEPVSAHCGSCQACIDVCPTHAIVAPQRVDARRCISYLTIEHSGPIPEALRPLMGNRVYGCDDCQLACPWNKFAQPAQVPDFDERPGLSGRPLAEWFAWDEGTFLRMTEGGPIRRIGHERWLRNVAVALGNALRATGDPALRAALASRVDDPSPLVREHVAWALAQAAAGTPEPPPA

SEQ ID NO: 74024 - protein, 365 aa, Acidovorax avenae
  misc_feature (1)..(365): tr|A0A2R4DMC9|A0A2R4DMC9_9BURK Epoxyqueuosine reductase OS=Acidovorax avenae subsp. avenae OX=80870 GN=queG PE =3 SV=1
MQGWARELGFSQIGVAGVDLSSAEPGLMQWLAQGFHGDMHYMQSHGLKRARPAELVPGTVSVITVRMDYLPRRTLERTAEREGAPAGWQAAELARLDRPREGIVSVYARGRDYHKVLRARLQKLADRIAGVVGPFGHRVFTDSAPVLEAELARRSGQGWRGKHTLVLHREAGSMFFLGEIYVDLPLAPSEPVSAHCGSCQACIDVCPTRAIVAPQRVDARRCISYLTIEHSGPIPEALRPLMGNRVYGCDDCQLACPWNKFAQPAQVPDFDERPGLSGRPLAEWFAWDEGTFLRMTEGGPIRRIGHERWLRNVAVALGNALRATGDPALRAALASRVDDPSPLVREHVAWALAQAAAGTPEPPPA

SEQ ID NO: 74025 - protein, 320 aa, Acidovorax caeni
  misc_feature (1)..(320): tr|A0A1I7G3N2|A0A1I7G3N2_9BURK Epoxyqueuosine reductase OS=Acidovorax caeni OX=343013 GN=SAMN04489707_100415 P E=4 SV=1
MQWLAQGFHGDMHYMAAHGLKRARPAELVPGTVSVITARMDYLPRSTPEGWQAVEWERLRRPGEAIVSVYARGRDYHKVLRARLQKLADRIAEAAGPFGHRVFTDSAPVLEAELARRSGQGWRGKHTLVLSREAGSMFFLGEIYVDMALAPTAPVTAHCGSCQACMDACPTQAIVAPYRVDARRCISYLTIEHAGDIPLALRPRMGNRIYGCDDCQLACPWNKFAQPSPLPDFDARAGLTGQQLVHLFAWDEATFLRQTEGGPIRRIGHERWLRNIAVALGNALRATGDPAVRDALRRRTQDPSALVREHVAWALAQETA

SEQ ID NO: 74026 - protein, 349 aa, Acidovorax carolinensis
  misc_feature (1)..(349): tr|A0A240U3Q5|A0A240U3Q5_9BURK Epoxyqueuosine reductase OS=Acidovorax carolinensis OX=553814 GN=queG PE=3 SV=1
MREWARELGFSQIGVAGVDLSASEPGLMQWLAQGFHGDMHYMAAHGLKRARPAELVPGTVSVITARMDYLPRDTAMDAPQGWQAVEFARLSRPLEGIVSMYARGRDYHKVLRARLQKLSDRIGEAVGPFGHRVFTDSAPVLEAELAARSGQGWRGKHTLVLNREAGSMFFLGEIYVDMALLPSEPVTAHCGSCSACIDVCPTRAIIAPHRLDARRCISYLTIEHAGPIPLELRPLMGNRIYGCDDCQLICPWNKFAQVSRLPDFDERKGLAGQQLVHLFAWDEATFLRMTEGGPIRRIGHERWLRNVAVALGNALRATGDEAVRAALQSRAEDPSALVREHVAWALEFE

SEQ ID NO: 74027 - protein, 353 aa, Acidovorax carolinensis
  misc_feature (1)..(353): tr|A0A240TUZ8|A0A240TUZ8_9BURK Epoxyqueuosine reductase OS=Acidovorax carolinensis OX=553814 GN=queG PE=3 SV=1
MREWARELGFSQIGVAGVDLSASEPGLMQWLAHGFHGDMLYMAAHGLKRARPAELVPGTVSVITARMDYLPRDTFAPAPMQAQGGWQAIEFARLSRPQEGIVSVYARGRDYHKVLRARLQKLSDRIGEAVGPFGHRVFTDSAPVLEAELAARSGQGWRGKHTLVLNREAGSMFFLGEIYVDMALPPSEPVTAHCGSCSACIDVCPTQAIIAPHRLDARRCISYLTIEHAGPIPLELRPLMGNRIYGCDDCQLICPWNKFAQVSRLPDFDERAGLAGQQLVHLFAWDEPTFLHMTEGGPIRRIGHERWLRNVAVALGNALRATGDEAVRAALQSRAQDASALVREHVAWALDFE

SEQ ID NO: 74028 - protein, 365 aa, Acidovorax cattleyae
  misc_feature (1)..(365): tr|A0A1H0K5Z0|A0A1H0K5Z0_9BURK Epoxyqueuosine reductase OS=Acidovorax cattleyae OX=80868 GN=queG PE=3 SV=1
MQGWARELGFSQIGVAGVDLSSAEPGLMQWLAQGFHGEMHYMQSHGLRRARPAELVPGTVSVITVRMDYLPRQTLERTAEREGSPTGWQAAELSRLDRPREGIVSVYARGRDYHKVLRARLQKLADRIAGAVGPFGHRVFTDSAPVLEAELARRSGQGWRGKHTLVLHREAGSMFFLGEIYVDLPLAPSEPVSAHCGSCQACIDVCPTRAIVAPQRVDARRCISYLTIEHSGPIPEALRPLVGNRVYGCDDCQLACPWNKFAQPAQVPDFDERPGLSGRPLAEWFAWDEPTFLRMTEGGPIRRIGHERWLRNVAVALGNALRATGDPALRAALASRLDDPSPLVREHVAWGLAQAGAGMPEPPAA

SEQ ID NO: 74029 - protein, 350 aa, Acidovorax cavernicola
  misc_feature (1)..(350): tr|A0A3A1W7T0|A0A3A1W7T0_9BURK Epoxyqueuosine reductase OS=Acidovorax cavernicola OX=1675792 GN=queG PE=3 SV=1
MQALARELGFSQIGIAGVDLSSAEDGLMQWLAHGFHGEMQYMATHGTRRARPAELVPGTVSVITARMDYLPRDTPGDWQTVEFDRLTRPGEAVVSVYARGRDYHKVLRNRLAKLAEKIAEEVGPFGHRAFTDSAPVLEAELASRSGQGWRGKHTLVLDREAGSMFFLGEIYVDMALPPSEPVTAHCGSCSACIDVCPTRAIVAPKRLDARRCISYLTIEHAGAIPVELRPLMANRIYGCDDCQLICPWNKFAKKSTLPDFDAREGLTGRTLAELFAWSEEDFLRRTEGSPIRRIGHERWLRNIAVALGNAVRSGEDGAKEALATRAAHESELVREHVAWGLAQQPADQPV

SEQ ID NO: 74030 - protein, 338 aa, Acidovorax citrulli
  misc_feature (1)..(338): tr|A1TLR0|A1TLR0_ACIAC Putative iron-sulfur cluster bin ding protein OS=Acidovorax citrulli (strain AAC00-1) OX =397945 GN=Aave_1307 PE=4 SV=1
MMQWLAQGFHGDMHYMQSHGLKRARPAELVPGTVSVITVRMDYLPRQTLARTAEREGSPGGWQAAELSRLDRPREGIVSVYARGRDYHKVLRARLQKLADRIAGAVGPFGHRVFTDSAPVLEAELARRSGQGWRGKHTLVLHREAGSMFFLGEIYVDLPLPPSEPVSAHCGSCQACIDVCPTRAIVAPQRVDARRCISYLTIEHAGPIPEALRPLMGNRVYGCDDCQLACPWNKFAQPAQVPDFDERPGLSGRPLAEWFAWDESTFLRMTEGGPIRRIGHERWLRNVAVALGNALRATGDPALRAALASRANDPSPLVREHVAWALAQAAAGAEPPPA

SEQ ID NO: 74031 - protein, 349 aa, Acidovorax delafieldii
  misc_feature (1)..(349): tr|A0A561XMX6|A0A561XMX6_ACIDE Epoxyqueuosine reductase OS=Acidovorax delafieldii OX=47920 GN=queG PE=3 SV=1
MQEWARELGFSQIGVAGVDLSAAEPGLAAWLAQGFHGDMHYMASHGMKRARPAELVPGTVSVITARMDYLPRDTARDAPGGWQVAELSRLQRPHEGIVSVYARGRDYHKVLRARLQKLSDRIAEAIGPFGHRVFTDSAPVLEAELAARSGQGWRGKHTLVLNREAGSMFFLGEIYVDMALPQSEPVTPHCGSCSACIDICPTQAIVAPYRVDARRCISYLTIEHAGPIPVELRPLMGNRIYGCDDCQLICPWNKFAQVSRLPDFDERKGLSGQQLVHLFAWDEATFLRMTEGGPIRRIGHERWLRNVAVALGNALRATGDGALRAALQSRAEDASALVREHVAWALDAA

SEQ ID NO: 74032 - protein, 324 aa, Acidovorax delafieldii
  misc_feature (1)..(324): tr|C5TC85|C5TC85_ACIDE Iron-sulfur cluster binding prot ein OS=Acidovorax delafieldii 2AN OX=573060 GN=AcdelDRA FT_4515 PE=4 SV=1
MQWLAQGFHGDMHYMAAHGLRRARPAELVPGTVSVITARMDYLPRDTPQQVPGGWQAVEFARLARPQEGIVSAYARGRDYHKVLRARLQKLSDRIAEAVGPFGHRVFTDSAPVLEAELAARSGQGWRGKHTLVLNREAGSMFFLGEIYVDMALPPSEPVTAHCGSCSACIDVCPTQAIIAPHRLDARRCISYLTIEHAGPIPLELRPLMGNRIYGCDDCQLICPWNKFAQASRLPDFDVRAGLAGQQLVHLFAWDEPTFLRMTEGGPIRRIGHERWLRNVAVALGNALRQTGDAAVRAALQSRAHDASALVREHVAWGLGQEGL

SEQ ID NO: 74033 - protein, 360 aa, Acidovorax ebreus
  misc_feature (1)..(360): tr|B9MEP2|B9MEP2_ACIET Epoxyqueuosine reductase OS=Acid ovorax ebreus (strain TPSY) OX=535289 GN=queG PE=3 SV=1
MVCSSQLVPQIQGWARELGFSQIKVAGVDLSSAEPGLMQWLAQGFHGEMHYMAAHGLKRARPAELVPGTVSVITARMDYLPRAMALDAPEGWQAIELGRLARPTEAVVSVYARGRDYHKVLRARLQKLSDRVAEAVGPFGHRVFTDSAPVLEAELARRSGQGWRGKHTLVLSREAGSMFFLGEIYVDMPLEPTEPVTHHCGSCQACIDVCPTQAIIAPYRLDARRCISYLTIEHAGPIPLELRPLMGNRIYGCDDCQLICPWNKFAQTSSLPDFDVRAGLVGQQLVHLFTWDEETFLRMTEGGPIRRIGHERWLRNIAVALGNALRTTRDPVVRAALAARADDPSPLVREHVAWALAQEN

SEQ ID NO: 74034 - protein, 348 aa, Acidovorax kalamii
  misc_feature (1)..(348): tr|A0A235ET91|A0A235ET91_9BURK Epoxyqueuosine reductase OS=Acidovorax kalamii OX=2004485 GN=queG PE=3 SV=1
MQEWARELGFSQIGVAGVDLSAAEPGLSAWLAQGFHGEMHYMAAHGMKRARPAELVPGTVSVITARMDYLPRDTAMDAPEGWQAAELSRLTRPQEGIVSVYARGRDYHKVLRARLQKLSDRIAEAIGPFGHRVFTDSAPVLEAELAARSGQGWRGKHTLVLNREAGSMFFLGEIYVDMALPESAPVTAHCGSCSACIDVCPTQAIIAPHRIDARRCISYLTIEHAGPIPLELRPLLGNRIYGCDDCQLICPWNKFAQVSRLPDFDERKGLSGQQLVHLFAWDEATFLRMTEGGPIRRIGHERWLRNVAVALGNALRATGDATLRTALQSRAQDESALVREHVAWALEI

SEQ ID NO: 74035 - protein, 371 aa, Acidovorax konjaci
  misc_feature (1)..(371): tr|A0A1I1RV20|A0A1I1RV20_9BURK Epoxyqueuosine reductase OS=Acidovorax konjaci OX=32040 GN=queG PE=3 SV=1
MQGWARELGFSQIGVAGVDLSSAEPGLMQWLAQGFHGDMQYMQAHGLKRARPAELVPGTVSVITARMDYLPQATLGRSLESGGTGTGLGMERGGWQAVEFARLDRPGEGIVSVYARGRDYHKVLRARLQKLADRIAAAVGPFGHRVFTDSAPVLEAELARRSGQGWRGKHTLVLNREAGSMFFLGEIYVDLPLAPSGPVTAHCGSCQACIDVCPTQAIVAPQRVDARRCISYLTIEHAGAIPEALRPLMGNRVYGCDDCQLACPWNKFAQASTVPDFDERPALSGRPLAEWFAWDEATFLRRTEGGPIRRIGHERWLRNVAVALGNALRATGDPALRAALAARAEDPSALVREHVAWALMQEPLHAAGSIE

SEQ ID NO: 74036 - protein, 345 aa, Acidovorax radicis
  misc_feature (1)..(345): tr|A0A561CEH6|A0A561CEH6_9BURK Epoxyqueuosine reductase OS=Acidovorax radicis OX=758826 GN=queG PE=3 SV=1
MQEWARELGFSQIGVAGVDLSAAEEGLMQWLAQGFHGEMHYMATHGTRRARPAELVPGTVSVITARMDYLPRGKAMEGWQEAELSRLARPGEGIVSVYARGRDYHKVLRARLQKLSDRIAEAVGPFGHRVFTDSAPVLEAELASRSGQGWRGKHTLVLNREAGSMFFLGEIYVDMQLPESAPVTAHCGSCSACIAICPTQAIIAPHRIDARRCISYLTIEHGGPIPLEFRVAMGNRIYGCDDCQLACPWNKFAQVSRLPDFDERNGLSGQQLVHLFAWDEATFLRMTEGGPIRRIGHERWLRNVAVALGNALRATGDEAVRAALQSRVADASPLVREHVAWALEG

SEQ ID NO: 74037 - protein, 359 aa, Acidovorax soli
  misc_feature (1)..(359): tr|A0A1H3WU18|A0A1H3WU18_9BURK Epoxyqueuosine reductase OS=Acidovorax soli OX=592050 GN=queG PE=3 SV=1
MWCNSQLVPQLRDWARELGFSQIGVAGVDLSASEPGLMQWLAQGFHGDMHYMAAHGLKRARPAELVPGTVSVITARMDYLPRVTPVQAPEGWQAIELARLSRPEEGIVSVYARGRDYHKVLRARLQKLSDRIAEAIGPFGHRVFTDSAPVLEAELASRSGQGWRGKHTLVLNREAGSMFFLGEIYVDMALPPSEPVSAHCGSCSACIDVCPTQAIIAPHRLDARRCISYLTIEHAGPIPVELRPLMGNRIYGCDDCQLICPWNKFAQVSRLPDFDERNGLAGQQLVHLFAWDEATFLRMTEGGPIRRIGHERWLRNVAVALGNALHATGDEALRAALQSRAEDASALVREHVAWALGLE

SEQ ID NO: 74038 - protein, 349 aa, Acidovorax sp.
  misc_feature (1)..(349): tr|A0A3D1MJ33|A0A3D1MJ33_9BURK Epoxyqueuosine reductase OS=Acidovorax sp. OX=1872122 GN=queG PE=3 SV=1
MQEWARELGFSQIGVAGVDLSAAEPGLEAWLAQGFHGDMHYMASHGLKRARPAELVPGTVSVITARMDYLPRDTAMDAPEGWQTAELSRLQRPQEGIVSVYARGRDYHKVLRARLQKLSDRIAEAIGPFGHRVFTDSAPVLEAELAARSGQGWRGKHTLVLNREAGSMFFLGEIYVDMALPESAPVTAHCGSCSACIDVCPTQAIIAPHRVDARRCISYLTIEHAGPIPVELRPLMGNRIYGCDDCQLICPWNKFAQVSRLPDFDERKGLAGQQLVHLFSWDEPTFLRMTEGGPIRRIGHERWLRNVAVALGNALRATGDEAVRAALQSRADDTSELVREHVVWALNIE

SEQ ID NO: 74039 - protein, 349 aa, Acidovorax sp.
  misc_feature (1)..(349): tr|A0A0N8VU75|A0A0N8VU75_9BURK Epoxyqueuosine reductase OS=Acidovorax sp. SD340 OX=1690268 GN=queG PE=3 SV=1
MQEWARELGFSQIGVAGVDLSAAEPGLEAWLAQGFHGDMHYMASHGMKRARPAELVPGTVSVITARMDYLPRDTAMDAPEGWQTAELSRLQRPQEGIVSVYARGRDYHKVLRARLQKLSDRIAEAIGPFGHRVFTDSAPVLEAELAARSGQGWRGKHTLVLSREAGSMFFLGEIYVDMALPESAPVTAHCGSCSACIDVCPTQAIIAPHRVDARRCISYLTIEHAGLIPVELRPLMGNRIYGCDDCQLICPWNKFAQVSRLPDFDERKGLAGQQLVHLFAWDEPTFLRMTEGGPIRRIGHERWLRNVAVALGNALRATGDEAVRAALQSRADDTSELVREHVVWALNFE

SEQ ID NO: 74040 - protein, 362 aa, Acidovorax temperans
  misc_feature (1)..(362): tr|A0A543LKB8|A0A543LKB8_9BURK Epoxyqueuosine reductase OS=Acidovorax temperans OX=80878 GN=queG PE=3 SV=1
MWCNSQLVPQIQEWARELGFSQIGVAGVDLSASEPGLMQWLAQGFHGDMHYMAAHGLKRARPAELVPGTVSVITARMDYLPRDRDSAPAVAQAGGWQAMELQRLQRPAEGIVSMYARGRDYHKVLRARLQKLSDRIAEAVGPFGHRVFTDSAPVLEAELAARSGQGWRGKHTLVLNREAGSTFFLGEIYVDMALPATEPVTAHCGSCSACIDACPTQAIVAPHRVDARRCISYLTIEYAGPIPLELRPLMGNRIYGCDDCQLVCPWNKFAQVSRLPDFDERKGLSGQQLVHLFAWDEPTFLRMTEGGPIRRIGHERWLRNVAVALGNALRQADSAELRSALQSRAHEPSELVREHVAWALAV

SEQ ID NO: 74041 - protein, 352 aa, Acidovorax temperans
  misc_feature (1)..(352): tr|A0A0D7K4V3|A0A0D7K4V3_9BURK Epoxyqueuosine reductase OS=Acidovorax temperans OX=80878 GN=queG PE=3 SV=1
MQEWARELGFSQIGVAGVDLSASEPGLMQWLAQGFHGDMHYMAAHGLKRARPAELVPGTVSVITARMDYLPRDRDSAPAVAHAGGWQAMELQRLQRPAEGIVSMYARGRDYHKVLRARLQKLSDRIAEAVGPFGHRVFTDSAPVLEAELAARSGQGWRGKHTLVLNREAGSTFFLGEIYVDMALPATEPVTAHCGSCSACIDACPTQAIVAPHRVDARRCISYLTIEYAGPIPLELRTLMGNRIYGCDDCQLVCPWNKFAQVSRLSDFDERKGLSGQQLVHLFAWDEPTFLRMTEGGPIRRIGHERWLRNVAVALGNALRQADSAELRSALQSRAHDPSELVREHVAWALAV

SEQ ID NO: 74042 - protein, 372 aa, Acidovorax valerianellae
  misc_feature (1)..(372): tr|A0A1G6WY22|A0A1G6WY22_9BURK Epoxyqueuosine reductase OS=Acidovorax valerianellae OX=187868 GN=queG PE=3 SV= 1
MQGWARELGFSQIGVAGVDLSSAEPGLMQWLAQGFHGEMQYMQAHGLRRARPAELVPGTVSVITARMDYLPRDTPVQGAAAAGKSAGPGWQAIEFARLERPSEGIVSVYARGRDYHKVLRQRLQKLADRIAEAVGPIGHRVFTDSAPVLEAELASRSGQGWRGKHTLVLNREAGSMFFLGEIYVDMPLDPSEPVTAHCGSCQACLDICPTQAIVAPHRVDARRCISYLTIEHAGPIPVELRPLMGNRIYGCDDCQLVCPWNKFAQASRLPDFDARPGLAGQQLAHLFSWDEPTFLRLTEGGPIRRIGHERWLRNVAVALGNALRATGDPGVQAALQSRASDPSALVREHVEWGLSQKGLQRNKDGGSALSIK

SEQ ID NO: 74043 - protein, 354 aa, Acidovorax wautersii
  misc_feature (1)..(354): tr|A0A1I2EEI7|A0A1I2EEI7_9BURK Epoxyqueuosine reductase OS=Acidovorax wautersii OX=1177982 GN=queG PE=3 SV=1
MQGWARELGFSQIGVAGVDLSSAEAGLMQWLGQGFHGDMHYMQSHGLKRARPAELVPGTVSVITARMDYLPAATFPAAGGASGWQAIEFARLERPAEGIVSVYARGRDYHKVLRSRLQKLADRIAQAVGPIGHRVFTDSAPVLEAELASRSGQGWRGKHTLVLNREAGSMFFLGEIYVDMALPASAPVTAHCGSCSACIDVCPTQAIVAPHRVDARRCISYLTIEHAGPIPEPLRPLMGNRIYGCDDCQLACPWNKFAQASVLPDFDARPGLAGQQLVHLFGWDEPTFLRLTEGGPIRRIGHERWLRNVAVALGNALRATGDEALRAALAARADDPSPLVREHVAWALAQRPDS

SEQ ID NO: 74044 - protein, 366 aa, Acinetobacter albensis
  misc_feature (1)..(366): tr|A0A1C4GTC4|A0A1C4GTC4_9GAMM Epoxyqueuosine reductase OS=Acinetobacter albensis OX=1673609 GN=queG PE=3 SV=1
MVSSTLSQKIHLDQDDSEALKKWIKAQALELGFSDCVIAKPDAQAELERFKEYLKRGYHGDMKFLEENLEKRADPTLLIPGTKSIICVRMNYLVETPKPRYIPDEPNAAIIARYARGRDYHKVMRGRLKTLAAKIREKVGDFEARPFADSAPVFEKSLAENAGMGWTGKHTLLIHKSSGSFFVLGELFTSLDLPFDGPTTKHCGSCTACIDICPTQAIVEPYMLDARKCIAYLTIEYKGIIAEELRRGIGNRVFGCDDCQLICPWNSFAKKATIEDFNPRHGLDQVTLLDLWQWDEQTFLSNTEGSPLRRTGYQSFMRNIAIGLGNAPFSHQIIEILKQHYDLHDEIVQVHIDWAIQEQMIKSGVV

SEQ ID NO: 74045 - protein, 362 aa, Acinetobacter baumannii
  misc_feature (1)..(362): tr|A0A246A1Z1|A0A246A1Z1_ACIBA Epoxyqueuosine reductase OS=Acinetobacter baumannii OX=470 GN=queG PE=3 SV=1
MTSSNTSRIAVQQIDPHELKAWIKAQALDLGFADCVIAKPDAQEQMPRFLEYLERGYHADMTYLEENLEKRADPTLLVPGTKSIICVRMNYLVESPKPRYVPFEPNSAIIARYARGRDYHKVMRGRLKTLATRIREKVGDFESRPFADSAPIFEKSLAESAGMGWTGKHTLLIHKKSGSFFVLGELFTSLDLPFDEPATSHCGSCRACIDICPTQAIVEPYMLDARRCIAYLTIEYKGIIAEELRAGIGNRIFGCDDCQLICPWNSFAKTASIPDFNPRHGLDNISLLDIWQWDEATFLANTEGSPIRRTGYQSFKRNIAIGLGNAPYSKEIVDQLNKGKSLHDEIVNVHIDWAIEQQLNQL

SEQ ID NO: 74046 - protein, 362 aa, Acinetobacter baumannii
  misc_feature (1)..(362): tr|A0A385EVF9|A0A385EVF9_ACIBA Epoxyqueuosine reductase OS=Acinetobacter baumannii WM99c OX=945555 GN=queG PE= 3 SV=1
MTSSNTSRIAVQQIDPHELKAWIKAQALDLGFADCVIAKPDAQEQMPRFLEYLERGYHADMTYLEENLEKRADPTLLVPGTKSIICVRMNYLVESPKPRYVPFEPNSAIIARYARGRDYHKVMRGRLKTLATRIREKVGDFESRPFADSAPIFEKSLAESAGMGWTGKHTLLIHKKSGSFFVLGELFTSLDLPFDEPATSHCGSCSACIDICPTQAIVEPYMLDARRCIAYLTIEYKGIIAEELRAGIGNRIFGCDDCQLICPWNSFAKTASIPDFNPRHGLDNISLLDIWQWDEATFLANTEGSPIRRTGYQSFKRNIAIGLGNAPYSKEIVDQLNKGKSLHDEIVNVHIDWAIEQQLNQL

SEQ ID NO: 74047 - protein, 376 aa, Acinetobacter baylyi
  misc_feature (1)..(376): tr|Q6FAQ0|Q6FAQ0_ACIAD Epoxyqueuosine reductase OS=Acin etobacter baylyi (strain ATCC 33305 / BD413 / ADP1) OX= 62977 GN=queG PE=3 SV=1
MIPSIIYSFMSFYQSKPHDNIPVQQYDSLELKQWIKEQALSLGFSDCVIAKPDAQDQMPRFQEYLKRGYHADMHYLEENLDKRANPKLLVPGTQSIICVRMNYLVESPKPRYIPEQPNSAIIARYARGRDYHKVMRGRLKTLASKIREKVGEFESRPFADSAPIFEKSLAESAGMGWTGKHTLLIHKKSGSFFVLGELFTSLELPFDQPATAHCGSCSACIDICPTQAIVEPYMLDARKCIAYLTIEYKGIIPEELREGIGNRIFGCDDCQLICPWNSFAKIATIPDFNPRHGLDNISLLEIWRWDEATFLANTEGSPIRRTGFQSFKRNIAIGLGNAPYSIDIIEALEKARDQHDEIVQVHIDWAIQQQLNKQLL

SEQ ID NO: 74048 - protein, 218 aa, Acinetobacter baylyi
  misc_feature (1)..(218): sp|Q6FAK7|QUEH_ACIAD Epoxyqueuosine reductase QueH OS=A cinetobacter baylyi (strain ATCC 33305 / BD413 / ADP1) OX=62977 GN=queH PE=3 SV=1
MSKPRIKLKLPDNADKLLLHSCCAPCSGEVMETLLYSGIDYSIFFYNPNIHPVKEYLIRKEENIRFAEKHNIPFIDCDYDTDNWFERAKGMENEPEKGIRCTMCFDMRFERAALYAYENGFKVFSSSLGISRWKNMEQINDCGIRAASHYPDIHYWDYNWRKNGGATRMLEISKREEFYQQEYCGCVYSLRDTNRWRMSQGRDRIQLGVKFYSASDPD

SEQ ID NO: 74049 - protein, 370 aa, Acinetobacter beijerinckii
  misc_feature (1)..(370): tr|N9E2M3|N9E2M3_9GAMM Epoxyqueuosine reductase OS=Acin etobacter beijerinckii ANC 3835 OX=1217649 GN=queG PE=3 SV=1
MAFTPSSQKIEIQQLDPQQLKTWIKAQAFDLGFSDCVIAKPDAQDQMPRFKEYLQRGYHADMHYLEENLEKRADPTLLVPGTKSIICVRMNYLVASPKPRYVPFEPNSAIIARYARGRDYHKVMRGRLKILANRIKEKVGDFESRPFADSAPIFEKSLAESAGMGWTGKHTLLIHKKSGSFFVLGELFTSLDLPFDQPATAHCGSCTACIDICPTQAIVEPYMLDARKCIAYLTIEYKGIIPEELRAGIGNRIFGCDDCQLICPWNGFAKTATIPDFNPRHGLDNILLLDIWQWDEATFLANTEGSPIRRTGYQSFKRNIAIGLGNAPYSDEIIAKLQEAKTWHDEIVNVHIDWAIQQQMQQSNVHQIEK

SEQ ID NO: 74050 - protein, 370 aa, Acinetobacter beijerinckii
  misc_feature (1)..(370): tr|N9EBD4|N9EBD4_9GAMM Epoxyqueuosine reductase OS=Acin etobacter beijerinckii CIP 110307 OX=1217648 GN=queG PE =3 SV=1
MAFTPSSQKIEIQQLDPQQLKTWIKAQALDLGFSDCVIAKPDAQDQMPRFKEYLERGYHADMHYLEENLEKRADPTLLVPGTKSIICVRMNYLVASPKPRYVPFEPNSAIIARYARGRDYHKVMRGRLKTLANRIKEKVGDFESRPFADSAPIFEKSLAESAGMGWTGKHTLLIHKKSGSFFVLGELFTSLDLPFDQPATAHCGSCTACIDICPTQAIVEPYMLDARKCIAYLTIEYKGIIPEELRAGIGNRIFGCDDCQLICPWNGFAKTATISDFDPRHGLDNILLLDIWQWDEATFLANTEGSPIRRTGYQSFKRNIAIGLGNAPYSDKIIAKLQEAKTWHDEIVNVHIDWAIQQQMHQSNVHQIEK

SEQ ID NO: 74051 - protein, 366 aa, Acinetobacter bereziniae
  misc_feature (1)..(366): tr|A0A0A8TUB1|A0A0A8TUB1_ACIBZ Epoxyqueuosine reductase OS=Acinetobacter bereziniae OX=106648 GN=queG PE=3 SV= 1
MSATSTTSSISLQQLDPQELKAWIKQQALQLGFADCVIARPDAQAELPRFKEYLKRGYHGDMKFLEENLEKRADPTLLVPGTKSIICVRMNYLVETPKPRYVPDEPNLAIIARYARGRDYHKIMRGRLKTLATIIKDKVGEFESRPFADSAPVFEKSLAENAGMGWTGKHTLLIHKKSGSFFVLGELFTSLDLPFDEPATSHCGSCTACIDICPTQAIVEPYMLDARKCIAYLTIEYKGIIPEDLRRGIGNRVFGCDDCQLICPWNSFAKTASITDFNPRHGLDQMSLLDLWHWDEQTFLSCTEGSPLRRTGYQSFMRNIAIGLGNAPYSSEIIQALTQHRTSHDEVVQVHIDWAIAEQLNKKSSL

SEQ ID NO: 74052 - protein, 366 aa, Acinetobacter bereziniae
  misc_feature (1)..(366): tr|N8X8M9|N8X8M9_ACIBZ Epoxyqueuosine reductase OS=Acin etobacter bereziniae NIPH 3 OX=1217651 GN=queG PE=3 SV= 1
MSATSTTSSISLQQLDPQELKAWIKQQALQLGFADCVIARPDAQAELPRFKEYLKRGYHGDMKFLEENLEKRADPTLLVPGTKSIICVRMNYLVETPKPRYVPDEPNLAIIARYARGRDYHKIMRGRLKTLTTIIKNKVGEFESRPFADSAPVFEKSLAENAGMGWTGKHTLLIHKKSGSFFVLGELFTSLDLPFDEPATSHCGSCTACIDICPTQAIVEPYMLDARKCIAYLTIEYKGIIPEDLRRGIGNRVFGCDDCQLICPWNSFAKTASITDFNPRHGLDQMSLLDLWHWDEQTFLNCTEGSPLRRTGYQSFMRNIAIGLGNAPYSSEIIQALTQHRTSHDEVVQVHIDWAIAEQLNKKSSL

SEQ ID NO: 74053 - protein, 364 aa, Acinetobacter bohemicus
  misc_feature (1)..(364): tr|A0A1I6NQP1|A0A1I6NQP1_9GAMM Epoxyqueuosine reductase OS=Acinetobacter bohemicus OX=1435036 GN=queG PE=3 SV= 1
MASSTPSQKIPLDQNDPEALKAWIKAQALELGFSDCVIAKPDAQEELPRFQEYLKRGYHGDMKFLEENLEKRADPTLLVPGTKSIICVRMNYLVETPKPRYVPDEPNLAIIARYARGRDYHKVMRGRLKTLASKIREKVGNFESRPFADSAPIFEKSLAENAGMGWTGKHTLLIHKKSGSFFVLGELFTSLDLPFDSPTTKHCGSCTACIDICPTQAIVEPYMLDARKCIAYLTIEYQGIIPEELRQGIGNRVFGCDDCQLICPWNSFAKKATIEDFNPRHDLDQSSLLDLWHWDETTFLTNTEGSPLRRTGYQSFMRNIAIGLGNAPFSDEIIVTLQQTREQYDEIVQVHIDWAIQEQLNKFC

SEQ ID NO: 74054 - protein, 364 aa, Acinetobacter bohemicus
  misc_feature (1)..(364): tr|N8P0R9|N8P0R9_9GAMM Epoxyqueuosine reductase OS=Acin etobacter bohemicus ANC 3994 OX=1217715 GN=queG PE=3 SV =1
MASSTPSQKIPLDQNDPEALKAWIKAQALELGFSDCVIAKPDAQEELPRFKEYLKRGYHGDMKFLEENLEKRADPTLLVPGTKSIICVRMNYLVETPKPRYVPDEPNLAIIARYARGRDYHKVMRGRLKTLASKIREKVGDFESRPFADSAPIFEKSLAESAGMGWTGKHTLLIHKKSGSFFVLGELFTSLDLPFDSPTTKHCGSCTACIDICPTQAIVEPYMLDARKCIAYLTIEYQGIIPEELRRGIGNRVFGCDDCQLICPWNSFAKKATIEDFNPRHDLDQSSLLDLWHWDETTFLANTEGSPLRRTGYQSFMRNIAIGLGNAPFSDEIIATLQQTREQYDEIVQVHIDWAIQEQLTKSC

SEQ ID NO: 74055 - protein, 363 aa, Acinetobacter bouvetii
  misc_feature (1)..(363): tr|A0A4Q7AQX4|A0A4Q7AQX4_9GAMM Epoxyqueuosine reductase OS=Acinetobacter bouvetii OX=202951 GN=queG PE=3 SV=1
MATSAQSKIQLNQDDSESLKTWIKAQALALGFSDCVIAKPDAQEELPRFKEYLKRGYHGDMKFLEENLEKRADPTLLIPGTKSIICVRMDYLVETPKPRYVPHQPNAAIIARYARGRDYHKVMRGRLKTLASIIREKVGDFEARPFADSAPVFEKSLAENAGMGWTGKHTLLIHKKSGSFFVLGELFTSLDLPFDSPATKHCGSCTACIDICPTQAIVEPYMLDARKCIAYLTIEYKGIIPEELRRGIGNRVFGCDDCQLICPWNSFAKKTAIEDFNPRHGLDHLNLLDLWQWDEETFLSCTEGSPIRRTGYQSFMRNIAIGLGNADYSDEILCALQQKRVLHDEIVQVHIDWAIAEQQAKAL

SEQ ID NO: 74056 - protein, 362 aa, Acinetobacter bouvetii
  misc_feature (1)..(362): tr|N9C9X9|N9C9X9_9GAMM Epoxyqueuosine reductase OS=Acin etobacter bouvetii DSM 14964 = CIP 107468 OX=1120925 GN =queG PE=3 SV=1
MATSAQSKIQLNQDDSESLKTWIKAQALALGFSDCVIAKPDAQEELPRFKEYLKRGYHGDMKFLEENLEKRADPTLLIPGTKSIICVRMDYLVETPKPRYVPHQPNAAIIARYARGRDYHKVMRGRLKTLASIIREKVGDFEARPFADSAPVFEKSLAENAGMGWTGKHTLLIHKKSGSFFVLGELFTSLDLPFDSPATKHCGSCTACIDICPTQAIVEPYMLDARKCIAYLTIEYKGIIPEELRRGIGNRVFGCDDCQLICPWNSFAKKTTIEDFNPRHGLDHLNLLDLWQWDEETFLSCTEGSPIRRTGYQSFMRNIAIGLGNADYSDEILCALQQKRVLHDEIVQVHIDWAIAEQLAKA

SEQ ID NO: 74057 - protein, 366 aa, Acinetobacter brisouii
  misc_feature (1)..(366): tr|V2UPS2|V2UPS2_9GAMM Epoxyqueuosine reductase OS=Acin etobacter brisouii CIP 110357 OX=1341683 GN=queG PE=3 S V=1
MSSTIPLQQFDPQELKAWIKAEALALGFADCVIAKPTRQDKEMPRFLEYLERGYHGDMHYLNDNLDKRADPTLLVPGTQSIICVRMNYLVETPKPRYVPFAPNSAIIARYARGRDYHKVMRGRLKTLTQKIRDRVGDFEARPFADSAPIFEKAIHESAGMGWTGKHTLLIQKKSGSFFVLGELFTSLDLPADPPTTAHCGSCSACIDICPTQAIVEPYMLDARRCIAYLTIEYKGIIPEEFREGIGNRIFGCDDCQLICPWNSFAKITPIEDFHPRHGLDQASLLDLWAWDETTFLQCTEGSPIRRTGFQSFKRNVAIGLGNAPYHSEIIKVLEQGKTLHDEIVNVHIDWAIQQQLKKATSTHFLK

SEQ ID NO: 74058 - protein, 356 aa, Acinetobacter calcoaceticus
  misc_feature (1)..(356): tr|A0A4R1XYM9|A0A4R1XYM9_ACICA Epoxyqueuosine reductase OS=Acinetobacter calcoaceticus OX=471 GN=queG PE=3 SV= 1
MHNLDPAQLKAWIKQQALDLGFADCVIARPDAQAELARFKEYLKRGYHGDMKYLEENLEKRADPTLLVPGTKSIICVRMDYLVESPRPRHVPDAPNQAIIARYARGRDYHKTLRGRLKTLASQIKAKVGEFESRPFADSAPIFEKSLAENAGMGWTGKHTLLIQRQSGSFFVLGELFSSLELPFDSPATAHCGSCSACIDICPTQAIVEPYMLDARKCIAYLTIEYKGIIPEELRQGIGNRVFGCDDCQLICPWNRYAKKTSIEDFHPRHGLDQVSLLDLWHWDESTFLSNTEGSPIRRTGFQSFMRNIAIGLGNAPFSARILDALRQARDGHDEVVQVHIDWAIQQQQAKAAILS

SEQ ID NO: 74059 - protein, 364 aa, Acinetobacter calcoaceticus
  misc_feature (1)..(364): tr|D0S3C8|D0S3C8_ACICA Epoxyqueuosine reductase OS=Acin etobacter calcoaceticus RUH2202 OX=575585 GN=queG PE=3 SV=1
MTSSDTSRIALQQLDLHELKAWIKAQALDLGFADCVIAKPDAQEQMPRFLEYLERGYHADMTYLEENLEKRADPTLLVPGTKSIICVRMNYLVESPKPRYVPFEPNSAIIARYARGRDYHKVMRGRLKTLATRIREKVGDFESRPFADSAPIFEKSLAESAGMGWTGKHTLLIHKKSGSFFVLGELFTSLDLPFDGPTTSHCGSCSACIDICPTQAIVEPYMLDARRCIAYLTIEYKGIIAEELRAGIGNRVFGCDDCQLICPWNSFAKTASISDFNPRNGLDNISLLDIWQWDEATFLANTEGSPIRRTGYQSFKRNIAIGLGNAPYSTEIVAQLQNGKILHDDIVNVHIDWAIEQQLNQLQS

SEQ ID NO: 74060 - protein, 362 aa, Acinetobacter calcoaceticus; identical to SEQ ID NO: 74046
  misc_feature (1)..(362): tr|A0A2S4SZ93|A0A2S4SZ93_9GAMM Epoxyqueuosine reductase OS=Acinetobacter calcoaceticus/baumannii complex sp. A BNIH27 OX=2080673 GN=queG PE=3 SV=1

SEQ ID NO: 74061 - protein, 362 aa, Acinetobacter celticus
  misc_feature (1)..(362): tr|A0A1C3CVZ9|A0A1C3CVZ9_9GAMM Epoxyqueuosine reductase OS=Acinetobacter celticus OX=1891224 GN=queG PE=3 SV=1
MVTPVQAKIQLNQNDPVALKAWIKAEALALGFSDCVIAKPDAQAELPRFKEYLKRGYHGDMKFLEENLEKRADPTLLIPGTKSIICVRMDYLVETPKPRYVPLEPNAAIIARYARGRDYHKTMRGRLKTLSAKIREKVGDFEARPFADSAPVFEKSLAENAGMGWTGKHTLLIHKKSGSFFVLGELFTSLELPFDTPTTKHCGSCTACIDICPTQAIVEPYMLDARKCIAYLTIEYKGIIAEELRRGIGNRVFGCDDCQLICPWNSFAKKTSIEDFHPRHGLDQVSLLDLWQWDEATFLSCTEGSPIRRTGYQSFMRNIAIGLGNADFSPAIIQALEQTRELHDEIVQVHIDWAIAEQYSKN

SEQ ID NO: 74062 - protein, 374 aa, Acinetobacter colistiniresistens
  misc_feature (1)..(374): tr|A0A558FHU3|A0A558FHU3_9GAMM Epoxyqueuosine reductase OS=Acinetobacter colistiniresistens OX=280145 GN=queG PE=3 SV=1
MASSTSFQTQSQKMPDKIELQQLDSQALKDWIKAQALDLGFADCVIAKPDAQDQMPRFKEYLERGYHADMHYLEENLEKRADPTLLVPGTKSIICVRMNYLVASPKPRYVPFEPNSAIIARYARGRDYHKVMRGRLKTLATRIKEKVGDFESRPFADSAPIFEKSLAESAGMGWTGKHTLLIHKKSGSFFVLGELFTSLDLPFDQPATAHCGSCTACIDICPTQAIVEPYMLDARKCIAYLTIEYKGIIPEELRSGIGNRIFGCDDCQLICPWNSFAKKASIPDFDPRHNLDDISLLEIWQWDEATFLSNTEGSPIRRTGYQSFKRNIAIGLGNAPYSAEIVTQLQDAKTRHDEIVNVHIDWAIQQQLQQIKVH

SEQ ID NO: 74063 - protein, 361 aa, Acinetobacter colistiniresistens
  misc_feature (1)..(361): tr|N9R872|N9R872_9GAMM Epoxyqueuosine reductase OS=Acin etobacter colistiniresistens OX=280145 GN=queG PE=3 SV= 1
MPDKIELQQLDSQALKDWIKAQALDLGFADCVIAKPDAQDQMPRFKEYLERGYHADMHYLEENLEKRADPTLLVPGTKSIICVRMNYLVASPKPRYVPFEPNSAIIARYARGRDYHKVMRGRLKTLATRIKEKVGDFESRPFADSAPIFEKSLAESAGMGWTGKHTLLIHKKSGSFFVLGELFTSLDLPFDQPATAHCGSCTACIDICPTQAIVEPYMLDARKCIAYLTIEYKGIIPEELRSGIGNRIFGCDDCQLICPWNSFAKKASIPDFDPRHNLDNISLLEIWQWDEATFLANTEGSPIRRTGYQSFKRNIAIGLGNAPYSAEIVTQLQDAKTRHDEIVNVHIDWAIQQQLQQIKVH

SEQ ID NO: 74064 - protein, 362 aa, Acinetobacter cumulans
  misc_feature (1)..(362): tr|A0A3A8FY23|A0A3A8FY23_9GAMM Epoxyqueuosine reductase OS=Acinetobacter cumulans OX=2136182 GN=queG PE=3 SV=1
MATSAQSKIQLNQDDPATLKAWIKAQALALGFSDCVIAKPDAQAESPRFKEYLKRGYHGDMKFLEENLEKRADPTLLIPGTKSIICVRMDYLVETPKPRYVPHEPNAAIIARYARGRDYHKTMRGRLKTLATVIREKVGDFESRPFADSAPVFEKSLAENAGMGWTGKHTLLIHKKSGSFFVLGELFTSLDLPFDSPAEKHCGSCTACIDICPTQAIVEPYMLDARKCIAYLTIEYKGIIPEELRRGIGNRVFGCDDCQLICPWNSFAKKTSIEDFNPRHGLDQVSLLDLWQWDETTFLNCTEGSPIRRTGYQSFMRNIAIGLGNADYSVEILHALQQNRALHDEIVQVHIDWAIAEQQSKS

SEQ ID NO: 74065 - protein, 362 aa, Acinetobacter cumulans
  misc_feature (1)..(362): tr|A0A498D8Z4|A0A498D8Z4_9GAMM Epoxyqueuosine reductase OS=Acinetobacter cumulans OX=2136182 GN=queG PE=3 SV=1
MATSAQSKIQLNQDDPTTLKAWIKAQALALGFSDCVIAKPDAQAELPRFKEYLKRGYHGDMKFLEENLEKRADPTLLIPGTKSIICVRMDYLVETPKPRYVPHEPNAAIIARYARGRDYHKTMRGRLKTLATVIREKVGDFESRPFADSAPVFEKSLAENAGMGWTGKHTLLIHKKSGSFFVLGELFTSLDLPFDSPAEKHCGSCSACIDICPTQAIVEPYMLDARKCIAYLTIEYKGIIPEELRRGIGNRVFGCDDCQLICPWNSFAKKTSIEDFNPRHGLDQVSLLDLWQWDETTFLNCTEGSPIRRTGYQSFMRNIAIGLGNADYSVEILHALQQNRALHDEIVQVHIDWAIAEQQSKS

SEQ ID NO: 74066 - protein, 364 aa, Acinetobacter defluvii
  misc_feature (1)..(364): tr|A0A2S2FHW1|A0A2S2FHW1_9GAMM Epoxyqueuosine reductase OS=Acinetobacter defluvii OX=1871111 GN=queG PE=3 SV=1
MSASSSATHIALQQIDPEKLKAWIKEQALQLGFADCVIAQPDAQAELTRFKEYLKRGYHGDMKFLEENLEKRADPTLLVPNTKSIICVRMNYLVETPKPRYVPDHPNSAIIARYARGRDYHKVMRGRLKTLANRIKEKIGDFESRPFADSAPIFEKSLAENAGMGWTGKHTLLIHKKSGSFFVLGELFTSLDLPFDQPTTKHCGSCTACIDICPTQAIVEPYMLDARKCIAYLTIEYKGIIPEELRRGIGNRVFGCDDCQLICPWNSFAQKTEVEDFYPRHGLERVTLLDLWHWDEATFLSCTEGSPIRRTGYQSFMRNIAIGLGNAPFSTEILLALQQTRSRHDEIVQVHIDWAIAEQHNKAK

SEQ ID NO: 74067 - protein, 371 aa, Acinetobacter equi
  misc_feature (1)..(371): tr|A0A0N9VFW7|A0A0N9VFW7_9GAMM Epoxyqueuosine reductase OS=Acinetobacter equi OX=1324350 GN=queG PE=3 SV=1
MNLSPSLHKIQVDQYDPEEVKVWIKNQALALGFSDCVIARPNAQEELLRLKEYLERGYHADMDYLAENLDKRADPTLLVPNTKSIICVRMNYLVTTPKPRTIPDLPNSGIIARYARGRDYHKVMRGRLKILATKIKEKYGDFESRPFADSAPIFEKSLAENAGMGWTGKHTLLIHKKSGSFFVLGELFTSLELPFDSPTTKHCGSCTACLDICPTQAIVEPYMLDARKCIAYLTIEYKGIIPEELRKPIGNRIFGCDDCQLICPWNSFAQKTEIEDFYPRHDLDRLTLLELWQWNEETFLKNTEGSPIRRTGYQSFKRNIAIGLGNAPFSPEILTELEVQRNKHDDIVQVHIDWAIQQQHENSLKFTNKNV

SEQ ID NO: 74068 - protein, 364 aa, Acinetobacter gandensis
  misc_feature (1)..(364): tr|A0A1A7RE62|A0A1A7RE62_9GAMM Epoxyqueuosine reductase OS=Acinetobacter gandensis OX=1443941 GN=queG PE=3 SV= 1
MAASTPAQKIPVDQYDPETLKAWIKAQALELGFSDCVIAKPDAQEELPRFKEYLKRGYHGDMKFLEENLEKRANPTLLVPGTRSIICVRMDYLVETPKPRYVPDEPNAAIIARYARGRDYHKVMRGRLKTLSNIIREKIGDFESRPFADSAPVFEKSLAENAGMGWTGKHTLLIHKKSGSFFVLGELFTSLDLPFDTPASKHCGSCAACIDICPTQAIVEPYMLDARKCIAYLTIEYKGIIPEELRRGIGNRVFGCDDCQLICPWNSFAHKTKIEDFYPRHGLNQVSLLDLWQWDEATFLSYTEGSPIRRTGYQSFMRNIAIGLGNAPYSLNIVQSLKNTREKHDAIVQVHIDWALAEQNSKMV

SEQ ID NO: 74069 - protein, 366 aa, Acinetobacter genomosp.
  misc_feature (1)..(366): tr|A0A1V2V484|A0A1V2V484_9GAMM Epoxyqueuosine reductase OS=Acinetobacter genomosp. 33YU OX=1675530 GN=queG PE= 3 SV=1
MTSSDTSRIAVQQIDPYELKAWIKAQALDLGFADCVIAKPDAQEQMPRFLEYLERGYHADMSYLEENLEKRADPTLLVPGTKSIICVRMNYLVESPKPRYVPFEPNSAIIARYARGRDYHKVMRGRLKTLATRIREKVGDFESRPFADSAPIFEKSLAESAGMGWTGKHTLLIHKKSGSFFVLGELFTSLDLPFDEPATAHCGSCSACIDICPTQAIVEPYMLDARRCIAYLTIEYKGIIAEELRSGIGNRIFGCDDCQLICPWNSFAKKVSITDFNPRHGLDNISLLDIWEWDEATFLANTEGSPIRRTGYQSFKRNIAIGLGNAPYSKEIVDQLHNGKNLHDEIVNVHIDWAIEQQLNQLELSN

SEQ ID NO: 74070 - protein, 366 aa, Acinetobacter genomosp.
  misc_feature (1)..(366): tr|A0A1V2V3L9|A0A1V2V3L9_9GAMM Epoxyqueuosine reductase OS=Acinetobacter genomosp. 33YU OX=1675530 GN=queG PE= 3 SV=1
MTSSDTSRIAVQQIDPYELKAWIKAQALDLGFADCVIAKPDAQEQMPRFLEYLERGYHADMTYLEENLEKRADPTLLVPGTKSIICVRMNYLVESPKPRYVPFEPNSAIIARYARGRDYHKVMRGRLKTLATRIREKVGDFESRPFADSAPIFEKSLAESAGMGWTGKHTLLIHKKSGSFFVLGELFTSLDLPFDEPATAHCGSCSACIDICPTQAIVEPYMLDARRCIAYLTIEYKGIIAEELRTGIGNRIFGCDDCQLICPWNSFAKKASITDFNPRHGLDNISLLDIWQWDEATFLANTEGSPIRRTGYQSFKRNIAIGMGNAPYSEEIVDQLHKGKNLHDEIVNVHIDWAIEQQLNQLQRSN

SEQ ID NO: 74071 - protein, 366 aa, Acinetobacter gerneri
  misc_feature (1)..(366): tr|N8ZMY6|N8ZMY6_9GAMM Epoxyqueuosine reductase OS=Acin etobacter gerneri DSM 14967 = CIP 107464 OX=1120926 GN= queG PE=3 SV=1
MASSSSKKLISELIDPEALKSWIKAEALALGFADCVIAKPDAQAELPRFKEYIKRGYHGDMKFLEENLEKRADPTLLVPGTKSVICVRMNYLVEKPEPRFVPDEPNSAIIARYARGRDYHKIMRGRLKTLATKIREKVGEFESRPFADSAPVFEKSLAENAGMGWTGKHTLLIHKKSGSFFVLGELFTSLELPFDQAATKHCGSCSACIDICPTKAIVEPYMLDARKCIAYLTIEYKGIIPEDLRRGIGNRVFGCDDCQLICPWNRFAKKASIEDFNPRHGLDQVSLLDLWKWDEETFLSCTEGSPIRRTGFQSFKRNIAIGLGNAPFSQEIVQALEQDFPAHDDIVQVHVDWALQEQQLKLKQTL

SEQ ID NO: 74072 - protein, 369 aa, Acinetobacter guillouiae
  misc_feature (1)..(369): tr|A0A077KZJ9|A0A077KZJ9_ACIGI Epoxyqueuosine reductase OS=Acinetobacter guillouiae OX=106649 GN=queG PE=3 SV= 1
MSATLTSQSIPLQQLDLQELKSWIKQQALQLGFADCVIARPDAQAELPRFKEYLKRGYHGDMKFLEENLEKRADPTLLVPGTKSIICVRMNYLVETPKPRYVPDEPNAAIIARYARGRDYHKIMRGRLKTLATLIKEKVGPFESRPFADSAPVFEKSLAESAGMGWTGKHTLLIHKKSGSFFVLGELFTSLDLPFDEPATHHCGSCSACIDICPTQAIVEPYMLDARRCIAYLTIEYKGIIPEELRRGIGNRVFGCDDCQLICPWNSFAKKASIEDFNPRHGLDDINLLDLWQWDEQTFLNCTEGSPIRRTGFQSFMRNIAIGLGNAPYSAQIIAALTQNRALHDEVVQVHIDWAITEQNAKQHQISAH

SEQ ID NO: 74073 - protein, 369 aa, Acinetobacter guillouiae
  misc_feature (1)..(369): tr|N8WUB3|N8WUB3_ACIGI Epoxyqueuosine reductase OS=Acin etobacter guillouiae NIPH 991 OX=1217656 GN=queG PE=3 S V=1
MSATLTSQSIPLQQLDLQELKSWIKQQALQLGFADCVIARPDAQAELPRFKEYLKRGYHGDMKFLEENLEKRADPTLLVPGTKSIICVRMNYLVETPKPRYVPDEPNSAIIARYARGRDYHKIMRGRLKTLATLIKEKVGPFESRPFADSAPVFEKSLAESAGMGWTGKHTLLIHKKSGSFFVLGELFTSLDLPFDEPATHHCGSCSACIDICPTQAIVEPYMLDARRCIAYLTIEYKGIIPEELRRGIGNRVFGCDDCQLICPWNSFAKKASIEDFNPRHGLDDINLLDLWQWDEQTFLNCTEGSPIRRTGFQSFMRNIAIGLGNAPYSAQIIAALTQNRALHDEVVQVHIDWAITEQNAKQHQISAH

SEQ ID NO: 74074 - protein, 374 aa, Acinetobacter gyllenbergii
  misc_feature (1)..(374): tr|A0A1B8UFD8|A0A1B8UFD8_9GAMM Epoxyqueuosine reductase OS=Acinetobacter gyllenbergii OX=134534 GN=queG PE=3 S V=1
MASSTPSQTQSQKMPDKIKLLQLDPQALKDWIKAQALDLGFADCVIAKPDAQDQMPRFKEYLERGYHADMHYLEENLEKRADPTLLVPGTKSIICVRMNYLVASPKPRYVPFEPNSAIIARYARGRDYHKVMRGRLKTLATRIKEKVGDFESRPFADSAPIFEKSLAESAGMGWTGKHTLLIHKKSGSFFVLGELFTSLDLPFDQPASAHCGSCTACIDICPTQAIVEPYMLDARKCIAYLTIEYKGIIPEELRSGIGNRIFGCDDCQLICPWNSFAKKASIPDFDPRHNLDDISLLEIWQWDEATFLANTEGSPIRRTGYQSFKRNIAIGLGNAPYSPEIVTQLQDAKTRHDEIVNVHIDWAIQQQLQQIKVH

SEQ ID NO: 74075 - protein, 361 aa, Acinetobacter gyllenbergii
  misc_feature (1)..(361): tr|V2UHR3|V2UHR3_9GAMM Epoxyqueuosine reductase OS=Acin etobacter gyllenbergii NIPH 230 OX=1217658 GN=queG PE=3 SV=1
MPDKIKLLQLDPQALKDWIKAQALDLGFADCVIAKPDAQDQMPRFKEYLERGYHADMHYLEENLEKRADPTLLVPGTKSIICVRMNYLVASPKPRYVPFEPNSAIIARYARGRDYHKVMRGRLKTLATRIKEKVGDFESRPFADSAPIFEKSLAESAGMGWTGKHTLLIHKKSGSFFVLGELFTSLDLPFDQPASAHCGSCTACIDICPTQAIVEPYMLDARKCIAYLTIEYKGIIPEELRSGIGNRIFGCDDCQLICPWNSFAKKASIPDFDPRHNLDDISLLEIWQWDEATFLANTEGSPIRRTGYQSFKRNIAIGLGNAPYSAEIVTQLQDAKTLHDEIVNVHIDWAIQQQLQQIKVH

SEQ ID NO: 74076 - protein, 374 aa, Acinetobacter haemolyticus
  misc_feature (1)..(374): tr|A0A429GIJ5|A0A429GIJ5_ACIHA Epoxyqueuosine reductase OS=Acinetobacter haemolyticus OX=29430 GN=queG PE=3 SV =1
MASTHSSKNASQKIEIQQLDPHALKSWIKAQALDLDFSDCVIAKPDAQDQIPRFKEYLERGYHADMHYLEENLEKRADPTLLVPGTKSIICVRMNYLVASPKPRYVPFEPNSAIIARYARGRDYHKVMRGRLKTLANRIKEKVGDFESRPFADSAPIFEKSLAESAGMGWTGKHTLLIHKKSGSFFVLGELFTSLDLPFDQPATAHCGSCTACIDICPTQAIVEPYMLDARKCIAYLTIEYKGIIPEEYRAGIGNRIFGCDDCQLICPWNGFAKTATIPDFDPRHSLDNISLLDIWRWDEATFLANTEGSPIRRTGYQSFKRNIAIGLGNAPYSDEIIAKLQEAKSWHDEIVNVHIDWAIQQQLQQSTVHQIEK

SEQ ID NO: 74077 - protein, 374 aa, Acinetobacter haemolyticus
  misc_feature (1)..(374): tr|N9FAH0|N9FAH0_ACIHA Epoxyqueuosine reductase OS=Acin etobacter haemolyticus NIPH 261 OX=1217986 GN=queG PE=3 SV=1
MASTHSSKNASQKIEIQQLDPHALKSWIKAQALDLGFSDCVIAKPDAQDQIPRFKEYLERGYHADMHYLEENLEKRADPTLLVPGTKSIICVRMNYLVASPKPRYVPFEPNSAIIARYARGRDYHKVMRGRLKTLANRIKEKVGDFESRPFADSAPIFEKSLAESAGMGWTGKHTLLIHKKSGSFFVLGELFTSLDLPFDQPATAHCGSCTACIDICPTQAIVEPYMLDARKCIAYLTIEYKGIIPEEYRAGIGNRIFGCDDCQLICPWNGFAKTATIPDFDPRHSLDNISLLDIWRWDEATFLANTEGSPIRRTGYQSFKRNIAIGLGNAPYSDEIIAKLQEAKSWHDEIVNVHIDWAIQQQLQQSTVHQIEK

SEQ ID NO: 74078 - protein, 374 aa, Acinetobacter halotolerans
  misc_feature (1)..(374): tr|A0A4Q6XKJ5|A0A4Q6XKJ5_9GAMM Epoxyqueuosine reductase OS=Acinetobacter halotolerans OX=1752076 GN=queG PE=3 SV=1
MASTASSQKLSQKIELQQFDPQELKAWIKAQALDLGFSDCVIAKPDAQDQMPRFKEYLKRGYHADMHYLEENLEKRANPTLLVPGTKSIICVRMNYLVASPKSRYVPFEPNSAIIARYARGRDYHKVMRGRLKTLATRIKEKVGDFESRPFADSAPIFEKSLAESAGMGWTGKHTLLIHKKSGSFFVLGELFTSLELPFDEPATAHCGSCTACIDICPTQAIVEPYMLDARKCIAYLTIEYKGIIPEDLRQGIGNRIFGCDDCQLICPWNGFAQTASIPDFDPRHSLDDISLLEIWQWDEATFLANTEGSPIRRTGYQSFKRNIAIGLGNAPYSAEIVAKLQEAKIWHDEIVNVHIDWAIQQQSRQAIVHQIEK

SEQ ID NO: 74079 - protein, 364 aa, Acinetobacter idrijaensis
  misc_feature (1)..(364): tr|A0A098YMJ3|A0A098YMJ3_9GAMM Epoxyqueuosine reductase OS=Acinetobacter idrijaensis OX=1507807 GN=queG PE=3 S V=1
MTTPDSHAQIQVYQQDPAELKAWIKAQALELGFSDCVIAKPDAQAELARLQEYLDRGYHGDMKFLEENLEKRANPTLLVPGTRSIICVRMDYLVEVPEPRYISYAPNSAIIARYARGRDYHKTMRGRLKTLATKIRGKIGDFESRPFADSAPIFEKSLAESAGMGWTGKHTLLIHKTSGSFFVLGELFTSLELPFDEPATKHCGSCTACIDICPTQAIVEPYMLDARRCIAYLTIEYKGIIPEDLRRGIGNRVFGCDDCQLICPWNSFARVTSVEDFHPRHGLDQVSLLDLWQWDEATFLSATEGSPMRRTGYQSFMRNIAIGLGNAPFDGQIIPALQQQRDQHDEIVQVHIDWAIQEQLAKSS

SEQ ID NO: 74080 - protein, 358 aa, Acinetobacter indicus
  misc_feature (1)..(358): tr|A0A437IX02|A0A437IX02_9GAMM Epoxyqueuosine reductase OS=Acinetobacter indicus OX=756892 GN=queG PE=3 SV=1
MQNIPVNQLDPVQLKAWIKAQALALGFADCVIARPDAQAELPRLEAYLAQGYQADMHFLGENLEKRANPALLVPGTKSIICVRMNYLVDRPAPRHVPDAPNSAIIARYARGRDYHKVMRGRLKTLASLIRDKVGDFESRPFADSAPIFEKSLAESAGMGWTGKHTLLIHKKSGSFFVLGELFSSLELPFDEPATAHCGSCSACIDICPTKAIVEPYVLDAGKCIAYLTIEYKGIIPEDLRRPIGNRVFGCDDCQLICPWNSFAQLTPLDDFAPRHGLDRMSLLELWQWDEATFLACTEGSPLRRTGYQSFKRNIAIGLGNAPYSADIIAQLQQAKTLHDEVVNVHIDWAIQEQLTKSA

SEQ ID NO: 74081 - protein, 358 aa, Acinetobacter indicus; identical to SEQ ID NO: 74080
  misc_feature (1)..(358): tr|V2VQ15|V2VQ15_9GAMM Epoxyqueuosine reductase OS=Acin etobacter indicus CIP 110367 OX=1341679 GN=queG PE=3 SV =1

SEQ ID NO: 74082 - protein, 364 aa, Acinetobacter johnsonii
  misc_feature (1)..(364): tr|A0A5C0U6W9|A0A5C0U6W9_ACIJO Epoxyqueuosine reductase OS=Acinetobacter johnsonii OX=40214 GN=queG PE=3 SV=1
MTTSTSSSKIPVDQYDPEQLKAWIKAEALALGFSDCVIAKPDAQAELPRFKKYLELGYHGDMHFLTENLEKRADPTLLVPGTKSIICVRMDYLVAVPEPRLVPFAPNSAIIARYARGRDYHKVMRGRLKTLSQKIKAKVGDFESRPFADSAPIFEKSLAENAGMGWVGKHTLLIHKTSGSFFVLGELFTSLELPFDQATTKHCGSCSACIDICPTQAIVEPYLLDARKCIAYLTIEFQGIIPEELRRGIGNRVFGCDDCQLICPWNSFAKTTPIDDFNPRHGLDDIQLIDLWQWDENTFMANTEGSPLRRTGYQSFMRNVAIGLGNAPFSDEILQQLQASRPELNDIVQVHIDWAIQEQLMKKQ

SEQ ID NO: 74083 - protein, 364 aa, Acinetobacter johnsonii
  misc_feature (1)..(364): tr|A0A0U3SUV8|A0A0U3SUV8_ACIJO Epoxyqueuosine reductase OS=Acinetobacter johnsonii XBB1 OX=1242245 GN=queG PE= 3 SV=1
MTTSTSSSKIPVDQYDPEQLKAWIKAEALALGFSDCVIAKPDAQVELPRFKKYLELGYHGDMHFLAENLEKRADPTLLVPGTKSIICVRMDYLVAVPEPRLVPFAPNSAIIARYARGRDYHKVMRGRLKTLSQKIKAKVGDFESRPFADSAPIFEKSLAENAGMGWVGKHTLLIHKTSGSFFVLGELFTSLELPFDQATTKHCGSCSACIDICPTQAIVEPYLLDARKCIAYLTIEFQGIIPVELRRGIGNRVFGCDDCQLICPWNSFAKTTPIDDFNPRHSLDDIQLLDLWQWDESTFMANTEGSPLRRTGYQSFMRNVAIGLGNAPFSDEILQQLQASRPELNDIVQVHIDWAIQEQLMKKH

SEQ ID NO: 74084 - protein, 374 aa, Acinetobacter junii
  misc_feature (1)..(374): tr|A0A4Q7B0L1|A0A4Q7B0L1_ACIJU Epoxyqueuosine reductase OS=Acinetobacter junii OX=40215 GN=queG PE=3 SV=1
MASTSSSHNTSQKIEIQQLDPQELKTWIKAQALELGFSDCVIAKPDAQDQMPRFKEYLKRGYHADMHYLEENLDKRADPTLLVPGTKSIICVRMNYLVASPKPRYVPFEPNSAIIARYARGRDYHKVMRGRLKTLATRIKEKVGDFESRPFADSAPIFEKSLAESAGMGWTGKHTLLIHKKSGSFFVLGELFTSLDLPFDQPATAHCGSCTACIDICPTQAIVEPYMLDARKCIAYLTIEYKGIIPEEYRAGIGNRIFGCDDCQLICPWNGFAKTATIPDFDPRHSLDNISLLDIWQWDEATFLANTEGSPIRRTGYQSFKRNIAIGLGNAPYSNEIVAKLQEAKPWHDEIVNVHIDWAIQQQLRQPIVHYIEK

SEQ ID NO: 74085 - protein, 374 aa, Acinetobacter junii
  misc_feature (1)..(374): tr|D0SJ49|D0SJ49_ACIJU Epoxyqueuosine reductase OS=Acin etobacter junii SH205 OX=575587 GN=queG PE=3 SV=1
MASTSSSHNTSQKIEIQQLDPQELKTWIKAQALELGFSDCVIAKPDAQDQMPRFKEYLKRGYHADMHYLEENLDKRADPTLLVPGTKSIICVRMNYLVASPKPRYVPFEPNSAIIARYARGRDYHKIMRGRLKTLATRIKEKVGDFESRPFADSAPIFEKSLAESAGMGWTGKHTLLIHKKSGSFFVLGELFTSLDLPFDQPATAHCGSCTACIDICPTQAIVEPYMLDARKCIAYLTIEYKGIIPEEYRAGIGNRIFGCDDCQLICPWNGFAKTATIPDFDPRHSLDNISLLDIWQWDESTFLANTEGSPIRRTGYQSFKRNIAIGLGNAPYSNEIVAKLQEAKPWHDEIVNVHIDWAIQQQLRQPIVHHIEK

SEQ ID NO: 74086 - protein, 370 aa, Acinetobacter kookii
  misc_feature (1)..(370): tr|A0A1G6IML5|A0A1G6IML5_9GAMM Epoxyqueuosine reductase OS=Acinetobacter kookii OX=1226327 GN=queG PE=3 SV=1
MASSTASQKIPLDQTDPEALKAWIKAQALQLGFSDCVIAKPDAQEELPRFQEYLKRGYHGDMKFLQENLEKRADPTLLLPGTKSIICVRMNYLVETPKPRYVPDEPNAAIIARYARGRDYHKTMRGRLKTLATKIREKVGDFESRPFADSAPIFEKSLAENAGMGWTGKHTLLIHKKSGSFFVLGELFTSLDLPFDGPSSKHCGSCTACIDICPTQAIVEPYMLDARKCIAYLTIEYQGIIPEELRRGIGNRVFGCDDCQLICPWNSFAKKATIEDFNPRHGLDQVSLLDLWHWDEQTFLAHTEGSPLRRTGYQSFMRNIAIGLGNAPFSREIMETLKQTRDQHDEIVQVHIDWAIQEQRAKSSSIMNRN

SEQ ID NO: 74087 - protein, 364 aa, Acinetobacter kyonggiensis
  misc_feature (1)..(364): tr|A0A1H3H5L4|A0A1H3H5L4_9GAMM Epoxyqueuosine reductase OS=Acinetobacter kyonggiensis OX=595670 GN=queG PE=3 S V=1
MASSTPSQKIPLDQNDPETLKAWIKAQALELGFSDCVIAKPDAQEELPRFQEYLKRGYHGDMKFLEENLEKRADPTLLVPGTKSIICVRMNYLVETPKPRYVPDEPNLAIIARYARGRDYHKVMRGRLKTLASKIREKVGDFESRPFADSAPIFEKSLAENAGMGWTGKHTLLIHKKSGSFFVLGELFTSLDLPFDSPTTKHCGSCTACIDICPTQAIVEPYMLDARKCIAYLTIEYQGIIPEELRRGIGNRVFGCDDCQLICPWNSFAKKATIEDFNPRHDLDQSSLLDLWHWDETTFLANTEGSPLRRTGYQSFMRNIAIGLGNAPFSNEILATLQQTREQYDEIVQVHIDWAIQEQLAKFC

SEQ ID NO: 74088 - protein, 366 aa, Acinetobacter lactucae
  misc_feature (1)..(366): tr|A0A151YUD9|A0A151YUD9_9GAMM Epoxyqueuosine reductase OS=Acinetobacter lactucae OX=1785128 GN=queG PE=3 SV=1
MTSSDTSRIAVQQLDPHELKAWIKAQALDLGFADCVIAKPDAQEQMPRFLEYLERGYHADMTYLEENLEKRADPTLLVPGTKSIICVRMNYLVESPKPRYVPFEPNSAIIARYARGRDYHKVMRGRLKTLATRIREKVGDFESRPFADSAPIFEKSLAESAGMGWTGKHTLLIHKKSGSFFVLGELFTSLDLPFDEPATAHCGSCSACIDICPTQAIVEPYMLDARRCIAYLTIEYKGIIAEELRAGIGNRIFGCDDCQLICPWNSFAKKASITDFNPRHGLDHISLLDIWQWDEATFLANTEGSPIRRTGYQSFKRNIAIGLGNAPYSKEIVDQLQNGKNLHDEIVNVHIDWAIEQQLSQVQSSN

SEQ ID NO: 74089 - protein, 366 aa, Acinetobacter lactucae
  misc_feature (1)..(366): tr|R8YY30|R8YY30_9GAMM Epoxyqueuosine reductase OS=Acin etobacter lactucae OX=1785128 GN=queG PE=3 SV=1
MTSSDTSRIAVQQIDPHELKAWIKAQALDLGFADCVIAKPDAQEQMPRFLEYLERGYHADMTYLEENLEKRADPTLLVPGTKSIICVRMNYLVESPKPRYVPLEPNSAIIARYARGRDYHKVMRGRLKTLATRIREKVGDFESRPFADSAPIFEKSLAESAGMGWTGKHTLLIHKKSGSFFVLGELFTSLDLPFDEPATAHCGSCSACIDICPTQAIVEPYMLDARRCIAYLTIEYKGIIAEELRAGIGNRIFGCDDCQLICPWNSFAKTASITDFNPRHGLDNIRLLDIWQWDEATFLANTEGSPIRRTGYQSFKRNIAIGLGNAPYSKEIVDQLQNGKNLHDEIVNVHIDWAIEQQLSQVQSSN

SEQ ID NO: 74090 - protein, 373 aa, Acinetobacter larvae
  misc_feature (1)..(373): tr|A0A1B2M035|A0A1B2M035_9GAMM Epoxyqueuosine reductase OS=Acinetobacter larvae OX=1789224 GN=queG PE=3 SV=1
MPSTSALSTQQITLQPYDPEQLKEWIKQQALQLGFADCVIAKPDASAELSRFKEYLKRGYHGEMGYLAENLEKRADPSLLVPGTKSIICVRMDYLVASPKPRHIPYAPNQAIIARYARGRDYHKIMRGRLKTLAQRIRDKIGDFESRPFADSAPIFEKALAESAGMGWTGKHTLLIQKKAGSFFVLGELFCSLALPFDRPTTSHCGSCHACIDICPTQAIVAPYMLDARKCIAYLTIEYKGVIPIALRRAIGNRVFGCDDCQLICPWNRYAKLAVIDDFQARHDLDHINLLDLWRWNETTFLERTAGSPIRRTGYESFMRNIAIALGNAPFHADISQALVQRYAELSPLVQQHIDWALDEQKNKQVKIALGLD

SEQ ID NO: 74091 - protein, 364 aa, Acinetobacter lwoffii
  misc_feature (1)..(364): tr|A0A4Q4DV64|A0A4Q4DV64_ACILW Epoxyqueuosine reductase OS=Acinetobacter lwoffii OX=28090 GN=queG PE=3 SV=1
MTTPDSHAQIQVYQQDPAELKAWIKAQALELGFSDCVIAKPDAQAELARLQEYLDRGYHGDMKFLEENLEKRANPTLLVPGTRSIICVRMDYLVEVPEPRYISYAPNSAIIARYARGRDYHKTMRGRLKTLATKIRGKIGDFESRPFADSAPIFEKSLAESAGMGWTGKHTLLIHKTSGSFFVLGELFTSLELPFDEPATKHCGSCTACIDICPTQAIVEPYMLDARRCIAYLTIEYKGIIPEDLRRGIGNRVFGCDDCQLICPWNSFAQVTSIEDFHPRHGLDQVSLLDLWQWDEATFLSATEGSPMRRTGYQSFMRNIAIGLGNAPFDGQIIPALQQQRDQHDEIVQVHIDWAIQEQLAKSS

SEQ ID NO: 74092 - protein, 364 aa, Acinetobacter lwoffii
  misc_feature (1)..(364): tr|D0STE0|D0STE0_ACILW Epoxyqueuosine reductase OS=Acin etobacter lwoffii SH145 OX=575588 GN=queG PE=3 SV=1
MATPDSQAQIKVYQQDPAELKAWIKAQALELGFSDCVIAKPDAQAELARLQEYLDRGYHGDMKFLEENLEKRANPTLLVPGTRSIICVRMDYLVEVPEPRYISYAPNSAIIARYARGRDYHKTMRGRLKTLATKIREKVGDFESRPFADSAPIFEKSLAETAGMGWTGKHTLLIHKTSGSFFVLGELFTSLELPFDEPATKHCGSCTACIDICPTQAIVEPYMLDARRCIAYLTIEYKGIIPEDLRRGIGNRVFGCDDCQLICPWNSFAQVTSIEDFHPRHGLDQVSLLDLWQWDEATFLSATEGSPMRRTGYQSFMRNIAIGLGNAPFDGQIIPALQQQRNQHDEIVQVHIDWAIQEQLAKSS

SEQ ID NO: 74093 - protein, 364 aa, Acinetobacter marinus
  misc_feature (1)..(364): tr|A0A1G6GLI6|A0A1G6GLI6_9GAMM Epoxyqueuosine reductase OS=Acinetobacter marinus OX=281375 GN=queG PE=3 SV=1
MPKAIPSIDLQLRNDPIALKAWIKAEAQDLGFADCVVARPDTEDQIPHLQAYLDKGYHADMHYLAENLDKRANPKLLVEGTACILCVRLNYLQEKPQGRYVPEQPDVGIIARYARGRDYHKIMRGRLKQLAQRIEAKVGQFSNRPFSDSAPIFEKALAENAGMGWTGKHTLLINRDSGSFFVLGELFCGLPLPFDEPTTAHCGSCSACIDICPTQAIVAPYQLDARKCIAYLTIEYKGSIPLELRPQIGNRIFGCDDCQLVCPWNRYAKITSIDDFLPRHGLDHTSLLEFWQWDEATFLHKTEGSPIRRTGFQSFKRNVAIALGNASHSKDIIQQLSEQNTEQHQDIVLEHQHWALQQQLAMQS

SEQ ID NO: 74094 - protein, 356 aa, Acinetobacter nosocomialis
  misc_feature (1)..(356): tr|A0A2L1VMI4|A0A2L1VMI4_ACINO Epoxyqueuosine reductase OS=Acinetobacter nosocomialis OX=106654 GN=queG PE=3 S V=1
MQQIDPHELKAWIKAQALDLGFADCVIAKPDAQEQMPRFLEYLERGYHADMTYLEENLEKRADPTLLVPGTKSIICVRMNYLVESPKPRYVPFEPNSAIIARYARGRDYHKVMRGRLKTLATRIREKVGDFESRPFADSAPIFEKSLAESAGMGWTGKHTLLIHKKSGSFFVLGELFTSLDLPFDEPATSHCGSCSACIDICPTQAIVEPYMLDARRCIAYLTIEYKGIIDEELRAGIGNRIFGCDDCQLICPWNSFAKTASITDFNPRHGLDNISLLDIWQWDEATFLANTEGSPIRRTGYQSFKRNIAIGLGNAPYSKEIVDQLHKGKNLHDEIVNVHIDWAIEQQLNQLQRSN

SEQ ID NO: 74095 - protein, 366 aa, Acinetobacter nosocomialis
  misc_feature (1)..(366): tr|A0A1Y5NS92|A0A1Y5NS92_ACINO Epoxyqueuosine reductase OS=Acinetobacter nosocomialis P020 OX=1285584 GN=queG PE=3 SV=1
MTSSNTSRIAVQQIDPHELKAWIKAQALDLGFADCVIAKPDAQEQMPRFLEYLERGYHADMTYLQENLEKRADPTLLVPGTKSIICVRMNYLVESPKPRYVPFEPNSAIIARYARGRDYHKVMRGRLKTLATRIREKVGDFESRPFADSAPIFEKSLAESAGMGWTGKHTLLIHKNSGSFFVLGELFTSLDLPFDEPATSHCGSCSACIDICPTQAIVEPYMLDARRCIAYLTIEYKGIIDEELRAGIGNRIFGCDDCQLICPWNSFAKTASITDFNPRHGLDNISLLDIWQWDEATFLANTEGSPIRRTGYQSFKRNIAIGLGNAPYSKEIIDQLHKGKNLHDEIVNVHIDWAIEQQLNQLQLSN

SEQ ID NO: 74096 - protein, 356 aa, Acinetobacter oleivorans
  misc_feature (1)..(356): tr|A0A2T5QMH2|A0A2T5QMH2_9GAMM Epoxyqueuosine reductase OS=Acinetobacter oleivorans OX=1148157 GN=queG PE=3 SV =1
MQQLDPHELKAWIKAQALDLGFADCVIAKPDAQEQMPRFLEYLERGYHADMTYLEENLEKRADPTLLVPGTKSIICVRMNYLVESPKPRYVPFEPNSAIIARYARGRDYHKVMRGRLKTLATRIREKVGDFESRPFADSAPIFEKSLAESAGMGWTGKHTLLIHKKSGSFFVLGELFTSLDLPFDEPATAHCGSCSACIDICPTQAIVEPYMLDARRCIAYLTIEYKGIIAEELRAGIGNRIFGCDDCQLICPWNSFAKTASISDFNPRNGLDNISLLDIWQWDEATFLANTEGSPIRRTGYQSFKRNIAIGLGNAPYSKEIVDQLHKGKNLHDEIVNVHIDWAIEQQLNQLQLSN

SEQ ID NO: 74097 - protein, 366 aa, Acinetobacter oleivorans
  misc_feature (1)..(366): tr|D8JL68|D8JL68_ACISD Epoxyqueuosine reductase OS=Acin etobacter oleivorans (strain JCM 16667 / KCTC 23045 / D R1) OX=436717 GN=queG PE=3 SV=1
MTSSDTSRIAVQQLDPHELKAWIKAQALDLGFADCVIAKPDAQEQMPRFLEYLERGYHADMTYLEENLEKRANPTLLVPGTKSIICVRMNYLVESPKPRYVPFEPNSAIIARYARGRDYHKVMRGRLKTLATRIREKVGDFESRPFADSAPIFEKSLAESAGMGWTGKHTLLIHKKSGSFFVLGELFTSLDLPFDEPATAHCGSCSACIDICPTQAIVEPYMLDARRCIAYLTIEYKGIIAEELRAGIGNRIFGCDDCQLICPWNSFAKTASISDFNPRNGLDNISLLDIWQWDEATFLANTEGSPIRRTGYQSFKRNIAIGLGNAPYSKEIVDQLHKGKNLHDEIVNVHIDWAIEQQLNQLQLSN

SEQ ID NO: 74098 - protein, 371 aa, Acinetobacter parvus
  misc_feature (1)..(371): tr|N8RLU5|N8RLU5_9GAMM Epoxyqueuosine reductase OS=Acin etobacter parvus DSM 16617 = CIP 108168 OX=981333 GN=qu eG PE=3 SV=1
MASTTSSGKSLDKIELQQLDPQELKTWIKTQALDLGFSDCVIAKPDAQDQMPRFKEYLKRGYHADMHYLEENLEKRADPTLLVPGTKSIICVRMNYLVASPKPRYVPFEPNSAIIARYARGRDYHKVMRGRLKTLASRIKEKVGDFESRPFADSAPIFEKSLAESAGMGWTGKHTLLIHKKSGSFFVLGELFTSLDLPFDQPATAHCGSCTACIDICPTQAIVEPYMLDARKCIAYLTIEHKGIIPEELRSGIGNRIFGCDDCQLICPWNGFAKTASIPDFDPRHSLDDISLLDIWQWDEATFLAKTEGSPIRRTGYQSFKRNIAIGLGNAPYSAEIISQLHDAKMWHDEIVNVHIEWAIQQQLQQISVPE

SEQ ID NO: 74099 - protein, 371 aa, Acinetobacter parvus
  misc_feature (1)..(371): tr|N8Q6G3|N8Q6G3_9GAMM Epoxyqueuosine reductase OS=Acin etobacter parvus NIPH 1103 OX=1217671 GN=queG PE=3 SV=1
MASTTSSGKSLDKIELQQLDPQELKTWIKTQALDLGFSDCVIAKPDAQDQMPHFKEYLKRGYHADMHYLEENLEKRADPTLLVPETKSIICVRMNYLVASPKPRYVPFEPNSAIIARYARGRDYHKVMRGRLKTLASRIKEKVGDFESRPFADSAPIFEKSLAESAGMGWTGKHTLLIHKKSGSFFVLGELFTSLDLPFDQPATAHCGSCTACIDICPTQAIVEPYMLDARKCIAYLTIEYKGIIPEELRSGIGNRIFGCDDCQLICPWNGFAKTALIPDFDPRHSLDDISLLEIWQWDEATFLAKTEGSPIRRTGYQSFKRNIAIGLGNAPYSAEIVSQLQEAKALHDEIVNVHIEWAIQQQLQQISVPE

SEQ ID NO: 74100 - protein, 364 aa, Acinetobacter piscicola
  misc_feature (1)..(364): tr|A0A4Q4GYK8|A0A4Q4GYK8_9GAMM Epoxyqueuosine reductase OS=Acinetobacter piscicola OX=2006115 GN=queG PE=3 SV= 1
MSASSSSTHIALQHIDPEQLKSWIKEQALQLGFADCVIAKPDAQAELVRFKEYLKRGYHGDMKFLEENLEKRADPTLLVPNTKSIICVRMNYLVETPKPRYVPDEPNSAIIARYARGRDYHKVMRGRLKTLANKIKEKVGDFESRPFADSAPVFEKSLAENAGMGWTGKHTLLIHKKSGSFFVLGELFTSLELPFDQPTTKHCGSCTACIDICPTQAIVEPYMLDARKCIAYLTIEYKGIIPEELRRGIGNRVFGCDDCQLICPWNSFAKKTPIEDFYPRHGLDNASLLDLWHWDEATFLNCTEGSPIRRTGYQSFMRNIAIGLGNAPFSTEILQALQHHRAHHDEIVQVHIDWAIAEQQRKSK

SEQ ID NO: 74101 - protein, 356 aa, Acinetobacter pittii
  misc_feature (1)..(356): tr|A0A242T0U6|A0A242T0U6_ACIPI Epoxyqueuosine reductase OS=Acinetobacter pittii OX=48296 GN=queG PE=3 SV=1
MQQIDPHELKAWIKAQALDLGFADCVIAKPDAQEQMPRFLEYLERGYHADMTYLEENLEKRADPTLLVPGTKSIICVRMNYLVESPKPRYVPLEPNSAIIARYARGRDYHKVMRGRLKTLATRIREKVGDFESRPFADSAPIFEKSLAESAGMGWTGKHTLLIHKKSGSFFVLGELFTSLELPFDEPATAHCGSCSACIDICPTQAIVEPYMLDARRCIAYLTIEYKGIIAEELRAGIGNRIFGCDDCQLICPWNSFAKTASISDFNPRHGLDNISLLDIWQWDEATFLANTEGSPIRRTGYQSFKRNIAIGLGNAPYSKEIVDQLQNGKNLHDEIVNVHIDWAIEQQLNQLQLSN

SEQ ID NO: 74102 - protein, 366 aa, Acinetobacter pittii
  misc_feature (1)..(366): tr|R8YPW4|R8YPW4_ACIPI Epoxyqueuosine reductase OS=Acin etobacter pittii ANC 4050 OX=1217691 GN=queG PE=3 SV=1
MTSSDTSRIAVQQLDPHELKAWIKAQALELGFADCVIAKPDAQEQMPRFLEYLERGYHADMTYLEENLEKRADPTLLVPGTKSIICVRMNYLVESPKPRYVPFEPNSAIIARYARGRDYHKVMRGRLKTLATRIREKVGDFESRPFADSAPIFEKSLAESAGMGWTGKHTLLIHKKSGSFFVLGELFTSLDLPFDEPATAHCGTCSACIDICPTQAIVEPYMLDARRCIAYLTIEYKGIIAEELRAGIGNRIFGCDDCQLICPWNSFAKKASITDFNPRHGLDHISLLDIWQWDEATFLANTEGSPIRRTGYQSFKRNIAIGLGNASYSKEIVDQLQNGKNLHDEIVNVHIDWAIEQQLSQVQSSN

SEQ ID NO: 74103 - protein, 364 aa, Acinetobacter populi
  misc_feature (1)..(364): tr|A0A1Z9YXP5|A0A1Z9YXP5_9GAMM Epoxyqueuosine reductase OS=Acinetobacter populi OX=1582270 GN=queG PE=3 SV=1
MSKSLSTLDLGLRDDPPALKHWIKAQAIALGFNDCVIAKPDTKDQLAHFQRYLDNGYHADMHYLEENLDKRADPTLLVPDTQSIICVRLNYLQDKPQARYVPDQPDLGIIARYARGRDYHKVMRGRLKQLAQRIEAKIGPFSSRPFSDSAPIFEKTLAENAGMGWTGKHTLLINRQSGSFFVLGELFCSLALPFDTPASKHCGSCSACIDICPTQAIVEPYMLDARKCIAYLTIEYKGSIPLELRAQIGNRIFGCDDCQLICPWNRYAKVTTLDDFQTRHGLDQTALLDFWQWDEATFLAKTEGSAIRRTGFQSFKRNVAVALGNAPFSTQILAALQQHFSEHEAVVNEHIAWAISVQLQKKRA

SEQ ID NO: 74104 - protein, 363 aa, Acinetobacter pragensis
  misc_feature (1)..(363): tr|A0A151XYB6|A0A151XYB6_9GAMM Epoxyqueuosine reductase OS=Acinetobacter pragensis OX=1806892 GN=queG PE=3 SV= 1
MATPDQAKISLNQDDPEALKAWIKAQALALGFSDCVIAKPDAQAELPRFKEYLKRGYHGDMKFLEENLDKRADPTLLIPGTKSIICVRMDYLVETPKPRYVPFEPNAAIIARYARGRDYHKVMRGRLKTLAAAIREKVGNFESRPFADSAPIFEKSLAENAGMGWTGKHTLLIHKKSGSFFVLGELFTSLDLPFDSPADKHCGSCTACIDICPTQAIVEPYMLDARKCIAYLTIEYKGIIPEELRRGIGNRVFGCDDCQLICPWNSFAKKTSIEDFNPRHGLDQVSLLDLWQWDEATFLTCTEGSPIRRTGYQSFMRNIAIGLGNAEYSPEIIQSLTQNRALHDEIVQVHVDWAIAEQSSKAL

SEQ ID NO: 74105 - protein, 374 aa, Acinetobacter proteolyticus
  misc_feature (1)..(374): tr|A0A2N0WGW5|A0A2N0WGW5_9GAMM Epoxyqueuosine reductase OS=Acinetobacter proteolyticus OX=1776741 GN=queG PE=3 SV=1
MASSTPSQTQSQKMPDKIKLQQLDPQALKDWIKAQALDLGFADCVIAKPDAQDQMPRFKEYLERGYHADMHYLEENLDKRADPTLLVPGTKSIICVRMNYLVASPKPRYVPFEPNSAIIARYARGRDYHKVMRGRLKTLATRIKEKVGDFESRPFADSAPIFEKSLAESAGMGWTGKHTLLIHKKSGSFFVLGELFTSLDLPFDQPASAHCGSCTACIDICPTQAIVEPYMLDARKCIAYLTIEYKGIIPEELRSGIGNRIFGCDDCQLICPWNSFAKKASIPDFDPRHNLDDISLLEIWQWDEATFLANTEGSPIRRTGYQSFKRNIAIGLGNAPYSAEIVTQLQDAKTLHDEIVNVHIDWAIQQQLQQIKVH

SEQ ID NO: 74106 - protein, 374 aa, Acinetobacter proteolyticus
  misc_feature (1)..(374): tr|A0A1E7R6R8|A0A1E7R6R8_9GAMM Epoxyqueuosine reductase OS=Acinetobacter proteolyticus OX=1776741 GN=queG PE=3 SV=1
MASSTPSQTQSQKTPDKIKLQQLDPQALKDWIKVQALDLGFADCVIAKPDAQDQMPRFKEYLERGYHADMHYLEENLDKRADPTLLVPGTKSIICVRMNYLVASPKPRYVPFEPNSAIIARYARGRDYHKVMRGRLKTLATRIKEKVGDFESRPFADSAPIFEKSLAESAGMGWTGKHTLLIHKKSGSFFVLGELFTSLDLPFDQPASAHCGSCTACIDICPTQAIVEPYMLDARKCIAYLTIEYKGIIPEELRSGIGNRIFGCDDCQLICPWNSFAKKASIPDFDPRHNLDDISLLEIWQWDETTFLANTEGSPIRRTGYQSFKRNIAIGLGNAPYSAEIVTQLQDAKTLHDEIVNVHIDWAIQQQLQQINVH

SEQ ID NO: 74107 - protein, 367 aa, Acinetobacter puyangensis
  misc_feature (1)..(367): tr|A0A240EAL2|A0A240EAL2_9GAMM Epoxyqueuosine reductase OS=Acinetobacter puyangensis OX=1096779 GN=queG PE=3 S V=1
MSKSLSTLDLGLRDDPHALKHWIKAQAMALGFNDCVIAKPDTKDQLAHFQRYLDNGYHADMHYLEENLDKRADPTLLVPDTHSIICVRLNYLQDKPQARYVPDQPDLGIIARYARGRDYHKVMRGRLKQLAQRIEDKIGPFSSRPFSDSAPIFEKTLAENAGMGWTGKHTLLINRQSGSFFVLGELFCSLALPFDTPASKHCGSCSACIDICPTQAIVEPYMLDARKCIAYLTIEYKGSIPLELRAQIGNRIFGCDDCQLICPWNRYAKVTTLDDFQTRHDLDQTALLDFWQWDEATFLAKTEGSAIRRTGFQSFKRNVAIALGNAPFSTQILAALQQYFSEHEALVKEHVAWAISVQVQKNEHKSH

SEQ ID NO: 74108 - protein, 366 aa, Acinetobacter qingfengensis
  misc_feature (1)..(366): tr|A0A1E7R944|A0A1E7R944_9GAMM Epoxyqueuosine reductase OS=Acinetobacter qingfengensis OX=1262585 GN=queG PE=3 SV=1
MSKNSVKTLDLSLRENPQALKTWIKTQALALGFNDCVIAKPDTKDQLEHFKRYLDQGYHADMHYLTENLDKRADPTLLVPNTQSIICVRLNYLQDKPQPRYIPDTPDIGIIARYARGRDYHKVMRGRLKQLAQCIEAKIGPFSSRPFSDSAPIFEKTLAENAGMGWTGKHTLLINRQSGSFFVLGELFCSLQLPFDAPATRHCGSCSACIDICPTQAIVEPYMLDARKCIAYLTIEYKGSIPLALRPMIGNRIFGCDDCQLICPWNRYAKVTTLEDFHTRHQLDQTHLMDFWQWDESTFLAKTEGSAIRRTGFQSFKRNVAIALGNAPFSAAICSALQQQNTEHNDLVLEHRNWALQQQINKNVQS

SEQ ID NO: 74109 - protein, 363 aa, Acinetobacter radioresistens
  misc_feature (1)..(363): tr|A0A2T1J3L7|A0A2T1J3L7_ACIRA Epoxyqueuosine reductase OS=Acinetobacter radioresistens OX=40216 GN=queG PE=3 SV=1
MSESLPSRKIDLAQLDAEALKQWIKSQALDLGFADCVVAKPDAQAEMVRFQEYLDRGYHADMDYLKENLEKRTDPTLLVPGTKSIICVRMNYLVETPKPRYVPYEPNSAIIARYARGRDYHKIMRGRLKTLASRIRDKVGNFESRPFADSAPIFEKSLAESAGMGWTGKHTLLIHKKSGSFFVLGELFTSLDLPFDEPATAHCGSCSACIDICPTQAIVEPYMLDARKCIAYLTIEYKGIIPQELRHGIGNRVFGCDDCQLICPWNSFAKKATIEDFNPRNGLDNISLLELWQWDEETFLKNTEGSPLRRTGYQSFKRNIAIGLGNAPYTTEIIAQLEQARTKHDEIVNHHIDWAIEQQISKS

SEQ ID NO: 74110 - protein, 363 aa, Acinetobacter radioresistens
  misc_feature (1)..(363): tr|A0A3F3GWQ2|A0A3F3GWQ2_ACIRA Epoxyqueuosine reductase OS=Acinetobacter radioresistens NIPH 2130 OX=1217674 G N=queG PE=3 SV=1
MSESLPSRKIDLAQLDAEALKQWIKSQALDLGFADCVVAKPDAQAEMARFQEYLDRGYHADMDYLKENLEKRADPTLLVPGTKSIICVRMNYLVETPKPRYVPYEPNSAIIARYARGRDYHKIMRGRLKTLASRIRDKVGNFESRPFADSAPIFEKSLAESAGMGWTGKHTLLIHKKSGSFFVLGELFTSLDLPFDEPATAHCGSCSACIDICPTQAIVEPYMLDARKCIAYLTIEYKGIIPQELRHGIGNRVFGCDDCQLICPWNSFAKKATIEDFNPRNGLDNISLLELWQWDEETFLKNTEGSPLRRTGYQSFKRNIAIGLGNAPYTTEIVTQLEQARTKHDEIVNHHIDWAIEQQISKS

SEQ ID NO: 74111 - protein, 372 aa, Acinetobacter rudis
  misc_feature (1)..(372): tr|S3NC12|S3NC12_9GAMM Epoxyqueuosine reductase OS=Acin etobacter rudis CIP 110305 OX=421052 GN=queG PE=3 SV=1
MLSSPSSQIAAHEPLDPEQLKIWIKEQARALGFSDCVIAQPDTQAELARFKTYLERGYHGDMSYLEENLDKRADPTLLVPGTKSIICVRMDYLVERPAPRIVPHAPNHAIIARYARGRDYHKVMRGRLKTLASKIRDKVGEFESRPFADSAPIFEKALAENAGMGWTGKHTLLINKKSGSFFVLGELFTSLLLPFDSPASKHCGTCQACIDICPTQAIVEPYMLDARKCIAYLTIEYKGIIPIEHRRGIGNRIFGCDDCQLICPWNRYAQITPIEDFHPRHGLDQASLLELWQWDEQTFLSRTEGSPIRRTGYSSFMRNIAIGLGNAPYSEDIVLALKQAHVLHDPIVQVHIDWALQEQTEKLKAQSQQLID

SEQ ID NO: 74112 - protein, 364 aa, Acinetobacter schindleri
  misc_feature (1)..(364): tr|A0A3B8HM28|A0A3B8HM28_9GAMM Epoxyqueuosine reductase OS=Acinetobacter schindleri OX=108981 GN=queG PE=3 SV= 1
MTTPDSPAQIQVFQEDSEALKAWIKVQALELGFSDCVIARPDAQAELPRLKEYLERGYHGDMKFLEENLEKRADPTLLIPNTRSIICVRMDYLVESPEPRMVPDAPNSAIIARYARGRDYHKTMRGRLKMLSAKIKEKVGEFESRPFADSAPVFEKSLAENAGMGWTGKHTLLIHKKSGSFFVLGELFTSLELPFDEPTTKHCGSCTACIDICPTQAIVEPYMLDARRCIAYLTIEYKGIIPEDLRRGIGNRVFGCDDCQLICPWNSFAKTTTIADFHPRHGLDQASLLDLWQWDEPTFLASTEGSPLRRTGYQSFIRNIAIGLGNAPFNPAIIQALQNSRAQHDEVVQVHIDWSIQEQLSKSR

SEQ ID NO: 74113 - protein, 364 aa, Acinetobacter schindleri
  misc_feature (1)..(364): tr|N8WKZ5|N8WKZ5_9GAMM Epoxyqueuosine reductase OS=Acin etobacter schindleri NIPH 900 OX=1217675 GN=queG PE=3 S V=1
MTTPDSPAQIQVFQEDPEALKAWIKVQALELGFSDCVIARPDAQAELPRLQEYLERGYHGDMKFLEENLDKRANPTLLIPNTRSVICVRMDYLVESPEPRMVPDAPNSAIIARYARGRDYHKTMRGRLKMLSAKIKEKVGEFESRPFADSAPVFEKSLAENAGMGWTGKHTLLIHKKSGSFFVLGELFTSLELPFDEPTTKHCGSCTACIDICPTQAIVEPYMLDARRCIAYLTIEYKGIIPEDLRRGIGNRVFGCDDCQLICPWNSFAKTTTIADFHPRNGLDQASLLDLWQWDEPTFLASTEGSPLRRTGYQSFMRNIAIGLGNAPFNPAIIQALQNSRAQHDEVVQVHIDWSIQEQLSKSR

SEQ ID NO: 74114 - protein, 356 aa, Acinetobacter seifertii
  misc_feature (1)..(356): tr|A0A2T5QV92|A0A2T5QV92_9GAMM Epoxyqueuosine reductase OS=Acinetobacter seifertii OX=1530123 GN=queG PE=3 SV= 1
MQQIDPYELKAWIKAQALDLGFADCVIAKPDAQEQMPRFLEYLERGYHADMSYLEENLEKRADPTLLVPGTKSIICVRMNYLVESPKPRYVPFEPNSAIIARYARGRDYHKVMRGRLKTLATRIREKVGDFESRPFADSAPIFEKSLAESAGMGWTGKHTLLIHKKSGSFFVLGELFTSLDLPFDEPATAHCGSCSACIDICPTQAIVEPYMLDARRCIAYLTIEYKGIIAEELRAGIGNRIFGCDDCQLICPWNSFAKKASITDFDPRYGLDNISLLEIWQWDEATFLANTEGSPIRRTGYQSFKRNIAIGMGNAPYSEEIVDQLHKGKNLHDEIVNVHIDWAIEQQLNQLQRSN

SEQ ID NO: 74115 - protein, 356 aa, Acinetobacter seifertii
  misc_feature (1)..(356): tr|A0A2M8MHA3|A0A2M8MHA3_9GAMM Epoxyqueuosine reductase OS=Acinetobacter seifertii OX=1530123 GN=queG PE=3 SV= 1
MQQIDPYELKAWIKAQALDLGFADCVIAKPDAQEQMPRFLEYLERGYHADMSYLEENLEKRADPTLLVPGTKSIICVRMNYLVESPKPRYVPFEPNSAIIARYARGRDYHKVMRGRLKTLATRIREKVGDFESRPFADSAPIFEKSLAESAGMGWTGKHTLLIHKKSGSFFVLGELFTSLDLPFDEPATAHCGSCSACIDICPTQAIVEPYMLDARRCIAYLTIEYKGIIAEELRAGIGNRIFGCDDCQLICPWNSFAKKASITDFNPRHGLDNISLLDIWQWDEATFLSNTEGSPIRRTGYQSFKRNIAIGMGNAPYSEEIVDQLHKGKNLHDEIVNVHIDWAIEQQLNQLQRSN

SEQ ID NO: 74116 - protein, 367 aa, Acinetobacter soli
  misc_feature (1)..(367): tr|A0A3R9A4D5|A0A3R9A4D5_9GAMM Epoxyqueuosine reductase OS=Acinetobacter soli OX=487316 GN=queG PE=3 SV=1
MPLDQPHGSIPLTQDDPEELKSWIKSQALALGFSDCVIAKPDAQDQMPRFKEYLKRGYHADMHYLAENLDKRADPTLLVPGTKSIICVRMNYLVESPKPRYVPDQPNSAIIARYARGRDYHKVMRGRLKTLAGIIKARVGEFESRPFADSAPIFEKSLAESAGMGWTGKHTLLIHKKSGSFFVLGELFTSLELPFDQPATAHCGSCTACIDICPTQAIVEPYMLDARKCIAYLTIEYKGIIAEELRAGIGNRIFGCDDCQLICPWNSFAKIASIPDFNPRHGLDNISLLEIWTWDEATFLANTEGSPIRRTGFQSFKRNIAIGLGNAPYSDEIIEALKMAREQHDEIVQVHIDWAIEQQLKKQYQIH

SEQ ID NO: 74117 - protein, 367 aa, Acinetobacter soli
  misc_feature (1)..(367): tr|N9AEF1|N9AEF1_9GAMM Epoxyqueuosine reductase OS=Acin etobacter soli NIPH 2899 OX=1217677 GN=queG PE=3 SV=1
MPLDQPHGSIPLTQDDPEELKSWIKSQALALGFSDCVIAKPDAQDQMPRFKEYLKRGYHADMHYLAENLDKRADPTLLVPGTKSIICVRMNYLVESPKPRYVPDQPNSAIIARYARGRDYHKVMRGRLKTLAGIIKARVGEFESRPFADSAPIFEKSLAESAGMGWTGKHTLLIHKKSGSFFVLAELFTSLELPFDQPATAHCGSCTACIDICPTQAIVEPYMLDARKCIAYLTIEYKGIIAEELRAGIGNRIFGCDDCQLICPWNSFAKIASIPDFNPRHGLDNISLLEIWTWDEATFLANTEGSPIRRTGFQSFKRNIAIGLGNAPYSDDVIEALKMAREQHDEIVQIHIDWAIEQQLKKQYQIH

SEQ ID NO: 74118 - protein, 364 aa, Acinetobacter sp.
  misc_feature (1)..(364): tr|A0A519J8D0|A0A519J8D0_ACISP Epoxyqueuosine reductase OS=Acinetobacter sp. OX=472 GN=queG PE=3 SV=1
MASSTLSQKIPLDQYDPEALKAWIKVQALELGFSDCVIAKPDAQEELPRFQEYLKRGYHGDMKFLQENLEKRANPALLVPGTKSIICVRMNYLVETPKPRYVPDEPNAAIIARYARGRDYHKTMRGRLKTLATKIREKVGDFESRPFADSAPIFEKSLAENAGMGWTGKHTLLIHKKSGSFFVLGELFTSLDLPFDGPTSKHCGSCTACMDICPTRAIVEPYMLDARKCIAYLTIEYQGIIPEELRRGIGNRVFGCDDCQLICPWNSFAKKTTIEDFNPRHGLDQVSLLDLWHWDEPTFLANTEGSPLRRTGYQSFMRNIAIGLGNAPFSTEIIETLRQSRDQHDEIVQVHIDWAIREQLAKSS

SEQ ID NO: 74119 - protein, 366 aa, Acinetobacter sp.
  misc_feature (1)..(366): tr|A0A2A5PJQ0|A0A2A5PJQ0_9GAMM Epoxyqueuosine reductase OS=Acinetobacter sp. YT-02 OX=2018564 GN=queG PE=3 SV= 1
MATSTTSAHISLHQDDPAALKAWIKAQALALGFADCVIAKPDAQAELARFQEYLKRGYHGDMKFLEENLDKRANPTLLVPNTKSIICVRMNYLVETPRPRHIPDAPNSAIIARYARGRDYHKVMRGRLKTLATRIREKVGNFESRPFADSAPIFEKSLAESAGMGWTGKHTLLIHKKSGSFFVLGELFTSLDLPFDPPATSHCGSCTACIDICPTQAIVEPYMLDARKCIAYLTIEYQGIIPEELRRGIGNRVFGCDDCQLICPWNSFAQVTTVEDFHPRHALDQVSLLDLWQWDESTFLAKTEGSPLRRTGYQSFMRNIAIGLGNAPFSAQILQTLQQTRAQHDEIVQIHIDWAIQEQLLKQPKI

SEQ ID NO: 74120 - protein, 366 aa, Acinetobacter tandoii
  misc_feature (1)..(366): tr|A0A515BE59|A0A515BE59_9GAMM Epoxyqueuosine reductase OS=Acinetobacter tandoii OX=202954 GN=queG PE=3 SV=1
MASTSSSSKISLQQLDPQELKAWIKAQALDLGFADCVIAKPDAQAELERFKEYLKRGYHADMTYLEENLDKRADPTLLVPGTRSIICVRMNYLVETPKPRYVPNEPNVAIIARYARGRDYHKIMRGRLKTLATRIRERVGDFESRPFADSAPIFEKSLAENAGMGWTGKHTLLIHKKSGSFFVLGELFTSLDLPFDPPTTKHCGSCTACIDICPTQAIVEPYMLDARKCIAYLTIEYKGIIPEELRRGIGNRVFGCDDCQLICPWNSFAQKASIEDFNPRHDLDRVTLLDLWHWDEATFLANTEGSPIRRTGYQSFMRNIAIGLGNAPFSSLILQTLHETRHLHDDIVQVHIDWAIQEQLIKSQTV

SEQ ID NO: 74121 - protein, 366 aa, Acinetobacter tandoii
  misc_feature (1)..(366): tr|R9B0Z5|R9B0Z5_9GAMM Epoxyqueuosine reductase OS=Acin etobacter tandoii DSM 14970 = CIP 107469 OX=1120927 GN= queG PE=3 SV=1
MASTSSSSNISLQQLDLQELKTWIKTQALDLGFADCVIAKPDAQAELERFKEYLKRGYHADMTYLEENLDKRADPTLLVPGTRSIICVRMNYLVETPKPRYVPNEPNAAIIARYARGRDYHKIMRGRLKTLATRIRERVGDFESRPFADSAPIFEKSLAENAGMGWTGKHTLLIHKKSGSFFVLGELFTSLDLPFDGPTTKHCGSCTACIDICPTQAIVEPYMLDARKCIAYLTIEYKGIIPEELRRGIGNRVFGCDDCQLICPWNSFAQKASIEDFNPRHDLDRVTLLDLWHWDEATFLSNTEGSPIRRTGYQSFMRNIAIGLGNAPFSRLILQTLHETRHLHDDIVQVHIDWAIQEQLIKSQSV

SEQ ID NO: 74122 - protein, 371 aa, Acinetobacter tjernbergiae
  misc_feature (1)..(371): tr|V2UZA2|V2UZA2_9GAMM Epoxyqueuosine reductase OS=Acin etobacter tjernbergiae DSM 14971 = CIP 107465 OX=112092 8 GN=queG PE=3 SV=1
MASSTSSQKLSQKIELQQFDPQALKAWIKAQALDLGFSDCVIAKPDAQDQMPRFKEYLKRGYHADMHYLEENLEKRADPTLLVPGTKSIICVRMNYLVASPKPRYVPFEPNSAIIARYARGRDYHKIMRGRLKTLATRLREKVGDFESRPFADSAPIFEKSLAESAGMGWTGKHTLLIHKKSGSFFVLGELFTSLDLPFDQPATAHCGSCTACIDICPTQAIVEPYMLDARKCIAYLTIEYKGIIPEELRSGIGNRIFGCDDCQLICPWNGFAKTASIPDFDPRHSLDDISLLEIWQWDEATFLAKTEGSPIRRTGYQSFKRNIAIGLGNAPYSAEIVSQLQEAKALHDEIVNVHIEWAIQQQLQQINVPE

SEQ ID NO: 74123 - protein, 366 aa, Acinetobacter towneri
  misc_feature (1)..(366): tr|A0A1E8DZR1|A0A1E8DZR1_9GAMM Epoxyqueuosine reductase OS=Acinetobacter towneri OX=202956 GN=queG PE=3 SV=1
MAKSTTSAQISLYQDDPVALKTWIKAQALALGFADCVIAKPDAQAELARFQEYLKRGYHGDMKFLEENLDKRANPTLLVPNTKSIICVRMNYLVETPRPRHIPDAPNSAIIARYARGRDYHKVMRGRLKTLATRIREKVGEFESRPFADSAPIFEKSLAESAGMGWTGKHTLLIHKKSGSFFVLGELFTSLDLPFDAPATSHCGSCTACIDICPTQAIVEPYMLDARKCIAYLTIEYQGVIPEELRRGIGNRVFGCDDCQLICPWNSFAQVTTVDDFHPRHALDQVSLLDLWQWDESTFLAKTEGSPLRRTGYQSFMRNIAIGLGNAPFSAQILQTLQQTRAQHDEIVQIHMDWAIQEQLLKQPKI

SEQ ID NO: 74124 - protein, 369 aa, Acinetobacter towneri
  misc_feature (1)..(369): tr|N9B5C8|N9B5C8_9GAMM Epoxyqueuosine reductase OS=Acin etobacter towneri DSM 14962 = CIP 107472 OX=1120929 GN= queG PE=3 SV=1
MATSTTSAHISLHQDDPAALKAWIKAQALALGFADCVIAKPDAQAELARFQEYLKRGYHGDMKFLEENLDKRANPTLLVPNTKSIICVRMNYLVETPRPRHIPDAPNSAIIARYARGRDYHKVMRGRLKTLATRIREKVGEFESRPFADSAPIFEKSLAESAGMGWTGKHTLLIHKKSGSFFVLGELFTSLDLPFDAPATPHCGSCTACIDICPTQAIVEPYMLDARKCIAYLTIEYQGVIPEELRRGIGNRVFGCDDCQLICPWNSFAQVTTVDDFHPRHALDQISLLDLWQWDESTFLAKTEGSPLRRTGYQSFMRNIAIGLGNAPFSAQILQILQQTRTQHDEIVQIHMDWAIQEQLLKQPKIKQK

SEQ ID NO: 74125 - protein, 367 aa, Acinetobacter ursingii
  misc_feature (1)..(367): tr|A0A3R9SJD7|A0A3R9SJD7_9GAMM Epoxyqueuosine reductase OS=Acinetobacter ursingii OX=108980 GN=queG PE=3 SV=1
MSSISSAASIPVLQHDAIALKQWIKQQALALGFADCVIAKPDAQAQMPRFEEYLKRGYHADMHYLEENLEKRADPKLLVPGTKSIICVRMNYLVETPKPRYVPDEPNSAIIARYARGRDYHKVMRGRLKTLASKIKEKVGEFESRPFADSAPIFEKSLAESAGMGWTGKHTLLIHKKSGSFFVLGELFTSLDLPFDEPATAHCGSCSACIDICPTQAIVEPYMLDARKCIAYLTIEYKGIIPEELRSGIGNRIFGCDDCQLICPWNSFAKTASIPDFDPRHGLDNISLIEIWNWDEATFLNNTEGSPIRRTGYQSFKRNIAIGLGNALYSELTVEQLIQAKAQHDDIVNVHIDWAIEQQLLKQRASQ

SEQ ID NO: 74126 - protein, 367 aa, Acinetobacter ursingii; identical to SEQ ID NO: 74125
  misc_feature (1)..(367): tr|N9SCF5|N9SCF5_9GAMM Epoxyqueuosine reductase OS=Acin etobacter ursingii NIPH 706 OX=1217716 GN=queG PE=3 SV= 1

SEQ ID NO: 74127 - protein, 364 aa, Acinetobacter variabilis
  misc_feature (1)..(364): tr|A0A427LKW7|A0A427LKW7_9GAMM Epoxyqueuosine reductase OS=Acinetobacter variabilis OX=70346 GN=queG PE=3 SV=1
MTTPDSQAQIQVYQQDPNELKAWIKAQARELGFSDCVIAKPDAQAELARLQEYLDRGYHGDMKFLEENLEKRADPTLLIPNTKSVICVRMDYLVDLPEPRLVPYAPNSAIIARYARGRDYHKTMRGRLKMLASKIREKVGEFESRPFADSAPVFEKSLAESAGMGWTGKHTLLIHKKSGSFFVLGELFSSLELPFDEPASKHCGSCTACIDICPTQAIVEPYMLDARRCIAYLTIEYKGIIPEELRRGIGNRVFGCDDCQLICPWNSFAQKTNIEDFHPRHGLDQVSLLDLWQWDEATFLSSTEGSPLRRTGYQSFMRNIAIGLGNAPFDPQIVQALQAQQNQHDEIVQVHIDWAIQEQLAKSR

SEQ ID NO: 74128 - protein, 364 aa, Acinetobacter variabilis
  misc_feature (1)..(364): tr|N9NZE6|N9NZE6_9GAMM Epoxyqueuosine reductase OS=Acin etobacter variabilis OX=70346 GN=queG PE=3 SV=1
MTIPDSQAQIQVYQQDPNELKAWIKAQARELGFSDCVIAKPDAQAELVRLQEYLDRGYHGDMKFLEENLEKRANPTLLIPNTKSVICVRMDYLVDLPEPRLVPYAPNSAIIARYARGRDYHKTMRGRLKMLAAKIREKVGEFESRPFADSAPVFEKSLAESAGMGWTGKHTLLIHKKSGSFFVLGELFSLLELPFDEPASKHCGSCTACIDICPTQAIVEPYMLDARRCIAYLTIEYKGIIPEELRRGIGNRVFGCDDCQLICPWNSFAQKTNIEDFHPRYGLDQVSLLDLWQWDEATFLSSTEGSPLRRTGYQSFMRNIAIGLGNAPFDPQIVQALQAQQNQHDEIVRVHIDWAIQEQLAKSR

SEQ ID NO: 74129 - protein, 369 aa, Acinetobacter venetianus
  misc_feature (1)..(369): tr|A0A150HRH1|A0A150HRH1_9GAMM Epoxyqueuosine reductase OS=Acinetobacter venetianus OX=52133 GN=queG PE=3 SV=1
MASSTPSGKSLDKIELQQLDPQELKTWIKAQALDLGFSDCVIAKPDAQDQMPRFKEYLERGYHADMHYLEENLQKRADPTLLVPGTKSIICVRMNYLVASPQPRYVPFEPNSAIIARYARGRDYHKVMRGRLKTLSSRIKQKVGDFESRPFADSAPIFEKSLAESAGMGWTGKHTLLIHKKSGSFFVLGELFTSLELPFDQPATAHCGSCTACIDICPTQAIVEPYMLDARKCIAYLTIEYKGIIPEELRQGIGNRIFGCDDCQLICPWNSFAKMATIPDFDARHSLDNISLLDIWQWDEVTFLANTEGSPIRRTGYQSFKRNIAIGLGNAPYSVDVVTQLQEAKPLHDEIVNVHIDWAIQQQLQRANV

SEQ ID NO: 74130 - protein, 369 aa, Acinetobacter venetianus
  misc_feature (1)..(369): tr|N8ZT00|N8ZT00_ACIVR Epoxyqueuosine reductase OS=Acin etobacter venetianus (strain ATCC 31012 / CIP 110063 / RAG-1) OX=1191460 GN=queG PE=3 SV=1
MASSTPSEKSLDKIELQQLDPQELKTWIKAQALDLGFSDCVIAKPDAQDQMPRFKEYLERGYHADMHYLEENLEKRANPTLLVPGTKSIICVRMNYLVASPQPRYVPFEPNSAIIARYARGRDYHKVMRGRLKTLASQIKEKVGDFESRPFADSAPIFEKSLAESAGMGWTGKHTLLIHKKSGSFFVLGELFTSLELPFDQPATAHCGSCTACIDICPTQAIVEPYMLDARKCIAYLTIEYKGIIPEELRQGIGNRIFGCDDCQLICPWNSFAKMATIPDFDARHGLDNISLLDIWQWDEATFLANTEGSPIRRTGYQSFKRNIAIGLGNAPYSADVVTQLQEAKPLHDEIVNVHIDWAIQQQLQRANV

SEQ ID NO: 74131 - protein, 364 aa, Acinetobacter wuhouensis
  misc_feature (1)..(364): tr|A0A385C366|A0A385C366_9GAMM Epoxyqueuosine reductase OS=Acinetobacter wuhouensis OX=1879050 GN=queG PE=3 SV =1
MSATSTTPSIPLQQLDLQELKTWIKQQALQLGFADCVIARPDAQAELPRFKEYLKRGYHGDMKFLEENLEKRADPTLLVPGTKSIICVRMNYLVETPKPRYVPDEPNSAIIARYARGRDYHKVMRGRLKTLASIIRERVGEFESRPFADSAPVFEKSLAENAGMGWTGKHTLLIHKKSGSFFVLGELFTSLELPFDEPATHHCGSCTACIDICPTQAIVEPYMLDARKCIAYLTIEYKGIIPEELRRGIGNRVFGCDDCQLICPWNSFAKKASIEDFNPRHGLDDVSLLDLWQWDEQTFLDCTEGSPIRRTGFQSFKRNIAIGLGNAPFSPQIIQALQQNNPQHDHVVQVHVDWAIAEQLAKKP

SEQ ID NO: 74132 - protein, 364 aa, Acinetobacter wuhouensis
  misc_feature (1)..(364): tr|A0A3G2T4R2|A0A3G2T4R2_9GAMM Epoxyqueuosine reductase OS=Acinetobacter wuhouensis OX=1879050 GN=queG PE=3 SV =1
MSATSTTPSIPLQQLDLQELKTWIKQQALQLGFADCVIARPDAQAELPRFKEYLKRGYHGDMKFLEENLEKRADPTLLVPGTKSIICVRMNYLVETPKPRYVPDEPNSAIIARYARGRDYHKVMRGRLKTLASIIRERVGEFESRPFADSAPVFEKSLAENAGMGWTGKHTLLIHKKSGSFFVLGELFTSLELPFDEPATHHCGSCTACIDICPTQAIVEPYMLDARKCIAYLTIEYKGIIPEELRRGIGNRVFGCDDCQLICPWNSFAKKASIEDFNPRHGLDDVSLLDLWQWDEQTFLDCTEGSPIRRTGFQSFKRNIAIGLGNAPFSPKNIQALQQNNPQHDHVVQVHVDWAIAEQLAKKP

SEQ ID NO: 74133 - protein, 343 aa, Actibacterium atlanticum
  misc_feature (1)..(343): tr|A0A058ZMG5|A0A058ZMG5_9RHOB Epoxyqueuosine reductase OS=Actibacterium atlanticum OX=1461693 GN=queG PE=3 SV =1
MLKQALISRALEEGFAKCRIMRPDAVPELPDRLAAFVEQGYHGQMGWMAERMQWRGNPAALWPQAKSVIMLAEPYTPDEDPMEVIAQPDRAAISVYARNRDYHDVAKKRLKRLGRWLLEQAPGEEIKVFVDTAPVMEKPLAQAAGLGWQGKHTNLLGRDLGSWFFLGALFTTVEFEPDTPEINHCGNCTACLEACPTDAFPAPYQIDARRCISYLTIEHHGPVDEKLRAKMGNRIYGCDDCLAACPWNKFAVEASEMKYAARDDLIAPKLADLALLDDAGFRAHFSGSPIKRIGRNRFVRNVLYAIGNSGDASLLHPAQALLDDPDDTVADAARWAVARLSKK

SEQ ID NO: 74134 - protein, 347 aa, Actibacterium mucosum
  misc_feature (1)..(347): tr|A0A037ZL25|A0A037ZL25_9RHOB Epoxyqueuosine reductase OS=Actibacterium mucosum KCTC 23349 OX=1454373 GN=queG PE=3 SV=1
MTDQLRADLTDFAHQAGFAAVGFCRPDAVPQLPERLKFFLDEGRHGQMGWMAERTHWRADPAALWPEAQTVIMLAEPYTPDHNPLDTLARRDRAAISVYAQNRDYHDIVKKRLKRVGRWLLEQVPAGEAIKVFVDTAPVMEKPLAQAAGLGWQGKHTNLLSRDLGNWFFLGAIFTTVRFDADTPGLSKCGSCTACLDICPTKAFPAPYQLDARRCISYLTIEHHGPVAPDLRAAMGNRIYGCDDCLAICPWNKFAVTGAEARYAARDDLRAPPLAELAMLDDAGFRARFSGSPIKRIGRNRFVRNVLYAIGNSGDPALLPTARALQGDADPTVADAAQWAFARLANP

SEQ ID NO: 74135 - protein, 276 aa, Actinobacillus pleuropneumoniae
  misc_feature (1)..(276): tr|A0A4U9WQ36|A0A4U9WQ36_ACTPL Epoxyqueuosine reductase OS=Actinobacillus pleuropneumoniae OX=715 GN=queG PE=4 SV=1
MTYTLGSYAPPPSVWEELKQELKAVAPELGIDDIGFASAEPFQSLKGILQSHRDKGFESGFEEPDLDKRVTPALPGTEPKSLIAIAITYHSKMENPPKSEPGKYRGIMARSAWGRDYHHVLREAMSRLEAYIKERVPDAELESMVDTGALVDRAVSQRAGIGFSAKNCAIISPKFGSWIFLGEMVTNIPFPPDTPITEDCGECTKCIDACPTGALVGPGQLNAQRCVSFLTQTKGFLDEEAMRKIGNRLYGCDTVKLFVRRTGQELDSSRGLQARS

SEQ ID NO: 74136 - protein, 367 aa, Actinobacteria bacterium
  misc_feature (1)..(367): tr|A0A2E7TIU0|A0A2E7TIU0_9ACTN 4Fe-4S ferredoxin-type d omain-containing protein OS=Actinobacteria bacterium OX =1883427 GN=CL508_00280 PE=4 SV=1
  misc_feature (84)..(84): Xaa can be any naturally occurring amino acid
  misc_feature (152)..(152): Xaa can be any naturally occurring amino acid
  misc_feature (176)..(176): Xaa can be any naturally occurring amino acid
  misc_feature (322)..(322): Xaa can be any naturally occurring amino acid
  misc_feature (358)..(358): Xaa can be any naturally occurring amino acid
MKDINLLNYLSENNIDIPDGFNISVVRLPSQLNKSLEINRAKEENRHANMKFTFSDPNYSGLGDKFEWAESCIIVSYSYISEDXSNLGFLPGRGSIARFAKEDFYIPLKEFINQIKEHFKKKNLRTAEFIDNPKHYDRLFFEQSGLGWQGKXTMMLSPGKGPWQLIGNIYVEKKFXLAIEKDYSCGSCNLCQISCPTGALDEDFILDSNKCISYWLQSPDIIPHDMREKIGNRFYGCDECLISCPPGQGVATNNNIDSSVDLVQVLNSDSSDLLELYNWFYIPKRNGDFLKRNAIIALANNPSSDTKEVFINLLKSNSDLVXLYCIWGLWKIGEFEVVSQNLDIENEKNEMILEEYQXLNEMIYSNK

SEQ ID NO: 74137 - protein, 358 aa, Actinobacteria bacterium
  misc_feature (1)..(358): tr|A0A1Z9JN71|A0A1Z9JN71_9ACTN Epoxyqueuosine reductase OS=Actinobacteria bacterium TMED172 OX=1986617 GN=queG PE=3 SV=1
  misc_feature (184)..(184): Xaa can be any naturally occurring amino acid
  misc_feature (186)..(186): Xaa can be any naturally occurring amino acid
  misc_feature (190)..(190): Xaa can be any naturally occurring amino acid
  misc_feature (201)..(201): Xaa can be any naturally occurring amino acid
  misc_feature (212)..(212): Xaa can be any naturally occurring amino acid
  misc_feature (230)..(230): Xaa can be any naturally occurring amino acid
  misc_feature (265)..(265): Xaa can be any naturally occurring amino acid
  misc_feature (277)..(277): Xaa can be any naturally occurring amino acid
  misc_feature (281)..(281): Xaa can be any naturally occurring amino acid
  misc_feature (286)..(287): Xaa can be any naturally occurring amino acid
  misc_feature (305)..(305): Xaa can be any naturally occurring amino acid
  misc_feature (324)..(324): Xaa can be any naturally occurring amino acid
  misc_feature (329)..(329): Xaa can be any naturally occurring amino acid
  misc_feature (337)..(337): Xaa can be any naturally occurring amino acid
  misc_feature (339)..(339): Xaa can be any naturally occurring amino acid
  misc_feature (341)..(341): Xaa can be any naturally occurring amino acid
  misc_feature (345)..(346): Xaa can be any naturally occurring amino acid
  misc_feature (349)..(349): Xaa can be any naturally occurring amino acid
MSDAALLALADDIKRWGRELGFQQVGITDTELGQHSDHLHRWLEKHHHGEMAYMAERETLRQNPEALHANTLRVISLRMDYLPPEVETVKILDHPRTAYISRYALGRDYHKLIRKRIKQLADKIIAQVGQHSSRPFVDSAPVLERALAEKAGLGWIGKNAMLINPSMGSWFFLGELFTDLPLPXDXPQTXQHCGSCTACLXICPTQAFVGPXQLDARRCISYLTIELKTXIPIELRPLIGNRVFGCDDCQLICPWNKFAKPTDEXDFKPRHGLDQAXMVDXFLWTXXEFDRHTQGSAIRRIGYEXWLRNLAVGIGNGENSAQAXAALLXQRGFSALXDXHXDWAXXQLXKNDRPVIRG

SEQ ID NO: 74138 - protein, 385 aa, Unknown
  misc_feature (1)..(385): tr|A0A094RKJ3|A0A094RKJ3_9ACTN 4Fe-4S ferredoxin-type d omain-containing protein OS=actinobacterium acAcidi OX= 1504320 GN=GM46_11225 PE=4 SV=1
MPLAKPSSRNPAVVSPDAPQGPEYWAQLHAIGQAAGLHSLGVAPADQMLRARQQIHDRIDQDLVNDMKFTFLRPERSTTPRQHLDGAQSIIVGVRSYAITDHSDDGASSPLARVARYAWLDHYGHLKDSLSVIAERLRQDGHRAVVFADDNAMVDRESAWLAGLGWFGKNANILLPGHGSFFVIGCVITTAVLPIATPIDDGCGACSRCIPACPTGAIVKDGVIDANKCLAWLLQKPGIFDREFRVALHDRIYGCDDCQTACPQVRRQELSESTEQLQSMIEVLAWLSMDDETLHESCMRWYVHKRDMTWIRRNLLIVLGNIADPKNPDVVDAVRKYLSHSRSELRAHAVWAAARLGLTELINHEDSDPMVCDELLHLPTLREGL

SEQ ID NO: 74139 - protein, 386 aa, Unknown
  misc_feature (1)..(386): tr|A0A094Q7I3|A0A094Q7I3_9ACTN 4Fe-4S ferredoxin-type d omain-containing protein OS=actinobacterium acAcidi OX= 1504320 GN=GM46_5710 PE=4 SV=1
MPEWCLRFGIVPLANQQPFNREQAAAYTEQLRALGLANGIDRIGVAPATVMQRARETLHSRKAIGLHDTMQFTYRNPDRSTNPEAAVPNAKAMIVGACSYSTDGPNEPQQLSARVARYAWADYYETLRDGLGVVAEALKSNGWNAQVFVDHNALVDREAAYLAGLGWYGKNANLLISGAGSFFVLGSVVTDAPLVVNERPVDDGCGACKRCLDSCPTNAIVEPGVIDAAKCLAWLVQKPGVFNRDYRVALADRVYGCDSCQDVCPPTIRLGITTKPTAVRAWVPILHMLNMEDAQLLESVGQWYIADRNPMWVRRNLLIVLGNIGNAEDEDVRDAIQRFCSHKEPMLRAHAIWSAARLGLHQFIPLTDEDPVVVEELRNLPEVRVG

SEQ ID NO: 74140 - protein, 465 aa, Actinomyces sp.
  misc_feature (1)..(465): tr|A0A3M2GMB2|A0A3M2GMB2_ACTSX tRNA epoxyqueuosine(34) reductase QueG OS=Actinomyces sp. OX=29317 GN=queG PE=4 SV=1
MRRVLLRRHAPLRGLCGHPRPGGRPHPSPGPRRRGARRRPPPQRGRPRAPAPLPGPGGVRGPGACEHGHVRRVPEVAELVEAGRRAGLAAVGVATAAPFDEVRVTLERRRAAGLAADMQFTYRNPARSTDPARSLPGARSLVVGALSFAVPDTPPPARPAGRVAAYATDDHYARLRAALGSVADILGGEGWRAVVLADQNALVDRAAAHRAGIGWWGRSTNILVPGAGSTVVLGSVVTDAPLVEVDPEPVADACGPCRRCLDACPTGALVAPGVLDARRCLAWIVQAPGMIDPAWREALGDRLYGCDDCQDACPPNRVPRGRARPTAPGEPDGRRWVDVVELLSCDDETLLERFGRWYIAGRDPAHLRRNALVVCANTAEPAPRTSPEVVAVLERHLSDPRPLVRAHAVWAARRLGLDELCVHAADDPDERVRAELAAAVEPRAPRPVTGSEAVPPTPRPDRRAH

SEQ ID NO: 74141 - protein, 312 aa, Adhaeribacter aerolatus
  misc_feature (1)..(312): tr|A0A512ARM9|A0A512ARM9_9BACT Epoxyqueuosine reductase OS=Adhaeribacter aerolatus OX=670289 GN=queG PE=3 SV=1
MSVKQQFTNLIKQKATELGFMYCGISKAEFLEEEAPRLENWLNNQMHGQMHYMENHFDKRLDPHLLVPGAKSVVSLLLNYYPPETLPENSLQISKYAYGQDYHFVIKDKLKSLLTYIRENIGEVDGRAFVDSAPVLDKAWAKKSGLGWIGKNSNLITTQVGSFYFIAELIIDLELEYDGPIKDYCGTCTKCLDACPTGAITEPYVVDGSKCISYFTIELKDKIPDEVGGKFGNWVFGCDICQDVCPWNRFSKPHQEPAFKLEPALQHLAKNDWRELTEDVFRQVFRKSAVKRTGFNGLLRNIKFVEEQKEKN

SEQ ID NO: 74142 - protein, 311 aa, Adhaeribacter sp.
  misc_feature (1)..(311): tr|A0A2T2Y9K1|A0A2T2Y9K1_9BACT Epoxyqueuosine reductase OS=Adhaeribacter sp. HMF7605 OX=2072846 GN=queG PE=3 S V=1
MLPTQQYTQLIKQKALELGFMYCGISKAEFLEEEAPRLENWLNRQMHGQMHYMENHFDKRLDPRLLVEGAKSVVSLLLNYYPEEQQPNDTFQISKYAYGQDYHFVIKDKLKDLLAYIRENIGEVGGRAFVDSAPVLDKAWAKKSGLGWIGKNSNLITPQVGSFYFIAELILDVELEYDGPIKDYCGTCTKCLDACPTNAIIEPYVVDGSKCISYFTIELKDQIPDSVDGKLGNWVFGCDICQDVCPWNRFARPHQEPAFNPNPGLLNMSEKDWQEITEDVFREVFRKSAVKRTGYNGLLRNIKFVTHKKDD

SEQ ID NO: 74143 - protein, 311 aa, Adhaeribacter sp.
  misc_feature (1)..(311): tr|A0A369QF62|A0A369QF62_9BACT Epoxyqueuosine reductase OS=Adhaeribacter sp. HMF7616 OX=2072847 GN=queG PE=3 S V=1
MTPKQQYTFLIKQKAQELGFMFCGVSRAEFLEEEAPRLENWLNRQMHGQMHYMENHFDKRLDPRLLVEGAKSVVSLLLNYYPEQPQPTDTFQISKYAYGQDYHFVIKDKLKSLLAYIRETIGDVGGRAFVDSAPVLDKAWAKKSGLGWVGKNSNLITPQVGSFYFIAELIIDLELEYDGPIKDYCGTCTKCIDACPTDAIIEPYVVNGSKCISYFTIELKDQIPQEVNGKFGNWVFGCDICQDVCPWNRFAKAHQEPAFDPQPGLTEFSKKDWQEITEEIFKEVFRKSAVKRTGFNGLLRNIKFVIPKNED

SEQ ID NO: 74144 - protein, 308 aa, Aequorivita antarctica
  misc_feature (1)..(308): tr|A0A5C6Z4D7|A0A5C6Z4D7_9FLAO Epoxyqueuosine reductase OS=Aequorivita antarctica OX=153266 GN=queG PE=3 SV=1
MIQNPLKYSQLIKVEAKRLGFISCGISKAEFLEEEAPRLENWLNKNMNGEMAYMENHFDKRLDPTILVPDSKSVISLLLNYFPSEIQTSETYKISKYAYGTDYHFIIKAKLKQLMDFISEEIGEVHGRAFVDSAPVLDKAWAAKSGLGWIGKHSNLLTKQLGSFYFIAELIIDLDLEYDTPVTDHCGSCTACIDACPTQAIVADKVVDGSKCISYFTIELKNEIPTSQKGHFEDWMFGCDICQDVCPWNRFSKLHSEPIFNPHPEMLSMTKKDWEEITEEVFQKLFKNSAVKRTKFSGLQRNINFLKD

SEQ ID NO: 74145 - protein, 308 aa, Aequorivita lipolytica
  misc_feature (1)..(308): tr|A0A5C6YTC2|A0A5C6YTC2_9FLAO Epoxyqueuosine reductase OS=Aequorivita lipolytica OX=153267 GN=queG PE=3 SV=1
MIQNTSKYTQLIKAEAKRLGFLSCGISKAEFLEEEAPRLENWLKKNMNGEMAYMENHFDKRLDPTILVPDSKSVISLLLNYFPSETQTSETYKISKYAYGTDYHLVIKDKLKQLMNFISEEIGEVHGRAFVDSAPVLDKAWAAKSGLGWIGKHSNLLTKQLGSFYFIAELILDLDLEYDSPVTDHCGSCNACIDACPTNAIVADKVVDGSKCISYFTIELKNEIPTSQKGNFEDWMFGCDICQDVCPWNRFSKPHNEPLFNPNPELLSMSKKDWEEITEDVFQKLFQKSAVNRTKFSGLKRNIQFLKD

SEQ ID NO: 74146 - protein, 308 aa, Aequorivita soesokkakensis
  misc_feature (1)..(308): tr|A0A1A9LFZ9|A0A1A9LFZ9_9FLAO Epoxyqueuosine reductase OS=Aequorivita soesokkakensis OX=1385699 GN=queG PE=3 SV=1
MINNKSKNTAVIKAEAKRLGFLSCGISKAEFLEKEAPRLETWLKKNMHGEMAYMENHFDKRLDPTLLVQDSKSVISLLLNYFPSEIQNPDSYQISKYAYGTDYHFVIKDKLKQLMEFISEKIGEVHGRAFVDSAPVLDKAWAAKSGLGWIGKHSNLLTKQLGSFYFIAELIVDLDLEYDTPVTDHCGSCTACIDACPTNAIVADKVVDGSKCISYFTIELKNEIPTSQKGNFEDWMFGCDICQDVCPWNRFSKPHNEPLFNPNPELLSMTKKDWEEITEDVFQKIFKNSAVNRTKFSGLKRNINFVKD

SEQ ID NO: 74147 - protein, 307 aa, Aequorivita sp.
  misc_feature (1)..(307): tr|A0A2D4XKS2|A0A2D4XKS2_9FLAO Epoxyqueuosine reductase OS=Aequorivita sp. OX=1872390 GN=queG PE=3 SV=1
MNDKSKNTAKIKSEAKRLGFLSCGISKAEFLEEQAPRLENWLNKDMHGEMAYMENHFDKRLNPTLLVPDSKSVISLLLNYFPSELQPSETYKISKYAYGTDYHFIIKDKLKQLMDFISEEIGEVHGRAFVDSAPVLDKAWAAKSGLGWIGKHSNLLTKQLGSFYFIAELIVDLDLEYDTPVTDHCGSCTACIDACPTNAIVADRVVDGSKCISYYTIELKNEIPTSEKGKFEDWMFGCDICQDVCPWNRFSKPNNEPLFNPHPELLSMTKKDWEEITEDVFQKLFKKSAVKRTKFLGLERNINFLKD

SEQ ID NO: 74148 - protein, 307 aa, Aequorivita sp.
  misc_feature (1)..(307): tr|A0A410G3X9|A0A410G3X9_9FLAO Epoxyqueuosine reductase OS=Aequorivita sp. H23M31 OX=2494375 GN=queG PE=3 SV=1
MSNKSKYTDLIKAEAKRLGFLSCGISKAGFLEEEAPRLESYLKANMNGEMAYLENHFDKRLDPTILVPDSKSVISLLYNYFPAETQREDTYKISKYAYGTDYHFVIKDKLKLLMDFISEEIGDVGGRAFVDSAPVLDKAWASKSGLGWIGKHSLLLTKQRGSFYFVSELILDLELEYDSPVTDHCGSCTACIDACPTGAIVAERVVDGSKCISYFTIELKNQIPESEKGKFENWMFGCDICQDVCPWNRFSQTHNEPLFNPHPDLLNMDRSDWEEITEEVFKSVFKKSAVKRTKFSGLQRNIQFLKD

SEQ ID NO: 74149 - protein, 308 aa, Aequorivita sublithincola
  misc_feature (1)..(308): tr|I3YTS5|I3YTS5_AEQSU Epoxyqueuosine reductase OS=Aequ orivita sublithincola (strain DSM 14238 / LMG 21431 / A CAM 643 / 9-3) OX=746697 GN=queG PE=3 SV=1
MIQNSSKYTQLIKAEAKRLGFISCGISRAEFLEEDAPRLENWLKNNMNGEMAYMENHFDKRLDPTLLVPDSKSVISLLLNYFPSETQTSESYKISKYAYGVDYHFIIKDKLKQLMEFISEEIGEVNGRAFVDSAPVLDKAWAAKSGLGWIGKHSNLLTKQVGSFYFIAELILDLDLEYDNPVTDHCGSCNACIDACPTNAIVADKVVDGSKCISYFTIELKNEIPISEKGKFEDWMFGCDICQDVCPWNRFSKSHNEPLFNPNPELLSMTKKDWEEITEEVFQKIFQKSAVKRTKFSGLQRNIKFLKD

SEQ ID NO: 74150 - protein, 307 aa, Aequorivita viscosa
  misc_feature (1)..(307): tr|A0A1M6AF29|A0A1M6AF29_9FLAO Epoxyqueuosine reductase OS=Aequorivita viscosa OX=797419 GN=queG PE=3 SV=1
MSSKSVYSNLIKAEAKRLGFLSCGISKAGFLEEEAPRLEHYLKNNMNGEMAYMENHFDKRLDPTILVPGSKSVISLLLNYFPSETQIDNTYKVSKYAYGTDYHFVIKDKLKQLMYFISEEIGDVSGRAFVDSAPVLDKAWAAKSGLGWVGKHSLLLTKNTGSFYFVAELILDLDLDYDAPVTDHCGTCTACIDACPTDAIVADRVVDGSKCISYFTIELKNEIPNSEKGKFEDWMFGCDICQDVCPWNRFSKPHNEPLFNPHPEMLDMNKKDWEEITAEVFQKIFQKSAVKRTKLSGLERNIQFLKK

SEQ ID NO: 74151 - protein, 377 aa, Aeribacillus composti
  misc_feature (1)..(377): tr|A0A559UGU1|A0A559UGU1_9BACI Epoxyqueuosine reductase OS=Aeribacillus composti OX=1868734 GN=queG PE=3 SV=1
MDFAVLKQEIIEYSKQIGIDKIGFASADVFETLKERLIVQQQLGYQSGFEEPDIEKRTNPELLLPKAKSIISIALAYPSKMKNAPRSTKKERRGLFCRASWGTDYHVILKDRLKKLERFILEKVDGAQVKSMVDTGELSDRAVAERAGIGWSGKNCMIITPEFGSYVYLGEMITNIPFPPDSPIEDRCGSCNICVDSCPTGALVQGGQLDSKKCIAFLTQTKGFLPDEYRGKIGNRLYGCDTCQLVCPENKGKDFHIHSEMEPDPEIAKPKLKPLLHISNREFKEKFGHIAGSWRGKKPIQRNAIIALAHYKDRTALPDLIKLMHEDSRPIIRGTAAWAIGRIGDQSVLFELEKALEKEQDEEVKNEIVKGIEMLKA

SEQ ID NO: 74152 - protein, 377 aa, Aeribacillus pallidus; identical to SEQ ID NO: 74151
  misc_feature (1)..(377): tr|A0A165YEB3|A0A165YEB3_9BACI Epoxyqueuosine reductase OS=Aeribacillus pallidus OX=33936 GN=queG PE=3 SV=1

SEQ ID NO: 74153 - protein, 399 aa, Aerococcaceae bacterium
  misc_feature (1)..(399): tr|A0A3D0CHG6|A0A3D0CHG6_9LACT tRNA epoxyqueuosine(34) reductase QueG OS=Aerococcaceae bacterium OX=2053495 GN =queG PE=4 SV=1
MINIRSRFVEVTDLNQQLKEKIKLKAEELGIDKIGFTHAEPFYTLEDRLKQQRAAGHNSGFEHKNIEERIYPEKIFEQPKSIIAIALAYPSRMKKPRSEKGKPRGEFARASWGTDYHHILNDRMNKLIAYIKEAADEENIGSVDFKPMVDTGELVDVAVAQRAGLGFIGRNGLLITEEFGSFVYLGEIITNIDFEADEEVPFGCGDCMKCIDACPTGALLGDGRINAQVCLSYQTQTKGYMPEEFRKKMGRVIYGCDICQVVCPYNRGINTHHHEEMEPDPELTNPVLEPLLDISNREFKESFGKMAGSWRGKKPLQRNAIIALANYREKSAIPKLLQVIETDPRPMIRGTAAWAIAKITEESPNQELILFLEEMREKEDEAETISEFNKALDILRTNM

SEQ ID NO: 74154 - protein, 389 aa, Aerococcaceae bacterium
  misc_feature (1)..(389): tr|A0A347WLP2|A0A347WLP2_9LACT tRNA epoxyqueuosine(34) reductase QueG OS=Aerococcaceae bacterium ZY16052 OX=20 36206 GN=queG PE=4 SV=1
MDNTVLKQEIQRLASEVGIDKIGFTNADPFDELASSLREQKAMGHTTGFEHQVLEERLYPDLIFDQPKSIISIALAYPSRIKEPLENTKEVKRGQFARASWGIDYHTILREKMECLIEEIKVLAPHAHFKAMVDTGELMDVAVAQRAGIGFIGRNGLLITEEFGSWIYLGEIVTDLEIAPDEPVPFGCGDCYRCVNACPTGALLGDGRMNGQRCLSYQTQTKGYMPEEFRKKISNVIYGCDICQHVCPYNQGIDFHRHPEMEPDSEVVQPALKPLLTISNRAFRETYGHLAGSWRGKKPLQRNAIIALVNSRDRTALPQLIQVMEEDPRPMMRGTAAWAISKLQRDYNAQLLACVKAQYVKETDKETIDEMRQAIHTLERKRPAKKPRR

SEQ ID NO: 74155 - protein, 399 aa, Aerococcus sanguinicola
  misc_feature (1)..(399): tr|A0A2I1MTT4|A0A2I1MTT4_9LACT tRNA epoxyqueuosine(34) reductase QueG OS=Aerococcus sanguinicola OX=119206 GN= queG PE=4 SV=1
MAMDWQVETEKIRRLALDEVGMNLVGFTTADDFTHIRQSLVEAKEEGRTTGFEHPVIEERLYPKALMEGAASIISFAMAYPNKPLYPKEHSRGERRGQFARASWGEDYHSILHRAASDLVQRLEGLYPDIETKTMVDTGELPDVAVAQRAGIGFIGRNGLIINEKFGSFIYLGEIITNLPLVPDTPKANACGDCTRCLDFCPTGALIGDGKMNAKVCVSYLTQTKGYIPQEFRRQVGHQIYGCDICQQVCPYNQNVDSHYHGAMEPEREEVEPLLQPMLTMSNREFKDKFGHLAGAWRGKKPLQRNAILALANYRDRSSIPLLLELIEKDPRPMIRGTAAYAVSIIERHFNPELLSFMEERLEAEQAQPSPDQETVVEFSQAVERLKKKRNKRQRKRSR

SEQ ID NO: 74156 - protein, 397 aa, Aerococcus sanguinicola
  misc_feature (1)..(397): tr|A0A0X8FC77|A0A0X8FC77_9LACT Epoxyqueuosine reductase OS=Aerococcus sanguinicola OX=119206 GN=AWM72_06715 PE =4 SV=1
MDWQVETEKIRRLALDEVGMNLVGFTTADDFTHIRQSLVEAKEEGRTTGFEHPVIEERLYPKALMEGAASIISFAMAYPNKPLYPKEHSRGERRGQFARASWGEDYHSILHRAASDLVQRLEGLYPDIETKTMVDTGELPDVAVAQRAGIGFIGRNGLIINEKFGSFIYLGEIITNLPLVPDTPKANACGDCTRCLDFCPTGALIGDGKMNAKVCVSYLTQTKGYIPQEFRRQVGHQIYGCDICQQVCPYNQNVDSHYHGAMEPEREEVEPLLQPMLTMSNREFKDKFGHLAGAWRGKKPLQRNAILALANYRDRSSIPLLLELIEKDPRPMIRGTAAYAVSIIERHFNPELLSFMEERLEAEQAQPSPDQETVVEFSQAVERLKKKRNKRQRKRSR

SEQ ID NO: 74157 - protein, 397 aa, Aerococcus sp.
  misc_feature (1)..(397): tr|A0A1S1BRM1|A0A1S1BRM1_9LACT Epoxyqueuosine reductase OS=Aerococcus sp. HMSC035B07 OX=1715184 GN=HMPREF2705_ 06780 PE=4 SV=1
MDWQVETEKIRRLALDEIGMNLVGFTTADDFTHIRQSLIEAKEEGRTTGFEHPVIEERLYPKALMEGAASIISFAMAYPNKPLYPKEHSRGERRGQFARASWGEDYHSILHRAASDLVQRLEGLYPDIETKTMVDTGELPDVAVAQRAGIGFIGHNGLIINEKFGSFIYLGEIITNLPLVPDTPKVNACGDCTRCLDFCPTGALIGDGKMNAKVCVSYLTQTKGYIPQEFRRQVGHQIYGCDICQQVCPYNQDVDSHYHGAMEPEREEVEPLLQPMLTMSNREFKDKFGHLAGAWRGKKPLQRNAILALANYRDRSSIPLLLELIEKDPRPMIRGTAAYAVSIIERHFNPELLSFMEERLEAEQAEPAPDQETVVEFSQAVERLKKKRNKRQRKRSR

SEQ ID NO: 74158 - protein, 376 aa, Aerococcus sp.
  misc_feature (1)..(376): tr|A0A1F1DL22|A0A1F1DL22_9LACT Epoxyqueuosine reductase OS=Aerococcus sp. HMSC061A03 OX=1739396 GN=HMPREF2892_ 09800 PE=4 SV=1
MNVVGFTSADDFTHIRQSLEEAEAEGRTTGFEHPVIEERLYPKDLLDGAASIIAFAMAYPNKPLYPKERNRGERRGQFARASWGEDYHSILHRAASDLVQALEERYPGIQTKTMVDTGELPDVAVAQRAGIGFIGRNGLIINEEFGSFIYLGEIITNLPLVPDAPKANACGDCTRCLDFCPTGALLGEGKMNAKVCISYLTQTKGYIPQAFRRQVGHQIYGCDICQQVCPYNQHVDSHYHAAMEPERDQVEPLLKPMLTLSNREFKEQFGHLAGAWRGKKPLQRNAILALANYRDRSAIPLLLEMIEKDPRPMIRGTAAYAVSIIERQFNPELLSFMEDRLRIEEAGPEADQETVVEFSQAVERIKKKRNKRQRKR

SEQ ID NO: 74159 - protein, 386 aa, Aerococcus urinaehominis
  misc_feature (1)..(386): tr|A0A0X8FNT5|A0A0X8FNT5_9LACT Epoxyqueuosine reductase OS=Aerococcus urinaehominis OX=128944 GN=AWM75_06095 P E=4 SV=1
MEEKEKVRDLALNQVGMDLVGFTTADDFSYMQKSLYEQKAAGHTSGFEHPVIDERLYPKRLLASGQSIVSFALAYPNQPLYEKKRERGVRRGQFARASWGVDYHHLLREKMDQLIACLAERYEGFEAYGMVDTGELSDVAVARRAGLGFIGRNGLLINQKYGSYIYLGEIITNLPFDNDPIIADGCGECRRCIDFCPTGALLGDGRMNAKRCISYLTQTKGYIPREFRDQVGHQIYGCDICQQVCPYNQGIDSHIHPLMEPERDQVEPILQPMLTMSNKQFKEQFGHLAGAWRGKKPLQRNAILALANYRDRSAIPLLLEIIDQDMRPMIRGTAAYAVAKIEKRYNQALVDFISQAYDQECRRSDSDEETRIEFKLALTTLKEKRK

SEQ ID NO: 74160 - protein, 384 aa, Aeromonas allosaccharophila
  misc_feature (1)..(384): tr|A0A1Q5VQM8|A0A1Q5VQM8_9GAMM Epoxyqueuosine reductase OS=Aeromonas allosaccharophila OX=656 GN=queG PE=3 SV= 1
MSAPDFHQLAHDIKLWARELGFDQAGITDTDLRIEEPRLQAWLDAGYHGSMDYMARHGMMRARPHELLPGTVRVLSVRMNYLPFEAGFAATLRDPTLGYISRYALGRDYHKVLRNRLKQLGDRIEARCAELFQGTEDTLGEWRPFVDSAPILERPLAAKAGLGWVGKHSLLLNESAGSFFFLGELLLNLPLPLDQPVEKEQCGKCVACINICPTGAIVAPYVVDGRRCISYLTIENDGPIPEEFRPLMGNRIYGCDDCQLICPWNRYADASPEPDFSPRPSLHRPPLLALWRWSESDFLKQTEGSPIRRIGYQRWRRNLAVALGNGPATPEVIAALQLGLTTAEPMVAEHIEWALATLASRQDEENKKTRLLIRCIEKGLSDHA

SEQ ID NO: 74161 - protein, 384 aa, Aeromonas allosaccharophila
  misc_feature (1)..(384): tr|A0A0T6UJB7|A0A0T6UJB7_9GAMM Epoxyqueuosine reductase OS=Aeromonas allosaccharophila OX=656 GN=queG PE=3 SV= 1
MSAPDFHQLAHDIKLWARELGFDQAGITDTDLRIEEPRLQAWLDAGYHGSMDYMARHGMMRARPHELLPGTVRVLSVRMNYLPFEAGFAATLRDPTLGYISRYALGRDYHKVLRNRLKQLGDRIEARCAELFQGTEETLGEWRPFVDSAPILERPLAAKAGLGWVGKHSLLLNESAGSFFFLGELLLNLPLPLDQPVAKEQCGKCVACINICPTGAIVAPYVVDGRRCISYLTIENDGPIPEEFRPLMGNRIYGCDDCQLICPWNRYADASPEPDFSPRPNLHRPPLLTLWGWSESDFLKQTEGSPIRRIGYQRWRRNLAVALGNGPATPEVIAALQQGLTTAEPMVAEHIEWALATLARRQDEENKKTRLLIRCIEKGLPDHA

SEQ ID NO: 74162 - protein, 384 aa, Aeromonas cavernicola
  misc_feature (1)..(384): tr|A0A2H9U5J6|A0A2H9U5J6_9GAMM Epoxyqueuosine reductase OS=Aeromonas cavernicola OX=1006623 GN=queG PE=3 SV=1
MTPPDLQQLAQEIKQWARELGFDQAGITDTDLAIEEPRLQAWLDAGHHGSMDYMARHGMMRARPHELLPGTVRVLSVRMNYLPFEAGFAATLRDPTLGYISRYALGRDYHKLLRHRLKQLGERIDVRCAELCADRAHPIAEWRPFVDSAPILERPLAAKAGLGWVGKHSLLLNESAGSFFFLGELLVSLPLPIDAPVAKEQCGKCVACINICPTGAIVAPYVVDARRCISYLTIENDGPIPEEFRPLMGNRIYGCDDCQLICPWNRYAGASAEPDFKARPSLHRPPLLELWGWSENDFLKQTEGSAIRRIGYQRWRRNLAVALGNGPATPEVFAALKMGLTTAEHMVAEHIEWALTTLARRQTEENKKTRLLIRCIEKGLSDHA

SEQ ID NO: 74163 - protein, 384 aa, Aeromonas caviae
  misc_feature (1)..(384): tr|A0A3G9IKV1|A0A3G9IKV1_AERCA Epoxyqueuosine reductase OS=Aeromonas caviae OX=648 GN=queG PE=3 SV=1
MTAAELAQLAHDIKLWARELGFDQVGIADTDLTLEEPRLQAWLDAGYHGTMDYMARHGMMRARPHELLPGTLRVISVRMNYLPFEAGFAATLRDPTLGYISRYALGRDYHKVLRNRLKQLGERIELRCETLLRAAGQTLGEWRPFVDSAPILERPLAAKAGLGWVGKHSLLLNESAGSFFFLGELLIALPLPVDAPVEKELCGKCVACINICPTGAIIAPYVVDGRRCISYLTIENDGPIPEEFRPLMGNRIYGCDDCQLICPWNRYADASPEPDFSPRPDLHRPPLLVLWRWSEAEFLKHTEGSPIRRIGYQRWRRNLAVALGNGPASSEVLDALQQALPEAAPMVAEHIEWALATLARRQQEENKKTRLLIRCIEKGLPDHA

SEQ ID NO: 74164 - protein, 384 aa, Aeromonas caviae
  misc_feature (1)..(384): tr|A0A3S7NWI4|A0A3S7NWI4_AERCA Epoxyqueuosine reductase OS=Aeromonas caviae OX=648 GN=queG PE=3 SV=1
MTAAELAQLAHDIKLWARELGFDQVGIADTDLTLEEPRLQAWLDAGYHGTMDYMARHGMMRARPHELLPGTLRVISVRMNYLPFEAGFAATLRDPTLGYISRYALGRDYHKVLRNRLKQLGERIELRCDTLLRAAGQTLGEWRPFVDSAPILERPLAAKAGLGWVGKHSLLLNESAGSFFFLGELLIALPLPVDAPVEKELCGKCVACINICPTGAIIAPYVVDGRRCISYLTIENDGPIPEEFRPLMGNRIYGCDDCQLICPWNRYADASPEPDFSPRPNLHRPPLLTLWGWSEAEFLKHTEGSPIRRIGYQRWRRNLAVALGNGPASSEVLAALEQALPEAAPMVAEHIEWALATLARRQQEENKKTRLLIRCIEKGLPDHA

SEQ ID NO: 74165 - protein, 375 aa, Aeromonas dhakensis
  misc_feature (1)..(375): tr|A0A433G670|A0A433G670_9GAMM Epoxyqueuosine reductase OS=Aeromonas dhakensis OX=196024 GN=queG PE=3 SV=1
MTTAELHQLAQDIKLWASELGFDQAGITDTDLTLEEPRLQAWLDAGYHGSMDYMARHGMMRARPHELLPGTLRVLSVRMNYLPFEAGFAATLRDPTLGYISRYALGRDYHKLLRSRLKQLGERIEQRCEALGWRPFVDSAPILERPLAAKAGLGWVGKHSLLLNESAGSFFFLGELLLSLPLPLDAPVEKEQCGKCVACINICPTGAIVAPYVVDGRRCISYLTIENDGPIPVEFRPLMGNRIYGCDDCQLICPWNRYANASPEPDFSPRPNLHRPPLLTLWGWSESEFLKHTEGSPIRRIGYQRWRRNLAVALGNGPASQEVMVALQQALTEAEPMVAEHIEWALATLARRQQDDNKKTRLLIRCIEKGLPDHA

SEQ ID NO: 74166 - protein, 375 aa, Aeromonas dhakensis
  misc_feature (1)..(375): tr|K1J7B6|K1J7B6_9GAMM Epoxyqueuosine reductase OS=Aero monas dhakensis OX=196024 GN=queG PE=3 SV=1
MTTAELHQLAQDIKLWASELGFDQAGITDTDLTLEEPRLQAWLDAGYHGSMDYMARHGMMRARPHELLPGTLRVLSVRMNYLPFEAGFAATLRDPTLGYISRYALGRDYHKLLRSRLKQLGERIEQRCEALGWRPFVDSAPILERPLAAKAGLGWVGKHSLLLNESAGSFFFLGELLLSLPLPLEAPVEKEQCGKCVACINICPTGAIVAPYVVDGRRCISYLTIENDGPIPVEFRPMMGNRIYGCDDCQLICPWNRYANASPEPDFSPRPNLHRPPLLTLWGWSESEFLKHTEGSPIRRIGYQRWRRNLAVALGNGPASQEVVVALQQALAEAEPMVAEHIEWALATLTRRQQDDNKKTRLLIRCIEKGLPDHA

SEQ ID NO: 74167 - protein, 382 aa, Aeromonas diversa
  misc_feature (1)..(382): tr|N9VQR6|N9VQR6_9GAMM Epoxyqueuosine reductase OS=Aero monas diversa CDC 2478-85 OX=1268237 GN=queG PE=3 SV=1
MSSLPLPSPECDLHALAHHIKLWARELGFDQAGITDTDLRLEEPRLQAWLDAGYHGSMEYMERHGMLRARPDELLPGTLRVISVRMNYLPFEAGFAATLRDPRLGYISRYALGRDYHKVLRNRLKQLGERIEQACAGLGYRPFVDSAPILERPLAAKAGLGWVGKHSLLLNAEAGSFFFLGELLVNIPLPLDAPVEKEQCGKCTACLTICPTGAIVAPYVVDGRRCISYLTIESDDPIPVELRPALGNRIYGCDDCQLICPWNRYAGATPEPDFSPRPNLHRPPLLTLWSWDEPAFLKHTEGSPIRRIGYQRWRRNLAVALGNGPADAAVIEALEQGRPDASPLVAEHIDWALATLKTRAEEENKKTQRLIRCIEKGLPDHA

SEQ ID NO: 74168 - protein, 375 aa, Aeromonas encheleia
  misc_feature (1)..(375): tr|A0A3S4UEA1|A0A3S4UEA1_9GAMM Epoxyqueuosine reductase OS=Aeromonas encheleia OX=73010 GN=queG PE=3 SV=1
MTATELQQLAQDIKLWARELGFDQVGITDTDLAVEEPRLQAWLDAGYHGSMDYMARHGMMRARPHELLPGTLRVLSVRMNYLPFEAGFAATLRDPTLGYISRYALGRDYHKVLRNRLKQLGERIEQRCETLGWRPFVDSAPVLERPLAAKAGLGWVGKHSLLLNEAAGSFFFLGELLVDLPLPMDAPVEKEQCGKCVACINICPTGAIVAPYVVDGRRCISYLTIESDEPIPLELRPLLGNRIYGCDDCQLICPWNRYADVSPEPDFSPRPNLHRPPLLDLWQWSEAEFLKHTEGSPIRRIGYQRWRRNLAVALGNGPATAAVSDALQQALGAAEPMVAEHIEWALATLAQRQQDDSKKTRLLIRCIEKGLPDHA

SEQ ID NO: 74169 - protein, 384 aa, Aeromonas enteropelogenes
  misc_feature (1)..(384): tr|A0A175VE95|A0A175VE95_AEREN Epoxyqueuosine reductase OS=Aeromonas enteropelogenes OX=29489 GN=queG PE=3 SV= 1
MTAPDFEQLAQDIKLWARELGFDQAGITDTDLAIEEPRLQAWLDAGHHGSMEYMARHGMMRARPHELLPGTRRVLSVRMNYLPFEAGFAATLRDPALGYISRYALGRDYHKVLRNRLKQLGERIERRCAELFQTTTGPISEWRPFVDSAPILERPLAAKAGLGWVGKHSLLLNESAGSFFFLGELLLNLPLPLDEPVEKELCGKCVACINICPTGAIKAPYVVDGRRCISYLTIENDGPIPQEFRPLMGNRIYGCDDCQLICPWNRYADASPEPDFSARPNLHRPPLLELWRWSESEFLKHTEGSPIRRIGYQRWRRNLAVALGNGPATAEVIDALQQALAEAEPLVAEHIEWALATLAGRREEESKKTRLLIRCIEKGLPDHA

SEQ ID NO: 74170 - protein, 413 aa, Aeromonas hydrophila
  misc_feature (1)..(413): tr|A0A454GFM1|A0A454GFM1_AERHY Epoxyqueuosine reductase OS=Aeromonas hydrophila OX=644 GN=queG PE=3 SV=1
MTATAMPVGQPWQQDPRDAIQHDSTPPSRSAPWQADGPMTTTELHQLAQDIKLWASELGFDQAGITDTDLTLEEPRLQAWLDAGHHGSMDYMARHGMMRARPHELLPGTLRVLSVRMNYLPFEAGFAATLRDPTLGYISRYALGRDYHKLLRSRLKQLGERIEQRCEALGWRPFVDSAPILERPLAAKAGLGWVGKHSLLLNESAGSFFFLGELLLSLPLPLDAPVEKEQCGKCVACINICPTGAIIAPYVVDGRRCISYLTIENDGPIPEEFRPLMGNRIYGCDDCQLICPWNRYANASPEPDFSPRPNLHRPPLLTLWGWSESEFLKHTEGSPIRRIGYQRWRRNLAVALGNGPASPQVMTALQQALAAAEPMVAEHIEWALATLAKRQQDDNKKTRLLIRCIEKGLPDHA

SEQ ID NO: 74171 - protein, 413 aa, Aeromonas hydrophila
  misc_feature (1)..(413): tr|A0KGR5|A0KGR5_AERHH Epoxyqueuosine reductase OS=Aero monas hydrophila subsp. hydrophila (strain ATCC 7966 / DSM 30187 / JCM 1027 / KCTC 2358 / NCIMB 9240) OX=38070 3 GN=queG PE=3 SV=1
MTATAMPVGQPWQQDPRDAIQHDSTPPSRSAPGQADGPMTTTELHQLAQDIKLWASELGFDQAGITDTDLTLEEPRLQAWLDAGHHGSMDYMARHGMMRARPHELLPGTLRVLSVRMNYLPFEAGFAATLRDPTLGYISRYALGRDYHKLLRNRLKQLGERIEQRCEALGWRPFVDSAPILERPLAAKAGLGWVGKHSLLLNESAGSFFFLGELLLSLPLPLDAPVEKEQCGKCVACINICPTGAIIAPYVVDGRRCISYLTIENDGPIPEEFRPLMGNRIYGCDDCQLICPWNRYANASPEPDFSPRPNLHRPPLLTLWGWSESEFLKHTEGSPIRRIGYQRWRRNLAVALGNGPASPQIMTALQQALAAAEPMVAEHIEWALATLAKRQQDDNKKTRLLIRCIEKGLPDHA

SEQ ID NO: 74172 - protein, 384 aa, Aeromonas jandaei
  misc_feature (1)..(384): tr|A0A2S5FD94|A0A2S5FD94_AERJA Epoxyqueuosine reductase OS=Aeromonas jandaei OX=650 GN=queG PE=3 SV=1
MTTPDFNQLAQDIKLWASELGFDQLGITDTDLLAEEPKLQAWLDAGYHGSMDYMARHGMMRARPHELLPGTLRVISVRMNYLPFEAGFAATLRDPTLGYISRYALGRDYHKVLRNRLKQLGDRIEARCAELFQGTSDTLGEWRPFVDSAPVLERPLAAKAGLGWVGKHSLLLNESAGSFFFLGELLVSLPLPIDAPVEKEQCGKCVACINICPTGAIVAPYVVDGRRCISYLTIENDGPIPEEFRPLMGNRIYGCDDCQLICPWNRYADASPEPDFSPRPSLHRPPLLALWRWSEAEFLKHTEGSPIRRIGYQRWRRNLAVALGNGPAGPEVIAVLQQALPEAEPMVAEHIEWALATLARRQDETNKKTRLLIRCIEKGLPDHA

SEQ ID NO: 74173 - protein, 384 aa, Aeromonas jandaei
  misc_feature (1)..(384): tr|A0A3N6V2R0|A0A3N6V2R0_AERJA Epoxyqueuosine reductase OS=Aeromonas jandaei OX=650 GN=queG PE=3 SV=1
MTTPDFNQLAQDIKLWASELGFDQVGITDTDLRAEEPKLQAWLDAGYHGIMDYMARHGMMRARPHELLPGTLRVISVRMNYLPFEAGFAATLRDPTLGYISRYALGRDYHKVLRNRLKQLGDRIEARCAELFQGTSDTLGEWRPFVDSAPVLERPLAAKAGLGWVGKHSLLLNESAGSFFFLGELLVSLPLPIDAPVEKEQCGKCVACINICPTGAIVAPYVVDGRRCISYLTIENDGPIPEEFRPLMGNRIYGCDDCQLICPWNRYADASPEPDFSPRPSLHRPPLLALWRWSEAEFLKHTEGSPIRRIGYQRWRRNLAVALGNGPANPEVMAALQQALPEAEPMVAEHIEWALATLARRQDETNKKTRLLIRCIEKGLPDHA

SEQ ID NO: 74174 - protein, 379 aa, Aeromonas lusitana
  misc_feature (1)..(379): tr|A0A2M8HEM1|A0A2M8HEM1_9GAMM Epoxyqueuosine reductase OS=Aeromonas lusitana OX=931529 GN=queG PE=3 SV=1
MTTAELHQLAQDIKLWARELGFDQVGITDTDLSIEEPRLQAWLDAGYHGSMDYMARHGMMRARPHELLPGTQRVLSVRMNYLPFEAGFASTLRDPTLGYISRYALGRDYHKVLRNRLKQLGERIEQRCQALFQATDWRPFVDSAPVLERPLAAKAGLGWVGKHSLVLNESAGSFFFLGELLINLPLPLDAPVEKEQCGKCVACINICPTGAIVAPYVVDGRRCISYLTIENDGPIPEEFRPLMGNRIYGCDDCQLICPWNRYADVSPEPDFSPRPNLHRPPLLDLWRWQESEFLKHTEGSPIRRIGYQRWRRNLAVALGNGPANPEVMAALQQALETASPMVAEHIEWALATLTSRQQGENKKTKLLIRCIEKGLSDHA

SEQ ID NO: 74175 - protein, 384 aa, Aeromonas media
  misc_feature (1)..(384): tr|A0A023RNB3|A0A023RNB3_AERME Epoxyqueuosine reductase OS=Aeromonas media WS OX=1208104 GN=queG PE=3 SV=1
MTAAELAQLAHDIKLWARELGFDQVGITDTDLALEEPRLQAWLDAGHHGTMDYMARHGMMRARPHELLPGTLRVLSVRMNYLPFEAGFAATLRDPTLGYISRYALGRDYHKVLRNRLKQLGERIEQRCQTLLPSTQATPGEWRPFVDSAPILERPLAAKAGLGWVGKHSLLLNETAGSFFFLGELLVGLPLPVDAPVEKEQCGKCVACINICPTGAIVAPYVVDGRRCISYLTIENDGPIPEEFRPLMGNRIYGCDDCQLICPWNRYADASPEPDFSPRPNLHRPPLLTLWGWSESDFLKHTEGSPIRRIGYRRWRRNLAVALGNGPASSDAMAALQQALASAEPMVAEHIEWALATLAVRQEKEDKKTRLLIRCIEKGLPDHA

SEQ ID NO: 74176 - protein, 375 aa, Aeromonas molluscorum
  misc_feature (1)..(375): tr|R1H487|R1H487_9GAMM Epoxyqueuosine reductase OS=Aero monas molluscorum 848 OX=1268236 GN=queG PE=3 SV=1
MTAPDFDKLAHDIKLWARELGFDQAGITDTDLSLEESRLQAWLDAGHHGSMDYMARHGMMRARPHELLPGTLRVLSVRMNYLPFEAGFAATLRDPSLGYISRYALGRDYHKLLRARLKQLGERIEARCDALGWRPFVDSAPVLERPLAAKAGLGWVGKHSLLLNESAGSFFFLGELLLSLPLPLDKPVEKELCGKCVACINICPTGAIVAPYVVDGRRCISYLTIESDDPIPVELRPLLGNRIYGCDDCQLICPWNRYADASPEPDFRPRANLHSPKLLDLWCWSEPEFLKNTEGSPIRRIGYQRWRRNLAVALGNGPADEGVLDALKAALPTAEPMVAEHISWALASLTARQQGENRKTKLLIRCIEKGLPDHA

SEQ ID NO: 74177 - protein, 384 aa, Aeromonas rivipollensis
  misc_feature (1)..(384): tr|A0A2P1PEA0|A0A2P1PEA0_9GAMM Epoxyqueuosine reductase OS=Aeromonas rivipollensis OX=948519 GN=queG PE=3 SV=1
MTAAELAQLAHDIKLWARELGFDQVGITDTDLALEEPRLQAWLDAGHHGTMDYMARHGMMRARPHELLPGTLRVLSVRMNYLPFEAGFAATLRDPTLGYISRYALGRDYHKVLRNRLKQLGERIEQRCQALLPSTQETPGEWRPFVDSAPILERPLAAKAGLGWVGKHSLLLNESAGSFFFLGELLVSLPLPVDAPVEKEQCGKCVACINICPTGAIIAPYVVDGRRCISYLTIENDGPIPEEFRPLMGNRIYGCDDCQLICPWNRYADASPEPDFSPRPNLHRPPLLDLWQWSEAAFLKHTEGSPIRRIGYQRWRRNLAVALGNGPASSDAMAALQQALPGAEPMVAEHIEWALATLAARQEKENKKTRLLIRCIEKGLPDHA

SEQ ID NO: 74178 - protein, 384 aa, Aeromonas salmonicida
  misc_feature (1)..(384): tr|A0A428VMI4|A0A428VMI4_AERSA Epoxyqueuosine reductase OS=Aeromonas salmonicida OX=645 GN=queG PE=3 SV=1
MTTPDFQQLAHDIKLWAGELGFDQVGITDTDLTLEEPRLQAWLDAGHHGSMDYMARHGMMRARPHELLPGTLRVVSVRMNYLPFEAGFAATLRDPTLGYISRYALGRDYHKVLRNRLKQLGERIEQRCQALFQTTQDTMGEWRPFVDSAPILERPLAAKAGQGWVGKHSLLLNESAGSFFFLGELLLALPLPIDAPVEKELCGKCVACINICPTGAIVAPYVVDGRRCISYLTIENDGPIPEEFRPLMGNRIYGCDDCQLICPWNRYADASPEPDFKARPNLHRPPLLELWRWAESEFLKHTEGSPIRRIGYQRWRRNLAVALGNGPATPEVIAALQLALTSADPMVAEHIEWALTTLAKRQQDDNKKTRLLIRCIEKGLPDHA

SEQ ID NO: 74179 - protein, 384 aa, Aeromonas salmonicida
  misc_feature (1)..(384): tr|A0A4U7JXD0|A0A4U7JXD0_AERSA Epoxyqueuosine reductase OS=Aeromonas salmonicida subsp. salmonicida OX=29491 G N=queG PE=3 SV=1
MTTPDFQQLAHDIKLWAGELGFDQVGITDTDLTLEEPRLQAWLDAGHHGSMDYMARHGMMRARPHELLPGTLRVVSVRMNYLPFEAGFAATLRDPTLGYISRYALGRDYHKVLRNRLKQLGERIEQRCQALFQTTQDTMGEWRPFVDSAPILERPLAAKAGLGWVGKHSLLLNESAGSFFFLGELLLALPLPIDAPVEKELCGKCVACINICPTGAIVAPYVVDGRRCISYLTIENDGPIPEEFRPLMGNRIYGCDDCQLICPWNRYADASPEPDFKARPNLHRPPLLELWRWAESEFLKHTEGSPIRRIGYQRWRRNLAVALGNGPATPEVIAALQLALTSAEPMVAEHIAWALTTLAKRQQDDNKKTRLLIRCIEKGLPDHA

SEQ ID NO: 74180 - protein, 382 aa, Aeromonas schubertii
  misc_feature (1)..(382): tr|A0A0S2SM67|A0A0S2SM67_9GAMM Epoxyqueuosine reductase OS=Aeromonas schubertii OX=652 GN=queG PE=3 SV=1
MSSLPQPSSESDLHALAHHIKLWARELGFDQAGITDTDLSIEEPRLQAWLDAGYHGSMEYMERHGMLRARPDELLPGTLRVISVRMNYLPFEAGFAATLRDPRLGYISRYALGRDYHKVLRNRLKQLGERIEQACAGLGYRPFVDSAPILERPLAAKAGLGWVGKHSLLLNAEAGSFFFLGELLVNIPLPLDAPVEKAQCGKCTACLTICPTGAIVAPYVVDGRRCISYLTIESDEPIPVELRPALGNRIYGCDDCQLICPWNRYADATPEPDFTPRPNLHRPPLLTLWSWDEPTFLKHTEGSPIRRIGYQRWRRNLAVALGNGPADGAVITALEQARPHATPLVAEHVDWALATLKNRAEEENKKTQRLIRCIEKGLPDQA

SEQ ID NO: 74181 - protein, 382 aa, Aeromonas schubertii
  misc_feature (1)..(382): tr|A0A0W7TWC3|A0A0W7TWC3_9GAMM Epoxyqueuosine reductase OS=Aeromonas schubertii OX=652 GN=queG PE=3 SV=1
MSSLPQPSSESDLHALAHHIKLWARELGFDQAGITDTDLSIEEPRLQAWLDAGYHGSMEYMERHGMLRARPDELLPGTLRVISVRMNYLPFEAGFAATLRDPRLGYISRYALGRDYHKVLRNRLKQLGERIEQACAGLGYRPFVDSAPILERPLAAKAGLGWVGKHSLLLNAEAGSFFFLGELLVNIPLPLDAPVEKAQCGKCTACLTICPTGAIVAPYVVDGRRCISYLTIESDEPIPVELRPALGNRIYGCDDCQLICPWNRYADATPEPDFTPRPNLHRPPLLTLWSWDEPTFLKHTEGSPIRRIGYQRWRRNLAVALGNGPADGAVITALEQARPHATPLVAEHVDWALATLQSRAEEENKKTQRLIRCIEKGLPDHA

SEQ ID NO: 74182 - protein, 382 aa, Aeromonas simiae
  misc_feature (1)..(382): tr|A0A5J6WT26|A0A5J6WT26_9GAMM tRNA epoxyqueuosine(34) reductase QueG OS=Aeromonas simiae OX=218936 GN=queG PE =4 SV=1
MTAPDLPDPASDLHALAHHIKLWARELGFDQAGITDTDLRLEEPRLQAWLDAGYHGSMEYMARHGMLRARPDELLPGTLRVISLRMNYLPFEAGFAATLRDPRLGYISRYALGRDYHKVLRSRLKQLGERIERACGELGFRPFVDSAPLLERPLAAKAGLGWVGKHSLLLNAEVGSFFFLGELLVNIPLPLDTAQEKEQCGKCTACLTLCPTGAIVAPYVVDGRRCISYLTIESDEPIPLELRPALGNRIYGCDDCQLICPWNRYAAASPEPDFAPRPTLHRPPLLLLWSWDEAAFLTHTEGSPIRRIGYQRWRRNLAVALGNGPADAEVIAALEQALPDASSLVAEHIEWALATLHLRADTENKKTQRLIRCIEKGLPDHA

SEQ ID NO: 74183 - protein, 384 aa, Aeromonas sobria
  misc_feature (1)..(384): tr|A0A1S2D612|A0A1S2D612_AERSO Epoxyqueuosine reductase OS=Aeromonas sobria OX=646 GN=queG PE=3 SV=1
MSAPDFHQLAHDIKLWARELGFDQAGITDTDLRSEEPRLQAWLDAGYHGSMDYMARHGMMRARAHELLPGTVRVLSVRMNYLPFEAGFAATLRDPTLGYISRYALGRDYHKVLRNRLKQLGDRIEARCAELFQDTADTLGEWRPFVDSAPILERPLAAKAGLGWVGKHSLLLNESAGSFFFLGELLLNLPLPLDQPVEKAQCGKCVACINICPTSAIVAPYVVDGRRCISYLTIENDGPIPEEFRPLMGNRIYGCDDCQLICPWNRYADASPEPDFSPRPSLHRPPLLALWCWSESDFLKQTEGSPIRRIGYQRWRRNLAVALGNGPAAPEVIAALQQGLTTAEPMVAEHIEWALATLARRQDEENKKTRLLIRCIEKGLPDHA

SEQ ID NO: 74184 - protein, 384 aa, Aeromonas sobria
  misc_feature (1)..(384): tr|A0A2N3IYV9|A0A2N3IYV9_AERSO Epoxyqueuosine reductase OS=Aeromonas sobria OX=646 GN=queG PE=3 SV=1
MSAPDFHQLAHDIKLWARELGFDQAGITDTDLRSEEPRLQAWLDAGYHGSMDYMARHGMMRARAHELLPGTVRVLSVRMNYLPFEAGFAATLRDPTLGYISRYALGRDYHKVLRNRLKQLGDRIEARCAELFQGTPDTQGDWRPFVDSAPILERPLAAKAGLGWVGKHSLLLNESAGSFFFLGELLLNLPLPLDQPVEKAQCGKCVACINICPTGAIVAPYVVDGRRCISYLTIENDGPIPEEFRPLMGNRIYGCDDCQLICPWNRYADASPEPDFSPRQSLHRPPLLALWRWSESDFLKQTEGSPIRRIGYQRWRRNLAVALGNGPATPEVIAALQQGLTTAEPMVAEHIEWALATLARRQDEENKKTRLLIRCIEKGLPDHA

SEQ ID NO: 74185 - protein, 375 aa, Aeromonas sp.
  misc_feature (1)..(375): tr|A0A261E477|A0A261E477_9GAMM Epoxyqueuosine reductase OS=Aeromonas sp. A35_P OX=1983805 GN=queG PE=3 SV=1
MTTAELHQLAQDIKLWASELGFDQAGITDTDLTLEEPRLQAWLDAGYHGSMDYMARHGMMRARPHELLPGTLRVLSVRMNYLPFEAGFAATLRDPTLGYISRYALGRDYHKLLRSRLKQLGERIEQRCEALGWRPFVDSAPILERPLAAKAGLGWVGKHSLLLNESAGSFFFLGELLLSLPLPLDAPVEKEQCGKCVACINICPTGAIVAPYVVDGRRCISYLTIENDGPIPAEFRPLMGNRIYGCDDCQLICPWNRYANASPEPDFSPRPNLHRPPLLTLWGWSESEFLKHTEGSPIRRIGYQRWRRNLAVALGNGPASQEVMVALQQALTEAEPMVAEHIEWALATLARRQQDDNKKTRLLIRCIEKGLPDHA

SEQ ID NO: 74186 - protein, 384 aa, Aeromonas sp.
  misc_feature (1)..(384): tr|A0A1Q8D2W6|A0A1Q8D2W6_9GAMM Epoxyqueuosine reductase OS=Aeromonas sp. YN13HZO-058 OX=1921564 GN=queG PE=3 S V=1
MSAPDFHQLAHDIKLWARELGFDQAGITDTDLRIEEPRLQAWLDAGYHGSMDYMARHGMMRARPHELLPGTVRVLSVRMNYLPFEAGFAATLRDPTLGYISRYALGRDYHKVLRNRLKQLGDRIEARCAELFQGTEETLGEWRPFVDSAPILERPLAAKAGLGWVGKHSLLLNESAGSFFFLGELLLNLPLPLDQPVEKEQCGKCVACINICPTGAIVAPYVVDGRRCISYLTIENDGPIPEEFRPLMGNRIYGCDDCQLICPWNRYADASPEPDFSPRASLHRPPLLALWRWSESDFLKQTEGSPIRRIGYQRWRRNLAVALGNGPAAPEVIAALQQGLTTAEPMVAEHIEWALATLARRQDEENKKTRLLIRCIEKGLPDHA

SEQ ID NO: 74187 - protein, 384 aa, Aeromonas taiwanensis
  misc_feature (1)..(384): tr|A0A5F0K868|A0A5F0K868_9GAMM Epoxyqueuosine reductase OS=Aeromonas taiwanensis OX=633417 GN=queG PE=3 SV=1
MMAAELAQLAQDIKLWARELGFDQVGITDTDLALEEPRLQAWLDAGHHGTMDYMARHGMMRARPHELLPGTLRVLSVRMNYLPFEAGFAATLKDPTLGYISRYALGRDYHKVLRNRLKQLGERIERRCAELFHTTTDPMGEWRPFVDSAPILERPLAAKAGLGWVGKHSLLLNESAGSFFFLGELLVSLPLPLDAPVEKEQCGKCVACINICPTGAIVAPYVVDGRRCISYLTIENDGPIPEEFRPLMGNRIYGCDDCQLICPWNRYADASPEPDFSPRPNLHRPPLIDLWGWSENEFLKHTEGSPIRRIGYQRWRRNLAVALGNGPATPEVMAALQQARPEAEPMVAEHIDWALATLARRQQDENKKTRLLIRCIEKGLPDHA

SEQ ID NO: 74188 - protein, 384 aa, Aeromonas veronii
  misc_feature (1)..(384): tr|A0A1Q8F410|A0A1Q8F410_9GAMM Epoxyqueuosine reductase OS=Aeromonas veronii OX=654 GN=queG PE=3 SV=1
MSAPDFHQLAHDIKLWARELGFDQAGITDTDLRIEEPRLQAWLDAGYHGSMDYMARHGMMRARPHELLPGTVRVLSVRMNYLPFEAGFAATLRDPTLGYISRYALGRDYHKVLRNRLKQLGDRIEARCAELFQGTEDTLGEWRPFVDSAPILERPLAAKAGLGWVGKHSLLLNESAGSFFFLGELLLNLPLPLDQPVEKEQCGKCVACINICPTGAIVAPYVVDGRRCISYLTIENDGPIPEEFRPLMGNRIYGCDDCQLICPWNRYADASPEPDFSPRPSLHRPPLLALWHWSESDFLKQTEGSPIRRIGYQRWRRNLAVALGNGPATPEVIAALQQGLATAEPMVAEHIEWALATLARRQDEENKKTRLLIRCIEKGLSDHA

SEQ ID NO: 74189 - protein, 384 aa, Aeromonas veronii
  misc_feature (1)..(384): tr|A0A0E2LAH9|A0A0E2LAH9_9GAMM Epoxyqueuosine reductase OS=Aeromonas veronii Hm21 OX=1347420 GN=queG PE=3 SV=1
MSAPDFHQLAQDIKLWARELGFDQAGITDTDLRIEEPRLQAWLDAGYHGSMDYMARHGMMRARAHELLPGTVRVLSVRMNYLPFEAGFAATLRDPTLGYISRYALGRDYHKVLRNRLKQLGDRIEARCAELFQGTEETLGEWRPFVDSAPILERPLAAKAGLGWIGKHSLLLNESAGSFFFLGELLLNLPLPLDQPVEKEQCGKCVACINICPTGAIVAPYVVDGRRCISYLTIENDGPIPEEFRPLMGNRIYGCDDCQLICPWNRYADASPEPDFSPRPSLHRPPLLALWCWSESDFLKQTEGSPIRRIGYQRWRRNLAVALGNGPATPEVIAALQLGLTTADPMVAEHIEWALATLARRQDEENKKTRLLIRCIEKGLSDHA

SEQ ID NO: 74190 - protein, 381 aa, Aestuariibacter sp.
  misc_feature (1)..(381): tr|A0A2D6XZ85|A0A2D6XZ85_9ALTE Epoxyqueuosine reductase OS=Aestuariibacter sp. OX=1872400 GN=queG PE=3 SV=1
MSELQSIDLYKLVDDIKAWANALGFQQVGISDIDLSQHEAALQSWLDNQYHGDMAFMANHGMKRARPAELVPGTLRVISVRMDYLPPDASFAKHLNNPDIGYISRYALGRDYHKVLRSKLKKLGEKIQAELADTQFRPFVDSAPVLEHAIAEKAGIGWTGKHSLTLNKQAGSWFFLGELFINLPLPVDEPTSEEHCGTCTACMTICPTQAIVAPYVVDARRCISYLTIEYDGVIPEVFREPMGNRLYGCDDCQLICPWNRYAPLTDEADFHPRKVLHGQSLATLFSWDEATFLRNTEGSPIRRIGYTKWRRNVSVAIGNASYDEHYIHLLTEALPDACEILRPHFEWALERQQQKNGDALSRPRQITRLVRTIEKGLPRDA

SEQ ID NO: 74191 - protein, 381 aa, Aestuariibacter sp.
  misc_feature (1)..(381): tr|A0A506RCH7|A0A506RCH7_9ALTE Epoxyqueuosine reductase OS=Aestuariibacter sp. GS-14 OX=2590670 GN=queG PE=3 S V=1
MSELQSIDLYKLVDDIKAWANALGFQQVGISDIDLSQHEAALQSWLDNQYHGDMAFMASHGMKRARPAELVPGTVRVISVRMDYLPPDASFAKHLNNPDIGYVSRYALGRDYHKVLRNKLKRLGEKIQSELANTQFRPFVDSAPVLEHAIAEKAGIGWTGKHSLTLNKQAGSWFFLGELFINLPLPVDEPTTEEHCGTCTACLTICPTQAIVAPYVVDARRCISYLTIEYDGVIPEALRKPMGNRIYGCDDCQLICPWNRYAPLTEEADFHPRKVLHGQSLAALFSWDEHTFLTNTEGSPIRRIGFTKWRRNISVAMGNAGYDERYVTLLTEALYGACDVLRPHLEWAIQQQQQKAGEMLTRPRQITRLVRTIEKGLPRDA

SEQ ID NO: 74192 - protein, 368 aa, Aestuariispira insulae
  misc_feature (1)..(368): tr|A0A3D9HXU3|A0A3D9HXU3_9PROT Epoxyqueuosine reductase OS=Aestuariispira insulae OX=1461337 GN=queG PE=3 SV=1
MTDLKAAIIEKAKEAGFDSVSFAPVTIPQRNLDRYQEFLEAGQYGDMDWMQEKNDWRRGPNSLWEECRTVIVLGMNYGPNQDPMLKLQFQERANISVYAQNKDYHDLVKKKLKQVARWLVETHSGQVKVFVDTAPVMEKAVAAQSGLGWQGKHTNLVSRDFGSWLFLGEIFTTLEIAPDKAVKDSCGNCQACLDICPTQAMPGPYKLDASRCISYLTIEHKSHIPVEFRNPMGNRIYGCDDCLAVCPWNKFAQMSDKMDFWPRAELSAPRLVDFLDLDDAGFRKFFSSSPIKRIGRNKFLRNVLIALGNARNPDLAEKIIPSLRDESPLVRAMAVWALGQLLDSSTFQALRQQYLPHEADTDVAREWG

SEQ ID NO: 74193 - protein, 373 aa, Aestuariivirga litoralis
  misc_feature (1)..(373): tr|A0A2W2AMN1|A0A2W2AMN1_9RHIZ tRNA epoxyqueuosine(34) reductase QueG OS=Aestuariivirga litoralis OX=2650924 G N=queG PE=4 SV=1
MSEVKTLRQELGERASGEGFSATRIVTLGPDAQQAERLSQFITEGRHGSMAWMAETEARRASPQAMWPEARTAIVFAQSYGQDLDPLERLADRESGVISVYALNRDYHDVVKGKLKRIAQWLARRTGADVKVFVDTAPLMEKPLAQKAGLGWQGKHTNLVSRELGSWFFIGTILTTAEIEADAAEADHCGSCRACLDICPTKAFPAPYQLDARRCISYLTIEHAGHIDREFRVAMGNRIYGCDDCLAACPWNKFAAAAREAKLLAREDLKAPRLGHLLALEDAAFRALFTGSPVKRTGRDRFIRNVLIAAGNSGDKSLVPQVTALLDDPAPIVRAMAVWAMSRLLGEPDFAQLRTERTGHETDADVRREWETA

SEQ ID NO: 74194 - protein, 351 aa, Aestuariivita sp.
  misc_feature (1)..(351): tr|A0A2E0YJF2|A0A2E0YJF2_9RHOB Epoxyqueuosine reductase OS=Aestuariivita sp. OX=1872407 GN=queG PE=3 SV=1
MHGQSVLYDLKARLQKKSQSEGFDDMRICRPWSVPQVSERLNKFLDKGYHGQMNWMAERSQWRSDPSALWPEARSVIIFAQSYAPDHDPRSILFEREKAAISVYALNKDYHKIVKKQLKAIASWLIAEAGGHVKIFVDTAPIPEKPLGHAAGLGWQGKHTNLVSRKLGNWFFIGSVFSTLDLPTDASEEDHCGSCTKCMMACPTEAFPAPYQLDARRCISYLTIEHKGPVAPELREKLGNRIYGCDDCLAACPWNKFAQDAREVRYHAREDLIEPRLVELVTLNDADFRQKFSGSPIKRIGRDRFVRNVLYAIGNSGESTLCQSAQNLCGDSDPVVAEAARWAVAKLAAGT

SEQ ID NO: 74195 - protein, 356 aa, Afifella marina
  misc_feature (1)..(356): tr|A0A1G5NZT8|A0A1G5NZT8_AFIMA Epoxyqueuosine reductase OS=Afifella marina DSM 2698 OX=1120955 GN=SAMN03080610 _02918 PE=4 SV=1
MTPPEGLGEAGKRLGVWIDAGRHGSMEWMPETAERRSDPRRIFRDVRSVVMLGMNYGPEGDPLATLAERQKATISVYARNRDYHDLIKGAMKRIGSRFAAEARRRDLPDEIKVFVDTAPVMEKPLAAAAGIGWQGKHTNLVSREHGSWLFLGAIFTAAELPADQAETDHCGSCRRCLDACPTNAFPAPYQLDARRCISYLTIEDKGLIPREFRKDLGNRIYGCDDCLAACPWNKFAETASEAKLKARADLQAPSLKDLVCLDDAAFRQHFSGSPIKRIGRAKFVSNVLIAIGNSGDPGLASQARARLDDDSPLVRGAAIWALARLAPETAERARAELLPQEEDAAVRGEWNLLGED

SEQ ID NO: 74196 - protein, 394 aa, Afipia broomeae
  misc_feature (1)..(394): tr|A0A2M8ZTE3|A0A2M8ZTE3_9BRAD Epoxyqueuosine reductase OS=Afipia broomeae OX=56946 GN=queG PE=3 SV=1
MAGGGAGVAHLRGSRLLNVNVKLSPADLKAALASEARALGFDCVGVTDPDAIADAARHFHAFLDAGAHGDMDWLAAQPERRTDPRVLWPGVRSVIMLGVNYGPDENPLAILQQRTRGAISVYAQGDDYHDVIKKRLKTLARWLVAASSAEVKVFVDTAAVMEKPLAHAAGLGWQGKHTNLVSREFGSWLFLGAIFTAAKLPRDDAAVDHCGSCQACLDICPTAAFPAPYRLDARRCISYLTIESKGPIPHEFRKAIGNRIYGCDDCLAACPWNKFAQAGREAKLAARDELRTPSLAELVRLDDAAFRALFAKSPVKRIGRNRFIRNVLIAIGNARDSALAVEAKRLLDDDNPLVRGAAVWALSQLMEPEAFAALASHAIGAETDESVQEEWRLA

SEQ ID NO: 74197 - protein, 372 aa, Afipia broomeae
  misc_feature (1)..(372): tr|K8P8F7|K8P8F7_9BRAD Epoxyqueuosine reductase OS=Afip ia broomeae ATCC 49717 OX=883078 GN=queG PE=3 SV=1
MDAVAIKAALTEEARTIGFGTIGITDPDAIAGARERLQTFLDAGSHGDMEWLANEPARRASPRVLWSDVRSVIMLGMNYGPDENPLALLGQKTRGAISVYARGDDYHDLIKKRLKTLARWLIAHAGGDVKVFVDTAAVMEKPLAQAAGLGWQGKHTNLVSREYGSWLFLGAIFTTLDLPRDATDIDHCGSCRACLDICPTNAFPAPYRLDARKCISYLTIEHKGAIPHEYREAIGNRIYGCDDCLSVCPWNKFAQEGHEAKLAARDELRGPALAELAKLDDASFRAMFTKSPVKRIGRDRFLRNVLTAIGNSNDTSLGTEARRLLDDESPLVRGAAVWALSRLLPREEFSQLAARSHDADEHVRSEWAAALA

SEQ ID NO: 74198 - protein, 411 aa, Afipia clevelandensis
  misc_feature (1)..(411): tr|K8NXE8|K8NXE8_9BRAD Epoxyqueuosine reductase OS=Afip ia clevelandensis ATCC 49720 OX=883079 GN=queG PE=3 SV= 1
MDGGRSGLGALRGSRLLTTPPDAAALKAALAAEARANGFSTLGIADPAAIDGARERLQAFLDAGAHGDMDWLANEPSRRASPKVLWSEVRSVIMLGMNYGPNENPLALLEQTTRGNISVYARGDDYHDLIKKRLKSVARWLIAQAGGDVKVFVDTAAVMEKPLAHAAGLGWQGKHTNLVSREFGSWLFLGAIFTTLDLPRDDADVNHCGSCQACLDICPTNAFPAPYRLDARKCISYLTIEHKGAIPREHRAAIGNRIYGCDDCLSVCPWNKFAQEGHEAKLAARDELRAPSLAELSRLDDASFRALFTKSPVKRIGRDRFLRNVLTAIGNSGDISLAPEARRLLDDPNPLVRGAAVWALSRLLSDQEFSELAAASTDHDADVRNEWEMGLHSSGNVEGDSLSPPAGRGLG

SEQ ID NO: 74199 - protein, 399 aa, Afipia massiliensis
  misc_feature (1)..(399): tr|A0A4U6BM44|A0A4U6BM44_9BRAD Epoxyqueuosine reductase OS=Afipia massiliensis OX=211460 GN=queG PE=3 SV=1
MDGGRPGVGPLRGSRLLTNTTLVDASHVDSAAVKAALIEQARAIGFGTIGITDPGAIEGAHDRLQNFLDAGSHGDMGWLANEPARRASPKVLWSDVRSVVMLGMNYGPDENPLALLEQKTRGAISVYARGDDYHDLIKKRLKTLARWLLATAGGDVKVFVDTAAVMEKPLAHAAGLGWQGKHTNLVSREYGSWLFLGAIFTTLELPRDDADVDHCGSCQACLDICPTSAFPAPYRLDARKCISYLTIEHKGAIPREHREAIGNRIYGCDDCLSVCPWNKFAQEGHELRLAARDELRGPSLAELARLDDPAFRTLFTKSPVKRIGRDRFMRNVLTAIGNSNDAALIPEARRLLDDANPLVRGAAVWALSRLLPHAEFSELAARSDESDEDVRSEWAAATN

SEQ ID NO: 74200 - protein, 392 aa, Afipia sp.
  misc_feature (1)..(392): tr|A0A5C8DZJ0|A0A5C8DZJ0_9BRAD Epoxyqueuosine reductase OS=Afipia sp. OX=1871052 GN=queG PE=3 SV=1
MDGGRPGLGALRGSRLLTTPIDVIALKAALAAEARANGFSTIGIADPDAIEGARERLQAFLDAGSHGDMDWLANEPARRASPKVLWSDVRSVIMLGMNYGPDENPLALLAQKNRGNISVYARGDDYHDLIKKRLKVVARWLIAQAGGDVKVFVDTAAVMEKPLAHAAGIGWQGKHTNLVSREFGSWLFLGAIFTTLDLPRDTADVNHCGSCQSCLDICPTNAFPAPYRLDARKCISYLTIEHKGAIPREHRQAIGNRIYGCDDCLSVCPWNKFAQEGHEAKLVARDELRAPSLAELSRLDDVSFRALFTKSPVKRIGRDRFMRNVLIAIGNSGDAALASDARRLLDDQSPLVRGTAVWALSRLLSRAEFAALADVSNDNDEGVREEWTTALA

SEQ ID NO: 74201 - protein, 401 aa, Afipia sp.
  misc_feature (1)..(401): tr|A0A0Q6YVY0|A0A0Q6YVY0_9BRAD Epoxyqueuosine reductase OS=Afipia sp. Root123D2 OX=1736436 GN=queG PE=3 SV=1
MDGGPAGTGALRGSGLLTSPAADPTDARMAEVKTALTGEALALGFDTLGVTAPDSISGAGKLLQIFLDDGAHGDMDWLARDPERRADPRVLWSEVRSVIMLGVNYGPDEDPMAVIAQRSRGAISVYARGDDYHELIKKRLKTLARSLLAQAGGDVKVFVDTAAVMEKPLARTAGLGWQGKHTNLVSREFGSWLFLGAIFTTLVLPRDAAEIDHCGSCHACLDACPTAAFPAPYRLDARKCISYLTIENKGPIPREFRAAIGNRIYGCDDCLAVCPWNKFAQQGHEAKLAARDELRAPTLAELSRLDDASFRALFTKSPVKRIGRERFIRNVLTAIGNSGDPSLAQDARRLLADDSAVVRGAAVWALSRLLAPSEFAELAAYANDDDETVRNEWRAAMPISV

SEQ ID NO: 74202 - protein, 377 aa, Agarivorans albus
  misc_feature (1)..(377): tr|R9PRF7|R9PRF7_AGAAL Epoxyqueuosine reductase OS=Agar ivorans albus MKT 106 OX=1331007 GN=queG PE=3 SV=1
MSLLSEIDLKQLVQHIKLTAKSLGFQQIGITDVDLSQHHQDVEQWLAKNYHGEMDYLARNLELRKHPEQLHEGTQRIISVRMDYLPEDAKFAQSLSASDQAYISRYALGRDYHKLMRKRLNQLGKSINDYCQQQLNMRPFVDSAPVMERQLATKAGLGWTGKHSLIINQDAGSWFFLGELFVDLPLPIDQPVDEQCGDCVACITICPTQAIVEPYQVDARRCISYLTIEYDGIIEEELRPLMGNRIYGCDDCQLTCPWNRYAQLTQEADFAAREQLDQPTLLALFAWTEEEFLKKTEGSPIRRIGYQQWLRNIAIALGNAAYSQQAIDELSAKQGLEAVAQHHVNWAIEQQQNKAAKASRKTARLIRIIEKGLTRDA

SEQ ID NO: 74203 - protein, 377 aa, Agarivorans sp.
  misc_feature (1)..(377): tr|A0A4D4IVZ4|A0A4D4IVZ4_9ALTE Epoxyqueuosine reductase OS=Agarivorans sp. Toyoura001 OX=2283141 GN=yjeS PE=3 SV=1
MPIPTEIDLKQLVQHIKLTAKSLGFQQIGITDVDLSQHHQSVEQWLAKDYHGEMDYLARNLELRKHPELLHEGTQRIISVRMDYLPEDAKFAQSLSNTEQAYISRYALGRDYHKLMRKRLNHLGKAINDYCEQQLNMRPFVDSAPVMERQLASKAGLGWTGKHTLVINQDAGSWFFLGELFVDLPLPIDQPVKEQCGDCVACITICPTQAIVEPYQVDARRCISYLTIEYDGVIDEELRPLMGNRIYGCDDCQLACPWNRYAQLTQEADFAAREQLDQPTLLQLFAWTETEFLKKTEGSPIRRIGHQQWLRNIAIALGNASYSEQAIQDLQSKQDVSDVVQEHIDWAIKQQLAKASKASRKTARLIRIIEKGLTRDA

SEQ ID NO: 74204 - protein, 358 aa, Agitococcus lubricus
  misc_feature (1)..(358): tr|A0A2T5IZL2|A0A2T5IZL2_9LACT Epoxyqueuosine reductase OS=Agitococcus lubricus OX=1077255 GN=queG PE=3 SV=1
MIMQKIPLLHDMQSLTQEIKRWGHELGFQQVGISGVDLGQHGQHLQNWLAKGYHADLDYMASHGAKRWQPDLLEPYTQRIISVRMDYLVDKPAPRTISSHPQQGVIARYALGRDYHKVLRKRLQKLAERIETHIQDLEYRAFVDSAPVLERAIAEQAGLGWIGKNTMLINRQAGSFFFLGELFTNLPLIIDQPSSAHCGSCSACLDICPTQAIVAPYQLDARLCIAYLTIEYTGVIPEHLRSLIGNRVFGCDDCQLICPWNRYANLSQEVDFQVRHQLDRVSLLTLWSWTEAEFLQRTEGSPLRRIGYQAFMRNIAIGLGNAPPSKTIIEALQQKQPMVTEMVQEHIIWAIKQQEKTF

SEQ ID NO: 74205 - protein, 384 aa, Agrobacterium albertimagni
  misc_feature (1)..(384): tr|K2PHU7|K2PHU7_9RHIZ Iron-sulfur cluster binding prot ein OS=Agrobacterium albertimagni AOL15 OX=1156935 GN=Q WE_05113 PE=4 SV=1
MDEPQIDPKIRKRRADLTQFLRHEAYAQGFDLCRITLPNAIPEAPARLASFLEAGRHGTMNWMEETKERRADPRVLWSEVRSIVMFGMNYGPNEDPRLLQAQPEKAAISVYARNRDYHDVIKGRLKEVATRFAAHAGEDVKVFVDTAPVMEKPLAASAGLGWQGKHTNLVSRDFGSWLFLGSLFTTAELEIDAPERDHCGSCRSCLDACPTDAFPAPYQIDARRCISYLTIEHKGPIDRALRPAFGNRIYGCDDCLAACPWNKFAAAAREMKLVAREDLKAPEIAFFLTLDDPSFRTYFSGSPVKRIGRDRFVRNVLIAAGNSGSLDLAPACERLLTDGSSDVRGMAAWALSRLLPADRFASLKRAHLTTETDEHVRQEWMTEN

SEQ ID NO: 74206 - protein, 383 aa, Agrobacterium arsenijevicii
  misc_feature (1)..(383): tr|A0A0D8L244|A0A0D8L244_9RHIZ Epoxyqueuosine reductase OS=Agrobacterium arsenijevicii OX=1585697 GN=queG PE=3 SV=1
MDVASDKQRIRARKLTDFVRQEALSLGFDLCRITAPDSIPLAPERLRLFLDKSYHGTMAWMEETEARRAEPKTLWGDVRSIVMFGLNYGPEEDPRGILAKPDKAAISVYARNRDYHDVIKGRLKEIATRFAARAGEDVKVFVDTAPVMEKPLAAAAGLGWQGKHTNLVSRTHGSWLFLGSMFTTAELCLDEAERDHCGSCRACLDACPTAAFPAPYQLDARRCISYLTIEHKGTIPHEFRPMIGNRIYGCDDCLAACPWNKFAASASEMKLQAREDLKEPSIAFLLTLDDAAFRSFFSGSPVKRIGRNRFVRNVLIAAGNSCDRQFVEQCKSLAETDASPEVRGMAVWALSQLMDREEFHTYSAGRAPEPDPEAEMEWQLAEA

SEQ ID NO: 74207 - protein, 395 aa, Agrobacterium bohemicum
  misc_feature (1)..(395): tr|A0A135NYQ1|A0A135NYQ1_9RHIZ Epoxyqueuosine reductase OS=Agrobacterium bohemicum OX=2052828 GN=queG PE=3 SV= 1
MRVPIRINCGRSAIDTALQKQQLRAGKLTDFVRAEALSLGFDLCRVTSADSIPLAPERLREFIGNGFHGTMGWMEETEERRASPKTLWGDVRSVVMFGLNYGPDEDPRDILTKPDKAAISVYARNRDYHDVIKGRLKEIATRFAARAGEDVKVFVDTAPVMEKPLAAAAGLGWQGKHTNLVSRTHGSWLFLGSMFTTAQLQLDEAERDHCGSCRACLDACPTNAFPEPYKIDARRCISYLTIEHKGPIPPEFRPMIGNRIYGCDDCLAACPWNKFAASASEMKLQAREDLKEPSIAFLLTLDDAAFRTFFSGSPVKRIGRNRFVRNVLIAAGNSGDSDFIAQCQTLARDSSAEVRAMAVWALSRLMDGKSFTTYAAARAPESDSNVLDEWRIAGV

SEQ ID NO: 74208 - protein, 323 aa, Agrobacterium deltaense
  misc_feature (1)..(323): tr|A0A1S7TPM9|A0A1S7TPM9_9RHIZ Iron-sulfur cluster bind ing protein OS=Agrobacterium deltaense NCPPB 1641 OX=11 83425 GN=AGR7A_Cc290321 PE=4 SV=1
MEETEARRAEPKTLWGDVRSIVMFGLNYGPEEDPRGLLSKPDKAAVSVYARNRDYHDVIKGRLKEIATRFAARAGEDVKVFVDTAPVMEKPLAAAAGLGWQGKHTNLVSRTHGSWLFLGSMFTTAELCLDEAERDHCGSCRACLDACPTAAFPAPYQLDARRCISYLTIEHKGPIPHEFRPVIGNRIYGCDDCLAACPWNKFAASASEMKLQAREDLKEPSIAFLLTLDDAAFRGFFSGSPVKRIGRNRFIRNVLIAAGNSADRQFVERCKALAETDPSPEVRGMAAWALSRLMDRDEFRTYSAGRAPEPDPEAEMEWQLAEA

SEQ ID NO: 74209 - protein, 326 aa, Agrobacterium deltaense
  misc_feature (1)..(326): tr|A0A1S7QBS0|A0A1S7QBS0_9RHIZ Iron-sulfur cluster bind ing protein OS=Agrobacterium deltaense Zutra 3/1 OX=118 3427 GN=AGR7C_Cc260357 PE=4 SV=1
MAWMEETEARRAEPKTLWGDVRSIVMFGLNYGPEEDPRGLLSKPDKAAISVYARNRDYHDIIKGRLKEIATRFAARAGEDVKVFVDTAPVMEKPLAAAAGLGWQGKHTNLVSRTHGSWLFLGSMFTTAELCLDEAERDHCGSCRACLDACPTAAFPAPYQLDARRCISYLTIEHKGPIPHEFRPMIGNRIYGCDDCLAACPWNKFAASASEMKLQAREDLKEPSIAFLLTLDDAAFRSFFSGSPVKRIGRNRFIRNVLIAAGNSADRQFVEQCKALAETDPSPEVRGMAAWALSRLMDRDEFRTYSAGRAPEPDPEAEMEWQLAEA

SEQ ID NO: 74210 - protein, 349 aa, Agrobacterium fabrum
  misc_feature (1)..(349): tr|A0A3G2CU07|A0A3G2CU07_9RHIZ Iron-sulfur cluster bind ing protein OS=Agrobacterium fabrum OX=1176649 GN=At1D1 32_27840 PE=4 SV=1
MPDSIPLAPKRLRQFLENGYHGTMAWMEETEARRAEPKTLWADVRSIVMFGLNYGPEEDPRDLLSKPDKAAISVYARNRDYHDIIKGRLKEIATRFAARAGEDVKVFVDTAPVMEKPLAAAAGLGWQGKHTNLVSRSHGSWLFLGSMFTTAELCLDEAEKDHCGSCRACLDACPTAAFPAPYQLDARRCISYLTIEHKGPIPHEFRPMIGNRIYGCDDCLAACPWNKFAASASEMKLKAREDLKEPSIAFLLTLDDAAFRSFFSGSPVKRIGRNRFIRNVLIAAGNSADRQFLGQCKALAETDPSAEVRGMAAWALSRLMDRDEFRTYSAGRAPETDPEAAMEWQLAEA

SEQ ID NO: 74211 - protein, 326 aa, Agrobacterium fabrum
  misc_feature (1)..(326): tr|A0A1S7PZG3|A0A1S7PZG3_9RHIZ Iron-sulfur cluster bind ing protein OS=Agrobacterium fabrum str. J-07 OX=118343 3 GN=AGR8A_Cc70019 PE=4 SV=1
MAWMEETEARRAEPKTLWADVRSIVMFGLNYGPEEDPRDLLSKPDKAAISVYARNRDYHDIIKGRLKEIATRFAARAGEDVKVFVDTAPVMEKPLAAAAGLGWQGKHTNLVSRSHGSWLFLGSMFTTAELCLDEAEKDHCGSCRACLDACPTAAFPAPYQLDARRCISYLTIEHKGPIPHESRPMIGNRIYGCDDCLAACPWNKFAASASEMKLKAREDLKEPSIAFLLTLDDAAFRSFFSGSPVKRIGRNRFIRNVLIAAGNSVDRQFVGQCKALAETDPSAEVRGMAAWALSRLMDRDEFRTYSAGRAPETDPEAAMEWQLAEA

SEQ ID NO: 74212 - protein, 326 aa, Agrobacterium genomosp.
  misc_feature (1)..(326): tr|A0A1S7MGL1|A0A1S7MGL1_9RHIZ Iron-sulfur cluster bind ing protein OS=Agrobacterium genomosp. 1 str. S56 OX=11 83429 GN=AGR1B_Cc120649 PE=4 SV=1
MAWMEETEARRAEPKTLWGDVRSIVMFGLNYGPEEDPRGVLSKADKAAISVYARNRDYHDVIKGRLKEIATRFAARAGEDVKVFVDTAPVMEKPLAAAAGLGWQGKHTNLVSRTHGSWLFLGSMFTTAELCLDEAENDHCGSCRACLDACPTAAFPAPYQLDARRCISYLTIEHKGVIPHEFRPMIGNRIYGCDDCLAACPWNKFAASASEMKLQAREDLKEPSIAFLLTLDDAAFRSFFSGSPVKRIGRNRFIRNVLIAAGNSRDQQFVQQCKSLAEKDPAPEVRGMAAWALSQLMDSEEFRAYSAGRAPEPDPEAEMEWQLAEA

SEQ ID NO: 74213 - protein, 326 aa, Agrobacterium genomosp.
  misc_feature (1)..(326): tr|A0A1S7QPR3|A0A1S7QPR3_9RHIZ Iron-sulfur cluster bind ing protein OS=Agrobacterium genomosp. 5 str. CFBP 6626 OX=1183435 GN=AGR5A_Cc90229 PE=4 SV=1
MAWMEETEARRAEPKTLWGDVRSIVMFGLNYGPEEDPRGVLSKPDKAAISVYARNRDYHDVIKGRLKEIATRFAARAGEDVKVFVDTAPVMEKPLAAAAGLGWQGKHTNLVSRTHGSWLFLGSMFTTADLCLDEAEKDHCGSCRACLDACPTAAFPAPYQLDARRCISYLTIEHKGPIPHEFRPMIGNRIYGCDDCLAACPWNKFAASASEMKLQAREDLKEPSIAFLLTLDDAAFRSFFSGSPVKRIGRNRFIRNVLIAAGNSRDRQFLEQCKALSERDPSPEVRGMAAWALSRLMDREEFRTYSATRAPETDPEAEMEWQLAEA

SEQ ID NO: 74214 - protein, 395 aa, Agrobacterium larrymoorei
  misc_feature (1)..(395): tr|A0A4Z1PTX8|A0A4Z1PTX8_9RHIZ Epoxyqueuosine reductase OS=Agrobacterium larrymoorei OX=160699 GN=queG PE=3 SV =1
MLAFARRHRRREPIDTSSQKQELRARKLTDFVRAEATALGFDLCRITSADAIPLAPERLRDFLDNGFHGTMAWMEETQERRANPKTLWSEVRSVVMFGLNYGPDEDPRQLLSQPDKAAISVYARNRDYHDVIKGRLKEIATRFAARAGEDVKVFVDTAPVMEKPLAAAAGLGWQGKHTNLVSRTHGSWLFLGSMFTTAELCLDEAERDHCGSCRACLDACPTNAFPSPYKIDARRCISYLTIEHKGPIPHEFRPMIGNRIYGCDDCLAACPWNKFAASASEMKLQAREDLKEPSIAFLLTLDDAAFRSFFSGSPVKRIGRNRFIRNVLIAAGNSNDPLLIDQCRQLADDASPDVRGMAIWALSRLMDRESFHAYAATHTADDDSDVQEEWRMAGE

SEQ ID NO: 74215 - protein, 395 aa, Agrobacterium larrymoorei
  misc_feature (1)..(395): tr|A0A4D7E2D2|A0A4D7E2D2_9RHIZ Epoxyqueuosine reductase OS=Agrobacterium larrymoorei OX=160699 GN=queG PE=3 SV =1
MLALASRWSRRETIDTSSQKQELRARKLTDFVRAEATALGFDLCRITSADAIPLAPERLRDFLDNGFHGTMAWMEETQERRANPKTLWSEVRSVVMFGLNYGPDEDPRQLLSQADKAAISVYARNRDYHDVIKGRLKEIATRFAARAGEDVKVFVDTAPVMEKPLAAAAGLGWQGKHTNLVSRTHGSWLFLGSMFTTAELCLDEAERDHCGSCRACLDACPTSAFPSPYKIDARRCISYLTIEHKGPIPHEFRPMIGNRIYGCDDCLAACPWNKFAASASEMKLRAREDLKEPSIAFLLTLDDAAFRSFFSGSPVKRIGRNRFIRNVLIAAGNSNDPLLIDQCRQLADDASPDVRGMAIWALSRLMDRESFHAYAATHTADDDSDVQEEWRMAGE

SEQ ID NO: 74216 - protein, 385 aa, Agrobacterium radiobacter
  misc_feature (1)..(385): tr|B9J7M3|B9J7M3_AGRRK Epoxyqueuosine reductase OS=Agro bacterium radiobacter (strain K84 / ATCC BAA-868) OX=31 1403 GN=queG PE=3 SV=1
MPEDRAAEKESRRRHSLTAFLRAEARAQGFDLCRITRPDAIPEASVRLDQFLEQGYHGTMTWMEETRERRGDPRMLWSDVRSVAVFGLNYGPDEDPRTILEKPDKAAISVYARNRDYHDVIKGRLKEIATRFAARSQQDVKVFVDTAPVMEKPLAAAAGLGWQGKHTNLVSRTHGSWLFLGSMFTTADLEPDQAEIDHCGSCRACLDACPTAAFPAPYQLDARRCISYLTIEHKGPIDPLLRPLIGNRIYGCDDCLAACPWNKFASSASEMKLIAREDLKEPSIAFLLELDDAAFRAFFSGSPVKRIGRDRFVRNVLIAAGNSDDRTLIEACRRLSADPSPVVRGMAVWALSRLMTAGEFLAFAAERTDEPDADVRAEWKLAGVA

SEQ ID NO: 74217 - protein, 326 aa, Agrobacterium radiobacter
  misc_feature (1)..(326): tr|W1KZ18|W1KZ18_RHIRD 4Fe-4S ferredoxin OS=Agrobacteri um radiobacter DSM 30147 OX=1336745 GN=L902_34405 PE=4 SV=1
MAWMEETEARRAEPKTLWGDVRSIVMFGLNYGPEEDPRDLLSKPDKAAISVYARNRDYHDIIKGRLKEIATRFAARAGEDVKVFVDTAPVMEKPLAAAAGLGWQGKHTNLVSRTHGSWLFLGSMFTTAELCLDEAEKDHCGSCRACLDACPTAAFPAPYQLDARRCISYLTIEHKGPIPHEFRPMIGNRIYGCDDCLAACPWNKFAASASEMKLQAREDLKEPSIAFLLTLDDAAFRSFFSGSPVKRIGRNRFIRNVLIAAGNSADRQFVEQCKALAETDPSPEVRGMAAWALSRLMDRDEFRTYSAGRAPEPDPEAEMEWQLAEA

SEQ ID NO: 74218 - protein, 385 aa, Agrobacterium rhizogenes
  misc_feature (1)..(385): tr|A0A546ZCS1|A0A546ZCS1_AGRRH tRNA epoxyqueuosine(34) reductase QueG OS=Agrobacterium rhizogenes OX=359 GN=qu eG PE=4 SV=1
MPEDRAAEKESRRRRSLTAFLCAEARAQGFDLCRITRPDAIPEASVRLDQFLEQGYHGTMAWMEETRERRGDPRMLWSDVRSIAVFGLNYGPDEDPRTILEKPDKAAISVYARNRDYHDVIKGRLKEIATRFAARSQQDVKVFVDTAPVMEKPLAAAAGLGWQGKHTNLVSRTHGSWLFLGSMFTTADLEPDQAEIDHCGSCRACLDACPTAAFPAPYQLDARRCISYLTIEHKGPIDPLLRPLIGNRIYGCDDCLAACPWNKFASSASEMKLIAREDLKEPSIAFLLELDDAAFRAFFSGSPVKRIGRDRFVRNVLIAAGNSDDRTLIGACRHLSADPSPVVRGMAVWALSRLMTAGEFLAFAAERTDEPDADVRVEWKLAGVA

SEQ ID NO: 74219 - protein, 378 aa, Agrobacterium rhizogenes
  misc_feature (1)..(378): tr|A0A2T7VC84|A0A2T7VC84_AGRRH Epoxyqueuosine reductase OS=Agrobacterium rhizogenes OX=359 GN=queG PE=3 SV=1
MQKQELRARKLTDFVKAEATALGFDLCRITSPDAIPLAPDRLREFLDSGFHGTMGWMAETQERRASPKTLWGDVRSIVMFGLNYGPDEDPRTILEKRDKAAISVYARNRDYHDVIKGRLKEIATRFAARAGEDVKVFVDTAPVMEKPLAAAAGLGWQGKHTNLVSRSFGSWLFLGSMFTTAELCLDEAERDHCGSCRACLDACPTNAFPAPYKLDARRCISYLTIEHKGPIPHEFRPMIGNRIYGCDDCLAACPWNKFAASASEMKLQAREDLKEPPIDFLLGLDDAAFRTFFSGSPVKRIGRNRFIRNVLIAAGNSKDQRLVEQCKRLASDVSPEVRGMAVWALSQLMDSHSFHAYAAAHTAEDDSDVQEEWRIAGA

SEQ ID NO: 74220 - protein, 395 aa, Agrobacterium rosae
  misc_feature (1)..(395): tr|A0A2S4EIL7|A0A2S4EIL7_9RHIZ Epoxyqueuosine reductase OS=Agrobacterium rosae OX=1972867 GN=queG PE=3 SV=1
MPVPTGSNRGRHAIDTALQKQQVRAAKLTDFVRSEALSLGFDLCRITAPDSIPQAPERLREFIDNGFHGTMGWMEETQERRADPKTLWGDVRSVVMFGLNYGPDEDPRGILDRPDKGAISVYARNRDYHDVIKGRLKEIATRFAARAGEDVKVFVDTAPVMEKPLAAAAGLGWQGKHTNLVSRTHGSWLFLGSMFTTAELQRDEAERDHCGSCRACLDACPTNAFPAPYKIDARRCISYLTIEHKGPIPLEFRPMIGNRIYGCDDCLAACPWNKFAASASEMKLQARDDLKEPSITFLLTLDDAAFRTFFSGSPVKRIGRNRFVRNVLIAAGNSGDSGFIAQCQTLAQDSSPEVRAMAVWALSRLMDGESFTTYATTRAPEDDSNVLDEWRMAGV

SEQ ID NO: 74221 - protein, 382 aa, Agrobacterium rubi
  misc_feature (1)..(382): tr|A0A1B9TI55|A0A1B9TI55_9RHIZ Epoxyqueuosine reductase OS=Agrobacterium rubi OX=28099 GN=queG PE=3 SV=1
MDTALHKQQLRAAKLTDFVRSEATALGFDLCRITSADSIPLAPERLREFIDNGFHGTMGWMEETEERRGRPRTLWSDVRSVVMFGLNYGPDEDPRDILTKPDKAAISVYARNRDYHDVIKGRLKEIATRFSARAGEDVKVFVDTAPVMEKPLAEAAGLGWQGKHTNLVSRTHGSWLFLGSMFTTAELCLDEAERDHCGSCRACLDACPTNAFPSPYKLDARRCISYLTIEHKGTIPHEFRPMIGNRIYGCDDCLAACPWNKFAASASEMKLQARDDLKEPDIASLLTLDDATFRTFFSGSPVKRIGRNRFIRNVLIAAGNSGDAKFIAQCQTLAQDVSPDVRGMAVWALSRLMDRHSFNAYACAHAAEDDSDVLNEWIIAGV

SEQ ID NO: 74222 - protein, 378 aa, Agrobacterium rubi
  misc_feature (1)..(378): tr|A0A081CUR7|A0A081CUR7_9RHIZ Epoxyqueuosine reductase OS=Agrobacterium rubi TR3 = NBRC 13261 OX=1368415 GN=q ueG PE=3 SV=1
MHKQQLRAAKLTDFVRSEASALGFDLCRITSADSIPLAPERLREFIDNGFHGTMGWMEETQERRARPRTLWSDVRSVVMFGLNYGPNEDPRDILTKPDKAAISVYARNRDYHDVIKGRLKEIATRFSARAGEDVKVFVDTAPVMEKPLAEAAGLGWQGKHTNLVSRTHGSWLFLGSMFTTAELCLDEAERDHCGSCRACLDACPTNAFPSPYKLDARRCISYLTIEHKGTIPHEFRPMIGNRIYGCDDCLAACPWNKFAASASEMKLQARDDLKEPDIAFLLTLDDATFRTFFSGSPVKRIGRNRFIRNVLIAAGNSGDAKFIAQCQTLAQDVSPDVRGMAVWALSRLMDRHSFNAYACARAAEDDSDVLNEWMIAGV

SEQ ID NO: 74223 - protein, 383 aa, Agrobacterium salinitolerans
  misc_feature (1)..(383): tr|A0A1S9ELU5|A0A1S9ELU5_9RHIZ Epoxyqueuosine reductase OS=Agrobacterium salinitolerans OX=1183413 GN=queG PE= 3 SV=1
MDVASEKQRIRAHKLTDFVRREALSLGFDLCRITAPDSIPLAPERLRQFLDNGYHGTMAWMEETEARRAEPKTLWGDVRSIVMFGLNYGPEEDPRDLLSKPDKAAISVYARNRDYHDVIKGRLKEIATRFAARAGEHVKVFVDTAPVMEKPLAAAAGLGWQGKHTNLVSRTHGSWLFLGSMFTTAELCLDEAERDHCGSCRACLDACPTAAFPAPYQLDARRCISYLTIEHKGPIPHEFRPMIGNRIYGCDDCLAACPWNKFAASASEMKLQAREDLKEPSIAFLLTLDDAAFRSFFSGSPVKRIGRNRFIRNVLIAAGNSADRQFVEQCKALAETDPSPEVRGMAAWALSRLMDRDEFRTYSAGRAPEPDPEAEMEWQLAEA

SEQ ID NO: 74224 - protein, 326 aa, Agrobacterium salinitolerans
  misc_feature (1)..(326): tr|A0A1S7U072|A0A1S7U072_9RHIZ Iron-sulfur cluster bind ing protein OS=Agrobacterium salinitolerans str. Haywar d 0363 OX=1183434 GN=AGR9A_Cc210359 PE=4 SV=1
MAWMEETEARRAEPRTLWGDVRSIVMFGLNYGPEEDPRGLLLKPDKAAISVYARNRDYHDVIKGRLKEIATRFAARAGEDVKVFVDTAPVMEKPLAAAAGLGWQGKHTNLVSRTHGSWLFLGSMFTTAELCLDDAERDHCGSCRACLDACPTAAFPAPYQLDARRCISYLTIEHKGPIPHEFRPMIGNRIYGCDDCLAACPWNKFAASASEMKLQAREDLKEPSIAFLLTLDDAAFRSFFSGSPVKRIGRNRFIRNVLIAAGNSADRQFVEQCKALAETDPSPEVRGMAAWALSRLMDRDEFRTYSAGRAPEPDPEAEMEWQLAEA

SEQ ID NO: 74225 - protein, 140 aa, Agrobacterium sp.
  misc_feature (1)..(140): tr|A0A357XDA2|A0A357XDA2_AGRSP tRNA epoxyqueuosine(34) reductase QueG (Fragment) OS=Agrobacterium sp. OX=361 G N=DEB63_19430 PE=4 SV=1
GNRIYGCDDCLAACPWNKFAASASEMKLQAREDLKEPSITFLLTLDDAAFRRFFSGSPVKRIGRNRFIRNVLIAAGNSADRQFLEQCKALAGRDPSPEVRGMAAWALSRLMDREEFRTYSATRAPETDPEAEMEWQLAEA

SEQ ID NO: 74226 - protein, 323 aa, Agrobacterium sp.
  misc_feature (1)..(323): tr|A0A0L6K2F8|A0A0L6K2F8_9RHIZ 4Fe-4S ferredoxin OS=Agr obacterium sp. SUL3 OX=1701910 GN=AKG12_20420 PE=4 SV=1
MEETEARRAEPKTLWGDVRSIVMFGLNYGPEEDPRGLLSKPDKAAISVYARNRDYHDIIKGRLKEIATRFAARAGEDVKVFVDTAPVMEKPLAAAAGLGWQGKHTNLVSRTHGSWLFLGSMFTTAELCLDEAEKDHCGSCRACLDACPTAAFPAPYQLDARRCISYLTIEHKGPIPHEFRPMIGNRIYGCDDCLAACPWNKFAASASEMKLQAREDLKEPSISFLLTLDDAAFRSFFSGSPVKRIGRNRFIRNVLIAAGNSADRQFVEQCKSLAETDPSPEVRGMAAWALSHLMDREEFRTYSATRAPESDPEAAMEWQLAKA

SEQ ID NO: 74227 - protein, 326 aa, Agrobacterium tumefaciens
  misc_feature (1)..(326): tr|H0H8V7|H0H8V7_RHIRD Iron-sulfur cluster binding prot ein OS=Agrobacterium tumefaciens 5A OX=1107544 GN=AT5A_ 11357 PE=4 SV=1
MAWMEETEARRAEPKTLWGDVRSIVMFGLNYGPEEDPRGVLSKADKAAISVYARNRDYHDVIKGRLKEIATRFAARAGEDVKVFVDTAPVMEKPLAAAAGLGWQGKHTNLVSRTHGSWLFLGSMFTTAELCLDEAEKDHCGSCRACLDACPTAAFPAPYQLDARRCISYLTIEHKGVIPHEFRPMIGNRIYGCDDCLAACPWNKFAASASEMKLQAREDLKEPSIAFLLTLDDAAFRSFFSGSPVKRIGRNRFIRNVLIAAGNSRDQQFVQQCKSLAEKDPAPEVRGMAAWALSQLMDSEEFRAYSAGRAPEPDPEAEMEWQLAEA

SEQ ID NO: 74228 - protein, 326 aa, Agrobacterium tumefaciens; identical to SEQ ID NO: 74217
  misc_feature (1)..(326): tr|A0A1S7PPE1|A0A1S7PPE1_RHIRD Iron-sulfur cluster bind ing protein OS=Agrobacterium tumefaciens str. Kerr 14 O X=1183424 GN=AGR4C_Cc20129 PE=4 SV=1

SEQ ID NO: 74229 - protein, 390 aa, Agrobacterium vitis
  misc_feature (1)..(390): tr|A0A1S2E963|A0A1S2E963_AGRVI tRNA epoxyqueuosine(34) reductase QueG OS=Agrobacterium vitis OX=373 GN=BBK95_1 0990 PE=4 SV=1
MAKEGSPERTAEKARARAAKLSAFIRQEAADKGFDLCRITGPESIPQAPARLLEFVDAGYHGTMAWMEETRDRRGDPKVLWPQVRSIVMFGLNYGPETDPRALQAQPDKAAISVYARNRDYHDIIKGKLKEIATRFAARAGEDVKVFVDTAPVMEKPLAAAAGLGWQGKHTNLVSREYGSWLFLGSLFTTAELQLDAAERDHCGSCRACLDACPTSAFPAPYQIDARRCISYLTIEHKGVIDRNLRPAFGNRIYGCDDCLAACPWNKFAAQAREIKLQAREDLTAPDIAFFLTLDDPGFRSHFSGSPVKRIGRDRFVRNVLIAAGNSGLSTLITPCLDLLADASPDVRGMAVWALSRLMEPQAFGALAHSIENEPDSDVRAEWIAAGVTP

SEQ ID NO: 74230 - protein, 390 aa, Agrobacterium vitis
  misc_feature (1)..(390): tr|B9JZB4|B9JZB4_AGRVS Epoxyqueuosine reductase OS=Agro bacterium vitis (strain S4 / ATCC BAA-846) OX=311402 GN =queG PE=3 SV=1
MAKEGSPERTAEKAKARAAKLSAFIRQEAADKGFDLCRITGPQSIPQAPARLMEFVDAGYHGTMAWMEETRERRGDPKVLWPQVRSIVMFGLNYGPETDPRALQAQPNKAAISVYARNRDYHDIIKGKLKEIATRFAARAGEDVKVFVDTAPVMEKPLAAAAGLGWQGKHTNLVSRDYGSWLFLGSLFTTAELELDAAERDHCGSCRACLDACPTAAFPAPYQIDARRCISYLTIEHKGVIDRDLRPAFGNRIYGCDDCLAACPWNKFAAQTREIKLQAREDLMAPDIAFFLTLDDPGFRSHFSGSPVKRIGRDRFVRNVLIAAGNSGLSTLITPCLDLLADASPDVRGMAVWALSRLMEPQAFGALAHYRENEPDSDVRAEWIAAGVTP

SEQ ID NO: 74231 - protein, 357 aa, Agromyces sp.
  misc_feature (1)..(357): tr|A0A542JL10|A0A542JL10_9PSED Epoxyqueuosine reductase OS=Agromyces sp. SLBN-50 OX=744977 GN=queG PE=3 SV=1
MSDSPPDLAQLAQSIKDWGRELGFQQVGITDVDLGEHEAHLQRWLDAGYQGEMDYMAAHGSKRSHPDELVPGTLRVVSLRMDYLPGDTRMAERLAQPEQAYVSRYALGRDYHKLVRKRLQQLAERIQAVIGPFGHRAFVDSAPVLEKAIAEKAGLGWIGKNTLVLNRKAGSWFFLGELFVDIPLPIDAPRASEHCGRCTACMDICPTAAFAGPYVLDARRCISYLTIELKGSIPEELRAPIGNRVFGCDDCQIVCPWNRFARPTEQGDFQPRHGLDSGGLVELFLWTEAEFLSRTEGSPLRRAGYERWLRNLAVGLGNAPSTIPVLEALRARREHPSELVREHVAWALARHHEKGPH

SEQ ID NO: 74232 - protein, 357 aa, Ahniella affigens
  misc_feature (1)..(357): tr|A0A2P1PYY4|A0A2P1PYY4_9GAMM Epoxyqueuosine reductase OS=Ahniella affigens OX=2021234 GN=queG PE=3 SV=1
MNETRALPDREQIRQWARALGFQECGVSTAPLAEDEAYLLSWLQQGFHGDMDYMARHGSKRSRPAELHTGTVSVISVRMDYHQPDAAPIAEILADPDAAFISRYALGRDYHKVLRQRLQKLADRIGQAVGPFGYRAFVDSAPVLEKALARNAGLGWIGKHTNLIHERHGSWFFLGELYTDLPLAPDPAHDRNHCGTCTRCLDVCPTQAIIAPYQVDARRCISYLTIELHGSIPEDLRPLLGNRIYGCDDCQWVCPWNKFADATIEVDFQIRHGLDRARLLDLFAWDETTFQNRTEGSPIRRIGYERWLRNIAVALGNAPFSEQTIQALRAKQSHPSELVQEHVAWAIKAQLAKASAA

SEQ ID NO: 74233 - protein, 386 aa, Ahrensia marina
  misc_feature (1)..(386): tr|A0A0N0VLX3|A0A0N0VLX3_9RHOB 4Fe-4S ferredoxin OS=Ahr ensia marina OX=1514904 GN=SU32_04260 PE=4 SV=1
MSTTLSPEKAKQSLISDLSSEGFELVGFMDANDTGKMTSALSEFIDAGYHGSMQWMEDTQERRAAPTVLWEDAKTIILAAMVYSPDNDYDPLHATTLDDRATISCYAHNRDYHDVIKGKLKQVAGRFVAKTGAEVKVFIDTAPVMEKPLAQKAGLGWQGKHTNLVSRQIGSWFFIGSIFTDMDLPLDDAETDHCGSCRACLDCCPTNAFPSAYRLDARRCISYLTIEHAGPIDIEFRKPMGNRIYGCDDCLAVCPWNKFATKAREAKLQAREDLKSPPLAALLQLDDTAFRKMFAGSPVKRIGRNRFIRNCLVAAGNSSDQELLPLIKTHLNDPDNVVRGTAVWALAQHVNKDEFSVLYETYYPTESDQSVCQEWMTALETTGLEL

SEQ ID NO: 74234 - protein, 376 aa, Ahrensia sp.
  misc_feature (1)..(376): tr|A0A2E0IKN6|A0A2E0IKN6_9RHOB tRNA epoxyqueuosine(34) reductase QueG OS=Ahrensia sp. OX=1872419 GN=queG PE=4 SV=1
MTPEKAKQSLVEDLKREGFADVRVARVDSIPLAPVRLREFLEAGRHATMGWMEETEERRADPRVLWPEARTVVLAAMNYGPPDSDEPLRALTRRERATISVYARNRDYHDVIKGKLKQAAGRFAAKTGGQVKVFIDTAPVMEKPLGEAAGLGWQGKHTNLVSRKLGSWFFIGSIFTDMDLPADAAETDHCGSCRNCLDICPTDAFPAPYTLDARRCISYLTIEHAGPIPVEFRKSMGNRIYGCDDCLAVCPWNKFAAAASEAKLTARDELNAPLIAELLRLDDPAFRTKFSGSPIKRIGRDRFVRNVLIAAGNSALPALADQVEPHLTDPQPVVRGAAAWALRELAEPRRFETAREAHLEKETDERVKQEWMGTAP

SEQ ID NO: 74235 - protein, 355 aa, Ahrensia sp.
  misc_feature (1)..(355): tr|E0MRA3|E0MRA3_9RHOB Putative electron transport prot ein YjeS OS=Ahrensia sp. R2A130 OX=744979 GN=R2A130_294 6 PE=4 SV=1
MSVPNLPKNWRANLEADANELGFESIGITTPDAIPEAAERLARALKDGHHATMGWMEETAERRGSPTALWPDVQSVIVLAMNYGPEFDPLTVLDEPERGAISVYARHRDYHDVMKGKVKTLASKLAARHRETFPDIEVKVFVDTAPVMEKPLAQAAGLGWQGKHTNLVSRDHGSWLFLASLFTNLSLPVDKLERDHCGSCMDCHDACPTNAFPAPYRLDARRCISYLTIEHHGPIPHEFRKPMGNRIYGCDDCLAVCPWNKFAHAASEVKLASPEPPRDDDLAGFLALDDTAFRTRFSGSPVKRIGRDRFIRNCCIAAGNSALPELLPAVEQLTQDADETVAEAARWAEAELRKN

SEQ ID NO: 74236 - protein, 368 aa, Aidingimonas halophila
  misc_feature (1)..(368): tr|A0A1H2R9A7|A0A1H2R9A7_9GAMM Epoxyqueuosine reductase OS=Aidingimonas halophila OX=574349 GN=queG PE=3 SV=1
MSSAAERELNESDLARLADLIKTWGRELGFQQVGITDTDLEAHEHYLERWLANGRHGEMQFMEKHGRKRTRPAELVPGTLRVISVRMDYLPPEVETTKVLGQPNRAYVSRYAVGRDYHKVIRKRLQQLAEHIEAEVGQFGYRAFVDSAPVMERALAQKAGLGWFGKNSMLLNPRAGSLFFLGELYTNLPLPTDPPFEEEHCGSCTSCQTACPTGAIVDDKVVDSRRCISYLTIELHGSIPEQYREAIGNRVYGCDDCQLVCPFTRFTRVSDEDDFAPRHDLDRMDLVSLFAWSREEFLTKTEGSPIRRIGYERWLRNLAVGLGNAPWSDRVEAALRARLAYPSDLVREHVRWALGKQQEKRQRVITKA

SEQ ID NO: 74237 - protein, 332 aa, Akkermansia glycaniphila
  misc_feature (1)..(332): tr|A0A1C7PCB3|A0A1C7PCB3_9BACT Tigr00276: epoxyqueuosin e reductase OS=Akkermansia glycaniphila OX=1679444 GN=P YTT_2094 PE=4 SV=1
MAARQLGFSDCRVAHAVPTPYGHTLQQWLRNGCHASMEWMERQEEKRLDPTLVLPDVRSIAILSYPYTPHNLRTARGRIARYAHGHDYHKLLESKLADLDETLRFYGGSQRYYTDSGPVNERDYATLSGMGWIGRHRQIIHPQGGSCIFLATILTTLELPADTPCSPRCGSCRRCIDACPGGALDGHSVDARRCISYWTIEHKGSIPEEWRSLLGDRLYGCDTCLEACPWNRFARETHDTRLLLPRHLRTLQPRDILTLDDQTFTEHFRHSPIRRIKREGLLRNACCVLGNIGTADDLPALEQALHDTPLIAEHAEWAIRRIHDRTASSSEP

SEQ ID NO: 74238 - protein, 383 aa, Akkermansia muciniphila
  misc_feature (1)..(383): tr|A0A2N8HKN7|A0A2N8HKN7_9BACT tRNA epoxyqueuosine(34) reductase QueG OS=Akkermansia muciniphila OX=239935 GN= queG PE=4 SV=1
MKRRQGAGNPISTGLKKILGGRGALVHDAGVLTPDPAVIKDSLCAVSRQLGFSGCRVARAGRSPHAEKLFQWLERGWHAGMEWMARSPERRADPAEVLSGCRSVICLSYDYDSPAMRPEGEGSICLYAHGRDYHGILEEKLADLQELLSIYGGEQKGYVDAGPVMERDHAEACGLGWRGRSGLIVRRKGGSRFFIATLLTTLELEPDTPVSHGCGSCRRCADLCPTGAIMENGQVDAGRCLSYWTIEHRGSIPEEIRPLVGTRLYGCDTCVTVCPWNGKPLPEADERFRMSRLLASIPLRDLLALDAGGFADLFRNSPLKRIKREGLLRNGCIVLGNAGTPDDIDFLKALSGESPLVAEHASWAVERILRRHGRHACSSGARD

SEQ ID NO: 74239 - protein, 353 aa, Akkermansia muciniphila
  misc_feature (1)..(353): tr|R6J2M9|R6J2M9_9BACT Uncharacterized protein OS=Akker mansia muciniphila CAG:154 OX=1263034 GN=BN502_01864 PE =4 SV=1
MLTPDSSVIKDSLCAVSRQLGFSGCRVARAEKSPHAEKLFQWLERGWHAGMEWMARSPERRTDPAEVLPGCRSVICLSYDYDSPGRRPEGEGSICLYAHGKDYHGILGEKLADLQELLSIYGGKQKGYVDSGPVMERDHAEACGLGWRGKSGLIVRRKGGSRFFIATLLTTLELEPDAPVSNGCGSCRRCAALCPTGAIMGNGQVDAGRCLSYWTIEHRGAIPEEIRPLIGTRLYGCDTCVTVCPWNGKPLPDVDERFRMSRLLASIPLRGLLSLDAGGFAALFRNSPLKRLKREGLLRNGCVVLGNAGTPDDIDFLKALYGESPLVEEHASWAVERILRRYGRHASSSGARD

SEQ ID NO: 74240 - protein, 350 aa, Akkermansia sp.
  misc_feature (1)..(350): tr|A0A354E9H7|A0A354E9H7_9BACT tRNA epoxyqueuosine(34) reductase QueG (Fragment) OS=Akkermansia sp. OX=1872421 GN=queG PE=4 SV=1
PDPAVIKNSLCAVSRQLGFSGCRVARAGKSLHAEKLFQWLERGWHAGMEWMARSPERRADPAEVLPGCRSVICLSYDYDSPVMRPEGEGSICLYAHGRDYHGILEEKLADLQELLSIYGGEQKGYVDSGPVMEREHAETCGLGWRGRSGLIVRRKGGSRFFIATLLTTLELEPDAPVSNGCGSCRRCAALCPTGAIMENGQVDAGRCLSYWTIEHRGAIPEKIRPLIGTRLYGCDTCVTVCPWNSKPLPDADERFRMSRFLSSVSLRDLLSLDAGGFAALFRNSPLKRLKREGLLRNGCIVMGNAGTPDDVDFLKTLYGESPLVEEHASWAVERILRRYGRHASSSGARD

SEQ ID NO: 74241 - protein, 388 aa, Akkermansia sp.
  misc_feature (1)..(388): tr|A0A139TQK3|A0A139TQK3_9BACT Putative iron-sulfur clu ster-binding protein OS=Akkermansia sp. KLE1798 OX=1574 265 GN=HMPREF3039_01938 PE=4 SV=1
MSIMGRQGCAGNPISAGAKKILGAGSALRHDGGVPKPDSFLIKDSLHSVSRSLGFSDCRVARAGRALHAEELFLWLERGWHADMEWMARSPERRVNPAEVLPGCRSVICLSYDYDSSMSRPSGSGSICLYAHGRDYHGILEEKLADLSELLSIYGGEQKGYVDAGPVMERDHAEACGLGWRGRSGLIVRRRGGSRFFIATLLTTLELEPDAPASGTCGSCRRCVEACPAGAIMENGLVDANRCLSYWTIEHRGAIPEDIRPLIGTRLYGCDTCVTACPWNKKPLTDADERFRMPLRLASISLRDLLSLDDAGFTAMFRNSPLKRIRREGLLRNGCIVLGNAGTPDDLDLLKRLCGESPLVAEHAEWAMERILHRHAAGGCPGGAEDEK

SEQ ID NO: 74242 - protein, 306 aa, Albidiferax sp.
  misc_feature (1)..(306): tr|A0A1H0SET7|A0A1H0SET7_9BURK Epoxyqueuosine reductase OS=Albidiferax sp. OV413 OX=1855285 GN=SAMN05216303_10 4159 PE=4 SV=1
MAYMESHGLKRARPAELVPGTVSVITARMDYLPRSTPEGWQALESDRLSRPQEGIVSVYARGRDYHKVLRARLQKLSDRIATELGPLGYRVFTDSAPVLEAELAARSGQGWRGKHTLVLNREAGSMFFLGEIYVDRALPPTAPTSGHCGSCSACIDVCPTQAIIAPQRLDARRCISYLTIEHAGPIPLEFRPLIANRIYGCDDCQLACPWNKFAQRSALPDFDERRGLSGQQLGTLFSWTEDEFLRYTEGGPIRRIGHERWLRNVAVAMGNALRAGEDADIRLALQQRAEDPSALVREHVAWALGI

SEQ ID NO: 74243 - protein, 368 aa, Albidovulum inexpectatum
  misc_feature (1)..(368): tr|A0A2S5JM03|A0A2S5JM03_9RHOB Epoxyqueuosine reductase OS=Albidovulum inexpectatum OX=196587 GN=queG PE=3 SV= 1
MDARAFRNRLTAKALEEGFSQVGYCAPDAIPDAPARLASFLEQGRHGQMHWMAERTGWRANPAALWPEARTIVMLAESYTPDHDPLAVLQHRDRAAISCYAQGRDYHDLVKKRLKRVGRWLIEQAAKEGVEAQIKVFVDTAPVMEKPLGQAAGLGWQGKHTNLVGRQLGSWFFLGAIFTTLDLPKDQPETDHCGNCRRCLDICPTAAFPAPYQLDARRCISYLTIEHRGPVAEDLRPALGNRIYGCDDCLAVCPWNKFAQKAREIGYAARVGAPELAELAALDDAAFRARFSGSPIKRIGRDRFVRNVAYAIGNSGRSELARSLMPLLNDPDPAVADAARWALDRLQGRQGPADRPAGGGNQTDSAPS

SEQ ID NO: 74244 - protein, 351 aa, Albidovulum xiamenense
  misc_feature (1)..(351): tr|A0A1G8Z3J1|A0A1G8Z3J1_9RHOB Epoxyqueuosine reductase OS=Albidovulum xiamenense OX=990712 GN=queG PE=3 SV=1
MSAAPDPAALKAELLREAEAVGFAEARVTTPDAIPEAAERLRHFVELGRHGTMRWMAERMEWRGNPAALWPEARSIVMLADLYTPRHDPLEVLKKREAGAISVYAGGRDYHDVIKKKLKRLGRWLLARAGGGEIKVFVDTAPVMEKPLGQAAGLGWQGKHTNLLSRRLGNWFFLGAIFTTLELPPDAPEVEHCGSCTACLDICPTRAFPAPFQLDARRCISYLTIEHAGPVDPELRPALGNRIYGCDDCLAVCPWNKFARAASEARYAMREELRAPDLAQLARLDDAGFRAFFSGSPIKRIGRNRFARNVAYAIGNSASPRLLPIAQELSNDADETVAEAGRWAAARLRQR

SEQ ID NO: 74245 - protein, 462 aa, Albimonas donghaensis
  misc_feature (1)..(462): tr|A0A1H3E420|A0A1H3E420_9RHOB Epoxyqueuosine reductase OS=Albimonas donghaensis OX=356660 GN=queG PE=3 SV=1
MCFPRRAARGPRPPRRGFQRAAAPGFGPRDLGRRASGPRPRVISDSAHTALRHPPRGTSLPHLAPRRTGDGAATRRRAIPLDPAQLKTRLAEAARAEGFAAMGVCRPDAIPEAAPRLARFLEAGRHGDMGWMEARSHWRGDPTTLWPEARSVIMLAEAYTPAEDPLALLEMPDRASVSVYARGPDYHDRVKKRLKRLAGAFLAEAGPETGVKVFVDTAPVMEKPLAQAAGLGWQGKHTNLLGREIGNWVFLGAIFTTAELPADAPEVSHCGTCRKCLDICPTQAFPAPYQLDATRCISYLTIELKGPIPREFRPLIGNRIYGCDDCLAVCPWNKFAAEASGALYQSRVELNRPRLTDFAALDEAGFREVFAGSPIKRIGHARFLRNVLIAMGNSGVSELIPWVEARIDDPAPLVRGTAVWALSRLAPGRLAARAPARPDPDPQVAEEWRLALAETGGAARRA

SEQ ID NO: 74246 - protein, 356 aa, Albimonas pacifica
  misc_feature (1)..(356): tr|A0A1I3DW01|A0A1I3DW01_9RHOB Epoxyqueuosine reductase OS=Albimonas pacifica OX=1114924 GN=SAMN05216258_10341 PE=4 SV=1
MGFGVCRADALGPGGGETAARLRRFLAEGAHGDMDWMEARAAWRGDPKTLWPEARSIVMLAESYAPAENPLHLLEMPERASVSVYARGPDYHDKVKGKLKRLARWAAERTGQPVKVFVDTAPVMEKPLAQAAGLGWQGKHTNLLGREIGNWVFLGAIFLAAELPPDAAETEHCGSCRRCLDICPTNAFPAPFRLDARRCISYLTIELKGPIPREMRPLIGNRIYGCDDCLAVCPWNKFAVEAGTLYQSRVELNRPRLADFAALDDAAFREVFRGSPIKRIGRGRFLRNVMVAVGNSGLAEMIPVAEARLDDPEPLVRGHAVWALSRLSPARLRARAEGRAPDPDPFVAQEWRAALA

SEQ ID NO: 74247 - protein, 351 aa, Alcanivoracaceae bacterium
  misc_feature (1)..(351): tr|A0A2E2DMI8|A0A2E2DMI8_9GAMM Epoxyqueuosine reductase OS=Alcanivoracaceae bacterium OX=2024895 GN=queG PE=3 SV=1
MDFQQLKENIQQWGRELGFQQIGIADTDLSAAEADLKTWLAKGYQGQMQWMSAHGDKRFRPEALEPGTLRVISARMDYLPPDTQPVKMLGEKNKAYVSRYALGRDYHKLIRKRLATLAARIRAEVGDSELARAFVDSAPVMEKPLAAKAGLGWQGKHTLVLNREAGSWFFLGEIYTDIPLPVDQPGEDHCGKCKACITVCPTDAIVAPYQLDARRCISYLTIEHDGSIPEDLRRGIGNRIFGCDDCQLMCPWNRFARHTGETDFHPRHGLGDSDLVTLFRWNEADFLERTAGSAIRRAGYAKWLRNIAVALGNAPTSPDIILALKERLDYPDETVQEHVQWALEQHRTPKP

SEQ ID NO: 74248 - protein, 364 aa, Alcanivoracaceae bacterium
  misc_feature (1)..(364): tr|A0A3L8AYM7|A0A3L8AYM7_9GAMM Epoxyqueuosine reductase OS=Alcanivoracaceae bacterium GenoA1_TS13_700 OX=20727 47 GN=queG PE=3 SV=1
MSHDTGGSLDYQALADKIRQWGKELGFQQIAIADVALDDHEQHLQQWLAAGFHGEMDYMARHGSKRSRPQELLPGTLRVISARMDYLPPDTGMVDVLNDPTKGFISRYTLGRDYHKLIRKRLAQLGKHIEAEVGPYGYRAFVDSAPVLEKALAAKAGLGWIGKHTLLLDRSAGSWFFLGEIYVDLPLPTDPPLSGHCGTCTACLDVCPTQAIVAPYQLDSRKCISYLTIELHGPIPEPLRAPMGNRVFGCDDCQLVCPWNRFAKFTQEPDFLPRHHLHNRSLVELFLWDEDTFLRNTEGSAIRRIGYLRWLRNLAVGLGNAPTSAAVVDALKTRAQHESELVREHVQWALQRHHDNPRIDLRSE

SEQ ID NO: 74249 - protein, 349 aa, Alcanivorax borkumensis
  misc_feature (1)..(349): tr|Q0VME1|Q0VME1_ALCBS Epoxyqueuosine reductase OS=Alca nivorax borkumensis (strain ATCC 700651 / DSM 11573 / N CIMB 13689 / SK2) OX=393595 GN=queG PE=3 SV=1
MDLNQLKEQIQQWGRELGFQQIGIADTDLHAEEVQLKAWLAKGYQGQMNWMSAHGNKRFRPGELEPGTLRVISARMDYLPPGTQPVKLLQQKDKAYVSRYALGRDYHKLIRKRLAILAGRIREAVADSELARAFVDSAPVMEKPLAAKAGLGWQGKHTLVLNREAGSWFFLGEIYTDIALPVDSPGEDHCGKCKACITVCPTDAIVAPYELDARRCISYLTIEHEGSIPEDLRKGIGNRIFGCDDCQLMCPWNRFAQHTEESDFQPRHGLGDSDLVALFSWSEEAFLERTAGSAIRRAGYLKWLRNIAVALGNAPTTEGIVQALKDKLDYPDETVREHVRWALEQHQAS

SEQ ID NO: 74250 - protein, 348 aa, Alcanivorax dieselolei
  misc_feature (1)..(348): tr|K0CBI4|K0CBI4_ALCDB Epoxyqueuosine reductase OS=Alca nivorax dieselolei (strain DSM 16502 / CGMCC 1.3690 / B -5) OX=930169 GN=queG PE=3 SV=1
MDFTHFKTQLAEQARLLGFQQLGVADIDLGEAETRLRRWLDAGYHGEMKWMEAHGHKRSRPQELEPGTLRVISLRMNYLPPDTQPVKLLKQGEKAYVSRYALGRDYHKLVRKRLATLARWIREQVSDSELARAFVDSAPVMEKPLAAKAGLGWQGKHTLLLNREAGSWFFLGEIYTDLPLPVDQPVEDRCGKCSACMTVCPTDAIVAPYQLDARRCISYLTIEHPGSIPEALRAGIGNRIFGCDDCQLMCPWNRFAQFTGEHDFQPRHQLENSDLVTLFLWDEATFLRCTEGSPIRRAGYQRWLRNLAVALGNGPASTEAIGALRSRRDDPSELVREHVNWALHRLLA

SEQ ID NO: 74251 - protein, 351 aa, Alcanivorax hongdengensis
  misc_feature (1)..(351): tr|L0WG25|L0WG25_9GAMM Epoxyqueuosine reductase OS=Alca nivorax hongdengensis A-11-3 OX=1177179 GN=queG PE=3 SV =1
MDLVELKQQIQQWGRELGFQQIGVADIDLADAEQQLKDWLANGYQGDMDWMAAHGNKRSRPAELEPGTLRVISARMDYLPPDTQPVKILQQKDKAYVSRYALGRDYHKLIRKRLAQLGARIREAVADSELARAFVDSAPVMEKPLAAKAGLGWQGKHTLLLNREAGSWFFLGEIYTDLPLPVDAPGEDHCGKCRACITVCPTDAIVAPYQLDARRCISYLTIEHDGSIPEDLREGIGNRIFGCDDCQLMCPWNRYSQHSGESDFHPRHGLGDSDLVTLFGWSEAQFLERTAGSAIRRAGYHKWLRNIAVALGNAPYSEDIVAALKARSEYPDETVREHVAWALKKQHASVI

SEQ ID NO: 74252 - protein, 349 aa, Alcanivorax jadensis
  misc_feature (1)..(349): tr|A0A095TIV6|A0A095TIV6_9GAMM Epoxyqueuosine reductase OS=Alcanivorax jadensis T9 OX=1177181 GN=queG PE=3 SV= 1
MDLQALKEKIQLWGRELGFQQIGIADTDLRAAEADLKAWLEKGYQGQMKWMAAHGNKRYRPEELEPGTLRVISARMDYLPPDTQPVKILQQKDKAYVSRYALGRDYHKLIRKRLAILAARIREEVADSELARAFVDSAPVMEKPLAAKAGLGWQGKHTLVLNREAGSWFFLGEIYTDIPLPVDQPGEDHCGKCRACITVCPTDAIVAPYELDARRCISYLTIEHEGSIPEDLREGIGNRIFGCDDCQLMCPWNRFAQHTGEGDFHPRHGLGDSDLVTLFSWSEEEFLERTAGSAIRRAGYRKWLRNIAVALGNAPGSEEIVQALRDRRDFPDETVQEHVCWALERHTQT

SEQ ID NO: 74253 - protein, 348 aa, Alcanivorax nanhaiticus
  misc_feature (1)..(348): tr|A0A095SI94|A0A095SI94_9GAMM Epoxyqueuosine reductase OS=Alcanivorax nanhaiticus OX=1177154 GN=queG PE=3 SV= 1
MDLHQLKDKIQQWGRELGFQQIGIADTDLSIAEADLKAWLAKGYQGQMEWMAAHGNKRFRPEELEPGTLRVISARMDYLPPDTQPVKMLQEKDKAYVSRYALGRDYHKLIRKRLATLASRIREEVADSQLARAFVDSAPVMEKPLAAKAGLGWQGKHTLVLNREAGSWFFLGEIYTDIPLPVDTPGEDHCGKCKACITVCPTDAIVAPYQLDARRCISYLTIEHDGSIPEDLRPGIGNRIFGCDDCQLMCPWNRFAQHTGETDFHPRHGLGDSDLVTLFGWNEEEFLERTAGSAIRRAGYEKWLRNIAVALGNAPTSEGVILALNARRNHPDETVQEHVQWALEQHQG

SEQ ID NO: 74254 - protein, 340 aa, Alcanivorax pacificus
  misc_feature (1)..(340): tr|A0A0B4XMJ4|A0A0B4XMJ4_9GAMM Epoxyqueuosine reductase OS=Alcanivorax pacificus W11-5 OX=391936 GN=queG PE=3 SV=1
MHIKTWGRELGFQQVGIADTDLSAAEAQLKAWLAAGYHGGMDWMLAHGDKRSRPAQLEPGTLRVISVRMDYLPPDTAPIKRLKQGEKAYISRYALGRDYHKLIRKRLARLAEQIRDAASDAGLARAFVDSAPVLEKPLAAKAGLGWQGKHTLILNRQAGSWFFLGEIYTDLPLPVDAPVTSHCGSCSACIDVCPTDAIVAPYQLDARRCISYLTIEHKGDIPEALRAPIGNRIFGCDDCQLVCPWNRYARHTGETDFHPRHQLDDVALVTLFNWSEEEFLRNTEGSAIRRTGYENWLRNIAVALGNGPASEVAIAALTRRLEHPSAMVVRHVRWALAQLA

SEQ ID NO: 74255 - protein, 349 aa, Alcanivorax profundi
  misc_feature (1)..(349): tr|A0A418XY36|A0A418XY36_9GAMM Epoxyqueuosine reductase OS=Alcanivorax profundi OX=2338368 GN=queG PE=3 SV=1
MDLQQLKENIQQWGRELGFQQIGIADTDLSAAEADLKAWLAKGYQGQMQWMSAHGDKRFRPEALEPGTLRVISARMDYLPPDTQPVKMLGEKDKAYVSRYALGRDYHKLIRKRLATLAARIRAEVGDSELARAFVDSAPVMEKPLAAKAGLGWQGKHTLVLNREAGSWFFLGEIYTDIPLPVDQPGEDHCGKCKACITVCPTDAIVAPYQLDARRCISYLTIEHDGSIPEDLRRGIGNRIFGCDDCQLMCPWNRFARHTGETDFHPRHGLGDSDLVTLFRWNEADFLERTAGSAIRRAGYAKWLRNIAVALGNAPTSPDIILALKERLDYPDETVQEHVQWALEQHRTP

SEQ ID NO: 74256 - protein, 73 aa, Alcanivorax sp.
  misc_feature (1)..(73): tr|A0A3C1HSJ6|A0A3C1HSJ6_9GAMM tRNA epoxyqueuosine(34) reductase QueG (Fragment) OS=Alcanivorax sp. OX=1872427 GN=DCQ09_15375 PE=4 SV=1
WMAAHGNKRSRPAELEPDTVRVLSLRMDYLPPDTQPVKVLQQKEKAYVSRYALGRDYHKLVRKRLARLAALIR

SEQ ID NO: 74257 - protein, 352 aa, Alcanivorax sp.
  misc_feature (1)..(352): tr|A0A220SPR6|A0A220SPR6_9GAMM Epoxyqueuosine reductase OS=Alcanivorax sp. N3-2A OX=2014542 GN=queG PE=3 SV=1
MDLADLKQRIADQALTLGFQQMGVADIDLSQAEQRLQQWLEAGHQGEMHWMAAHDGKRSRPAQLEPGTLRVLSFRMDYLPPDTQPVKVLRQKEKAYLSRYALGRDYHKLIRKRLARLAGWIREQAQESGLARAFVDSAPVMEKPLAAKAGLGWQGKHTLLLNREAGSWFFLGEIYTDLPLPIDAPGEDHCGKCSACMTVCPTDAIVAPYQLDARRCISYLTIEHPGPIPEPLRPGIGNRVFGCDDCQLMCPWNRFASHTGEHAFHPRHGLDDQELVSLFLWDEATFLARTEGSAIRRAGFERWLRNLAVALGNGPASARALAALRQRRHHPSALVREHVEWALARLEPAFPL

SEQ ID NO: 74258 - protein, 307 aa, Algibacter alginicilyticus
  misc_feature (1)..(307): tr|A0A0P0CZC7|A0A0P0CZC7_9FLAO Epoxyqueuosine reductase OS=Algibacter alginicilyticus OX=1736674 GN=queG PE=3 SV=1
MDNKSNRTKLIKKEAKRLGFLSCGISKAAFLEEEAPRLEKWLNHSMNGKMQYMENHFDKRLDPTKLVEGSKSVISLLLNYFPSEVQKFDSFKLSKYAYGTDYHFVIKDKLKSLLNFIQDEIGEVHGRAFVDSAPVLDKAWAAKSGLGWIGKHSNLLTQQVGSFYFIAELIIDLDLEYDSVTTDHCGTCTACIDACPTQAITEPYVVDGSKCISYLTIELKENIPSEFKGKMDDWMFGCDVCQDVCPWNRFSKIHNEPLFNPHPELLSITKKDWEEITEATFKKVFKKSAVKRTKFEGLKRNIKFLNS

SEQ ID NO: 74259 - protein, 307 aa, Algibacter amylolyticus
  misc_feature (1)..(307): tr|A0A556QZK9|A0A556QZK9_9FLAO Epoxyqueuosine reductase OS=Algibacter amylolyticus OX=1608400 GN=queG PE=3 SV= 1
MIDNKSKYTQLIKSEAKRLGFLSCGISKAGFLEAEAPRLEKWLNKNMNGQMQYMENHFDKRLDPTKLVEDSKSVVSLLLNYYPSENQSKKAFKISKYAYGTDYHFVIKDKLKSLLHFIQDEIGEVHGRAFVDSAPVLDKAWAAKSGLGWIGKHSNLLTQQVGSFYFIAELIIDLDLEYDSITSDHCGTCTACIDACPTQAITEPYVVDGSKCISYFTIELKENIPTEFKGKMDDWMFGCDVCQDVCPWNRFSKPHNEPLFNPHPELLQMTKKDWEEVTQETFSKVFQKSAVKRTKFSGLKRNIEFLK

SEQ ID NO: 74260 - protein, 309 aa, Algibacter aquaticus
  misc_feature (1)..(309): tr|A0A1E5TCT5|A0A1E5TCT5_9FLAO Epoxyqueuosine reductase OS=Algibacter aquaticus OX=1849968 GN=queG PE=3 SV=1
MINSKSDNAKLIKEEAKRLGFLSCGISKSQFLEEEAPRLEKWLNKNMNGQMQYMENHFDKRLDPTKLVEDSKSVISLLLNYYPQEKQQDITAPKISKYAYGRDYHFVIKDKLKSLLNFIQEEIGEVHGRAFVDSAPVLDKAWAAKSGLGWIGKHSNLLTQQVGSFYFIAELIVDLDLEYDSATTDHCGTCTACIDACPTQAIVEPYVVDGSKCISYFTIELKENIPTEFKGKMDDWMFGCDVCQDVCPWNRFSKTHNEPLFNPHPELLSITKKDWEEITEDTFRKVFKNSAVKRTKYSGLKRNINFLKD

SEQ ID NO: 74261 - protein, 132 aa, Algibacter lectus
  misc_feature (1)..(132): tr|A0A090WTQ7|A0A090WTQ7_9FLAO Epoxyqueuosine (OQ) redu ctase queG OS=Algibacter lectus OX=221126 GN=JCM19274_3 015 PE=4 SV=1
MEYDSATTDHCGSCTACIDACPTEAIVEPYVVDGSKCISYLTIELKENLPPSFKGKMDDWMFGCDVCQDVCPWNRFSKAHSEPLFNPHPELLSMTKKDWEEITEDTFKKVFQKSAVKRTKFAGLKRNINFLK

SEQ ID NO: 74262 - protein, 306 aa, Algibacter lectus
  misc_feature (1)..(306): tr|A0A090VHR8|A0A090VHR8_9FLAO Epoxyqueuosine reductase OS=Algibacter lectus OX=221126 GN=queG PE=3 SV=1
MNKEDYTLLIKTEAKRLGFLSCGISKAQFLEEEAPRLENYLNKNMNGQMRYMENHFDKRLNPTLLVEDSKSVVSLLLNYFPSEVQQDTSAPKLSKYAYGHDYHHIIKDKLKHLLHFIQDEIGEVSGRAFVDSAPVLDKAWAAKSGLGWVGKHSNLITQKVGSFYFIAELIIDLELEYDSATTDHCGSCTACIDACPTEAIVEPYVVDGSKCISYLTIELKENLPPSFKGKMDDWMFGCDVCQDVCPWNRFSKAHSEPLFNPHPELLSMTKKDWEEITEDTFKKVFQKSAVKRTKFAGLKRNINFLK

SEQ ID NO: 74263 - protein, 308 aa, Algibacter pectinivorans
  misc_feature (1)..(308): tr|A0A1I1MS74|A0A1I1MS74_9FLAO Epoxyqueuosine reductase OS=Algibacter pectinivorans OX=870482 GN=queG PE=3 SV= 1
MINNKAKYSNFIKAEAKRLGFLSCGISKAGFLEEEAPRLEKWLNNNMNGQMQYMENHFDKRLDPTKLVEDSKSVISLLLNYYPAEEQNSNSFKISKYAYGADYHFVIKDKLKSLLHVIQDEIGEVHGRAFVDSAPVLDKAWAAKSGLGWIGKHSNLLTQQVGSFYFIAELIIDLDLEYDSVTTDHCGTCTACIDACPTQAITEPYVVDGSKCISYFTIELKENIPTEFKGKMDNWMFGCDVCQDVCPWNRFSKPHNEPLFNPHPDLLEMTRKDWEEVTQETFSKVFQKSAVKRTKFSGLKRNIDFLKT

SEQ ID NO: 74264 - protein, 309 aa, Algibacter sp.
  misc_feature (1)..(309): tr|A0A2N0J966|A0A2N0J966_9FLAO Epoxyqueuosine reductase OS=Algibacter sp. RHA_19 OX=1798237 GN=queG PE=3 SV=1
MLPIVHKENATTLIKEEAKRLGFISCGVSKAEFLEEEAPRLESWLNKNMNGQMSYMENHFDKRLDPTKLVDGSKSVISLLLNYYPEATQNDDALKISKYAYGQDYHHVIKSKLRALQEFITDNIGEVEGRAFVDSAPVLDKAWAAKSGLGWIGKNSNLITQRVGSFYFIAELIVDIELAYDSAVTDHCGTCTACIDACPTQAIVDPYVVDGSKCISYFTIELKNEIPAEVRGKFDDWIFGCDVCQDVCPWNKFSKPHNEPLFNPHPDLLSMTKKDWEEITEDVFRKVFKKSAVKRTKFSGLQRNIDFLE

SEQ ID NO: 74265 - protein, 307 aa, Algibacter sp.
  misc_feature (1)..(307): tr|A0A2U2XA04|A0A2U2XA04_9FLAO Epoxyqueuosine reductase OS=Algibacter sp. ZY111 OX=2100723 GN=queG PE=3 SV=1
MEAKSKYTELIKTEAKRLGFLSCGISKAEFLEEEAPRLEKWLNNNMHGQMHYMENHFDKRLDPTLLVEGSKSVVSLLLNYFPSEEQNKDSFKISKYAFGTDYHFVIKDKLKSLLHFIQDEIGDVHGRAFVDSAPVLDKAWAAKSGLGWIGKHSNLLSQQVGSFYFIAELIIDLELEYDTPVTDHCGTCTACIDACPTEAITEPYVVDGSKCISYFTIELKENIPSGFKGQLDDWMFGCDVCQDVCPWNRFSKSHSEPLFNPNPELLSMTKKDWEEITEDTFRKVFKKSAVKRTKFSGLKRNINFLKD

SEQ ID NO: 74266 - protein, 306 aa, Algibacter wandonensis; identical to SEQ ID NO: 74262
  misc_feature (1)..(306): tr|A0A4R8MFR0|A0A4R8MFR0_9FLAO Epoxyqueuosine reductase OS=Algibacter wandonensis OX=1343161 GN=queG PE=3 SV=1

SEQ ID NO: 74267 - protein, 313 aa, Algoriphagus alkaliphilus
  misc_feature (1)..(313): tr|A0A1G5ZQI7|A0A1G5ZQI7_9BACT Epoxyqueuosine reductase OS=Algoriphagus alkaliphilus OX=279824 GN=queG PE=3 SV =1
MTPADKHASILKSTAKRLGFDFCGIAKAELLESEAPRLEDWLNRNYHGKMGYLANHFDKRLDPTKLVEGAKTVVSLIYNYYPEKQLPHQSEDIKLAKYAYGEDYHDVIRARLTEFLEVLREEIGEIGGRFFVDSAPIMERQWAQKAGLGWIGKNSLLLNREMGSFFFLAELIIDLEATPDAPLAKDYCGTCTACIDACPTDAIVQPGVVDGSRCISYLTIELKEAIPDEFAGKMENWAFGCDICQDVCPWNRFSRPNREPAFQPDAELANFSNKEWIEMTEETFKRVFSKSAVKRTKFVGLKRNVDFLVSNSF

SEQ ID NO: 74268 - protein, 324 aa, Algoriphagus antarcticus
  misc_feature (1)..(324): tr|A0A3E0DWY5|A0A3E0DWY5_9BACT Epoxyqueuosine reductase OS=Algoriphagus antarcticus OX=238540 GN=queG PE=3 SV= 1
MSVEKIKDVYLYPMAPAENNASIIKSTAKRLGFDFCGIAKAGFLEEEAPRLEDWLNRNYNGEMGYLSNHFDKRLDPTKLVEGAKTVVSLVYNYYPSNELPAEKSDIKLAKYAYGEDYHFVIRDKLNEFLEILREEIGEIDGRGFVDSAPVMERQWAQKAGLGWLGKNSLLLNREMGSFFFLSELIIDLEVAPDTPLAKDYCGTCTACIDACPTDAIVDNGVIDASRCISYLTIELKEAIPNEFKGKMENWVFGCDICQDVCPWNRFSKPHQEPRFQPNDELKELSKSDWQEITEETFGKVFKKSAVKRTKLAGLKRNVDFLTSN

SEQ ID NO: 74269 - protein, 313 aa, Algoriphagus aquaeductus
  misc_feature (1)..(313): tr|A0A326S4T4|A0A326S4T4_9BACT Epoxyqueuosine reductase OS=Algoriphagus aquaeductus OX=475299 GN=queG PE=3 SV= 1
MSPAEKHAKILKSTAKRLGFDFCGIAKAEFLESEAPRLEEWLNRNYQGKMAYLANHFDKRLDPTKLVEGAKTVVSLIYNYYPEKQLSHQPEDLKLAKYAYGQDYHDVIRAKLTEFLEVIREEIGEINGRSFVDSAPVMERQWAQRAGLGWIGKNSLLLNRQMGSFFFLAELIIDLEATPDTALAKDYCGTCTACMDACPTDAIVQPEVIDASKCISYLTIELKEAIPNEFAGKMENWVFGCDICQDVCPWNRFSRTHQEPAFQPNPELSQFTNLEWIEMTEETFKRVFAKSAVKRTKFSGIKRNVDFLKNGLA

SEQ ID NO: 74270 - protein, 311 aa, Algoriphagus aquimarinus
  misc_feature (1)..(311): tr|A0A5C7B2C3|A0A5C7B2C3_9BACT Epoxyqueuosine reductase OS=Algoriphagus aquimarinus OX=237018 GN=queG PE=3 SV= 1
MTPAEKNASIIKSTAKRLGFDFCGIAKAGFLEEEAPKLEEWLNRNYNGEMGYLANHFDKRLDPTKLVEGAKTVVSLIYNYYPEQKLPETSNSIKLAKYAYGEDYHFVIRDKLNEFLEILRDEIGEIDGRGFVDSAPVMERQWAQKAGLGWLGKNSLLLNREIGSFFFLAELIIDLEVIPDTPLAKDYCGTCTACIDACPTDAIVDNGVIDGSRCISYLTIELKDAIPIEFKSQMENWAFGCDICQDVCPWNRFSKPHQEPKFQPHPELAEFTNRDWQEITEETFRKVFKKSAVKRTKLAGLKRNVDFLTSK

SEQ ID NO: 74271 - protein, 311 aa, Algoriphagus aquimarinus
  misc_feature (1)..(311): tr|A0A1I0VSP4|A0A1I0VSP4_9BACT Epoxyqueuosine reductase OS=Algoriphagus aquimarinus OX=237018 GN=queG PE=3 SV= 1
MTPAEKNASIIKTTAKRLGFDFCGIAKAGFLEEEAPKLEEWLNRNYNGEMGYLANHFDKRLDPTKLVEGAKTVVSLVYNYYPEEKLPSGNSDIKLAKYAYGEDYHFVIRDKLNEFLEILRAEIGEIDGRGFVDSAPVMERQWAQKAGLGWLGKNSLLLNKQQGSFFFLSELIIDLEVAPDTPLTKDYCGTCTACIDACPTDAIVDNGVIDGSRCISYLTIELKDAIPTEFKGQMENWAFGCDICQDVCPWNRFSKPHQEPRFSPNEELKELSKTDWREITEETFRKVFKKSAVKRTKLAGLKRNVDFLTSN

SEQ ID NO: 74272 - protein, 312 aa, Algoriphagus boritolerans
  misc_feature (1)..(312): tr|A0A1H5V7Y3|A0A1H5V7Y3_9BACT Epoxyqueuosine reductase OS=Algoriphagus boritolerans DSM 17298 = JCM 18970 OX= 1120964 GN=queG PE=3 SV=1
MTPADKHAQLIKSIAKRLGFDFCGIAKAEFLESEAPRLEEWLNRNYQGKMGYLANHFDKRLDPTKLVEGAKTVVSLIYNYYPEKQLPHQSEDIKLAKYAYGADYHDVIRTKLTEFLEVLREEIGEINGRSFVDSAPVMERQWAQKAGLGWIGKNSLLLNREMGSFFFLAELIIDLEVTPDLPLAKDYCGTCTACIDACPTDAIVQAGVVDASRCISYLTIELKEAIPDEFAGKMENWAFGCDICQDVCPWNRFSKPNREPAFQPKDELAGFSNRDWVEMTEETFKRVFAKSAVKRPKFLGIKRNVEFLSRPK

SEQ ID NO: 74273 - protein, 313 aa, Algoriphagus boseongensis
  misc_feature (1)..(313): tr|A0A4R6T6Y1|A0A4R6T6Y1_9BACT Epoxyqueuosine reductase OS=Algoriphagus boseongensis OX=1442587 GN=queG PE=3 S V=1
MSSAENHSLIIKSTAKRLGFDFCGIANAEFLESEAPRMEEWLNRNYHGKMAYLANHFDKRLDPTKLVEGAKTVVSLIYNYFPEKELPHQSEDFKLAKYAYGEDYHIVIRDKLNEFLEVLREEIGEINGRSFVDSAPVMERQWAQRAGLGWIGKNSLLLNREMGSFFFLADLIIDLEATPDTPLAKDYCGTCTACIDACPTDAIVQPEVIDASKCISYLTIELKEAIPDEFKGKMENWAFGCDICQDVCPWNRFSKPHQETRFSPNSELSAFTNKEWIEMTEETFKRVFSKSAVKRTKLSGIKRNVDFLQSKGL

SEQ ID NO: 74274 - protein, 311 aa, Algoriphagus chordae
  misc_feature (1)..(311): tr|A0A2W7QF88|A0A2W7QF88_9BACT Epoxyqueuosine reductase OS=Algoriphagus chordae OX=237019 GN=queG PE=3 SV=1
MTPAEKNASIIKSTAKALGFDFCGIAKAGFLEEEAPLLEEWLNRSYNGQMGYLANHFDKRLDPTKLVEGAKTVVSLVYNYFPEQKLPESPDSIKLAKYAYGEDYHFVIREKLNEFLEILREEIGEIDGRGFVDSAPVMERQWAQKAGLGWLGKNSLLLNRDMGSFFFLSELIIDLEVTPDTPLAKDFCGTCTACIDACPTDAIVDNGVIDGSRCISYLTIELKDAIPSEFQGKMENWAFGCDICQDVCPWNRFSKPHQEPRFSPNEELKELSKTDWKEITEETFRKVFKKSAVKRTKLAGIKRNVDFLSSK

SEQ ID NO: 74275 - protein, 314 aa, Algoriphagus faecimaris
  misc_feature (1)..(314): tr|A0A1G6NUN3|A0A1G6NUN3_9BACT Epoxyqueuosine reductase OS=Algoriphagus faecimaris OX=686796 GN=queG PE=3 SV=1
MLSPSEKNAQLIKSTAAQLGFDFCGIAKAEFLEEEAPRLEEWLNRNYQGKMAYLANHFDKRLDPTKLVTGAQTVVSLIYNYYPHKKLPENPEDIKLAKYAYGEDYHFVIKEKLKTFLEILREKIGEIEGRAFVDSAPVMERQWAQKAGLGWIGKNSLLLNREMGSFFFLAELIIDLKVEPDSPLAKDYCGTCTACIDACPTDAIVQPGVVDGSRCISYLTIELKDAIPDEFQGKMENWAFGCDICQDVCPWNRFSRPHQEPAFAPPPDLQGFSKKDWVEMTEETFRKVFKKSAVKRTKFAGLKRNLQFIASNKS

SEQ ID NO: 74276 - protein, 312 aa, Algoriphagus halophilus
  misc_feature (1)..(312): tr|A0A1N6GGT7|A0A1N6GGT7_9BACT Epoxyqueuosine reductase OS=Algoriphagus halophilus OX=226505 GN=queG PE=3 SV=1
MTPAEKHASLIKSIANRLGFDFCGIAKAGFLEEEAPRLEEWLSRNYQGEMGYLANHFDKRLDPTKLVEGAKTVVSLVYNYYPETSLPESPESIKLAKYAYGEDYHFVIKDKLKDFLEILRNEIGEIEGRAFVDSAPVMERQWAQKAGLGWIGKNSLLLNKKQGSFFFLAELIIDLEVTPDTPLTKDYCGTCTACIDACPTDAIVQPSVVDGSRCISYLTIELKDAIPNEFKGKMDNWAFGCDICQDVCPWNRFSKPHQESKFKPHPDLEGFTNQDWLELTDETFRKVFKKSAVKRTKFAGLKRNVEFLRSKE

SEQ ID NO: 74277 - protein, 314 aa, Algoriphagus hitonicola
  misc_feature (1)..(314): tr|A0A1I2QRV7|A0A1I2QRV7_9BACT Epoxyqueuosine reductase OS=Algoriphagus hitonicola OX=435880 GN=queG PE=3 SV=1
MNSIQKHAQLIKSTAAQLGFDFCGIAKADFLEEEVPRLEEWLNRNYHGQMAYLANHFDKRLDPTKLVPGAKTVVSLIYNYFPEKKLPEKAEDIKLAKYAYGQDYHFVIKDKLKTFLEILREEIGEIEGRVFVDSAPVMERQWAQKSGIGWVGKNSLLLNREMGSFFFLAELIIDLEATPDIPLAKDYCGTCTACIDACPTDAIVQPGVVDGSRCISYLTIELKDAIPNEFQGKMKNWTFGCDICQDVCPWNRFSRPHQEPAFDLHPDLKEFTNKDWIEMTEETFRKVFKKSAVKRAGFPKLKTTLSFFKNEGSS

SEQ ID NO: 74278 - protein, 311 aa, Algoriphagus locisalis
  misc_feature (1)..(311): tr|A0A1I7DD46|A0A1I7DD46_9BACT Epoxyqueuosine reductase OS=Algoriphagus locisalis OX=305507 GN=queG PE=3 SV=1
MTPAETNASLIKSTAKRLGFDFCGVAKAGFLEEEAPRLEDWLNGNYNGEMGYLANHFDKRLDPTKLVEGAKTVVSLVYNYYPEEKLSSESSDIKLAKYAYGEDYHFVIRDKLNEFLEILREEIGEIDGRGFVDSAPVMERQWAQKAGLGWLGKNSLLLNREMGSFFFLAELIIDLEVTPDIPLAKDYCGTCTACVDACPTNAIVENGVVDGSRCISYLTIELKDSIPNQFKGQMENWAFGCDICQDVCPWNRFSKPHQEPRFQAHPELAGFSNRDWQEITEETFRKVFKKSAVKRTKLAGLKRNVDFLKSN

SEQ ID NO: 74279 - protein, 311 aa, Algoriphagus machipongonensis
  misc_feature (1)..(311): tr|A3HU74|A3HU74_9BACT Epoxyqueuosine reductase OS=Algo riphagus machipongonensis OX=388413 GN=queG PE=3 SV=1
MTSAERHASFIKSTAKRLGFDFCGIAKAEFLEEEAPRLEEWLSRNYNGEMGYLANHFDKRLDPTKLVEGAKTVVSMVYNYYPEKKLPESSEDIKLAKYAYGEDYHFVIREKLNEFLKILREEIGEIDGRGFVDSAPVMERQWAKKAGLGWLGKNSLLLNRQMGSFFFLAELIIDLEVTPDTPLAKDYCGTCTACIDACPTDAIVDHGVIDGSKCISYLTIELKDAIPSEFQGKMENWAFGCDICQDVCPWNRFSKPHQEAKFQPHPELAEFTHRDWQEITEETFRKVFKKSAVKRTKLAGLKRNVDFLKSK

SEQ ID NO: 74280 - protein, 313 aa, Algoriphagus marincola
  misc_feature (1)..(313): tr|A0A0P7XHB5|A0A0P7XHB5_9BACT Epoxyqueuosine reductase OS=Algoriphagus marincola HL-49 OX=1305737 GN=queG PE= 3 SV=1
MNSTQKHAQTIKSTAKRLGFDFCGISKAEFLEEEAPRLEDWLNRNYQGQMAYLANHFDKRLDPCKLVPGAQTVVSLIYNYFPEKKLPEKAEDIKLAKYAYGQDYHFVIKEKLKTFLEILREEIGEIEGRVFVDSAPVMERQWAQKAGLGWIGKNSLLLNREMGSFFFLAELIIDLEVEPDSPIAKDYCGTCTACIDACPTDAIVQPGVVDGSRCISYLTIELKDSIPNEFRDKMENWAFGCDICQDVCPWNRFSRPHQEPAFDLHPDLKDFTKKDWIEMTEETFRKVFKKSAVKRTKFVGLKRNIEFLKEKNP

SEQ ID NO: 74281 - protein, 313 aa, Algoriphagus ornithinivorans
  misc_feature (1)..(313): tr|A0A1I5G8A7|A0A1I5G8A7_9BACT Epoxyqueuosine reductase OS=Algoriphagus ornithinivorans OX=226506 GN=queG PE=3 SV=1
MSPSFKYAQFIKSTAKHLGFDFCGIAKAEFLEEEAPRLEEWLNRNYQGQMAYLANHFDKRLDPTKLVPSAKTVISLIYNYYPEHKLPEKPEDIKLAKYAYGEDYHFVIKDKLKTFLEILRREIGEIEGRVFVDSAPVMERQWAHKAGLGWVGKNSLLLNRKMGSFFFLAELIIDLEVVPDVPLAKDYCGTCTACIDACPTDAIVQPGVVDGSRCISYLTIELKEAIPSEFKGKMENWAFGCDICQDVCPWNRFSKPHQEPKFDPHSDLKDYSKKDWIEMTEETFQKVFKKSPLKRTKFAGLKRNLEFIQSKPS

SEQ ID NO: 74282 - protein, 311 aa, Algoriphagus ratkowskyi
  misc_feature (1)..(311): tr|A0A2W7RHQ4|A0A2W7RHQ4_9BACT Epoxyqueuosine reductase OS=Algoriphagus ratkowskyi OX=57028 GN=queG PE=3 SV=1
MTSAEKNASIIKSTAKRLGFDFCGIAKAGFLEEEAPKLEDWLNRNYNGEMGYLANHFDKRLDPTKLVEGAKTVVSLIYNYYPAEELQSESSAIKLAKYAYGEDYHFVIRDKLNEFLEILRDEIGEIDGRSFVDSAPVMERQWAQKAGLGWLGKNSLLLNRKQGSFFFLSELIIDLEVSPDTPLAKDYCGTCTACIDACPTDAIVGNGVIDGSRCISYLTIELKDAIPDVFKGKMENWAFGCDICQDVCPWNRFSKPNQEPRFQPSDELKELTKSDWKEITEETFRRVFKKSAVKRTKLVGLNRNIDFLNSK

SEQ ID NO: 74283 - protein, 313 aa, Algoriphagus sp.
  misc_feature (1)..(313): tr|A0A2D8CAL9|A0A2D8CAL9_9BACT Epoxyqueuosine reductase OS=Algoriphagus sp. OX=1872435 GN=queG PE=3 SV=1
MSPSLKYAQFIKSTAKQLGFDFCGIAKAEFLEEEAPRLEEWLNRNYQGQMAYLANHFDKRLDPTKLVPGAQTVISLIYNYYPAHKLPEKPEDIKLAKYAYGEDYHFVIKDKLKTFLEVLREEIGEIEGRVFVDSAPVMERQWAQKAGLGWIGKNSLLLNRKMGSFFFLAELIIDLEVEPDLPLAKDYCGTCTACIDACPTDAIVQPGVVDGSRCISYLTIELKEAIPAEFKGKMENWAFGCDICQDVCPWNRFSKPHQEPKFDPHSDLKDYSKKDWIEMTEETFQKVFKKSPLKRTKFAGLKRNLEFIQSKPS

SEQ ID NO: 74284 - protein, 313 aa, Algoriphagus sp.
  misc_feature (1)..(313): tr|A0A4Y9QVS2|A0A4Y9QVS2_9BACT Epoxyqueuosine reductase OS=Algoriphagus sp. XY-J91 OX=2562278 GN=queG PE=3 SV= 1
MSSADQHNAILKKIARQLGFDFCGIAKAEFLEEEAPRLEEWLNRNYQGQMSYLANHFDKRLDPTKLVPGAKTVVSLIYNYYPEKKLPENSESIKLAKYAYGEDYHLVIKEKLKTFLEMLREQIGEIDGRVFVDSAPVMERQWAQKAGLGWIGKNSLLLNRKMGSFFFLAELIIDLEATPDTPLAKDYCGTCTACIDACPTDAIVQPGVVDGSRCISYLTIELKEAIPNEFKGQLENWAFGCDICQDVCPWNRFSKPHHEPAFLPHPDLEGFTNQDWIEMTEETFRKVFKKSAVKRTKFAGLKRNIEFIKSNKS

SEQ ID NO: 74285 - protein, 311 aa, Algoriphagus yeomjeoni
  misc_feature (1)..(311): tr|A0A327PRW1|A0A327PRW1_9BACT Epoxyqueuosine reductase OS=Algoriphagus yeomjeoni OX=291403 GN=queG PE=3 SV=1
MTPAEKNAHLIKSAAKRLGFDFCGIAKAGFLEEEAPRLEEWLNRNYQGEMGYLANHFDKRLDPTKLVEGAKTVVSLIYNYYPEQKLPESSESIKLAKYAYGEDYHFVIRDKLNEFLEILRDEIGEIDGRGFVDSAPVMERQWAQKAGLGWLGKNSLLLNREMGSFFFLAELIIDLEVTPDTPLAKDYCGTCTACIDACPTDAINGDGVIDGSRCISYLTIELKDSIPSEFKNKMENWAFGCDICQDVCPWNRFSKPHQEPKFQPHPELAEFTNRDWQEITEETFRKVFKKSAVKRTKLAGLKRNVEFLKSK

SEQ ID NO: 74286 - protein, 312 aa, Algoriphagus zhangzhouensis
  misc_feature (1)..(312): tr|A0A1M7ZBD2|A0A1M7ZBD2_9BACT Epoxyqueuosine reductase OS=Algoriphagus zhangzhouensis OX=1073327 GN=queG PE=3 SV=1
MLSPEKNAQILKSIAQRLGFEACGIAKAGFLEEEAPRLENWLNQNYQGEMGYLANHFDKRLDPTKLVPGAKTVVSLIYNYYPENKLPEDTDSIKLAKYAYGEDYHFVIKDKLKTFIELIREEIGEVEGRAFVDSAPVMERQWAQKSGLGWLGKNSLLLNRKMGSFFFLAELIIDLEAQPDTPLSKDYCGTCTACVDACPTDAIAKAGVVDGSRCISYLTIELKDAIPSEFQGKMENWVFGCDICQDVCPWNRFSKPHSEPKFIPDPELRDFSNQDWIEMTEDTFRKVFKKSPLKRTKFAGLSRNIEFLISND

SEQ ID NO: 74287 - protein, 360 aa, Alicycliphilus denitrificans
  misc_feature (1)..(360): tr|A0A3R7EFU4|A0A3R7EFU4_9BURK Epoxyqueuosine reductase OS=Alicycliphilus denitrificans OX=179636 GN=queG PE=3 SV=1
MVCSSQLVPRIQGWARELGFSQIGVAGVDLSAAEPGLMQWLAEGFHGEMHYMAAHGLRRARPAELVPGTVSVITARMDYLPRTTPEGWQAVEFERLRRPQEAIVSVYARGRDYHKVLRARLQKLSDRIAEAVGPFGHRVFTDSAPVLEAELARRSGQGWRGKHTLVLSREAGSMFFLGEIYLDMALAPTEPVTAHCGSCQACMDVCPTQAIVAPHRVDARRCISYLTIEHAGPIPPALRPLMGNRIYGCDDCQLICPWNKFAQPSSLPDFDARAPLVGQQLVQLFAWDEATFLRMTEGGPIRRIGHERWLRNIAVALGNALRAARDAGEAGALRAALATRADDASALVREHVAWALAQGV

SEQ ID NO: 74288 - protein, 360 aa, Alicycliphilus denitrificans
  misc_feature (1)..(360): sp|F4G4E2|QUEG_ALIDK Epoxyqueuosine reductase OS=Alicyc liphilus denitrificans (strain DSM 14773 / CIP 107495 / K601) OX=596154 GN=queG PE=3 SV=2
MVCSSQLVPRIQGWARELGFSQIGVAGVDLSAAEPGLMQWLAEGFHGEMHYMAAHGLRRARPAELVPGTVSVITARMDYLPRTTPEGWQAVEFERLRRPQEAIVSVYARGRDYHKVLRARLQKLSDRIAEAVGPFGHRVFTDSAPVLEAELARRSGQGWRGKHTLVLSREAGSMFFLGEIYLDMALAPTEPVTAHCGSCQACMDVCPTQAIVAPHRVDARRCISYLTIEHAGPIPPALRPLMGNRIYGCDDCQLICPWNKFAQPSSLPDFDARAPLEGQQLAQLFAWDEAMFLRMTEGGPIRRIGHERWLRNIAVALGNALRATRDAGEAGALRAALATRANDASALVREHVAWALAQGI

SEQ ID NO: 74289 - protein, 358 aa, Alicycliphilus sp.
  misc_feature (1)..(358): tr|A0A5C8CXH3|A0A5C8CXH3_9BURK Epoxyqueuosine reductase OS=Alicycliphilus sp. OX=1872437 GN=queG PE=3 SV=1
MVSSSQLVPQIRGWARELGFSQIGVAGVDLSAAEPGLMQWLAEGFHGEMHYMAAHGLRRARPAELVPGTVSVITARMDYLPRATPPGWQAVEFDRLTRPREAIVSVYARGRDYHKVLRARLQKLSERIAGAVGPFGHRVFTDSAPVLEAELARRSGQGWRGKHTLVLSREAGSMFFLGEIYLDMALAPTQPVTAHCGSCQACMDVCPTQAIIAPHRVDARRCISYLTIEHGGPIPEELRPLMGNRIYGCDDCQLICPWNKYAQASSLPDFDARAPLVGQQLVQLFAWDEATFLRQTEGGPIRRIGHERWLRNIAVALGNALRATGDERLRAALLARADDPSALVREHVAWALLEEKRP

SEQ ID NO: 74290 - protein, 336 aa, Alicycliphilus sp.
  misc_feature (1)..(336): tr|A0A0E9LQ21|A0A0E9LQ21_9BURK Epoxyqueuosine reductase OS=Alicycliphilus sp. B1 OX=1603291 GN=queG PE=3 SV=1
MAGVDLSAAEPGLMQWLAEGFHGEMHYMAAHGLRRARPAELVPGTVSVITARMDYLPRTTPEGWQAVEFERLRRPQEAIVSVYARGRDYHKVLRARLQKLSDRIAEAVGPFGHRVFTDSAPVLEAELARRSGQGWRGKHTLVLSREAGSMFFLGEIYLDMALAPTEPVTAHCGSCQACMDVCPTQAIVAPHRVDARRCISYLTIEHAGPIPPALRPLMGNRIYGCDDCQLICPWNKFAQPSSLPDFDARAPLEGQQLAQLFAWDEAMFLRMTEGGPIRRIGHERWLRNIAVALGNALRATRDAGEAGALRAALATRANDASALVREHVAWALAQGI

SEQ ID NO: 74291 - protein, 425 aa, Alicyclobacillus acidocaldarius
  misc_feature (1)..(425): tr|F8ID72|F8ID72_ALIAT 4Fe-4S ferredoxin-type domain-co ntaining protein OS=Alicyclobacillus acidocaldarius (st rain Tc-4-1) OX=1048834 GN=TC41_0578 PE=4 SV=1
MRRAGAERDPEVTGRDKLTLADIRPLAEEVGLPEIAATDASPFDELASPLADYEARGRTGFEWADAAERMDPRFWLPEAKSILTAALPYLTEEGARRMREHPRSEIRGQTSCYVYGEDYHRVLSDRLTALAGRIGNLVGREIRYRVAVDTSPLVDRRVAERSGLGWIGKNGMLFSPRYGSYVFLGALLIDVEIEDALHLPPAIGKHCGDCDLCMRACPTQAFVAPGELKATACLSYVTQMKGIIPRAYRKPLGRRVWGCDVCQQVCPLNRDRAHAEDPAFTPDAEAAYPDLVRLLGMSNRQFLRAYGRSAMAWRGVRTLQRNALVALGNLRRPEAVPIVARYLASDRAELRASAAWALGEIGGADALRALQAALAAEQDPDVQKEIEDAIANASRGGHDGSEEREQPGLGHRDGEHAGGGHVARR

SEQ ID NO: 74292 - protein, 414 aa, Alicyclobacillus acidocaldarius
  misc_feature (1)..(414): tr|C8WS72|C8WS72_ALIAD 4Fe-4S ferredoxin-type domain-co ntaining protein OS=Alicyclobacillus acidocaldarius sub sp. acidocaldarius (strain ATCC 27009 / DSM 446 / JCM 5 260 / NBRC 15652 / NCIMB 11725 / NRRL B-14509 /
MTGRDKLTLADIRPLAEEVGLPEIAATDASPFDDLARPLADYEARGRTGFEWADAAERMDPRFWLPEAKSILTAALPYLTEEGARRMREHPRSEICGQTSCYVYGEDYHRVLSDRLTALAGRIGNLVGREIRYRVAVDTSPLVDRRVAERSGLGWIGKNGMLFSPRYGSYVFLGALLIDVEIEDALHLPPAIGKHCGDCDLCMRACPTQAFVAPGELKATACLSYVTQMKGIIPRAYRKPLGRRVWGCDVCQQVCPLNRDRAHAEDPAFTPDAEAAYPDLVRLLGMSNRQFLRAYGRSAMAWRGVRTLQRNALVALGNLRRPEAVPIVARFLASDRVELRASAAWALGEIGGQDALRELRAAFASEQDPDVRKEMEDAIANAWGKACEGDEGRDETGSGYRDCDHPCRGDVAGR

SEQ ID NO: 74293 - protein, 384 aa, Alicyclobacillus acidoterrestris
  misc_feature (1)..(384): tr|A0A512CPK9|A0A512CPK9_9BACL Epoxyqueuosine reductase OS=Alicyclobacillus acidoterrestris OX=1450 GN=queG PE =4 SV=1
MSTELDIETLRELAQREGVLEVAVTDTAPFPELIPWLEAYEARGSTGFEVGEVAQRINPRLWMREAKSIIVIALPYLTEQGARTARSHPRGRRHGHTSHYTYGVDYHRVLAEKLHAIHRSMEVVVGHEIAMKLSIDTSPLVDRRLAERAGLGWIGKNAMFYSHRYGSYVFIGAMLVDLVIPPTAHQEAAVGALCGTCSRCLTACPTGAIVAPGVMDATRCLSYVTQMKGLIPVEFRDKLGRRVWGCDVCQSTCPINQNVEHSKENAFGPSQELAYPDLIELLQMSNRQFMRKYGHTAMAWRGLRTLQRNALIALGNAGDAAALAWMIPFLQNARVELRASAAWAIGKIGGPEAKEALLEALEEEADAQVMEELRNGLEACHERG

SEQ ID NO: 74294 - protein, 384 aa, Alicyclobacillus acidoterrestris
  misc_feature (1)..(384): tr|T0CZP2|T0CZP2_ALIAG 4Fe-4S ferredoxin-type domain-co ntaining protein OS=Alicyclobacillus acidoterrestris (s train ATCC 49025 / DSM 3922 / CIP 106132 / NCIMB 13137 / GD3B) OX=1356854 GN=N007_01315 PE=4 SV=1
MSAELDIETLRELAKREGVLEVAVTDAAPFPELIPWLEAYEARGRTGFEVGEVALRINPRFWMHEARSIIVIALPYLTEQGAHTARSHPRGRRHGRTSHYTYGVDYHRVLAEKLRAIHRSMEAVVGHEIAMKLSIDTSPLVDRRLAERAGLGWIGKNAMFYSHRYGSYVFLGAMLVNLAIPPTAHQEAAVGALCGTCTRCLTACPTGAIVAPGVIDATRCLSYVTQMKGIIPVEFRDKLGRRVWGCDVCQSTCPINQNVEHSKEDAFGPSHELAYPDLIELLQMSNRQFMRKYGHTAMAWRGLRTLQRNALIALGNAGDAAALAWMIPFLHNARVELRASAAWAIGKIGGKEAKEALLHALDEEQDAQVMEELRNGLEACHERG

SEQ ID NO: 74295 - protein, 380 aa, Alicyclobacillus ferrooxydans
  misc_feature (1)..(380): tr|A0A0P9GW03|A0A0P9GW03_9BACL 4Fe-4S ferredoxin-type d omain-containing protein OS=Alicyclobacillus ferrooxyda ns OX=471514 GN=AN477_00435 PE=4 SV=1
MAELSSHTLQRLGREAGFDAIGATSAKPFPELIPRLEDYEKRGRTGFEHADIAARVDPKTWFPPARSLISVAMAYLTDEGRKLARSHPQKGWHGHVTVYSYGEDYHQVMVAKMRHLVALIEAELGRKIESKTAIDTAPLVDRRVAERAGIGWVGKNCMFFTPQHGSFVFLGTLAVDIEVESVRTELEQKCGSCTLCLDACPTGALLAPGVIDATRCLSYITQMKGVIPREFRAALGKRVWGCDTCQWACPENKAVTGSGHGEYMPSSPAGELEFPDLAEVLSWTNRSFAKRYGHTAAAWRGLRTWQRNALIALGNTRSKEAVPLVTPFLNHERKELRISAIWALGRIGGEEARNALTLCLVDESDSEVIEELQLALQGEE

SEQ ID NO: 74296 - protein, 391 aa, Alicyclobacillus hesperidum
  misc_feature (1)..(391): tr|A0A1H2W9S8|A0A1H2W9S8_9BACL Epoxyqueuosine reductase OS=Alicyclobacillus hesperidum OX=89784 GN=SAMN0448972 5_11425 PE=4 SV=1
MTSSVQLTRQDIADMAAALHLPEIGVTDAQPFPELIAPLLAYEKRGRTGFEAGDLAARTQPSLWFPEAKSIVVAALPYMTPDGQALARSHPRGGLRGQASGYTYGQDYHEVLRDRLTQLQMAIAERLGRPVAGRIAVDTSPLVDRRVAERSGVGWVGKNGMLYSQRYGSYVFLGALLLDVEIADASAHPPAVGRHCGTCELCMTACPTGAIVGPGQLDATRCLSYITQMKGVIPRPFRKKMGRRVWGCDVCQTACPVNRLREAPDDSAFHPNAELAFPDLVELLQMSNRRFLRVYGETAMGWRGVRTLQRNALIALGNMGRVEAIPHIEPFLQSERAELRASAAWALGEIGGPDAVRLLLDARAVESDAQVQCEIADAIEAARKKTREREA

SEQ ID NO: 74297 - protein, 391 aa, Alicyclobacillus hesperidum; identical to SEQ ID NO: 74296
  misc_feature (1)..(391): tr|J9HPD6|J9HPD6_9BACL Uncharacterized protein OS=Alicy clobacillus hesperidum URH17-3-68 OX=1200346 GN=URH1736 8_1163 PE=4 SV=1

SEQ ID NO: 74298 - protein, 378 aa, Alicyclobacillus macrosporangiidus
  misc_feature (1)..(378): tr|A0A1I7K358|A0A1I7K358_9BACL Epoxyqueuosine reductase OS=Alicyclobacillus macrosporangiidus OX=392015 GN=SAM N05421543_11364 PE=4 SV=1
MSELSLETLRALGREAGLDAVGATTADPFPEMAPRLEAYAARGRTGFEHDQVENRIDPRRWMPEARSLVAAAMAYLTPEGRQLARRHPRDPRRGVVSVYSYGEDYHNVLAKRLRRLAELMGAEVGRPVRYRIAVDTSPLVDRRVAERAGIGWVGKNCMLYSAEHGSFVFLGTLLTDVEVEPAQAMVPPKCGACTRCLEACPTGALMGPGVIDARRCLSYITQMKGIIPREFRIPMGRRVWGCDTCQWACPENRATGGASHAEYRPAEELAFPDLLEILSWSNRTFEHRLGHTAAAWRGLRTWQRNALIALGNCRDEAAVPYIVPFLRHDRRELRASAAWALWRIGGEAARQAVAAAYAAETDPEVKAEMAWAASSRDA

SEQ ID NO: 74299 - protein, 384 aa, Alicyclobacillus montanus
  misc_feature (1)..(384): tr|A0A1M6P3F6|A0A1M6P3F6_9BACL Epoxyqueuosine reductase OS=Alicyclobacillus montanus OX=1830138 GN=SAMN0544350 7_10776 PE=4 SV=1
MKSLTLERLQEIARPLNFAAVGATDASPFEELQPILSEYAKRGLTGFEVSDIRQRMDPRQWLPEAESIVVVAMAYLTEKGLHEARLHPRSRQHGQTSVYVYGEDYHIVLRNQLLTLHALLEEEWGGSIPARVIVDTSPMVDRRLAERAGIGWIGKNCMLIVPGSGSFVFLGAILLGIPIQGSQQLAMPTMQCGHCDLCLKACPTGALLAPGVIQATACLSYVTQMKGIIPKAYRAALGKRIFGCDTCQWVCPENRHIEYAHATVFEPEKDQAYPDLLKILRMSQRQFQKLYGRSAAGWRGVRTVQRNALIALGNMRAREALMEIIPFLDHHRRELRASAAYALGQIGGQVAMDVLKQRLSIEEDEEIRQELVDALHQASVGNNS

SEQ ID NO: 74300 - protein, 391 aa, Alicyclobacillus sacchari
  misc_feature (1)..(391): tr|A0A4R8LK71|A0A4R8LK71_9BACL Epoxyqueuosine reductase OS=Alicyclobacillus sacchari OX=392010 GN=C7445_10943 PE=4 SV=1
MTPPLRLTRDDIAQMAAALDLPEIGVTDAEPFPELVAPLLAYEERGRTGFEAGDLASRIQPSLLFPEVKSIVVAALPYMTPAGEALARSHPRGEMRGQASGYTYGQDYHGVLRDRLTQLQAAIEDCLGRPVGARVAVDTSPLVDRRVAERSGVGWVGKNGMLYSERYGSYVFLGALLLDIEIADANSYPPAIGRHCGSCERCMTACPTGAIVGPGQLDATRCLSYITQMKGVIPRAYRKKMGRRVWGCDVCQTACPLNRMREAADDPAFHPNPELAYPDLVALLKMSNRQFMRVYGETAMGWRGVRTLQRNALIALGNIGRHDAIAHIEPFLRSDRVELRASAAWALGEIGGPDAVKLLVAAQAVEADEDVRRELEEAVMSIKNRTKEKEA

SEQ ID NO: 74301 - protein, 391 aa, Alicyclobacillus tengchongensis
  misc_feature (1)..(391): tr|A0A0V0PN34|A0A0V0PN34_9BACL Uncharacterized protein OS=Alicyclobacillus tengchongensis OX=368812 GN=SD51_10 045 PE=4 SV=1
MTSSVQLTRQDIADMAAALHLPEIGVTDAQPFPELIAPLLAYEERGRTGFEAGDLAARTQPSLWFPEAKSIVVAALPYMTPEGQTVARSHPRGELRGQASGYTYGQDYHEVLRDRLTRLQTAIAERLGRPVAGRIAVDTSPLVDRRVAERSGVGWVGKNGMLYSERYGSYVFLGALLLDIEIADASAHPPAVGRHCGTCELCMTACPTGAIVGPGQLDATRCLSYITQMKGMIPRPFRKKMGRRVWGCDVCQTACPVNRLREAPDDPAFHPNAELAFPDLVELLQMSNRRFMRVYGETAMGWRGVRTLQRNALIALGNMGRVDAIPHIEPFLQSERAELRASAAWALGEIGGTDAVRLLLDARAVESDAQVQCEIADAIEAARKKTREREA

SEQ ID NO: 74302 - protein, 414 aa, Alicyclobacillus vulcanalis
  misc_feature (1)..(414): tr|A0A1N7NXI7|A0A1N7NXI7_9BACL Epoxyqueuosine reductase OS=Alicyclobacillus vulcanalis OX=252246 GN=SAMN054217 99_11049 PE=4 SV=1
MNRGDKLSLSEIRPLAEAVGLPEIAATDASPFDDLAGPLADYEARGRTGFEWANAVERMDPRFWLPEAKSIITAALPYLTEEAARQMREHPRHELRGQTSCYVYGEDYHGVLSARLEALARRIQDLVGREIRFRVAVDTSPLVDRRVAERSGLGWIGKNGMLFSPRYGSYVFLGALLLDVEIEDANHLPPDVGKHCGDCDLCMRACPTQAFAAPGELKATACLSYVTQMKGMIPREYRRPLGRRIWGCDVCQQVCPLNRQREAAKDDAFLPDREVAYPDLVRLLEMSNRQFVRAYGRSALAWRGVRTLQRNALIALGNLRREEAVPLIVRFLSSDRVELRASAAWALGEIGGEQARRELQAALTVEQDAEVRQEIEAAIANASGNGREEASGCEGRRLGGRDGGDASGRHVAGG

SEQ ID NO: 74303 - protein, 382 aa, Aliidiomarina haloalkalitolerans
  misc_feature (1)..(382): tr|A0A432VVD2|A0A432VVD2_9GAMM Epoxyqueuosine reductase OS=Aliidiomarina haloalkalitolerans OX=859059 GN=queG PE=3 SV=1
MRNKLLDYHALAEKIKQWGRELGFQQVGITDLDLSEHEATLQKWLDNHYHGDMHFMERHGMLRARPAELQPGSVRAICVRMDYLPKGAKFAQVLRQPQLGYVSRYALGRDYHKMMRKRLKALGDRIREEVSTADFRPFVDSAPLLEKPLAVKAGLGWTGKHSLVLDSQDGSWFFLGELLINLPLPVDQPQPEQCGSCTACMTICPTQAIVEPYVIDARRCISYLTIEHAGEIPLEFRQAMGNRIYGCDDCQLICPWNRYATPTPEADFLPRHELHEPDLLYLWSWSEDEFLRLTEGSPIRRIGYEKWQRNLAVAMGNAPASTELISALAQQRPNTTPLVQVHIDWALDQLEQRLAATETSAKPARLTQRLIRVIEKGLPRDA

SEQ ID NO: 74304 - protein, 384 aa, Aliidiomarina iranensis
  misc_feature (1)..(384): tr|A0A432W2H2|A0A432W2H2_9GAMM Epoxyqueuosine reductase OS=Aliidiomarina iranensis OX=1434071 GN=queG PE=3 SV= 1
MTPDYHGLTEKIKQWGIELGFQQVGISDLDLSAHEESLQAWLDKKYHGEMAFMERHGMLRARPAELHPGSVRAICVRMDYLPEGARFAAVLKQPQLGYISRYALGRDYHKVLRKRLKQLGDKIAKHIEDNREDYSLSADFRPFVDSAPIMERPLAEKAGLGWVGKHTLLLDSDDGSWFFLGELLINLPLPVDKPQPEQCGSCTACITICPTQAIVEPYVLDARRCISYLTIEHGGSIPEEFRKAIGNRIYGCDDCQLVCPWNRYAKPTPETDFMPRHALHTPDLLDLWAWSEEEFLTATEGSPIRRIGYEKWQRNLAIALGNAPHDKAVISALSARLETASDIVKEHIEWALAQQQAATESSAVKSRLTERLIRVVEKGLPRDA

SEQ ID NO: 74305 - protein, 382 aa, Aliidiomarina minuta
  misc_feature (1)..(382): tr|A0A432W9G2|A0A432W9G2_9GAMM Epoxyqueuosine reductase OS=Aliidiomarina minuta OX=880057 GN=queG PE=3 SV=1
MFSIMVQTTDYQLLADNIKRWGKELGFQQVGITDIDLSQHQAALQSWLDKNFHGDMDYMQRHGMLRTRPDELHPGSVRAISVRMDYLPKGAAFARVLKNSRLGYVSRYALGRDYHKLMRKRLKQLGEKIKAEFSETDFRPFVDSAPILERPLAEKAGLGWTGKHTLLLDSKDGSWFFLGELLINLPLPTDTPQAEQCGKCTACMTICPTQAIVEPYLLDARRCISYLTIELKGPIPEEFRKPMGNRIYGCDDCQLICPWNRYASPTDEKDFHPRSVLHAPDLIELWNWTETEFLKHTEGSPIRRIGHQRWLRNIAVALGNAPASEEVVQALLQRNQQVSELIQEHIDWALQEQKRKLQQDDQPSQQIKRLVRVIEKGLPRDA

SEQ ID NO: 74306 - protein, 391 aa, Aliidiomarina sanyensis
  misc_feature (1)..(391): tr|A0A432WP98|A0A432WP98_9GAMM Epoxyqueuosine reductase OS=Aliidiomarina sanyensis OX=1249555 GN=queG PE=3 SV= 1
MQNSESKSATTVKLSELVEKIKQWGSELGFQKVGIADLDLSKHESALQEWLDNQYHGTMDYMERHGMLRARPADLHPGSVRAISVRMNYLPPNARFAEVLGDDKKAFVSRYALGRDYHKVMRKRLQKLGAKITDYCLTHLHDVMPNFRPFVDSAPILERPLAEKAGLGWTGKHTLLLDTDDGSWFFLGELLINLPLPIDQPQPEQCGKCTACITICPTQAIVAPYKLDARRCISYLTIEHAGPIPEAFRRPMGNRIYGCDDCQLVCPWNRYATPTPEEDFLPRHPLHAPELLELWAWDEATFLERTEGSPIRRIGFERWQRNLAVAFGNARPSADLIEALEQRLPDASPLVGEHIEWALAELRKKALEGTPKNLQLDRLIRIVEKGLPRDA

SEQ ID NO: 74307 - protein, 387 aa, Aliidiomarina shirensis
  misc_feature (1)..(387): tr|A0A432WV55|A0A432WV55_9GAMM Epoxyqueuosine reductase OS=Aliidiomarina shirensis OX=1048642 GN=queG PE=3 SV= 1
MTPDYHGLTEKIKQWGIDLGFQQVGISDLDLSAHEEKLQEWLDKKYHGDMDYMERHGMLRARPAELHPGSLRAICVRMDYLPEGARFAAVLKQPQLGYVSRYALGRDYHKVLRKRLKQLGEKITKFIQENRNDYDLDADFRPFVDSAPILERPLAEKAGLGWTGKHTLLLDSEDGSWFFLGELLINLPLPVDKPQPEQCGSCTACITICPTQAIVEPYVVDARRCISYLTIEHAGVIPEEFRKPMGNRIYGCDDCQLVCPWNRYAKPTPETDFLPRHELHTPDLLELWAWDEARFLQETEGSPIRRIGYEKWQRNLAIAMGNAPTNATVIEALSARLETASEMVKVHIEWALGQHEQHLNENNTEHKHSRLTERLIRVVEKGLPRDA

SEQ ID NO: 74308 - protein, 378 aa, Aliidiomarina soli
  misc_feature (1)..(378): tr|A0A432WKB0|A0A432WKB0_9GAMM Epoxyqueuosine reductase OS=Aliidiomarina soli OX=1928574 GN=queG PE=3 SV=1
MPDSIDYHALARDIKEWGKELGFQDVGITDLDLSQHQASLQKWLDNEYHGEMEYMQRHVDLRLHPELLHPGSVRAICVRMDYLPKGALFAKVLKNPQLGYVSRYALGRDYHKLMRKRLKKLGDRIKAAFADTDFRPFVDSAPVMERPLAEKAGLGWTGKHSLLLDSKDGSWFFLGELFINLPLPVDEKQPEQCGKCTACMTICPTQAIVEPYVVDARRCISYLTIELQGPIPEEFRRPMGNRIYGCDDCQLICPWNRYATPTDEGDFAPRHQLHAPELLTLFGWDEATFLQQTEGSPIRRIGHQRWLRNIAVALGNAPYSEDIVTALQSRQHEVSDMVSEHIAWALAEQAAKKIDSQRPSQQIKRLVRVIEKGLPRDA

SEQ ID NO: 74309 - protein, 383 aa, Aliidiomarina sp.
  misc_feature (1)..(383): tr|A0A552X1Z4|A0A552X1Z4_9GAMM Epoxyqueuosine reductase OS=Aliidiomarina sp. IM1326 OX=2593535 GN=queG PE=3 SV =1
MTTADLHELAEKIKSWGSELGFQQVGITDLDLSMHEDALQRWLDNQYHGSMDYMERHGMLRARPQELHPGSVRAICVRMDYLPQGARFAEVLSDERKAYVSRYALGRDYHKVMRKRLKQLGDKIQAYCDHELPGTSADFRPFVDSAPILERPLAEKAGLGWTGKHTLLLDANDGSWFFLGELLINLPLPTDQAQPEQCGKCTACITICPTQAIIEPYVLDARRCISYLTIEHEGAIPEQFRKPMGNRIYGCDDCQLVCPWNRYATPTPEADFLPRHPLHAPDLLALWAWDEATFLQQTQGSPIRRIGFERWQRNLAIAIGNSAPNPSLIQALQEKRTAASEVVKEHIDWALAELEHKQRAGHTGNQQVKRLVRIIEKGLPRDA

SEQ ID NO: 74310 - protein, 314 aa, Aliifodinibius roseus
  misc_feature (1)..(314): tr|A0A1M5C599|A0A1M5C599_9BACT Epoxyqueuosine reductase OS=Aliifodinibius roseus OX=1194090 GN=queG PE=3 SV=1
MNLAKRTKRVREEALRLGFDACGFAKAGRLETEERRLEEWLNQGRHGSMSWMENHFDKRVDPTKLVPGSKSVVSVIGSYFHPDHERQQQQVGQPKIAKYAQGRDYHKVYKKKLKKLFAFTEELLGGLNGRVFVDSAPVLDKAWAVRGGLGWIGKNSNLLNRDTGSFCFIGEMIIDAEFLYSTQVTDHCGSCTRCIDACPTNAIHEPYRVDGSKCISYHTIELKERIPEEYRDRLGEWMYGCDICQDVCPWNRDAGYTQMEDLYPRDKILDHDINFWKELDNEQYDALFEGSAMRRAKFEKYKDNVAAVAENLNR

SEQ ID NO: 74311 - protein, 316 aa, Aliifodinibius sediminis
  misc_feature (1)..(316): tr|A0A521DCE2|A0A521DCE2_9BACT Epoxyqueuosine reductase OS=Aliifodinibius sediminis OX=1214077 GN=queG PE=3 SV =1
MNLAQRTKRVREEALRLGFDACGFAKAGRLETEERRLEEWLNQGRHGMMHWMENHFDKRVDPTRLVPGSRSVVSVIGSYFHPDHRRQQQQGDRPKIAKYAQGRDYHKVYKKKLKKLFSFTEELLGELHGRVFVDSAPVLDKAWAVRAGLGWIGKNSNLLNKNVGSFLFIGEMIVDADFLYSTQVTDHCGSCTRCIDACPTNAIYEPYRVDGSKCISYHTIELKERIPEEYRDSIGQWLYGCDICQDVCPWNRDAKYSQMEDLYPRQKILDHDINFWKELDNQQYDALFEGSAMRRAKFEKYKDNVAAVAENMNAGS

SEQ ID NO: 74312 - protein, 316 aa, Aliifodinibius sp.
  misc_feature (1)..(316): tr|A0A2A2GF77|A0A2A2GF77_9BACT Epoxyqueuosine reductase OS=Aliifodinibius sp. WN023 OX=2032627 GN=queG PE=3 SV =1
MNIRERTQKVREYALRLGFNACGFAKAGRLEKEERRLREWLNQDRNGTMGWMENHFEKRVDPTKLVPGSKSVVSVIGSYFHPDHERQMEQDGTPKIAKYAQGRDYHKVYKKKLKKLFAQTKELLGGLEGRVFVDSAPVLDKAWAVKSGLGWMGKNSNILNKNIGSFFFIGEMIVDAEFNYDTPVTDHCGSCTRCIDACPTNAIYEPYRVDATKCISYLTIELKDEIPEEYRDDLEGWMFGCDICQNVCPWNRDAPYGEMEDLFPRKKILDHDINYWEELDIPQYDALFEGSAIRRAKFEKYKDNVAAAAENLNKRD

SEQ ID NO: 74313 - protein, 382 aa, Aliiglaciecola lipolytica
  misc_feature (1)..(382): tr|K6YQP2|K6YQP2_9ALTE Epoxyqueuosine reductase OS=Alii glaciecola lipolytica E3 OX=1127673 GN=queG PE=3 SV=1
MTQLSPLFLDELAKNIKEWGKALGFQQVGIADTDLSQHQKYLKSWLEKGYNGNMQFFERNQEKRADPAQLLPGTLRLISVRMDYLPPDASFARDLKQSGTAYISRYAVGRDYHKLLRNRLKKLGEKIQQHFAELEFRPFVDSAPVLEHAVAEKAGIGWTGKHSLTLNKEAGSWFFLGELFVNIPLPIDQPIQNDCGSCTACLTICPTQAIVEPYVVDARRCISYLTIEHDGVIPEQFRTAMGNRIYGCDDCQLICPWNRYAHLTQEKDFYARVAIKSQDLLVLFAWDENEFLANTEGSAIRRIGYQKWQRNIAIALGNADFDTNILSTLKSKLQNTSEMVAEHIQWAIEQQLNKQLNTPPNNEQRLTKRLIRSVEKGLPRDA

SEQ ID NO: 74314 - protein, 386 aa, Aliiglaciecola sp.
  misc_feature (1)..(386): tr|A0A553LA16|A0A553LA16_9ALTE Epoxyqueuosine reductase OS=Aliiglaciecola sp. M165 OX=2593649 GN=queG PE=3 SV= 1
MTQFSPEYLDDLAKSIKAWAKSLGFQQVGITDTDVSQHNHALKSWVEQGYHGDMAFFEQNHELRTDPAKLEQGTLRVISVRMNYLPPDASFAQDLKNDSTGYISRYALGRDYHKLIRKRLKQLGDKIREHCEQIQFRPFVDSAPILEHALAEKAGIGWTGKHSLTLNKDAGSWFFLGELFINIPLPVDQPVEENCGACTACMTICPTQAIVAPYTVDARKCISYLTIEHKGPIPLELRPLIGNRIYGCDDCQLICPWNRFADVTDESDFLPRSLLKSQPLTELFAWDEETFLQNTTGTPIRRIGYQKWKRNLAVAMGNARYSTEILQALREALPLQSELVQEHIIWALAQQESKSRLIETTSNANDVERLKSRLVRSVEKGLPRDA

SEQ ID NO: 74315 - protein, 382 aa, Aliikangiella marina
  misc_feature (1)..(382): tr|A0A545TIN3|A0A545TIN3_9GAMM Epoxyqueuosine reductase OS=Aliikangiella marina OX=1712262 GN=queG PE=3 SV=1
MPVTQDQLKQIKTFIYEKACKVGFQGARVSDISTSGYFEAFKQWVDDGFHGDMSFLERNQNLREFPPQLHPNTCRVISLRYDYLPVNASFTKPLKDTSLANISRYALGKDYHKLLRKKLSRLCDALRTHFNQIEDIDTRVFVDSAPVLETAFAEKSGIGWKGKHSLIINEAAGSWFFLAEIFINLPLALDEPVKDKCGSCNACIKLCPTDAIIGNKKVDATRCISYLTIENKGPIPLELRSKIGNRVYGCDDCQLACPWNRYASVSSEPAFLPMQNLGASRLLELWNWTEEDFNTNLQGSPIRRIGYQAWLRNLAVGIGNGPFAPDIISQLEKKKPDANDMVLEHINWAIEELINKNGQQLNLQAKTKKLINCVESMLARDA

SEQ ID NO: 74316 - protein, 381 aa, Aliikangiella sp.
  misc_feature (1)..(381): tr|A0A545U546|A0A545U546_9GAMM Epoxyqueuosine reductase OS=Aliikangiella sp. M105 OX=2592383 GN=queG PE=3 SV=1
MLSTEALTEIKSKLVIKAREHGFQDARVSDTSTSGYFAKFKQWVNDGFHGDMSFLERNQNLRSSPDELHPGTLRVVSLRYDYLPEHAGFVKPLKHPQQANVSRYALGRDYHKLMRKKLDAVCRQLQAEIETSDAVDYRVFVDSAPVLETSFAEKSGLGWKGKHSLIINKKAGSWFFLGEIFINLPLPIDEPVEDLCGNCSACISLCPTDAIIDSKKVDATRCISYLTIENKGPIPISLRSKMGNRIYGCDDCQLACPWNRYAQISKETGFQPKNNLDTISLLQLWQWNEKEFLDNFQGSPIRRIGYQNWLRNLAVAIGNSVYEPQTIELLVNKKQEANDLVCEHIDWAISQLKNRQSNDLTVNKKTQKLINCVTNMLPRDA

SEQ ID NO: 74317 - protein, 353 aa, Aliiroseovarius crassostreae
  misc_feature (1)..(353): tr|A0A0N8IC36|A0A0N8IC36_9RHOB Epoxyqueuosine reductase OS=Aliiroseovarius crassostreae OX=154981 GN=queG PE=3 SV=1
MTASPGDPATFKARIEAKARDEGFAAFGVCRPDATPDTAARLAQYVAEGRHGDMGWMEERMHWRGSAAALWPEARSVIMLAEPYTPEHDPRDVLNMPDKGAISVYAQNRDYHDIVKKRLKRVGRWMVEQFSCEIKVFVDTAPVMEKPLAAAAGLGWQGKHSNLLSRELGNWFFLGAIFTTLELPADPPGTENCGSCRACLDACPTDAFPAPFQVDARRCISYLTIEHKGPVEEELRGKLGNHIYGCDDCLAACPWNKFAVQAQELRYAARADLLAPDLAELALLDDTAFRTKFSGSPIKRVGWGRFMRNVLYAIGNSGRADLRSSAKRHIGSEDPCIRDAAQWALNMLTKTSR

SEQ ID NO: 74318 - protein, 326 aa, Aliiroseovarius halocynthiae
  misc_feature (1)..(326): tr|A0A545SQG2|A0A545SQG2_9RHOB tRNA epoxyqueuosine(34) reductase QueG OS=Aliiroseovarius halocynthiae OX=98505 5 GN=queG PE=4 SV=1
MARICRPDSVPDIAARLEQFVAEGRHGDMGWMKDRMHWRGNPAALWSEAKSVIMLAEPYTPSHDPMEVVEQPDRAAISVYAQNRDYHDIVKKRLKRVGRWMIERFGGEIKVFVDTAPVMEKPLGAAAGLGWQGKHTNLLSRELGNWFFLGAIFTTLELPEDEPGRENCGSCTSCLDACPTDAFPAPFQLDARRCISYLTIEHNGPVPEELRAKMGNRIYGCDDCLAACPWNKFAVEAQEIRYAARDDLVAPKLGELLDLDDTAFRAKFSGSPIKRIGRDRFLRNVLYAVGNSGDSAFLAKLEPHLRDPHPIVADAARWAKERLLMP

SEQ ID NO: 74319 - protein, 368 aa, Aliiroseovarius pelagivivens
  misc_feature (1)..(368): tr|A0A2R8ATE6|A0A2R8ATE6_9RHOB Epoxyqueuosine reductase OS=Aliiroseovarius pelagivivens OX=1639690 GN=queG PE= 3 SV=1
MSRKPPQGGRLPPDPGKPGSPPEDISGKKIEIVAQAEAEGFAMARICRPDAVPEIAARLEQFVAEGRHGDMAWMGERMHWRGNPAALWPEAKSVIMLAEPYTPSHDPMEVIGQPDRAAISVYAQNRDYHDIVKKRLKRVGRWMIDHFGGEIKVFVDTAPVMEKPLGAAAGLGWQGKHTNLLSRELGNWFFLGAIFTTLELPVDEPGRENCGSCTSCLDACPTDAFPAPFQLDARRCISYLTIEHKGPMSEELRSKLGNRIYGCDDCLAACPWNKFAEGAHEMRYAAREDLVAPKLAELMGLDDAGFREKFSGSPIKRIGRDRFLRNVLYAVGNSADSAFLPALEPHLADPDPVVADAARWAKSRLQAV

SEQ ID NO: 74320 - protein, 345 aa, Aliiroseovarius sediminilitoris
  misc_feature (1)..(345): tr|A0A1I0MY17|A0A1I0MY17_9RHOB Epoxyqueuosine reductase OS=Aliiroseovarius sediminilitoris OX=1173584 GN=queG PE=3 SV=1
MTAEIRQAIIDKALEEGFAQAGFCRPDSVPQIADRLDTFVAEGRHGDMLWMGERMHWRGNPAALWPEARTVIMLAEPYTPSHDPMDVIGQTDRAAISVYAQNKDYHDIVKKRLKRVGRWMIDSFGGEIKVFVDTAPVMEKPLAAAAGLGWQGKHTNLLSRELGNWFFLGAIFTTLDLPTDEPAREKCGSCTACLDVCPTDAFPAPFQLDARRCISYLTIEHKGPVDEPLRSQLGNRIYGCDDCLAACPWNKFAVEATEMRYAAREDLVAPKLADLVGFDDAGFRAHFSGSPIKRIGLSRFLRNVLYAIGNSGKSSLLPHAQAHADSDDPVVADAARWAVGKLSGA

SEQ ID NO: 74321 - protein, 351 aa, Aliishimia ponticola
  misc_feature (1)..(351): tr|A0A4S4N6Q4|A0A4S4N6Q4_9RHOB Epoxyqueuosine reductase OS=Aliishimia ponticola OX=2499833 GN=queG PE=3 SV=1
MPDDLKDRVIQQALGEGFVSARVCRPDSVPEVAARLKAFVDAGYHGQMSWMAERMEWRGAPDVLWPEARSVVMLAESYTPEHDPLSVLERRDRGAISVYAQNRDYHDVVKKRLKRLARWMVAETGCQVKVFVDTAPVPEKALGAASGLGWQGKHTNLVSRDWGNWAFIGSVFTTLELTPDTAGVDNCGSCRACLDICPTDAFPAPYQLDARRCISYLTIEHKGPVAPELRAKMGNRIYGCDDCLAACPWNKFAVAASDLRYAARAELTAPKLAELAMLDDAAFRAMFSGSPIKRIGRDRFVRNVLYAIGNSGDPALAPSAAALVGDPNPVVAEAATWAVSRLGARGIDVAG

SEQ ID NO: 74322 - protein, 372 aa, Aliivibrio finisterrensis
  misc_feature (1)..(372): tr|A0A4Q5KQW0|A0A4Q5KQW0_9GAMM Epoxyqueuosine reductase OS=Aliivibrio finisterrensis OX=511998 GN=queG PE=3 SV =1
MNIDYQALANNIKVWAQELGFQKVGICDVDLSQHEAALEQWLDAGYHGSMDWMARHGMMRARPNELHPGTIRVISARMDYLPPQAGFASNLSDPTQAYISRYALGRDYHKLIRNQLKKLGQKIEAEVEQLGYRPFVDSAPILERPLAEKAGLGWTGKHSLLLDKDAGSWFFLGELLIDIPLPVDSPVENQCGKCTACVTSCPTNAILENGVIDARRCISYLTIENSEVIPEEFRSLMGNRIYGCDDCQLVCPWNREAEITQQNDFHRRESLDNANLLSLFAWDEVTFLKNTEGSAIRRIGHKQWLRNLAIAMGNAPHSTDIISALQARIGLDDNLDIHLLWAIEQQQSQQVNANRKEQRLIRIIEKGLPRDA

SEQ ID NO: 74323 - protein, 371 aa, Aliivibrio fischeri
  misc_feature (1)..(371): sp|Q5E2C3|QUEG_ALIF1 Epoxyqueuosine reductase OS=Aliivi brio fischeri (strain ATCC 700601 / ES114) OX=312309 GN =queG PE=3 SV=1
MKINYQELANNIKLWAKELGFQKVGICDVDLSQHEAALEQWLEAGYHGSMDWMARHGVMRARPDELHPGTIRVISARMDYLPPKAGFASNLKDPNQAYISRYALGRDYHKLIRNQLKKLGQKIEEEVEQLGYRPFVDSAPILERPLAEKAGLGWTGKHSLLLDKNAGSWFFLGELLVDIPLPVDTPVENQCGKCTACISSCPTNAILENGVIDARRCISYLTIENSGIIPEEFRSLMGNRIYGCDDCQLVCPWNREAEITQQADFHRRSSLGNSDLISLFSWDESTFLKNMEGSAIRRIGHIQWLRNLSIAMGNAPHSEAIISALQDRLGLDENLDIHIQWAIKQQSLVITSNRKEQRLIRIIEKGLPRDA

SEQ ID NO: 74324 - protein, 371 aa, Aliivibrio fischeri
  misc_feature (1)..(371): tr|A0A510UMQ0|A0A510UMQ0_ALIFS Epoxyqueuosine reductase OS=Aliivibrio fischeri OX=668 GN=queG PE=3 SV=1
MKINYQELANNIKLWAKELGFQKVGICDVDLSQHEVALEQWLEAGYHGSMDWMARHGVMRARPDELHPGTIRVISARMDYLPPEANFASNLKDPNQAYISRYALGRDYHKLLRNQLKKLGQKIEKEVEQLGYRPFVDSAPILERPLAEKAGLGWTGKHSLLLDKHAGSWFFLGELLVDIPLPVDTPVENQCGKCTACVSSCPTNAILENGVIDARRCISYLTIENSGVIPEEFRSLMGNRIYGCDDCQLVCPWNREAEITQQADFHRRSSLGDSDLISLFSWDESTFLKNMEGSAIRRIGHTQWLRNLSIAMGNAPHSEAIISALRDRLGLDENLDIHIQWAIKQQSLAITSNRKEQRLIRIIEKGLPRDA

SEQ ID NO: 74325 - protein, 370 aa, Aliivibrio logei
  misc_feature (1)..(370): tr|A0A1B9P2X2|A0A1B9P2X2_ALILO Epoxyqueuosine reductase OS=Aliivibrio logei OX=688 GN=queG PE=3 SV=1
MDYQELAINIKLWAQELGFQKVGICDVDLSQHEAALEQWLEAGYHGSMDWMARHGLMRARPNELHPGTIRVISARMDYLPPEACFASNLSDPTQAYISRYALGRDYHKLIRNQLKKLGQKIETEVEQLGYRPFVDSAPILERPLAEKAGLGWTGKHSLLLDKDAGSWFFLGELLVDIPLPIDAPVENQCGKCTACVSSCPTNAILDNGVIDARRCISYLTIENSGVIPEEFRSLMGNRIYGCDDCQLVCPWNREAEITQQSDFHRRDSLNNSDLLALFDWDEDSFLKYMEGSAIRRIGHTQWLRNISIALGNAPHSPDIILSLQNRLGFDTNLDIHIHWAIEQQNSQQINIKRKEQRLIRIIEKGLPRDA

SEQ ID NO: 74326 - protein, 372 aa, Aliivibrio salmonicida
  misc_feature (1)..(372): tr|B6EMR2|B6EMR2_ALISL Epoxyqueuosine reductase OS=Alii vibrio salmonicida (strain LFI1238) OX=316275 GN=queG P E=3 SV=1
MKIDYQELAINIKLWAQELGFQKVGICDVDLSQHEAALEQWLEAGYHGSMDWMARHGLMRARPNELHPGTIRVISARMDYLPPEACFASNLSDPTQAYISRYALGRDYHKLIRNQLKKLGQKIETEVEQLGYRPFVDSAPILERPLAEKAGLGWTGKHSLLLDKDAGSWFFLGELLVDIPLPIDAPVENQCGKCTACVSSCPTNAILDNGVIDARRCISYLTIENSGVIPEEFRSLMGNRIYGCDDCQLVCPWNREAEITQQSDFHRRDSLNNSDLLALFDWDEDSFLKYMEGSAIRRIGHTQWLRNISIALGNAPHSPDIILSLQNRLGFDTNLDIHIHWAIEQQNSQQINIKRKEQRLIRIIEKGLPRDA

SEQ ID NO: 74327 - protein, 370 aa, Aliivibrio sifiae
  misc_feature (1)..(370): tr|A0A2S7XLR6|A0A2S7XLR6_9GAMM Epoxyqueuosine reductase OS=Aliivibrio sifiae OX=566293 GN=queG PE=3 SV=1
MDYQELANNIKLWAQELGFQKVGICDIDLSQHEAALEQWLDAGYHGSMDWMARHGVMRARPAELHPGTIRVISARMDYLPPEAGFASNLSDSTQAYISRYALGRDYHKLIRNQLKKLGQKIEAEVEELGYRPFVDSAPILERPLAEKAGLGWTGKHSLLLDKDAGSWFFLGELLVDIPLPVDTPLENQCGKCTACITSCPTNAILDNGVIDARRCISYLTIENSNVIPEEFRSLMGNRIYGCDDCQLVCPWNREAEITQQNDFHRRDSLNNADLLSLFAWDEATFLKNMEGSAIRRIGHLQWLRNISIAMGNAPHSEIIISALNDKLGLDTNLDIHLNWAIEQQHSLQVNQNRKEQRLIRIIEKGLPRDA

SEQ ID NO: 74328 - protein, 370 aa, Aliivibrio sifiae
  misc_feature (1)..(370): tr|A0A2S7XG54|A0A2S7XG54_9GAMM Epoxyqueuosine reductase OS=Aliivibrio sifiae OX=566293 GN=queG PE=3 SV=1
MDYQELANNIKLWAQELGFQKVGICDIDLSQHEAALEQWLDAGYHGSMDWMARHGVMRARPDELHPGTIRVISARMDYLPPEAGFASNLSDSTQAYISRYALGRDYHKLIRNQLKKLGQKIEAEVEELGYRPFVDSAPILERPLAEKAGLGWTGKHSLLLDKDAGSWFFLGELLVDIPLPVDTPLENQCGKCTACVTSCPTNAILDNGVIDARRCISYLTIENSDVIPEEFRSLMGNRIYGCDDCQLVCPWNREADITQQNDFHRRDSLNNADLLSLFAWDESTFLKNMEGSAIRRIGHLQWLRNISIAMGNAPHSELIISALNDKLGLDTNLDIHLNWAIEQQKSGQINQNRKEQRLIRIIEKGLPRDA

SEQ ID NO: 74329 - protein, 370 aa, Aliivibrio sp.
  misc_feature (1)..(370): tr|A0A1B9P9N2|A0A1B9P9N2_9GAMM Epoxyqueuosine reductase OS=Aliivibrio sp. 1S175 OX=1840087 GN=queG PE=3 SV=1
MDYQALANNIKLWAQELGFQKVGICDIDLSQHEAALEQWLDAGYHGSMDWMARHGVMRARPNELHPGTIRVISARMDYLPPEAGFASNLSDTTQAYISRYALGRDYHKLIRNQLKKLGQKIEAEVEQLGYRPFVDSAPILERPLAEKAGLGWTGKHSLLLDKDAGSWFFLGELLVDIPLPVDSPVENQCGKCTACVTSCPTNAILENGVIDARRCISYLTIENSGVIPEEFRPLMGNRIYGCDDCQLVCPWNREADITQQNDFHRRDSLNNADLISLFDWDEATFLKNMEGSAIRRIGYLQWLRNISIAMGNAPQSELIISALMKRLDLDENLDIHIHWAIEQQKSHQINKNRKEQRLIRIIEKGLPRDA

SEQ ID NO: 74330 - protein, 372 aa, Aliivibrio wodanis
  misc_feature (1)..(372): tr|A0A090IIK6|A0A090IIK6_9GAMM Epoxyqueuosine reductase OS=Aliivibrio wodanis OX=80852 GN=queG PE=3 SV=1
MKIDYQALATNIKLWAQELGFQKVGICDVDLSQHEAALEQWIDAGYHGSMDWMARHGVMRARPNELHPGTIRVISARMDYLPPQAGFASNLSDPTQAYISRYALGRDYHKLIRNQLKKLGQRIEAEVEQLGYRPFVDSAPILERPLAEKAGLGWTGKHSLLLDKDAGSWFFLGELLVDIPLPVDSPVENQCGKCTACVTSCPTNAILENGVIDARRCISYLTIENSDVIPEEFRSLMGNRIYGCDDCQLVCPWNREADITQQSDFHRRESLDNANLLSLFAWDETTFLKNMEGSAIRRIGHLQWLRNIAIAMGNAPHSKDIVLSLRDRLGLDNNLDIHILWAIEQQNSRPINKNRKEQRLIRIIEKGLPRDA

SEQ ID NO: 74331 - protein, 377 aa, Alishewanella aestuarii
  misc_feature (1)..(377): tr|J2II02|J2II02_9ALTE Epoxyqueuosine reductase OS=Alis hewanella aestuarii B11 OX=1197174 GN=queG PE=3 SV=1
MQAEQISQQIKTWAKELGFQSCGISRPQLGAEQEARLQQWLDAGYHGEMQYMAEHGMLRARPTELHPGTLSVISVRLDYLPKAAAFATNLADPSQAYISRYALGRDYHKLMRNRLKQLGQKIATLISDLDCRPFVDSAPILERPLAQQAGLGWIGKHSLLLAEEAGSWFFLGELLVNLELPADQPHPGDCGSCVACITSCPTGAIVAPYVVDARRCISYLTIELKDAIPTEFRPLLGNRIYGCDDCQLVCPVNRQAPLTEEPDFQRRPQWQDQSLLALFQWDETTFLRLTEGSAIRRIGFERWQRNLAVALGNAPYQPEIVATLKQALPTATPLVAEHIEWALQQQKHKSYLAQNLLPRSTERLVRIIQKGLPRDAG

SEQ ID NO: 74332 - protein, 377 aa, Alishewanella agri
  misc_feature (1)..(377): tr|I8U5Z6|I8U5Z6_9ALTE Epoxyqueuosine reductase OS=Alis hewanella agri BL06 OX=1195246 GN=queG PE=3 SV=1
MQAEKIRNQIKAWAKELGFQACGISRPQLGAEQEQRLQQWLDAGYHGEMQYMAEHGMLRARPAGLHPGTLSVISVRLDYLPKAAAFATNLADPSQAYISRYALGRDYHKLMRNRLKQLGQKIATLISDLDGRPFVDSAPILERPLAQQAGLGWIGKHSLLLAEEAGSWFFLGELLVNLELPVDQPHPGDCGSCVACITSCPTGAIVAPYVVDARRCISYLTIELKGAIPTEFRPLLGNRIYGCDDCQLVCPVNRQAPLTAEPDFQRRPQWQDQSLLALFQWDETTFLRLTEGSAIRRIGFERWQRNLAVALGNAPYQPEIVASLKQAQPTATPLVAEHIEWALQQQKQKSYLAQNLLPRSTERLVRIIQKGLPRDAG

SEQ ID NO: 74333 - protein, 377 aa, Alishewanella jeotgali
  misc_feature (1)..(377): tr|H3ZGQ7|H3ZGQ7_9ALTE Epoxyqueuosine reductase OS=Alis hewanella jeotgali KCTC 22429 OX=1129374 GN=queG PE=3 S V=1
MQAEQISQQIKTWAKELGFQSCGISRPQLGAEQEARLQQWLDAGYHGEMQYMAEHGMLRARPAELHPGTLSVISVRLDYLPKAAAFATNLADPSQAYISRYALGRDYHKLMRNRLKQLGQKIASLISDLDGRPFVDSAPILERPLAQQAGLGWIGKHSLLLAEEAGSWFFLGELLVNLELPADQPHPGDCGSCVACITSCPTGAIVAPYVVDARRCISYLTIELKGAIPTEFRPLLGNRIYGCDDCQLVCPVNRQAPLTAEPDFQRRPQWLDQSLLALFQWDETTFLRLTEGSAIRRIGFERWQRNLAVALGNAPYQPEIVATLKQALPTATPLVAEHIEWALQQQKQKSYLAQNLLPRSTERLVRIIQKGLPRDAG

SEQ ID NO: 74334 - protein, 377 aa, Alishewanella sp.
  misc_feature (1)..(377): tr|A0A259P4F4|A0A259P4F4_9ALTE Epoxyqueuosine reductase OS=Alishewanella sp. 34-51-39 OX=1970316 GN=queG PE=3 SV=1
MQAEQIRNQIKAWAKELGFQACGISRPQLGAEQEQRLQQWLDAGYHGEMQYMAEHGMLRARPAELHPGTLSVISVRLDYLPKAAAFATNLADPSQAYISRYALGRDYHKLMRNRLKQLGQKIATLISDLDGRPFVDSAPILERPLAQQAGLGWIGKHSLLLAEETGSWFFLGELLVNLELPADQPHPGDCGSCVACITSCPTGAIVAPYVVDARRCISYLTIELKGAIPTEFRPLLGNRIYGCDDCQLVCPVNRQAPLTAEPDFQRRPQWQDQSLLALFQWDETTFLRLTEGSAIRRIGFERWQRNLAVALGNAPYQPEIVATLKQALPTATPLVAEHIQWALQQQKHKSYLAENLLPRSTERLVRIIQKGLPRDAG

SEQ ID NO: 74335 - protein, 377 aa, Alishewanella sp.
  misc_feature (1)..(377): tr|A0A0T5PII3|A0A0T5PII3_9ALTE Epoxyqueuosine reductase OS=Alishewanella sp. WH16-1 OX=1651088 GN=queG PE=3 SV =1
MQAEQIRNQIKAWAKELGFQACGISRPQLGAKQEQRLQQWLDAGYHGEMQYMAEHGMLRARPAGLHPGTLSVISVRLDYLPKAAAFATNLADPSQAYISRYALGRDYHKLMRNRLKQLGQKIATLISDLDGRPFVDSAPILERPLAQQAGLGWIGKHSLLLAEEAGSWFFLGELLVNLELPVDQPHPGDCGSCVACITSCPTGAIVAPYVVDARRCISYLTIELKGAIPTEFRPLLGNRIYGCDDCQLVCPVNRQAPLTAEPDFQRRPQWQDQSLLALFQWDEATFLHLTEGSAIRRIGFERWQRNLVVALGNAPYQPEIVATLKQALPTATPLVAEHIEWALQQQKQKSYLAQNLLPRSTERLVRIIQKGLPRDAG

SEQ ID NO: 74336 - protein, 306 aa, Alistipes finegoldii
  misc_feature (1)..(306): tr|A0A174CPN3|A0A174CPN3_9BACT Epoxyqueuosine reductase OS=Alistipes finegoldii OX=214856 GN=queG PE=4 SV=1
MLDHQYIKKLAADAGFDLCGLAPCRHLVENESMLRAWLGKGYQSSLAYMERNVEKRADPRKLVEGARTAVVCAVSYKNRAGEGYPPGHRTKVASYACAADYHTTIKGMLGRMLDALCASRPDLSGRAFVDTAPLLEKQLAVEAGLGWIGRQSLLVTPRFGTYVLLGELLLTDDADAYDPPFEGSRCGRCHNCIESCPTGAIVAPKVIDTGRCISCHTIEKEPTEGIGLDGWIFGCDRCQSCCPHNQKAPMHTNPAFDPVFDPLAMDAEAWLAMDETEFEARMGTTPLTRSGLARIRSNIAGTPGPE

SEQ ID NO: 74337 - protein, 302 aa, Alistipes finegoldii
  misc_feature (1)..(302): tr|R5UL22|R5UL22_9BACT Uncharacterized Fe-S protein OS= Alistipes finegoldii CAG:68 OX=1263035 GN=BN754_01964 P E=4 SV=1
MLDYQHIKKLAADAGFDLCGLTPCGHMAQNEAWLRAWLGKGYQSSLTYMERNVEKRADPRKLVEGARTAVVCAVSYKSRIGEGYPPGYRTKIASYACTADYHTTIKGMLNGMLEHLKAAVPGLGGRAFVDTAPLLEKQLAVEAGLGWIGRQSLLVTPRHGTYVLLGELLLTDEADTYDAPFEGSRCGRCRNCIESCPTGAIIAPKVIDTGRCISCHTIEREPSGGIDLDGWIFGCDRCQSCCPHNQKAPMHANRAFDPVFDPLTMDAAAWTAMDETEFEARMGATPLTRSGLARIRGNIKTE

SEQ ID NO: 74338 - protein, 301 aa, Alistipes indistinctus
  misc_feature (1)..(301): tr|A0A412SFB0|A0A412SFB0_9BACT tRNA epoxyqueuosine(34) reductase QueG OS=Alistipes indistinctus OX=626932 GN=q ueG PE=4 SV=1
MNQDHSIHSRAEILGFDRCGIARCRPLEERRGLLERWLAQGRHGGLTYMERNLDKRIDPALLVEGARSVVVCAISYNRPPAAGVASRIASYARGRDYHPVLKEKLHELLAYIRDLHPGTSGRVFVDTAPILEKSWAAEAGVGRIGRHSLLIVPGLGSFVVLGLIVTDAELEPDPPFLAPDPCGSCRACIEACPVGAIGNDRTIDASLCISRRTIEAEAGNEGDLHGWIFGCDICQLACPHNRHAPVSAHTCFAPAGDIGQMTETDWLQLSGTDFQNRFGDTPLARCGLERIQRRIRQGSQK

SEQ ID NO: 74339 - protein, 301 aa, Alistipes indistinctus
  misc_feature (1)..(301): tr|G5H866|G5H866_9BACT 4Fe-4S ferredoxin-type domain-co ntaining protein OS=Alistipes indistinctus YIT 12060 OX =742725 GN=HMPREF9450_01126 PE=4 SV=1
MNQDHSIHSRAEILGFDRCGIARCRPLEERRGLLERWLAQGRHGGLTYMERNLDKRIDPALLVEGARSVVVCAISYNRPPAAGVASRIASYARGRDYHPVLKEKLHELLAYIRDLHPGTSGRVFVDTAPILEKSWAAEAGVGRIGRHSLLIVPGLGSFVVLGLIVTDAELEPDPPFLAPDPCGSCRACIEACPVGAIGNDRTIDASLCISRRTIEAEAGDEGDLHGWIFGCDICQLACPHNRHAPVSAHTCFAPAGDIGQMTETDWLQLSGTDFQNRFGDTPLARCGLERIQRRIRQGSQK

SEQ ID NO: 74340 - protein, 308 aa, Alistipes inops
  misc_feature (1)..(308): tr|A0A0B0BVV9|A0A0B0BVV9_9BACT 4Fe-4S ferredoxin-type d omain-containing protein OS=Alistipes inops OX=1501391 GN=LG35_03500 PE=4 SV=1
MLQAREIKQAAAAAGFDLCGICRVRNFSAEQTFFEGWLERGFDGGLGYLRRNVEKRFSPAELMPGAHSVVVCGVSYKNDTSLGYGDTAVPKVASYACSGDYHVAVKEMLYETAARLGLKEDGTGFRAFTDTAPLLEKRLACEAGLGFIGRNTLLVSPRYGSFLLLGELVVDVPVDTYDRPYEGIGCGACRRCVEHCPAGALTGEGLDARRCISRLTVEPHPERVPALAQRIGASTAGWIFGCDDCQNVCPYNLRAPFFANPRFRPLFSPADMPACRWLEMTQAEFDARFGATPMARSGLARIKELLRR

SEQ ID NO: 74341 - protein, 309 aa, Alistipes obesi
  misc_feature (1)..(309): tr|A0A3D3YL85|A0A3D3YL85_9BACT tRNA epoxyqueuosine(34) reductase QueG OS=Alistipes obesi OX=1118061 GN=queG PE =4 SV=1
MLDRSFIRQSAAAAGFDLCGVAPCRHLVRNEQFFRRWLGDGRHASLGYLERNLDKRFDVRRLVEGAQTVVVCAVGYKNGLSDGYPDDFRAKIASYALTADYHATIKGMLGDLFGRLRAAEPALAGRAFVDSAPLVEKQLAVEAGLGWIGRQSLLVTPRFGSFVLLGELVLDAACDRYDEPLAGVGCGSCRRCVEACPTGAVCNDRAIDARRCISCHTIERTPAAEIALDGWIFGCDACQSRCPYNLRAPLHLHPAFDPLFDPLSFPPERWLAMEEAEFRTSFGRTPLMRSGLRRLQANAAQNLRRKGRE

SEQ ID NO: 74342 - protein, 306 aa, Alistipes onderdonkii
  misc_feature (1)..(306): tr|A0A5B5IVN7|A0A5B5IVN7_9BACT tRNA epoxyqueuosine(34) reductase QueG OS=Alistipes onderdonkii OX=328813 GN=qu eG PE=4 SV=1
MLDHQYIKKLAADAGFDLCGLAPCRHLVENESMLRAWLGKGYQSSLAYMERNVEKRADPRKLVEGARTAVVCAVSYKNRAGEGYPPGHRTKVASYACAADYHTTIKGMLGRMLDALCASRPDLSGRAFVDTAPLLEKQLAVEAGLGWIGRQSLLVTPRFGTYVLLGELLLTDDADAYDPPFEGSRCGRCHNCIESCPTGAIVAPKVIDTGRCISCHTIEKEPTEGIGLDGWIFGCARCQSCCPHNQKAPMHTNPAFDPVFDPLAMDAEAWLAMDETEFEARMGTTPLTRSGLARIRSNIAGTPGPE

SEQ ID NO: 74343 - protein, 306 aa, Alistipes onderdonkii
  misc_feature (1)..(306): tr|A0A4Q5I9F7|A0A4Q5I9F7_9BACT tRNA epoxyqueuosine(34) reductase QueG OS=Alistipes onderdonkii OX=328813 GN=qu eG PE=4 SV=1
MLDHQYIKKLAADAGFDLCGLAPCRHLVENESMLRAWLGKGYQSSLAYMERNVEKRADPRKLVEGARTAVVCAVSYKNRAGEGYPPGHRTKVASYACAADYHTTIKGMLGRMLDALRASRPDLSGRAFVDTAPLLEKQLAVEAGLGWIGRQSLLVTPRFGTYVLLGELLLTDDADVYDPPFEGSRCGRCHNCIESCPTGAIVAPKVIDTGRCISCHTIEKEPTEGIGLDGWIFGCDRCQSCCPHNQKAPMHTNPAFDPVFDPLAMDAEAWLAMDEAEFEARMGTTPLTRSGLARIRSNIAGTPGPE

SEQ ID NO: 74344 - protein, 309 aa, Alistipes putredinis
  misc_feature (1)..(309): tr|A0A1Q6FAH9|A0A1Q6FAH9_9BACT tRNA epoxyqueuosine(34) reductase QueG OS=Alistipes putredinis OX=28117 GN=BHV6 6_02690 PE=4 SV=1
MISGQYIKKLAENAGFDLCGITPCKHLAENESYFREWLAKGYGSSLEYLERNLDKRFDVRRLVEGAQTVVVCAVSYKNPLGEGYPPGCRTKIASYARNRDYHPVLKGMLGTMLEALRRQYPGLTGRTFVDTAPLLEKQLAVEAGLGWIGRQSLLLTPQYGSYVLLGELVLTLPSDQYDAPFAGARCGRCRNCLDSCPTGAIVAPKVIDTNRCISCRTIEKESDSALPDLDGWIFGCDRCQSCCPHNQKAPMHRSPHFDPLFDPLTISDREWLAMSEEEFLLRFGNTPLARSGLRRIQQNVRINQEKNEE

SEQ ID NO: 74345 - protein, 309 aa, Alistipes putredinis
  misc_feature (1)..(309): tr|B0MVD7|B0MVD7_9BACT Putative iron-sulfur cluster-bin ding protein OS=Alistipes putredinis DSM 17216 OX=44597 0 GN=ALIPUT_01084 PE=4 SV=1
MISGQYIKKLAENAGFDLCGITPCKHLAENESYFREWLAKGYGSSLEYLERNLDKRFDVRHLVEGAQTVVVCAVSYKNPLGEGYPPGCRTKIASYARSRDYHPVLKRMLGTMLEALRRQYPGLTGRTFVDTAPLLEKQLAVEAGLGWIGRQSLLLTPQYGSYVLLGELVLTLPSDQYDAPFAGARCGRCRNCLDSCPTGAIVAPKVIDTNRCISCRTIEKESDSALPDLDGWIFGCDRCQSCCPHNQKAPMHRSPHFDPLFDPLTISDREWLAMSEEEFLLRFGNTPLARSGLRRIQQNVRINQEKNEE

SEQ ID NO: 74346 - protein, 311 aa, Alistipes shahii
  misc_feature (1)..(311): tr|A0A5B3G955|A0A5B3G955_9BACT tRNA epoxyqueuosine(34) reductase QueG OS=Alistipes shahii OX=328814 GN=queG PE =4 SV=1
MIDHLYIKRLAAGAGFDLCGIAPCRHLAENEALFRAWLARGRQSSLGYLERNVDKRFDARRLVEGARTAVVCAVSYKNRVGEGYPPGHRTKVASYACAADYHATLRTMLGGMLDALRAAHPGLGGRAFVDTAPLAEKQLAVEAGLGWIGRQSLLVTPQYGSYVVLGELILTEETDRYDAPFEGSRCGTCRSCIDNCPTGAVAPDRTIDTGRCISCRTIEREQPGQTDLHGWIFGCDACQSLCPWNRRAPQHRNAAFDAVFDPLAMDAATWLGMDEAAFEALCGRTPLTRSGLVRIRENALRNAAPEEPSER

SEQ ID NO: 74347 - protein, 311 aa, Alistipes shahii
  misc_feature (1)..(311): tr|D4IPA6|D4IPA6_9BACT Uncharacterized Fe-S protein OS= Alistipes shahii WAL 8301 OX=717959 GN=AL1_25650 PE=4 S V=1
MIDHLYIKRLAAGAGFDLCGIAPCRHLAENETLFRAWLARGRQSSLGYLERNVDKRFDARRLVEGARTAVVCAVSYKNRVGEGYPPGHRTKVASYACAADYHATLRTMLGGMLDALRAAHPGLGGRAFVDTAPLAEKQLAVEAGLGWIGRQSLLVTPQYGSYVVLGELILTEETDRYDAPFEGSRCGTCRSCIDNCPTGAVAPDRTIDTGRCISCRTIEREQPGQTDLHGWIFGCDACQSLCPWNRRAPQHRNAAFDAVFDPLAMDAATWLGMDEAAFEALCGRTPLTRSGLVRIRENALRNAAPEEPSER

SEQ ID NO: 74348 - protein, 300 aa, Alistipes sp.
  misc_feature (1)..(300): tr|A0A359G5Z0|A0A359G5Z0_9BACT tRNA epoxyqueuosine(34) reductase QueG OS=Alistipes sp. OX=1872444 GN=queG PE=4 SV=1
MLDRTEIKRLAAEAGFDLCGVAPCHPMPQAEERFRAWLGRGLHSTLGYMERHTEKRFDPARLFEGARTAVVCAVGYKNAASNGYPAAHRTRVASYACAADYHTSIRAMLGRMLDALLKTRPALRGRAFVDTAPLAEKQLAVEAGLGWIGRQSLLVTPALGTYVLLGELLLTEPCGSYDAPFEGSRCGTCRACLDACPVQALTPDRTVDTRRCISRHTVERDPDPAAPLHGWIFGCDACQSVCPYNRRAPQHRNPAFDPLFDPAAMTADEWFALSEEEFDRRMGQTPLTRSGLERIRRNIG

SEQ ID NO: 74349 - protein, 302 aa, Alistipes sp.
  misc_feature (1)..(302): tr|E4ME62|E4ME62_9BACT Putative iron-sulfur cluster-bin ding protein OS=Alistipes sp. HGB5 OX=908612 GN=HMPREF9 720_2020 PE=4 SV=1
MLDYQHIKKLAADAGFDLCGLAPCGHMAQNEAWLRAWLGKGYQSSLTYMERNVEKRADPRKLVEGARTAVVCAVSYKNRIGEGYPPGHRTKIASYACTADYHTTIKGMLNGMLEHLKAADPGLGGRAFVDTAPLLEKQLAVEAGLGWIGRQSLLVTPRHGTYVLLGELLLTDEADAYDAPFEGSRCGRCRNCIESCPTGAIVVPKVIDTGRCISCHTIEREPSGGIDLDGWIFGCDRCQSCCPHNQKAPMHANRAFDPVFDPLTMDAAAWMALDETEFEARMGATPLTRSGLARIRGNIKTE

SEQ ID NO: 74350 - protein, 311 aa, Alistipes timonensis
  misc_feature (1)..(311): tr|A0A1H4FGS8|A0A1H4FGS8_9BACT Epoxyqueuosine reductase OS=Alistipes timonensis JC136 OX=1033731 GN=SAMN054441 45_11071 PE=4 SV=1
MLDFLNIKKLAAEAGFDLCGVAPCRHLADGEARFRAWLARGGQSSLGYMERNTEKRFDPRLLVEGARTAVICAVSYKNAAGEGYPARHRTKVASYACTTDYHTTIRTMLLQLFDALRTAHPGLSGRAFVDTAPLAEKQLAAEAGLGWIGRQSLLVTPQFGTYVLLGELILTDEADAYDTPFGENRCGSCRRCVEACPTGAVAPDRTIDTARCISCRTIEKVPESDADLDGWIFGCDACQSCCPWNLRAPLHRNAAFDPVFDPLSMDAATWLGMDEAAFEALCGRTPLTRSGLTRIRENIRRNSAPGEPSER

SEQ ID NO: 74351 - protein, 310 aa, Aliterella atlantica
  misc_feature (1)..(310): tr|A0A0D9A2E5|A0A0D9A2E5_9CYAN Epoxyqueuosine reductase OS=Aliterella atlantica CENA595 OX=1618023 GN=queG PE= 3 SV=1
MDKFSIEQRALELGFHKVGIASVDSIDAEVQHLRSWLKQGYQADMAWMDNPKRQDIRKVMPEVRSVICVALNYYTPHQRPNSPEYAKISRYAWGRDYHKVLTKKLKALTNWLQQTPGVQARYYADTGPIQDKVWAQKAGIGWIAKNGNVIAREYGSWIFLGEILTNLDLTPSIPHTEHCGSCTRCLDACPTGALAKPFVVDANRCIAYHTIENRAQELPENIVPHLQGWVAGCDICQDVCPWNQRFARVTDVAEFQPYPTNVAPKLTDLAQMSDESWEQRFTASALRRIKPDMWRRNARANLLRQGRVET

SEQ ID NO: 74352 - protein, 381 aa, Alkalibacillus haloalkaliphilus
  misc_feature (1)..(381): tr|A0A511W9S5|A0A511W9S5_9BACI Epoxyqueuosine reductase OS=Alkalibacillus haloalkaliphilus OX=94136 GN=queG PE =3 SV=1
MDFNQLKQELFDYCEEINVQKVGIASTDTFDTLKQRLVTQQAFNYQSGFEKGTVEERTTPTKLLPKAQSIISIALAYPSKMKDAPKSKKGDRRGIFARASWGKDYHDVLREKLNLIGEFLEEKVEGAQFKAMVDTGELHDRAVAERAGIGFVGKNCNLITDEYGSWVYLGELITNIPFEPDEPIEEGCGDCNICVDKCPTGALVQGGQLNASRCIAYQTLTKDFLPDEYRTKIGNRIYGCDTCQVVCPKNKGVDFHLHPEMEPDPELAKPKLEPLLTISNREFKEQFGYMSGSWRGKKPIQRNAIIALAHYKEVESVDTLIHLMKKDPRPVIRGTAAWAIGKIGREDAKQVLEKAKLHEQDEDVLVEIDKGLDFLKVHTTT

SEQ ID NO: 74353 - protein, 363 aa, Alkalibacter saccharofermentans
  misc_feature (1)..(363): tr|A0A1M4V2S0|A0A1M4V2S0_9FIRM Epoxyqueuosine reductase OS=Alkalibacter saccharofermentans DSM 14828 OX=112097 5 GN=SAMN02746064_00897 PE=4 SV=1
MDLKDDIMIAAKDIGIDMIGFTDSVSKDFFVPIYEDRKSKGCLVLLDSVDSKEWFSPKAHWDLCKSVVSIGVPYRWEEECELGGTQGLFARVSRGVDYHKVLHEKIKQMMERVKKYHPDIDYKAYVDNGPVSDRAFAWAAGVGFYGKNGFIISPDYGSFVFLGQVLLNKELSEKSTPLESMCGHCDLCINACPVDALKGPFRFDGNKCISYLTQKKGILNRQERKAIGQSLYGCDICQDVCPFNKEAKLSKEGKFKADCKDIAPELEYILNMDNKTYSEYFKGTSSGWRGKRTLQRNAVILCGNILLENNFTLLLQCIHDQREEIRIHAMFSLLEYGARGEKTVEEHIQAESCDFMDKFNRYR

SEQ ID NO: 74354 - protein, 391 aa, Alkalibacterium gilvum
  misc_feature (1)..(391): tr|A0A1H6RTL1|A0A1H6RTL1_9LACT Epoxyqueuosine reductase OS=Alkalibacterium gilvum OX=1130080 GN=queG PE=3 SV=1
MTQDLKELIKIKAAEIGIDKIGFTHAEPFYSLEDKLKKQQAKGHHSGFEHKVIEERVYPEKIFDEPRSIISIALAYPSKMHNKPPRVKGERRGEFARASWGTDYHYILRDRMNKLIHYIKEIAPQNVSFKPMVDTGELVDVAVAQRAGLGFIGRNGLLITKEFGSYVYLGEIITNIEFEADEEVAFGCGDCTRCIDACPTDALLGDGRMNANRCLSFQTQTKGYMPKEYRRKMGHVIYGCDICQIVCPYNKGMDSHFHEEMEPEPFNTNPKLKPLLTISNREFKETFGELAGSWRGKKPLQRNAIIALANYRDYSAVPDLLNVIDNDVRPMIRGTAAWAIGVITNKRPNGEIIAFLEEALLKETDEETIEEFQSAINDLKERMNKLNMKEN

SEQ ID NO: 74355 - protein, 391 aa, Alkalibacterium kapii
  misc_feature (1)..(391): tr|A0A511ARB0|A0A511ARB0_9LACT Epoxyqueuosine reductase OS=Alkalibacterium kapii OX=426704 GN=queG PE=4 SV=1
MNQELKELIKTKAAEIGIDKIGFTHAEPFYSLEDKLKKQHAKGHHSGFEHKVIEERIYPEKIFAEPKSIISIALAYPSKMPNKPPRVKGERRGEFARASWGTDYHYVLRDRMNKLIKYIEEIGPEDVAFKPMVDTGELVDVAVAQRAGIGFIGRNGLLITKEFGSYVYLGEIITNLEFEPDEEVTYDCGDCTRCVDACPTDALLGDGRMNAIRCLSYQTQTKGYMTKEYRRKMGHVIYGCDICQIVCPYNKGIDSHIHEEMEPEPFNTNPKLKPLLTISNREFKETFGNLAGSWRGKKPLQRNAIIALANYRDYSAVPDLLNVIDNDVRPMIRGTAAWAVAVITQKRPNTEVIAFLEDALLKETEEETIREFQGAIENLKARMSQLETKEN

SEQ ID NO: 74356 - protein, 393 aa, Alkalibacterium olivapovliticus
  misc_feature (1)..(393): tr|A0A2T0W9R6|A0A2T0W9R6_9LACT Epoxyqueuosine reductase OS=Alkalibacterium olivapovliticus OX=99907 GN=queG PE =3 SV=1
MNQELKEKIQAKAEDLGINKIGFTHADPFYDLEAKLHAQQEKGHHSGFEHKVIEERIYPERIFDQPKSIIAIALAYPSKMRDKAPRVKGERRGEFARASWGTDYHTVLSKKMDQLIDYIRSEAEGDVSFKPMVDTGELVDVAVAQRAGLGFIGRNGLLITKEFGSYVYLGEIITNIEFESDEEVSFGCGDCTRCVDACPTDALLGDGRMNAQRCLSYQTQTKGYMPKEYRRQMGHVIYGCDICQIVCPYNKGIDSHFHEEMEPEPFNTTPELKPLLTISNKDFKKDFGDMAGSWRGKKPLQRNAIIALANYRDFSAVPDLLNVIENDPRPMIRGTAAWAVATITKKRPNQDVLDFLEESVLKETDEETVAEFTEAIIELKERLDLIESKRRDT

SEQ ID NO: 74357 - protein, 394 aa, Alkalibacterium pelagium
  misc_feature (1)..(394): tr|A0A1H7KW57|A0A1H7KW57_9LACT Epoxyqueuosine reductase OS=Alkalibacterium pelagium OX=426702 GN=queG PE=3 SV= 1
MNQLLKEKIIDKAEELGINKIGFTHADPFYDLEEKLHAQQEKGHHSGFEHRVIEERIYPEKIFDQPKSIIAIALAYPSKMREKAPRVKGERRGEFARASWGKDYHSILKDKMDQLIEYIRSEAEGDVTFKPMVDTGELVDVAVAQRAGLGFIGRNGLLITKEYGSYVYLGEIITNIAFEPDNEVDFGCGDCTRCVDACPTDALLGDGRMNAQRCLSYQTQTKGYMPKEYRRKMGHVIYGCDICQIVCPYNKGMDSHFHEDMEPEPFNTTPELKPLLTISNKEFKQTFGEMAGSWRGKKPLQRNAIIALANYRDFTAVPDLLNVIDNDPRPMIRGTAAWAVATIISKRPNEDVLAFLEEAVLKETDEETITEFNEAIAGLKERLDAIESKRRDKH

SEQ ID NO: 74358 - protein, 391 aa, Alkalibacterium putridalgicola
  misc_feature (1)..(391): tr|A0A1H7TA90|A0A1H7TA90_9LACT Epoxyqueuosine reductase OS=Alkalibacterium putridalgicola OX=426703 GN=queG PE =3 SV=1
MSQQLKELIKVKAAEIGIDKIGFTHAEPFYSLEDKLIKQHAKGHHSGFEHKVIEERIYPEKIFAEPKSIIAIALAYPSKMRNKPPRVKGERRGEFARASWGTDYHYVLQDRMDKLIAYIEEVAPGEVAFKPMVDTGELVDVAVAQRAGLGFIGRNGLLITEEFGSYVYLGEILTNIDFEPDEEVAFGCGDCTRCVDACPTDALLGDGRMNANRCLSYQTQTKGYMPKEYRRKMGHVIYGCDICQIVCPYNKGVDSHFHEEMEPEPFNTMPELKPLLTISNREFKETFGDLAGSWRGKKPLQRNAIIALANYRDYSAVPDLLNVIDNDVRPMIRGTAAWAIATITKKRPNEEIVTFLEEALLKETDEETITEFKEAIGEIKARLNKLNAKES

SEQ ID NO: 74359 - protein, 388 aa, Alkalibacterium sp.
  misc_feature (1)..(388): tr|A0A1L8P6R4|A0A1L8P6R4_9LACT Epoxyqueuosine reductase OS=Alkalibacterium sp. 20 OX=1798803 GN=queG PE=3 SV=1
MSQQLKELIKAKAKEIGIDKIGFTHAEPFYSLEDKLIKQHAKGHHSGFEHKVIEERIYPEKIFDEPKSIIAIALAYPSKMQNKPPRVKGERRGEFARASWGTDYHFILRDRMKKLVEYIEEIAPGEVAFKPMVDTGELVDVAVAQRAGLGFIGRNGLLITEEFGSYVYLGEIITNIAFESDEKVAFGCGDCTRCIDACPTDALLGDGRMNANRCLSYQTQTKGYMPKEYRRKMGHMIYGCDICQIVCPYNKGMDSHFHEEMEPDPINTMPELKPLLTISNREFKDTFGDLAGSWRGKKPLQRNAIIALANYRDYTAVPDLLNVIDNDPRPMIRGTAAWAVATITNKHPNEEIVLFLEEAVKKETEDETVSEFNEAIGDLKARLNTLNN

SEQ ID NO: 74360 - protein, 388 aa, Alkalibacterium sp.
  misc_feature (1)..(388): tr|A0A011RLB3|A0A011RLB3_9LACT Epoxyqueuosine (OQ) redu ctase QueG OS=Alkalibacterium sp. AK22 OX=1229520 GN=AD IAL_2021 PE=4 SV=1
MNEELKQKIIRQAERIGINKIGFTHADPFYDLEPKLHAQQEKGHHSGFEHKIIEERIYPEKIFDQPQSIIAIALAYPSKMSRKPPRVKGERRGEFARASWGRDYHEILSEKMDQLIAYIRSEAGEDVRFKPMVDTGELVDVAVAQRAGLGFIGRNGLLITEEYGSYVYLGEIITNIPFEPDKEVAFGCGDCTRCIDACPTDALLGDGRMNAKCCLSFQTQTKGYMPKEYRRQMGHVIYGCDICQIVCPYNKGIDSHFHEEMEPESENTNPKLKPLLTISNKEFKQAFGPLAGSWRGKKPIQRNAIIALANYRDFSAVPDLLNVIDNDPRPMIRGTAAWAVATIVKKRPTDDILSFLEEAAEKESEPETVQEFAEAIQDLKDRLNRKNS

SEQ ID NO: 74361 - protein, 391 aa, Alkalibacterium subtropicum
  misc_feature (1)..(391): tr|A0A1I1J0Y8|A0A1I1J0Y8_9LACT Epoxyqueuosine reductase OS=Alkalibacterium subtropicum OX=753702 GN=SAMN044881 02_106110 PE=4 SV=1
MNQQLKELIKAKAKEIGIDKIGFTHAEPFYSLEDKLIKQHAKGHHSGFEHKVIEERIYPEKIFAEPKSIIAIALAYPSKMRNKPPRVKGERRGEFARASWGTDYHYVLQDRMDKLIAYIEEIAPGEVAFKPMVDTGELVDIAVAQRAGLGFIGRNGLLITEEFGSFVYLGEILTNIEFEPDQEVSFGCGDCTRCVDACPTDALLGDGRMNANRCLSYQTQTKGYMPKEYRRKMGHVIYGCDICQIVCPYNKGVDSHVHEEMEPEPFNTMPELKPLLTISNRDFKETFGDLAGSWRGKKPLQRNAIIALANYRDYSAVPDLLNVIDNDVRPMIRGTAAWAIATITKKRPNEEIVTFLEEALLKETDEETVTEFKEAIGELKARLNKLNAKES

SEQ ID NO: 74362 - protein, 394 aa, Alkalibacterium thalassium
  misc_feature (1)..(394): tr|A0A1G9CVB7|A0A1G9CVB7_9LACT Epoxyqueuosine reductase OS=Alkalibacterium thalassium OX=426701 GN=queG PE=3 S V=1
MNQLLKEKIIDKAEELGINKIGFTHADPFYELEEKLHAQQEKGHHSGFEHRVIEERIYPEKIFDQPKSIIAIALAYPSKMREKAPRVKGERRGEFARASWGKDYHLILKEKMDQLIEYIRQEAEGDVTFKPMVDTGELVDVAVAQRAGLGFIGRNGLLITKEYGSYVYLGEIITNIAFEPDSEVDFGCGDCTRCVDACPTDALLGDGRMNAQRCLSYQTQTKGYMPKEYRRKMGHVIYGCDICQIVCPYNKGMDSHFHEDMEPEPFNTTPELKPLLTISNKEFKQTFGEMAGSWRGKKPLQRNAIIALANYRDFTAVPDLLNVIDNDPRPMIRGTAAWAVATIISKRPNEDVLAFLEEAVLKETDEETITEFNEAITGLRERLDAIESKRRDKH

SEQ ID NO: 74363 - protein, 368 aa, Alkalibaculum bacchi
  misc_feature (1)..(368): tr|A0A366IG37|A0A366IG37_9FIRM Epoxyqueuosine reductase OS=Alkalibaculum bacchi OX=645887 GN=DES36_102191 PE=4 SV=1
MKDRIIEEAKKLNIDLIGFTNADVFHEAKSAIEDRIDKENLSPFLPLDLEKNTNPLKVWDEAKSIISIGIFYKHDILFGEDESNGGKISRVAWGKDYHIVLMDKMNRLMSTIQAIYPQLEYKPFTDSGFLLDRAIAERSGLGYYGKNGFIINPLYGSYIFLGHILVNVDIEENAKKMNSKCGPCKRCITACPTGALEEGQGFRSKKCISYLTQKKEFLNREERKSLGNSLYGCDICQEVCPMNKGSLLSKEGQFAPDLSTVKPKLKDLLKMDNKTFKKNYGSTAAGWRGKKNLQRNAIIVAGNVQSEENFRLLIDTLKDNRPDIRLYAMLSLLEYGEKGRVLVEKSLVLEDEEFKQKYVESGKLKGED

SEQ ID NO: 74364 - protein, 383 aa, Alkalicoccus halolimnae
  misc_feature (1)..(383): tr|A0A5C7FPF9|A0A5C7FPF9_9BACI tRNA epoxyqueuosine(34) reductase QueG OS=Alkalicoccus halolimnae OX=1667239 GN =queG PE=4 SV=1
MSSQFKNEIIEFSRKIGIDKIGFAPADPFVTMKERLRIQQEKGYASGFEKGSLEERTNPDLLLPEAKTIISIALAYPSKMKDAPRSVKGDRRGIFCRASWGEDYHHVLRRKLKQVEEFILQKDPRARCKEMVDTGELPDRAVAERAGIGWSGKNCAIITPEFGSYVYLGEMITTISFEEDVPLEEQCGTCNKCVDACPTGALVQGGQLDATKCIAFLTQTKTMLPKQYRKKLGNRLYGCDTCQTVCPENKGVDEHRHPEMEPDPEIVKPQLEPLLTMSNREFKEKFGRISGSWRGKKPIQRNAIIALAVFKEKASLPVLTKLMHEDPRPVIRGTAAWALSEIENSEDIYKEIDKAGSNENNEEAKTEMENALSFMKNAGEKSY

SEQ ID NO: 74365 - protein, 383 aa, Alkalicoccus saliphilus
  misc_feature (1)..(383): tr|A0A2T4U6K8|A0A2T4U6K8_9BACI Epoxyqueuosine reductase OS=Alkalicoccus saliphilus OX=200989 GN=queG PE=3 SV=1
MRMNRGLKQEIIDYSKEIGVDKIGFAAADPFVTLKERLRVQQEKGYVSGFEKGTLGERTTPELLLPEAKTVISIALAYPSKMKDAPRSVKGDRRGIFCRASWGEDYHHILRRKLNLLEEFIQKKVTGARSKSMVDTGELSDRAVAERAGIGWSGKNCAVITPEFGSYVYLGDLITTVPLEEDQPLEDQCGSCTKCIDACPTGALIQGGQLDATKCVAFLTQTKTMLPEKYRKKIGNRLYGCDTCQVVCPENKGKDFHHHPEMEPDPEVVKPRLEEVLSMSNKEFKKKFGHISGSWRGKKPIQRNAVIALGVFKEKSALPTLIKLLKEDPRPVIRGTAAWAIGEIEKSSETYQMLEASAETEKDEEVLSEIYSVLNNTQTTLRS

SEQ ID NO: 74366 - protein, 360 aa, Alkalilimnicola ehrlichii
  misc_feature (1)..(360): tr|A0A3E0WYF6|A0A3E0WYF6_9GAMM Epoxyqueuosine reductase OS=Alkalilimnicola ehrlichii OX=351052 GN=queG PE=3 SV =1
MSSPVSAKNQDALRDPRTLAELAASIKQWGREAGFAEVGITGTDLAQDEAYLLRWLERQFHGDMDYMARHGVKRSRPEQLLPGTIRVISVRMDYAPEEEPEHGDNTQAFIARYARGRDYHKLIRKRLQHLATRLEQEVGMFGYRVFVDSAPVLEKALARNAGLGWIGKNTLLINSRAGSYFFLGEIYTDLPLPVDEPASEHCGSCRACLDICPTKAIVAPYQLDARLCISYLTIESHQAIPEDLRPHIGNRIFGCDDCQQVCPWNKFAQATDEADFKPRHGFDSADLIELFLWSEETFLERTAGSAIRRLGHERWLRNIAVALGNQAPEPTIEAALEQRRNHPSALVREHVEWALARLRT

SEQ ID NO: 74367 - protein, 351 aa, Alkalilimnicola ehrlichii
  misc_feature (1)..(351): tr|Q0AB66|Q0AB66_ALKEH Epoxyqueuosine reductase OS=Alka lilimnicola ehrlichii (strain ATCC BAA-1101 / DSM 17681 / MLHE-1) OX=187272 GN=queG PE=3 SV=1
MQALAERIRVWAGELGFTGVGIADPDLRQDEYWLLRWLRRGWQGTMGWMGRHGVKRSRPQRLLPGTGRIISVRLDYQPAGAEPWSVLADGRKAYVARYALGRDYHKLMRQRLQKLARRIETEVGPYGYRAFVDSAPVLEKAVGREADLGWIGKHTLLMDRDASSWFFLGELFTDLPLPADPPRRRGHCGRCRACIDVCPTGAIVGPYQLDARLCISYLTIEHDGPIPEPLRPLMGNRVFGCDDCQLICPWNKFARPTAEGDFQPRHNLDHADLVELFGWTESQFLDRMAGSAIRRLGHERWLRNLAVALGNGPASAEAVAALEARQEHPSALVREHVAWALRRLTEPGNAE

SEQ ID NO: 74368 - protein, 375 aa, Alkalimonas amylolytica
  misc_feature (1)..(375): tr|A0A1H3Y3I8|A0A1H3Y3I8_ALKAM Epoxyqueuosine reductase OS=Alkalimonas amylolytica OX=152573 GN=queG PE=3 SV=1
MSLAALATRIKIWAKELGFADCGITNTDLKREEPRLQAWLEQEFHGEMDYMARHGMVRARPDELLPGTLRVISVRMDYLPERAAFASNLKDPSKAYISRYALGRDYHKVIRKKLKQLAERIEQEVSELGYRPFVDSAPVLERPLAQKAGLGWVGKHSLLLNNEAGSWFFLGELLVNLPLPIDEPHPGDCGSCVACITSCPTQAIVAPFVVDGRRCISYLTIELKGAIPLEFRPLLGNRIYGCDDCQLVCPENRTAPLSLEADFQIKDHWRDQSLLSLFGWDEPTFLQRTEGSPIRRIGFERWQRNLAVALGNAPYSEDIVQTLQQAHAGASALVQEHIDWALQQQQKKQWLETSVLPRQTERLVRIVKKGLPRDA

SEQ ID NO: 74369 - protein, 321 aa, Alkalinema sp.
  misc_feature (1)..(321): tr|A0A251WID1|A0A251WID1_9CYAN Epoxyqueuosine reductase OS=Alkalinema sp. CACIAM 70d OX=1934309 GN=queG PE=3 S V=1
MASTEPSTLTSAIKQKAFDLGFHKVGIVRVADWANVEPQELRSWLAQGYQAEMAWMAASKRQNVYEILPTVQSIVCVAINYYTPHQRPTGAEYGKISRYGWGRDYHKVLHKRLKAFSLWLEAQTGLDAHNETIQTRYYADTGPIQDKVWAERAGIGWIAKNSNVITREYGSWVFLGEILTNLVLIPDRPHTQHCGTCTRCIDACPTAAITQPFVVDANRCIAYHTIENRNDELPHDIASNLQGWVAGCDICQDVCPWNQRFAQATDIPDFQPYPDNIAPQLQDLATLDAAEYDRRFPASALRRIKPEMWRRNARANLTHHS

SEQ ID NO: 74370 - protein, 370 aa, Alkaliphilus metalliredigens
  misc_feature (1)..(370): tr|A6TU90|A6TU90_ALKMQ 4Fe-4S ferredoxin-type domain-co ntaining protein OS=Alkaliphilus metalliredigens (strai n QYMF) OX=293826 GN=Amet_3636 PE=4 SV=1
MNLKKEIIDFAKTIGIDLIGFTTAAPFEELRPILEERKAKGYLSGFEEQDMEKRIDPKKTMANAQSILVIGQPYYIDDLETTLGDSQFYGELARTAWGTDYHQIVKEKLEEIMSFIKEKEENVEYRTFVDTGPLVDRQVAYRAGLGWYGWNNTLISSKYGSWFFIGYLLINLEFPPDRPMDDQVCLACQLCIKHCPNQALQGPYSFNSQRCVSNLLQQKEEMKDADKKKIGKKIYGCDICQSVCPHNERVRKTKELRFQPQNPKHEIDLIHFLGISKKEFKDIYGQNASGWRGKKILQRNAIIAMGNHHNKEAIPHLLPLLKDPRLDIRSVTIWALNELDPEYTCQLLQEMMERENSEELQSMMNKYCNP

SEQ ID NO: 74371 - protein, 375 aa, Alkaliphilus oremlandii
  misc_feature (1)..(375): tr|A8MEX5|A8MEX5_ALKOO Uncharacterized protein OS=Alkal iphilus oremlandii (strain OhILAs) OX=350688 GN=Clos_09 07 PE=4 SV=1
MNLKEKIVQYSKSIGIDLIGFTDAGPFDDLRQILLDRKINGKLSGFEEEDIQLRVDPRKTLDTAKSIIVIAMSYYVGADQLPCSEKPKFYGELARTAWGKDYHLVLKEKLNQLADFIKNEEEDFQYKAFVDTGPLVDRYVANRSGIGFYGYNSAIINKTYGSWIFIGYMINNMAFEEDKSLENVHCYGCNLCIEQCPTSAIEGPYQFDANKCLSNILQQKRDIAEDVRLLIGKKIYGCDICQNVCPHNKGIKEMTTKEFMPKNPSHCVDLIELLHISNKEYNEIFKGNASGWRGKKTLQRNAIIALGNYKDENPWPHLIPMLKDERPDIRKITIETLYSIHPQKTVQLISSMKGNEKDQEVLMTIHKYLDNYKNK

SEQ ID NO: 74372 - protein, 366 aa, Alkaliphilus peptidifermentans
  misc_feature (1)..(366): tr|A0A1G5K2P8|A0A1G5K2P8_9CLOT Epoxyqueuosine reductase OS=Alkaliphilus peptidifermentans DSM 18978 OX=1120976 GN=SAMN03080606_03213 PE=4 SV=1
MNLKQDIITFSKTIGVDLIGFTSAEPFEEIRATLEDRKKRNLLSGFEEQDLEKRIDPRRTMANAKSIIVIGQSYYYNSQYEETKYYGDLARTAWGRDYHLVLAGKLDEISNFINSRVRDFQYKGYVDTGPLVDRHLAYRAGLGWYGHNATLINDVYGSWFFIGYLITNIELESDKPLDTKCAGCNICIEQCPGGAIEEPYIINAKKCLSNILQQKSDIPIEKRKILGRRLYGCDICQTVCPHNKNAKEMTGEDFIPSILPNKIDLIKLLNISNKEYKELFETNASGWRGKRVLQRNAIIALVNYGDRNIVPHLIKLLKDNRPEIRRYALWGIIHLDRSIGIELAKDLYTIETDENNKKTIEDYFLL

SEQ ID NO: 74373 - protein, 353 aa, Alkaliphilus sp.
  misc_feature (1)..(353): tr|A0A2G2MME9|A0A2G2MME9_9CLOT tRNA epoxyqueuosine(34) reductase QueG OS=Alkaliphilus sp. OX=1872455 GN=queG P E=4 SV=1
MSVLSSRGSMLELKSEIIKYAHTLSIDLIGFTTADRFNGLENILNERKKKNYLSEFEEENFELRINPRKTLKSARSIVVIGQSYYSNIDSSPVDTNRSKFQGDLARISWGEDYHIVLKEKLDKLSSFIGNKHSDFQFLSFVDTGPLVDRHVAWRAGLGVFGKNNCLINDKLGSWFVIGYMLTNLDIEADKPKENICCINCNICIKECPTGAIEKPHVINVKKCISYILQSKDSILENNRELLETRIYGCDICQNKCPKNFMVTETSLDEFKPIVKQIDLVDLLTISNKKFKLLLGNNSAGWRGKKILQRNAIIAMGNQNRASAIPYLLPYLTDDRVEMREYARWAIAKLKKLT

SEQ ID NO: 74374 - protein, 355 aa, Alkalispirillum mobile
  misc_feature (1)..(355): tr|A0A498CFT1|A0A498CFT1_9GAMM Epoxyqueuosine reductase OS=Alkalispirillum mobile OX=85925 GN=queG PE=3 SV=1
MTADSMQALAGRIRSWAREMGFTGVGIADPDLRQDEYWLLRWLQHGWQGTMGWMGRHGVKRSRPARLLPGTRRIISVRLNYQPEGAEPWSVLQDGRKAYVARYALGRDYHKLMRQRLQRLARRIEAEVGPHGYRAFVDSAPVLEKAVGREANLGWIGKHTLLMDRDASSWFFLGELFTDLPLPADPPRRQGHCGSCRACIDICPTRAIIGPYQLDARRCISYLTIEHDGPIPEALRPLIGNRVFGCDDCQLVCPWNKFAQPTAEADFQPRHGLDQTDLVTLFGWTEQQFLDRMAGSAIRRLGHERWLRNLAVALGNGPASAEAVAALEARRAHPSELVREHVAWALNRLRSPSGG

SEQ ID NO: 74375 - protein, 353 aa, Alkalispirochaeta americana
  misc_feature (1)..(353): tr|A0A1N6QRR6|A0A1N6QRR6_9SPIO Epoxyqueuosine reductase OS=Alkalispirochaeta americana OX=159291 GN=SAMN059208 97_10528 PE=4 SV=1
MVDDELRELARQEGLKCLAVMDARSAPEKEEEVFRQWLSQGRHGTMKWMERHAEMRYRPQGLLPGCRSMIFVGFNYYQPLPRAPDKPAGRVARYAWGRDYHKELGKRLRRVVRALQGRYPHHHFRSWTDATPLAERYYAELAGLGFSGRNNLIIHRRFGSWFFLGEILSTLKFREHRPSRDCSSSATATRTRTCPDRCSRCIDSCPTRALMEPHRIDASRCISYLTIEYQGVIGPDLARSLGDWVFGCDLCQERCPFNQGVPSTGIEGFLQHRGGSFLLLRDLLSLREEDMLARFAGSPLMRAGRTRLVRNACIAAANSGALDLLPQLRVLREDADEIIAAQAEQAITALEGY

SEQ ID NO: 74376 - protein, 373 aa, Alkalispirochaeta odontotermitis
  misc_feature (1)..(373): tr|A0A0A0DXE1|A0A0A0DXE1_9SPIO Uncharacterized protein OS=Alkalispirochaeta odontotermitis OX=1329640 GN=JY97_ 13230 PE=4 SV=1
MTPKKIIREKALELGFEDAGFTGVEPLDDYIREIDSRPPQMYGWVQTEKFNTRRGATVGQKHPWAKSLVVLIRNYHRRAFPPQMVGIIGRCYQVDERREHGPEHQRVVDFLNFLKSHGIRVWFDEELPARMSAARAGITNYGKNCFAYARTSMRGASWLESIPLLLDAELEPDEPSIELDCPKWCKNACMAACPTGALYAPKKMNPLRCIAFNTYYTSGITPLELREPMGTWVYGCDRCQEVCPRNQPWLNQNLPENKPLERRAPDFALETLLSMDDRHYVDKVWPLAFYISRKLAAKWQMNAARALGNLGDPAKVPFLIQSLKENPHEIVRSMSAWSLGQLGGKGARAGLEACRSGEEGLVRQEIEQALQKS

SEQ ID NO: 74377 - protein, 353 aa, Alkalispirochaeta sphaeroplastigenens
  misc_feature (1)..(353): tr|A0A2S4JFZ9|A0A2S4JFZ9_9SPIO DUF1730 domain-containin g protein OS=Alkalispirochaeta sphaeroplastigenens OX=1 187066 GN=AU468_12900 PE=4 SV=1
MTTEELRDLAREEGLECLAVIDARAAPEEEEVFRQWLSQERHGTMAWLERHAPVRYRPQELLPGCRSMISVGFNYYQPLPPEPEQPAGRVARYAWGRDYHKELGKRLRRLVRALQDRFPGDRFRSWTDATPLAERYYAELSGLGFTGRNNLLIHRRFGSWFFLGEILSTASLAEHRPRQEEGCSSRAACPHRCSRCIDSCPTRALIGPHRLDASRCISYLTIEYRGVIAPDLADSLGNWVFGCDLCQDCCPLNGGVPSTRAEGFLRHRSGSFLALADLLSLREEDLLSRFAGSPLMRAGRTRLVRNACIAAANSGDFELLPLVRALREDADQVVAAQAEQAVARLEERRDGAP

SEQ ID NO: 74378 - protein, 319 aa, Alkalitalea saponilacus
  misc_feature (1)..(319): tr|A0A1T5FUG3|A0A1T5FUG3_9BACT Epoxyqueuosine reductase OS=Alkalitalea saponilacus OX=889453 GN=queG PE=3 SV=1
MNLTQQHIANTIRDKALELGFDDVGFSPATELTEDKERLEKWLNNGYNAGMKYMNNHFEKRVNPALLVERSLSVITVLKNYNQQNNQLSTNFPKISRYAYGKDYHDTIRKKLSVLFDYIREHIYPDLQGRYFVDSAPLLERTLAVKAGLGWIGKNSMLINRKLGSWVFIAELVVNLELPYNQTTVNDGCGGCTRCIDACPTQAILPHRQIDSNRCISYLTIENRDDIPENFEGKLDGWVFGCDICQEVCPWNRKAKDTDEPDFRPSEQLLKMTPVEWEKLTPEKFSELFRGSAVKRTKFNGFMRNHNFIAEPHKTHKKI

SEQ ID NO: 74379 - protein, 366 aa, Alkanindiges illinoisensis
  misc_feature (1)..(366): tr|A0A4Y7XDZ5|A0A4Y7XDZ5_9GAMM Epoxyqueuosine reductase OS=Alkanindiges illinoisensis OX=197183 GN=queG PE=3 S V=1
MASKKATIPVLDETLRQNPQALKEWIKAQARQLGFSDCGIARPDTQDQIPHLQQYLADGFHADMDYLATNLDKRANPALLVPDTRSIICVRMDYLAEAPPHRYVPHEPNQAIIARYARGRDYHKVLRGRLKQLARVIEEKVGPFESRPFADSAPIFEKALAEKSGLGWTGKHTLLINKKAGSFFFLGELFTSLDLPFDEPATAHCGSCSACLDICPTKAIVAPYRLDARKCIAYLTIEYQGIIPEEFRKPIGNRVFGCDDCQLICPWNGFAQLSGEDDFKARHHLNQATLLELWQWTEQEFLSKTEGSAIRRTGYQGFMRNVAIGLGNADFDPQIIAALQQSQHDEVVQVHVDWALTQQQLKMQAV

SEQ ID NO: 74380 - protein, 366 aa, Alkanindiges sp.
  misc_feature (1)..(366): tr|A0A1S8CZG9|A0A1S8CZG9_9GAMM Epoxyqueuosine reductase OS=Alkanindiges sp. H1 OX=1907941 GN=queG PE=3 SV=1
MTHKKASIVLLDESLRQNPQALKDWIKAQARQLGFSDCGIARPDTCDQIPHLQQYLDDGFHADMDYLAANLSIRANPALLVPNTRSIICVRMDYLAEAPPHRYVPHEPNQAIIARYARGRDYHKVVRGRLKQLARLIEEQIGPFESRPFADSAPIFEKALAEKSGLGWTGKHTLLINKKAGSFFFLGELFTSLDLPFDEPATAHCGSCSACLDICPTQAIVAPYRLDARKCIAYLTIEYQGIIPEEFRKPIGNRVFGCDDCQLICPWNGFAQLSKEDDFKARHNLNQVTLLELWQWSEQEFLSKTEGSAIRRTGYQGFMRNVAIGLGNADFDPAIIAALQHSQHDEVVQVHVDWAIQQQQLKMQAD

SEQ ID NO: 74381 - protein, 381 aa, Allobacillus sp.
  misc_feature (1)..(381): tr|A0A556PPH0|A0A556PPH0_9BACI Epoxyqueuosine reductase OS=Allobacillus sp. SKP2-8 OX=1955271 GN=queG PE=3 SV= 1
MDFNQLKQELLEYGAEVNIQKIGFASADTFDTLKQRLLVQQSLGYQSGFEKGSIEERTTPTKLLPKAQSIISIAIAYPSRMKDAPKSRKGDRRGFFARASWGKDYHDVLREKLRLLEEFLHQKVEGVATKAMVDTGELHDRAVAERAGVGFVGKNCALITEEYGSYVYLGELITNIPFEPDQPVEDGCGDCNICVDACPTGALVEGGQLNASRCIAFQTLTKSFLPDEFRSKLGNRLYGCDTCQLVCPKNKGMDFHLHEELEPDPELVKPRLIPLLTISNREFREKFGYMAGSWRGKKPLQRNAIIALAHYRDETAVDTLNDLMHKDPRPVIRGTAAWAIGKIGTMEAKELIEAAMKKETDEDVLEEMNKGIALTKQERAI

SEQ ID NO: 74382 - protein, 381 aa, Allobacillus sp.
  misc_feature (1)..(381): tr|A0A556PNQ7|A0A556PNQ7_9BACI Epoxyqueuosine reductase OS=Allobacillus sp. SKP4-8 OX=1955272 GN=queG PE=3 SV= 1
MDFHQLKQELLEYGAEVNIQKIGFASADTFDTLKQRLLVQQSLGYHSGFEKGSVEERTTPTKLLPKAQSIISIAIAYPSRMKDAPKSRKGDRRGFFARASWGKDYHDVLREKLRLLEEFLHEKVDGVATKAVVDTGELHDRAVAERAGVGFVGKNCALITEEYGSYVYLGELITNIPFEPDQPVEDGCGDCNICVDACPTDALVQGGQLNASRCIAFQTLTKSFLPDEFRSKLGNRIYGCDTCQLVCPKNKGMDFHLHEELEPDPELVKPRLIPLLTISNREFKDKFGYMAGSWRGKKPLQRNAIIALAHYRDETAVDTLNDLMHKDPRPVIRGTAAWAIGKIGTEEAKELIETAMEKETDEDVLIEMEKGLALTKQESAM

SEQ ID NO: 74383 - protein, 357 aa, Allochromatium vinosum
  misc_feature (1)..(357): tr|D3RRU4|D3RRU4_ALLVD Epoxyqueuosine reductase OS=Allo chromatium vinosum (strain ATCC 17899 / DSM 180 / NBRC 103801 / NCIMB 10441 / D) OX=572477 GN=queG PE=3 SV=1
MSHATHSPDTPQVLAERLKTWGRELGFQQIGITDTDLTDAEPRLRDWLARGYHGEMDYMARHGTKRSRPDELVPGTLSVISARMDYQPESRATLHERLADPAGAFISRYSLGRDYHKVLRRRLQRLADRLAAHIGPFGHRVFVDSAPVMEKPLAEKAGLGWIGKHSNLVNPRAGSWFFLGEIYTDQPLPPDQPMADHCGRCRACLDACPTGAIVAPYQVDGRRCISYLTIELKGAIPEPLRPLIGNRIHGCDDCQLVCPWNRFARLTEETDFLPRHGLDTATLIALFAWDEPTFLARTEGSAIRRLGHERWLRNLAVALGNAPDSPEVRLALETRADHPSPLVREHVVWALAGLACR

SEQ ID NO: 74384 - protein, 367 aa, Allochromatium warmingii
  misc_feature (1)..(367): tr|A0A1H3HPB1|A0A1H3HPB1_ALLWA Epoxyqueuosine reductase OS=Allochromatium warmingii OX=61595 GN=queG PE=3 SV=1
MPLTLTPLESPAALVARIKTWGRELGFQQLGIADTDLTDAEPRLRDWLARGYHGEMEYMARHGRKRSRPAELVPGTLSVIAARMDYQPESRATLRERLADPATAFIARYALGRDYHKVLRQRLQRLADRLATHIGPFGHRVFVDSAPVMEKPLAAKAGLGWIGKHSNLVHPQAGSWFFLGEIYTDLPLPPDPPLTDHCGRCHACLSACPTGAIVAPYQVDARRCVSYLTIELHGPIPESLRPLIGNRIHGCDDCQLVCPWNRFASLTTESDFLPRHGLDTATLLALFAWDDATFLARTAGSAIRRLGPERWLRNLAVALGNAPPSIEIETALQARADHPSALVREHVAWALGQHITRRNQPPAANTT

SEQ ID NO: 74385 - protein, 362 aa, Allofrancisella guangzhouensis
  misc_feature (1)..(362): tr|A0A0A8EA52|A0A0A8EA52_9GAMM Epoxyqueuosine reductase OS=Allofrancisella guangzhouensis OX=594679 GN=queG PE =3 SV=1
MKLELTLEQWQKVKNYALDELGLSSLSKADCDLSEYIPYYNKWLESGYNAELDYMVKHGEKRFVPNQLVPGTNSVIVATLNYLNRHISTKTEVKRLRSISEIAEVSIYAHGRDYHKVMKKKLQKLGEYIDKITANHQFRVFTDSAPVLEKPLAEKAGLGWIGKNSMLMNKEQGSFFFIGVIYSNLDLSKLPDTDLKLNECGKCRACIKLCPTGAILPNKMIDSRKCISYLTIENKGAIPLEFRDKIGTRIYGCDDCQLVCPFNNAAPETTEQDFQQRDFLVNRPLLELFSWSKEDFDKYTQGSAIRRIGYDAWIRNISIAIGNSPYKDENLLALENKRTKYLDNKLILEHIDWAINKQKSFI

SEQ ID NO: 74386 - protein, 366 aa, Allofrancisella inopinata
  misc_feature (1)..(366): tr|A0A4R7LJ17|A0A4R7LJ17_9GAMM Epoxyqueuosine reductase OS=Allofrancisella inopinata OX=1085647 GN=queG PE=3 S V=1
MKLELTLEQWQKVKNYAVNELGLSSLSKADCDLSEYIPYYNKWIENGYYAELDYMVKHGQKRFIPDQLVPGTNSVIVATLNYLNRSISTKTEVKRLRTPSEIAEISIYAHGRDYHKVMKKKLQKLGEYIDKITSDHQFRVFTDSAPVLEKPLAEKAGLGWIGKNSMLMNKEQGSFFFIGVIYSNLDLSKLPNTDPKLNECGKCQACIKLCPTGAILPNKMIDSRKCISYLTIENKGAIPLEFRDKIGTRIYGCDDCQLVCPFNNQAPVTTEQDFQQRNFLVNRPLLELFSWSKEDFDNYTQGSAIRRIGYDAWIRNISIAIGNSPYKHENLLALKNKRAEYLDNFLILEHIDWAINKLYNKQKSSI

SEQ ID NO: 74387 - protein, 319 aa, Alloprevotella rava
  misc_feature (1)..(319): tr|G5GC84|G5GC84_9BACT Uncharacterized protein OS=Allop revotella rava F0323 OX=679199 GN=HMPREF9332_01185 PE=4 SV=1
MTKKTPDEPSFLTEGILKASLIKAEALRLGFSACGLAPAEPVDKVHAERRLQWISEGRHADMQYLERNMDKRLDPRLLVEGARTIVSVALNYYPAEKLSGWALSRYVYGQDYHEVMKARLRQLAEHIPPKEGYETRVFVDTAPLDERYWAWRCGLGWQGRSGQLILPKGGTYFFLGEIVLPYEADAYDTPIENRCGTCHACVDACPGQALRGDGTLDANRCLSYLTIENRGDLPPGTGQKMGTCFYGCDRCAEVCPWNRFAKPTEVEEFRPSEQLLQMTREDWEQLTIEQYRAIFKGSAVKRAKFEGLKRNIKALARKK

SEQ ID NO: 74388 - protein, 240 aa, Alloprevotella sp.
  misc_feature (1)..(240): tr|A0A496KQV0|A0A496KQV0_9BACT DUF1730 domain-containin g protein (Fragment) OS=Alloprevotella sp. OX=1872471 G N=D8H91_04900 PE=4 SV=1
MILSSEYIKAEAQRLGFFACGISPALPMDAEHVARRQQWLDEGMHGEMSYLERNEDKRRDPRLLVEGVQCIVSLALNYYTFVPEESAPNYPPSDDKTAHNLTENTTSTTSSNTFDAEKTTPSSISPASTTNPRREKQKERYIPLARYARGKDYHDEMKARLFQLLGNIRQHLIDNGHTAAAEQLETSRVFTDTAPVDERYWAWKSGLGWIGKNSQLIIPGAGSYFFLGELFLTLPADAFD

SEQ ID NO: 74389 - protein, 321 aa, Alloprevotella sp.
  misc_feature (1)..(321): tr|A0A3P1ZFF7|A0A3P1ZFF7_9BACT tRNA epoxyqueuosine(34) reductase QueG OS=Alloprevotella sp. OH1205_COT-284 OX= 2491043 GN=queG PE=4 SV=1
MPTTLSSDFIKAEALRLGFFACGLSAAAPIDKQRAQRRERWVAEGCHAEMSYLERNEDKRRDPRLLVEGAQTVVSVALNYYTFVPDTEHGGERHIPIARYARGRDYHDVMKQRLHALLHILAEKYGEPSLAGSRAFVDTAPIDERYWAWRSGLGWIGKNTQLIIPGAGSYFFLGELLLTLPADNYDSPIKNRCGTCRRCLTSCPTQALSEENGLDARRCLSYLTIEYRGENLPEGTGRKMGNTFYGCDRCSDCCPWNKWARPTAETDFQPSQALLNMTFEDWKKLTIEEYRKLFKGSAVKRAKYEGLTRNIRTLAEAETEE

SEQ ID NO: 74390 - protein, 306 aa, Alloprevotella tannerae
  misc_feature (1)..(306): tr|C9LFH4|C9LFH4_9BACT Putative iron-sulfur cluster-bin ding protein OS=Alloprevotella tannerae ATCC 51259 OX=6 26522 GN=GCWU000325_00956 PE=4 SV=1
MDKKVLQAQTIKAEAARLGFSACGLARAERVDQTQEARFRKWIAEGKHGEMDYLARNIEKRMDPRLLVEGAQTIVAVAMNYLPAHLPEKPPLARYAYGKDYHDVVRERLLALMQSLNLKPYEDGRAFVDTAPVDERYWAVKAGLGWTGRNGQLIIPRAGSYFFLGELILVHPADAYDSPKRNLCGNCRACVDACPAGALCGDGSMDARKCLSYLTIEHRGPLPEEAGEQMGDCFYGCDRCAEVCPWNRFARPTQEAAFAPSAELLRMKTEDWRALDVETYRRLFKGSAVKRAKYEGLKRNIDAWKP

SEQ ID NO: 74391 - protein, 356 aa, Unknown
  misc_feature (1)..(356): tr|A0A0N0K1P1|A0A0N0K1P1_9PROT Epoxyqueuosine reductase OS=alpha proteobacterium AAP81b OX=1523432 GN=queG PE= 3 SV=1
MSALREALAAEAARLGFVAFGIAPADAAPAAGARLRQWLAEGCHGDMLWMAETESRRASPRGLWPEVRSVVMLGMSYASPHDPRRLAEHPDRAAISVYAQGEDYHEVVKKRLKTLARWLVAAAPDAGVKVFVDTAPVMEKPLAEAAGLGWQGKHTNLVSRAHGSWLFLGSIMTTLELGLDLAADAPHADRCGSCDRCQVACPTAAFPAPYRLDARRCISYLTIEHKGPVPDEFRAALGNRIYGCDDCLAACPWNRFAAVAQAMQAFRPRAELAAPRLADLLALDDAAFRAVFSGSPIKRIGRDRFVRNCLYAAGNSGDAALRPAVAALAGDPDPGVADAAAWALARLAERTAASTH

SEQ ID NO: 74392 - protein, 364 aa, Unknown
  misc_feature (1)..(364): tr|A0A1V1PJH8|A0A1V1PJH8_9PROT Epoxyqueuosine (OQ) redu ctase QueG OS=alpha proteobacterium U9-1i OX=1605283 GN =U91I_00131 PE=4 SV=1
MRDRLIAQARVLGFDAIGVADARAEWPADAWLKEFLREGRQGDMDWLGSERRAHPNALWPEAKSAILVGQSYAPEDDALALLGETQSGLVSAYAARRDYHDVVKGKLKQLAQWLARESGQDVKVFVDTAPLMEKPLAARAGLGWQGKHTNLVSREHGSWLFLGAILSAAEIETDTPHEDHCGSCRACLDICPTNAFPAPYKLDARRCLAYLTIEHKGQIAREFREPLGNRVFGCDDCLAACPWNKFAQTSREQRLAMKQELRLAPLSELAALDDAQFRLRFAGTPVKRTGRDRFVRNVVCAIGNSGDAALAPAAEALLDDASPLVRGMAVWALSRLLDGPAFERLKSARASQERDVSVREEWGP

SEQ ID NO: 74393 - protein, 188 aa, Alphaproteobacteria bacterium
  misc_feature (1)..(188): tr|A0A351T2G5|A0A351T2G5_9PROT tRNA epoxyqueuosine(34) reductase QueG (Fragment) OS=Alphaproteobacteria bacter ium OX=1913988 GN=queG PE=4 SV=1
MVSRLRAEADAAGFAAFGIADPAAIAEDGARFRTFLVLGRQGEMAWLAAKADRRADPFTLWPDVRSVIMLGMNYAPARNPMEKLAHRSAGNISCYAQGRDYHIIVKKRLKKVAGWLHRETGAEVKVFVDTAPVLEKPLARAAALGWQGKHTNLVSRQFGSWLFLGAIFTTLPLTPDNPEPDHCGSCRA

SEQ ID NO: 74394 - protein, 371 aa, Alphaproteobacteria bacterium
  misc_feature (1)..(371): tr|A0A424SWV8|A0A424SWV8_9PROT tRNA epoxyqueuosine(34) reductase QueG OS=Alphaproteobacteria bacterium TMED93 OX=1986648 GN=queG PE=4 SV=1
MSDIFLNEIEEYSKSLGFQDFKVTNFKDFSIYSNNLREFIKNKFYGEMGWIKEKSLIRENPKNIWLDAKSALVFGLNYGPATNPLLEIKNRNTGYISIYARRKDYHKVIKTKLKSIGRFISNNSDIKVKVFVDTAPIMEKPLAELSNMGWIGKHTNLVSKKYGSWLFLGIILTNYSFKKIKKDKKNNCGSCKACNEVCPTNAFISPYKLDARKCISYLTIEHKSHIKKKYRPLIGNRIFGCDDCLAVCPWNKFARTHSDIKLDINKNLVLQPLKSLVNLDEESFRKKFSGTPVRRLGYDRFLRNILIAIGNSGDKSLVESTVSKLEHNSNLVRAMAVWALFQLSINRFKEEKKLRFEREKDSRVREEWNIR

SEQ ID NO: 74395 - protein, 382 aa, Alsobacter sp.
  misc_feature (1)..(382): tr|A0A2T1HNW9|A0A2T1HNW9_9RHIZ Epoxyqueuosine reductase OS=Alsobacter sp. SH9 OX=2109933 GN=queG PE=3 SV=1
MSGDRLKARLLADAAREGFDAVGVTTPDAIPDAPARLAEALAQGWHAGMDWLAETPERRASPAGLWPDVRSVVLLGTSYAPEEDPLAGLAHPDRAVISVYARSRDYHDVIKGKLKQVAGRFAAAAGADVKVFVDTAPVMEKPLAAAAGLGWQGKHSVLVSRRHGSWLFLGAIYTTAALPPDAPEPDHCGSCRRCLDICPTDAFPAPYRLDAGRCISYLTIEHKGPIPHELRTGVGNRVFGCDDCLAVCPWNKFAQAGREAKLRAREDLANPPLAELARLDDAAFRLRFAGTPVKRTGRDRFVRNVLVAVGNSGDAALAREAEALLSDASPLVRGAAIWALGRLAPDRLAAARRELEPAEADPDVVAEWRLAGGGPAERSNAS

SEQ ID NO: 74396 - protein, 357 aa, Altererythrobacter aquimixticola
  misc_feature (1)..(357): tr|A0A4T3EY77|A0A4T3EY77_9SPHN Epoxyqueuosine reductase OS=Altererythrobacter aquimixticola OX=2489173 GN=queG PE=3 SV=1
MVKDASIATLQDGLRAKAAELGFACVGFAPAEDDPLRAERLHDWLGAGFHATMGWMQDRADVRQGPQSMWPEAQSVIALGMSYAPDGDPLALEGDAEKARISVYAQGRDYHDVVKKAEKALARWLVAEAEGMGLEVALKVFVDTAPVMEKPLGESAGIGWQGKHTNLVSREHGSWLFLGAIYCTLPFVPDEPHDDRCGSCRACQDACPTNAFPRPYQLDARRCISYLTIEHKGPIPEEFREGMGNRIYGCDDCLAVCPWNKFADTAARHQAFVAREELVEPNLAELLALDDAGFRTKFSGSPIKRIGRDRFVRNCLIAAGNSGNAELLPAVSALANDEDGVVAEAAGWAATKLTVIP

SEQ ID NO: 74397 - protein, 357 aa, Altererythrobacter atlanticus
  misc_feature (1)..(357): tr|A0A0F7KRS7|A0A0F7KRS7_9SPHN Epoxyqueuosine reductase OS=Altererythrobacter atlanticus OX=1267766 GN=queG PE =3 SV=1
MIRGPDLVDLKARLVDQARLLGFATIGFAPAADNPEQARRLREWLDAGMHGEMQWMEDRADVRQGPQSMWPDAQSVLALGMSYAPDCDPLALEGDAERARISVYAQGRDYHDVVKKALKALARWLVAEAEKIGLEVQLKVFVDTAPVMEKPLGQAAGIGWQGKHTNLVSREHGSWLFLGAIYTTLPFPPDEAHPDRCGNCTACQQACPTNAFPEPYRLDARRCISYLTIEHKGPIPHEFREAMGNRIYGCDDCLAVCPWNKFAGTAARHKALAPREELAAPHLAELLALDDPAFRQKFSGSPIKRVGRDRFVRNCLIAAGNSGNPDLAGPVRALLDDPDPVVAEAARWAVARLTASL

SEQ ID NO: 74398 - protein, 351 aa, Altererythrobacter dongtanensis
  misc_feature (1)..(351): tr|A0A1B2A9S4|A0A1B2A9S4_9SPHN Epoxyqueuosine reductase OS=Altererythrobacter dongtanensis OX=692370 GN=queG P E=3 SV=1
MVNALVSSDLRPRLIERARAEGFVAVGVAPASLDRGDALRAWLAEGAHGSMEWMEQRVAERASPQGLWPAARSVIALGMSYTPENDPLALEGQTDRGRISVYAQARDYHDTVKKALKRLARWLVAEAPGAEVKVFVDTAPVMEKPLGEAAGIGWQGKHTNLVSRDHGSWLFLGAIYTTIEFAPDAPHGDRCGSCDACQRACPTDAFPSPYRLDARRCISYLTIEHAGPIPVEFRKAIGNRVYGCDDCLAVCPWNKFADAAAANRAFLPRAELAAPRLEELLALDDAGFRALFSGSPIKRIGRGRFVRNCLIAAGNSADGRLLPQVRTLTQDADPVVAEAAQWAVKELTAAP

SEQ ID NO: 74399 - protein, 352 aa, Altererythrobacter epoxidivorans
  misc_feature (1)..(352): tr|A0A0M4LX37|A0A0M4LX37_9SPHN Epoxyqueuosine reductase OS=Altererythrobacter epoxidivorans OX=361183 GN=queG PE=3 SV=1
MVNTATKLSLAGRIEEEARRLGFVSFGVTSASEDPVRSQRLEEWLDEGRHASMEWMENRKDQRASPQTLWPDARSVIALGMSYAPAQDPLALADAADRARISVYAQGKDYHDTVKKRLKALARWMVAEWPESELKVFVDTAPVMEKPLGEASGLGWQGKHTNLVSREHGSWLFLGAIYTTLDLEPARPHRDLCGSCDACQRACPTDAFPRPYQLDARRCISYLTIEHKGPVPEEFRAGLGNRIYGCDDCLAVCPWNKFAETAHRHRDFIPRAELTAPRLAELLALDDAGFRQFFSGSPIKRIGRDRFVRNCLYAAGNSGDVRLLDQVDLLRADPDPVVADAAAWAADRLRTS

SEQ ID NO: 74400 - protein, 353 aa, Altererythrobacter ishigakiensis
  misc_feature (1)..(353): tr|A0A562UT60|A0A562UT60_9SPHN Epoxyqueuosine reductase OS=Altererythrobacter ishigakiensis OX=476157 GN=queG PE=3 SV=1
MVNAASKSDLKARIAAEAERLGFAAFGVTDATDDPLRAKRLHQWLGAGHHASMEWMETRADVRHGPQSLWPEAKSVIALGMSYAPADDPLALEAHPEKARISVYARGKDYHDTVKKKLKALARWMVEHEPDNELKVFVDTAPVMEKPLGEAAGIGWQGKHTNLVSCSHGNWLFLGAIYTTLELKPDNPHSDRCGSCKACQVACPTDAFPAPYQLDARRCISYLTIEHKGPIAEEFREALGNRIYGCDDCLAVCPWNKFAETAASNRDFLPRAELVAPRLNELLDLNDAGFRQLFSGSPIKRIGRDRFIRNCLYAAGNSGDATLLAHAEALQNDPNPAVADAARWAITKLRAVP

SEQ ID NO: 74401 - protein, 353 aa, Altererythrobacter marensis
  misc_feature (1)..(353): tr|A0A2W4YUL2|A0A2W4YUL2_9SPHN Epoxyqueuosine reductase OS=Altererythrobacter marensis OX=543877 GN=queG PE=3 SV=1
MVNAAANPALQQRLRDEARRLGFVAVGFTDAADDPLRARRLHQWLGEGHNGAMGWMATRAHQRQGPQSLWPAARSVIALGMAYTPGGDPLALADHPERARISVYAQGRDYHDTVKKALKALARWLVAEAPDTELKVFVDTAPVMEKPLGEAAGIGWQGKHTNLVSREHGSWLFLGAIYTTIAFAPDKPHRDLCGSCRACQDACPTAAFPTPYRLDARRCLSYLTIEHSGPIPEEFRAALGNRIYGCDDCLAVCPWNKFADAAARHRAFLPRAELVAPRLAELLALDDAGFRRLFAGSPVKRIGRNRFVRNCAIAAGNSGDVALRAPLSALTSDVDPVVAEAARWALTRLPAAS

SEQ ID NO: 74402 - protein, 353 aa, Altererythrobacter marensis
  misc_feature (1)..(353): tr|A0A0G3XA29|A0A0G3XA29_9SPHN Epoxyqueuosine reductase OS=Altererythrobacter marensis OX=543877 GN=queG PE=3 SV=1
MSNARENAALRGDLLAEARRLGFVAVDIAPATDDPERARRLREWIAAGHHGTMGWMEDRAEVRQGPQAMWPEAKSVIALGMSYAPAHDPLALEGDAERARISVYAQGRDYHDTVKKAAKALARWLASRAPDARLKVFVDTAPVMEKPLGEAAGIGWQGKHTNLVSREHGSWLFLAAIYTTLELDPAEPHGDNCGSCRACQDACPTDAFPEPYRLDARRCISYLTIEHKGPIPHEFRKAIGNRIYGCDDCLAVCPWNKFADSAARNRAFLPRAELVAPRLAELLALDDPGFRQLFSGSPIKRIGRNRFVRNCLIAAGNSGNPALAGAVRALADDPDPVVAEAAEWAARELTPAP

SEQ ID NO: 74403 - protein, 352 aa, Altererythrobacter namhicola
  misc_feature (1)..(352): tr|A0A1C7D5Y7|A0A1C7D5Y7_9SPHN Epoxyqueuosine reductase OS=Altererythrobacter namhicola OX=645517 GN=queG PE=3 SV=1
MARNQPIAALQEALREKARELGFVAVGFTHAADDPERARRLHEWLEAGHHGDMAWMEDRADVRQGPASMWPEAKSVIALGMAYTPDADPLALEGDGAKARISVYAQGRDYHDTVKKALKALARWLVEQAPETQLKVFVDTAPVMEKPLGQAAGIGWQGKHSNLVSREHGSWLFLGAIYTTLAFEPDAAEADHCGSCTACHQACPTDAFPQPYVVDARRCISYLTIELKGPIPHEFREAMGNRIYGCDDCLAVCPWNKFADSAARHKAFVPREELVAPDLAALLALDDAGFRQKFSGSPIKRIGRDRFVRNCLVAAGNSGNGALLAMVETLRDDPDPVVAEAADWAAARLSEA

SEQ ID NO: 74404 - protein, 344 aa, Altererythrobacter sp.
  misc_feature (1)..(344): tr|A0A2E1Y6C2|A0A2E1Y6C2_9SPHN Epoxyqueuosine reductase OS=Altererythrobacter sp. OX=1872480 GN=queG PE=3 SV=1
MQNALRAEARELGFAACGFAPAGEEPRRTARFEEWLADGRHGSMEWMESRKVQRASPQGLWPEAKSVIALGMSYAPDVDPLALEGDPEKARISVYAQGRDYHDVVKKALKALARWLIAREPDSELKVFVDTAPVMEKPLGEAAGIGWQGKHTNLVSRKHGSWMFLGAIYSTIEFTPDEPHRDMCGSCRNCQDACPTNAFPAPYQLDARRCISYLTIEHKGPIPEEFRESLGNRIYGCDDCLAVCPWNKFADTAHRHIKLAPRQELAAPQLARFLEFDDAGFRQFFSGSPIKRVGRDRFVRNCLYAAGNSGNGALKAQVESLKADPDPAVAEAAIWAAGKLSPFP

SEQ ID NO: 74405 - protein, 353 aa, Altererythrobacter sp.
  misc_feature (1)..(353): tr|A0A316JV39|A0A316JV39_9SPHN Epoxyqueuosine reductase OS=Altererythrobacter sp. XM-24bin4 OX=2133952 GN=queG PE=3 SV=1
MVNTAANLRLKARIAEQAKSLGFAAFGVTTAQDDPIRADRLEQWLGEGHHGSMEWMEARSDVRRGPQSLWPEAKSVIALGMSYVPADDPLALEAHPEKARISVYARGKDYHDTVKKRLKALARWMVEQEPESELKVFVDTAPVMEKPLGEAAGIGWQGKHTNLVSRDHGNWLFLGAIYTTLELEPDAPHENRCGSCNACQTACPTDAFPAPYTLDARRCISYLTIEHKGPIAEEFREALGNRIYGCDDCLAVCPWNKFAETAATHRDFLPRAELVAPRLAELLALDDAGFCRLFAGSPIKRIGRDRFVRNCLYAAGNSGDASLIARIGSLRNDPDPAVAEAADWATEKLTTAL

SEQ ID NO: 74406 - protein, 353 aa, Altererythrobacter xiamenensis
  misc_feature (1)..(353): tr|A0A1Y6F202|A0A1Y6F202_9SPHN Epoxyqueuosine reductase OS=Altererythrobacter xiamenensis OX=1316679 GN=queG P E=3 SV=1
MVNAAATNELRTALLAEAKRLGFVAVGFAPAAEDPLRAERLEQWLAEGNHGTMEWMEARADVRRSPHAMWPEAQSVIALGMSYAPADDPLALEAHPDRARISVYARGKDYHDTVKKRLKALARWLVERAPDSELKVFVDTAPVMEKPLGEAAGIGWQGKHTNLVSRDHGSWLFLGAIYTTIRFAPDEPHDDRCGSCNACQMACPTDAFPAPYRLDARRCISYLTIEHKGPIAEEFRAALGNRIYGCDDCLAVCPWNKFAQTAQAHRDFLPRGELTAPRLADLLTLDDAGFRQFFSGSPIKRIGRDRFVRNCLYAAGNSGDRSLLGQVEPLLGDPDPVVAEAARWALSQLRAVP

SEQ ID NO: 74407 - protein, 384 aa, Alteribacillus bidgolensis
  misc_feature (1)..(384): tr|A0A1G8MY10|A0A1G8MY10_9BACI Epoxyqueuosine reductase OS=Alteribacillus bidgolensis OX=930129 GN=queG PE=3 S V=1
MTGAQLKEKIMAYSKDIGIDKIGFASADPFLSLKDRLHEQQRLNYQSGFEEKDIEKRVTPAKLLPEAKTIVAIALAYPSKMKNPPKSTKGDRRGVFCRASWGEDYHRVLKDRLQKLEEYMLELVPGARCQSMVDTGELSDRAVAERAGIGWSGKNCAIITPEFGSYVYLGEMVTTISLPPDNPITEQCGTCNKCVDACPTGALVQGGQLDSNKCIAYLTQTKDFLPERYRKKLGNRLYGCDTCQQVCPENKGMDFHHQEEFEPDPDTVKPKLLPLLELSNKEFKQKYGRLAGSWRGKKPIQRNAIIALGHFKAEESIETLDQLLNNDPRPVIRGTAAWSLGQINTKRTITLLEKAKGYETEGEVLKEIENALNQIAEDQMLSSK

SEQ ID NO: 74408 - protein, 383 aa, Alteribacillus iranensis
  misc_feature (1)..(383): tr|A0A1I2FKH9|A0A1I2FKH9_9BACI Epoxyqueuosine reductase OS=Alteribacillus iranensis OX=930128 GN=queG PE=3 SV= 1
MTNVELKEKIIEYSKEIGIDKIGFASADPFLTLKDRLLEQQRLQYQSGFEEKDIDKRVTPKKLLPEAKTIIAIALAYPSKMKNEPKNKKGERRGRFCRASWGEDYHRVLQNRLEKLEDYIMSLVPEAACKSMVDTGELSDRAVAERAGIGWSGKNCAIITPEFGSYVYLGEMITTLSLPPDTPITDQCGTCNKCVEACPTDALVQGGQLNSNKCIAYLTQTKDFLPKQYRKQIGNRLYGCDTCQQVCPENKGRDIHSNEEFEPDPDIVKPLLIPILQLSNREFRENYGPLAGSWRGKKPIQRNAIIALGNYKEESAIEVLEDLLLHDPRPIIRGSAAWALGQINTERSALSLYRAKETEKDSDIVKEINEALDYITSEVRYAK

SEQ ID NO: 74409 - protein, 378 aa, Alteribacillus persepolensis
  misc_feature (1)..(378): tr|A0A1G8D8H8|A0A1G8D8H8_9BACI Epoxyqueuosine reductase OS=Alteribacillus persepolensis OX=568899 GN=queG PE=3 SV=1
MTAAQLKEKIIAYSKDIGIDKIGFTSADPFLSLKDRLLEQQRLQYQSGFEENDIEKRTTPKKLVPEAKTIISIALAYPSKMKNPPKSRKGERRGVFCRASWGEDYHRVLKNRLQKLEAYIQELVPEAKCQSMVDTGELADRAVAERAGIGWSGKNCAIITPEFGSYVYLGEMITTVSIPADTPVTEQCGTCNKCVDACPTGALVQGGQLDSNKCIAYLTQTKDFLPKRYRKKLGNRLYGCDTCQQVCPENKGVDSHRHEEFEPDPELVKPKLMPLLELSNKEFKQKYGRLAGSWRGKKPIQRNAVIALGHFKAEESIELLSRLLTNDPRPVIRGTAAWSLGQMNTADTQKLLEQAKQSETDEKVLEEIDDALLPFPLH

SEQ ID NO: 74410 - protein, 380 aa, Alteromonadaceae bacterium
  misc_feature (1)..(380): tr|A0A2D9RZ81|A0A2D9RZ81_9ALTE Epoxyqueuosine reductase OS=Alteromonadaceae bacterium OX=1916082 GN=queG PE=3 SV=1
MSTLQSIDLVNLVDDIKAWAVALGFQQVGISDIDLSQHEYALQQWLDNQYHGEMDYMASHGMKRARPAELVPGTVRVISVRMDYLPPDASFARHLKDGDIAYISRYALGRDYHKVLRKKLKQLGEQISERLAGTQYRPFVDSAPVLEHAIAEKAGLGWTGKHSLTLNKQAGSWFFLGELFINLPLPVDEPVEEHCGTCTACMTMCPTQAIVAPYQVDARRCISYLTIESNGVIPEELRAAMGNRIYGCDDCQLVCPWNRYAPVTAESDFHPRQVLHGQSLLTLFDWDEKTFLQNTEGSPIRRIGYAKWQRNLCVAIGNAPYSEDYVAALNAARDEACELVLPHLDWALEQQQGKQQASSSENRQLARLTRTIEKGLPRDA

SEQ ID NO: 74411 - protein, 380 aa, Alteromonadaceae bacterium
  misc_feature (1)..(380): tr|A0A424TUX3|A0A424TUX3_9ALTE Epoxyqueuosine reductase OS=Alteromonadaceae bacterium TMED7 OX=1986650 GN=queG PE=3 SV=1
MSTLQSIDLVNLVDDIKAWAVALGFQQVGISDIDLSQHEYALQQWLDNQYHGEMDYMASHGMKRARPAELVPGTVRVISVRMDYLPPDASFARHLKDGDMAYISRYALGRDYHKVLRKKLKQLGEQISERLAGTQYRPFVDSAPVLEHAIAEKAGLGWTGKHSLTLNKQAGSWFFLGELFINLPLPVDEPVEENCGTCTACMTMCPTQAIVAPYQVDARRCISYLTIEYNGVIPEDLRPAMGNRIYGCDDCQLVCPWNRFAPVTAESDFHPRQVLHGQSLLTLFGWDEKTFLHNTEGSPIRRIGYAKWQRNLCVAIGNAPYSEEYITALNAAKDEACELVLPHLEWALAQQHRKHQANSDENRQLARLTRTIEKGLPRDA

SEQ ID NO: 74412 - protein, 375 aa, Alteromonadales bacterium
  misc_feature (1)..(375): tr|A0A2N0WTM0|A0A2N0WTM0_9GAMM Epoxyqueuosine reductase OS=Alteromonadales bacterium alter-6D02 OX=2058087 GN= queG PE=3 SV=1
MNESICYQQLAQQIEQWAIDLGFTGFGICDTDLSQHEAAFQQWLDNGYHGGMEYMARHGMMRARPNELLPGTLRVISVRLDYLPPDALIVSTMKEPTNAYISRYATGRDYHKIMRNRLKKLQQKIETQVEGLIARPFVDSAPILERPLAEKAGLGWVGKHTLILNQDVGSFFFLGELLVSIPLPVSEPVKEQCGSCVACITICPTQAIVEPYVVDGRRCLSYITIEKFGEIPVEFRKAMGNRIYGCDDCQLICPWNKFAQASSEDDFKPRKDLHSPQLLSLFSWDEATFLKRTEGSPIRRIGHERWLRNIAVALGNAPYEEAIVQALKDKREEVSELVQEHIDWAIAQQQEKTNSINRKTLRMLKAVERGMPAHQ

SEQ ID NO: 74413 - protein, 376 aa, Alteromonadales bacterium
  misc_feature (1)..(376): tr|A0Y531|A0Y531_9GAMM Epoxyqueuosine reductase OS=Alte romonadales bacterium TW-7 OX=156578 GN=queG PE=3 SV=1
MSNLTPDYPKLAQQIKAWGKELGFSEVGITDIDLSKHEQQLQRWLDAGFHGSMDYMAAHGMKRARPDELIPGTQRVISVKMNYLPPDAGFAKTLKNKQKAYISRYALGRDYHKLIRNRLKKLGQKIEQEVGEYGFRPFVDSAPVLERQLAEKAGLGWRGKHSLLINKEAGSWFFLGELFIDLPLPIENENTFEGCGKCVACITLCPTGAIVEPYVVDARKCISYLTIEHQGPIPEQYRALLGNRVYGCDDCQLVCPWNRYGQITDERDFHPRTQLKDKDLLELFSWDETTFLKNTEGSPIRRIGHERWLRNLAVGLGNANFDPDIISALEQKIDGCSDLVKEHIQWALEQQNNKQPSLRKTQRLIRIVEKGLPRDA

SEQ ID NO: 74414 - protein, 381 aa, Alteromonas aestuariivivens
  misc_feature (1)..(381): tr|A0A3D8M8U3|A0A3D8M8U3_9ALTE Epoxyqueuosine reductase OS=Alteromonas aestuariivivens OX=1938339 GN=queG PE=3 SV=1
MSTIDSIDLNRLVKDIKAWGQALGFQQVGISDIDLSQHEHHLNNWLAEGYHGQMHYMASHGSKRARPAELVPGTVRVISVRMDYLPPDASFAKHLSSAQTAYISRYALGRDYHKVLRNRLKQLGEKITQSLQQTQYRPFVDSAPVLEHAIAQKAGLGWTGKHTLTINRQAGSWFFLGELFVNLPLPVDNPVEEGCGSCTACLTICPTQAIVAPYKVDARRCISYLTIEYDGVIPEELRSAMGNRIYGCDDCQLICPWNRYANLSEEPDFHPRKALHGQSLTDLFRWTEEDFLHNTQGSPIRRIGFVKWQRNLTVAMGNAEYSEEIIFLLKERRSEAPELVQTHIDWAIAQQMKKYENRSPVPNRQTQRLVRAVQKGLPRDA

SEQ ID NO: 74415 - protein, 386 aa, Alteromonas australica
  misc_feature (1)..(386): tr|A0A353JK90|A0A353JK90_9ALTE Epoxyqueuosine reductase OS=Alteromonas australica OX=589873 GN=queG PE=3 SV=1
MSKIHSIDLIQLSNDIKAWGRTLGFQDVGICDIDLSKHEKPLREWLDKGYHGSMHFMESHGMKRARPDELVPGTLRVISVRMNYLPPDASFASHLNDPDIGYISRYALGRDYHKVLRKKLKQLGEKIAHAIANSDIEHQYRPFVDSAPVLEHALAEKAGIGWTGKHSLTLNKDAGSWFFLGELFTNLPLPIDAPAEPACGTCNACMTMCPTNAIVAPYTVDAKRCISYLTIELDDDIPEALRPLMGNRIYGCDDCQLVCPWNRYADITEESDFYPRQVLHGKRLIDLFAWSEATFLRHTEGSPIRRIGYEKWQRNIAVALGNAPYSSEIVDALQQALKKVSDRVDRHIQWAIAQQLARKSNLGKDTPLRQQDRLIRIVQKGLPRDA

SEQ ID NO: 74416 - protein, 386 aa, Alteromonas australica
  misc_feature (1)..(386): tr|A0A075P0D3|A0A075P0D3_9ALTE Epoxyqueuosine reductase OS=Alteromonas australica OX=589873 GN=queG PE=3 SV=1
MSKIHSIDLIQLSNDIKAWGRTLGFQDVGICDIDLSKHEKPLREWLDKGYHGSMHFMESHGMKRARPDELVPGTLRVISVRMNYLPPDASFASHLNDPDIGYISRYALGRDYHKVLRKKLKQLGEKIAHAIANSDIEHQYRPFVDSAPVLEHALAEKAGIGWTGKHSLTLNKDAGSWFFLGELFTNLPLPIDAPAEPACGTCNACMTMCPTNAIVAPYTVDAKRCISYLTIELDDDIPEALRPLMGNRIYGCDDCQLVCPWNRYADITEESDFYPRQVLHGKRLIDLFAWSEATFLSHTEGSPIRRIGYEKWQRNIAVALGNAPYSSEIVDALQQALKKVSDRVDRHIQWAIAQQLARKSNLGKDTPLRQQDRLIRIVQKGLPRDA

SEQ ID NO: 74417 - protein, 379 aa, Alteromonas confluentis
  misc_feature (1)..(379): tr|A0A1E7Z9E4|A0A1E7Z9E4_9ALTE Epoxyqueuosine reductase OS=Alteromonas confluentis OX=1656094 GN=queG PE=3 SV= 1
MSALQSIDLNRLTDDIKAWGRALGFQQVGISDVDLSQHEDKLLEWLNNGYHGSMDYMAAHGLKRARPAELVPGTVRVISVRMNYLPPDASFARHLSDDKIGYISRYALGRDYHKVLRNRLKQLGEKIKAELADTEYRPFVDSAPVLEHAIAEKAGIGWTGKHSLTLNKEAGSWFFLGELFINLPLPVDEAVEEGCGSCTACLTICPTQAIVAPYTVDARKCISYLTIENDGPIPEDLRPLMGNRIYGCDDCQLVCPWNRYGNITEEKDFFPRSQLHGETLVNLFNWDETTFLKNTEGSPIRRIGHARWLRNIAVAMGNAAADGSILSALESRSGQVSELVQEHIDWAIDQQKNKNAAYDDNRQKQRLIRVIQKGLPRDA

SEQ ID NO: 74418 - protein, 380 aa, Alteromonas lipolytica
  misc_feature (1)..(380): tr|A0A1E8F9A2|A0A1E8F9A2_9ALTE Epoxyqueuosine reductase OS=Alteromonas lipolytica OX=1856405 GN=queG PE=3 SV=1
MSTLQSIDLVNLVDDIKAWAVALGFQQVGISDIDLSQHEYYLQQWLNNNYHGEMDYMASHGMKRARPDELVPGTLRVISVRMDYLPPDASFAKHLKDGHTGYISRYALGRDYHKVLRKKLKQLGEQISQHLATTAYRPFVDSAPVLEHAIAEKAGIGWTGKHTLTLNKQAGSWFFLGELFINLPLPVDEPAQENCGTCNACITMCPTQAIVAPYQVDARRCISYLTIEYNGIIPESLRPAMGNRIYGCDDCQLVCPWNRYAPLTSESDFHARGVLHGQSLLTLFRWDEDTFLRHTEGSPIRRIGFAKWRRNLCVAIGNAPFATDYLTALDEAEETACELVRPHLLWARQQQISKQHAALTTNRQVARLTRSIEKGLPRDA

SEQ ID NO: 74419 - protein, 380 aa, Alteromonas macleodii
  misc_feature (1)..(380): tr|A0A1E7D8N5|A0A1E7D8N5_ALTMA Epoxyqueuosine reductase OS=Alteromonas macleodii OX=28108 GN=queG PE=3 SV=1
MSEFSSIDLVELTNNIKAWGTALGFQQVGISDIDLHQHEAHLQEWLDNGYHGDMAFMESHGMKRARPDELVPGTLRVISVRMNYLPPDASFAKHLKTPEIGYISRYALGRDYHKVLRKRLKQLGEKITASLAHTQYRPFVDSAPVLEHAIAEKAGIGWTGKHSLTLNKEAGSWFFLGELFINLPLPTDSPIEEGCGTCTACLTICPTNAIVAPYKVDARRCISYLTIESDKDIPEELRPMMGNRIYGCDDCQLVCPWNRFADVTSEEDFHPRQVLHGQSLNALFGWSEETFLRNTEGSPIRRIGFEKWQRNIAVALGNAPYDEQSILLLKERRGSVSDLVDRHIDWALKRQQEKQQASDAKNRQQARLIRVIEKGLPRDA

SEQ ID NO: 74420 - protein, 380 aa, Alteromonas macleodii
  misc_feature (1)..(380): tr|K0D5I4|K0D5I4_ALTMS Epoxyqueuosine reductase OS=Alte romonas macleodii (strain Black Sea 11) OX=1004785 GN=q ueG PE=3 SV=1
MSEISSIDLVELTNNIKAWGTALGFQQVGISDIDLHQHEAHLKEWLDNGYHGDMAFMESHGMKRARPDELVPGTLRVISVRMNYLPPDASFAEHLKKPEIGYISRYALGRDYHKVLRKRLKQLGEKITASLARTQYRPFVDSAPVLEHAIAEKAGIGWTGKHSLTLNKEAGSWFFLGELFINLPLPVDSPIEEGCGSCTACLTICPTNAIVAPYKVDARRCISYLTIESDKDIPEALRPMMGNRIYGCDDCQLVCPWNRFADVTSEEDFHPRQVLHGQSLNALFSWSEEAFLRNTEGSPIRRIGFEKWQRNIAVALGNAPYSEESILLLKERRGCVSDLVDRHIDWALEQQQEKQQATDVKNRQQARLIRVIEKGLPRDA

SEQ ID NO: 74421 - protein, 380 aa, Alteromonas marina
  misc_feature (1)..(380): tr|A0A0B3Z1D4|A0A0B3Z1D4_9ALTE Epoxyqueuosine reductase OS=Alteromonas marina OX=203795 GN=queG PE=3 SV=1
MSEFSSIDLVELTNNIKAWGTALGFQQVGISDIDLHQHEAHLQEWLDNGYHGDMAFMESHGMKRARPDELVPGTLRVISVRMNYLPPDASFAKHLKKPEIGYISRYALGRDYHKVLRKRLKQLGEKITASLAHTQYRPFVDSAPVLEHAIAEKAGIGWTGKHSLTLNKEAGSWFFLGELFINLPLPTDSPIEEGCGTCTACLTICPTNAIVAPYKVDARRCISYLTIESDKDIPEGLRPMMGNRIYGCDDCQLVCPWNRFADVTSEEDFHPRQVLHGQSLNALFGWSEETFLRNTEGSPIRRIGFEKWQRNIAVALGNAPYDEQSILLLKERRGSVSDLVDRHIDWALKRQQEKQQASDAKNRQQARLIRVIEKGLPRDA

SEQ ID NO: 74422 - protein, 380 aa, Alteromonas mediterranea
  misc_feature (1)..(380): tr|A0A1J0SV60|A0A1J0SV60_9ALTE Epoxyqueuosine reductase OS=Alteromonas mediterranea OX=314275 GN=queG PE=3 SV= 1
MSEINSIDLRELTNNIKAWGTALGFQQVGISDIDLHQHEAHLQAWLDKGYHGDMAYMESHGMKRARPAELVPGTLRVISVRMNYLPPDASFAQHLKAPHIGYISRYALGRDYHKVLRKRLKQLGEKITASLADTQYRPFVDSAPVLEHAIAEKAGIGWTGKHSLTLNKDAGSWFFLGELFINVPLPVDSPIEEGCGSCTACLTICPTNAIVEPYKVDGRKCISYLTIESDKDIPEELRPLMGNRIYGCDDCQLVCPWNRFANITEEEDFHPRTVLHGQSLNTLFSWSEETFLQNTEGSPIRRIGFQKWQRNIAVALGNAPYNEESIQLLKERYGTVSELVDRHIDWALQQQQKKQAAYEAQNRQQQRLIRVIEKGLPRDA

SEQ ID NO: 74423 - protein, 380 aa, Alteromonas mediterranea
  misc_feature (1)..(380): tr|S5C721|S5C721_9ALTE Epoxyqueuosine reductase OS=Alte romonas mediterranea UM7 OX=1300258 GN=queG PE=3 SV=1
MSEINSIDLRELTNNIKAWGTALGFQQVGISDIDLHQHEAHLQAWLDKGYHGDMAYMESHGMKRARPAELVPGTLRVISVRMNYLPPDASFAQHLKAPHIGYISRYALGRDYHKVLRKRLKQLGEKITASLADTQYRPFVDSAPVLEHAIAEKAGIGWTGKHSLTLNKDAGSWFFLGELFINVPLPVDSPIEEGCGSCTACLTICPTNAIVEPYKVDGRKCISYLTIESDKDIPEELRPLMGNRIYGCDDCQLVCPWNRFANITEEEDFHPRTVLHGQSLNTLFSWSEETFLQNTEGSPIRRIGYQKWQRNIAVALGNAPYNEESIKLLKERHGTVSELVDRHIDWALQQQQKKQAAYEAQNRQQQRLIRVIEKGLPRDA

SEQ ID NO: 74424 - protein, 383 aa, Alteromonas naphthalenivorans
  misc_feature (1)..(383): tr|F5Z6F6|F5Z6F6_ALTNA Epoxyqueuosine reductase OS=Alte romonas naphthalenivorans OX=715451 GN=queG PE=3 SV=1
MSTINSIDLIQLTQDIKAWGRALGFQQVGISDIDLHQHEAHLTQWLENDYHGDMAFMANHGMKRARPDELVPGTLRVISVRMNYLPPDASFAKHLSQPDTGYISRYALGRDYHKVLRKRLKQLGEKITGALSNTEYRPFVDSAPVLEHAIAEKAGIGWTGKHSLTINKEAGSWFFLGELFINLPLPIDSPLEEGCGTCTACLTICPTNAIVAPYKVDARRCISYLTIESDKDIPEDLRPLMGNRIYGCDDCQLICPWNRYADITEEEDFHPRKVLHGQSLTTLFSWDEATFLNNTEGSPIRRIGFEKWQRNIAVALGNANYSEQTVNALQTNLGKVSDKVDRHISWALAQQENKKAGLALEEKANRQQKRLTRAVEKGLPRDA

SEQ ID NO: 74425 - protein, 381 aa, Alteromonas pelagimontana
  misc_feature (1)..(381): tr|A0A2A6B0X0|A0A2A6B0X0_9ALTE Epoxyqueuosine reductase OS=Alteromonas pelagimontana OX=1858656 GN=queG PE=3 S V=1
MSKISSLDLIRLVDDIKAWGKALGFQQVGISDIDLSKHEVYLNQWLENGFHGDMHFMAAHGTKRARPAELVPGTLRVISVSMDYLPPDASFARHLGNDSIAYISRYALGRDYHKVLRKKLKQLGDKITSALSTTEFRPFVDSAPVLEHAIAEKAGLGWTGKHSLTLNRQSGSWFFLGELFINLPLPVDSPVEEGCGSCTACMTICPTQAIVAPYTVDARKCISYLTIEHDGEIPEKLRPLMGNRIYGCDDCQLVCPWNRFASITEQEDFHPREMLHGQSLVTLMEWDEETFLRNTEGSPIRRIGWAKWQRNIAVAMGNASYDEQIIASLKKAAVKANEIVRLHIEWALTQQHQKQATNKQTTSRQTLRLTRVIEKGLPRDA

SEQ ID NO: 74426 - protein, 380 aa, Alteromonas sp.
  misc_feature (1)..(380): tr|A0A2D5LHI8|A0A2D5LHI8_ALTSX Epoxyqueuosine reductase OS=Alteromonas sp. OX=232 GN=queG PE=3 SV=1
MSTLQSIDLVNLVDDIKAWAVALGFQQVGISDIDLSQHEYALQQWLDNQYHGEMEYMASHGMKRARPAELVPGTVRVISVRMDYLPPDASFARHLKDGDIAYISRYALGRDYHKVLRKKLKQLGEQISERLADTQYRPFVDSAPVLEHAIAEKAGLGWTGKHSLTLNKQAGSWFFLGELFINLPLPVDEPVEENCGTCTACMTMCPTQAIVAPYQVDARRCISYLTIEYNGVIPEELRAPMGNRIYGCDDCQLVCPWNRFAPLTAESDFHPRQVLHGQSLLTLFNWDEKTFLQNTEGSPIRRIGYAKWQRNLCVAIGNAPYSEDYIAALNAAKDEACELVSPHLEWALEQQLRKQQASSDENRQLARLTRTIEKGLPRDA

SEQ ID NO: 74427 - protein, 380 aa, Alteromonas sp.
  misc_feature (1)..(380): tr|A0A1L8MFT0|A0A1L8MFT0_9ALTE Epoxyqueuosine reductase OS=Alteromonas sp. V450 OX=1912139 GN=queG PE=3 SV=1
MSEISSIDLVELANNIKAWGTALGFQQVGISDIDLHQHESHLQEWLDNGYHGDMAFMENHGMKRARPNELVPGTLRVISVRMNYLPPDASFAKHLNMPEVGYISRYALGRDYHKVLRKRLKQLGEKITASLAHTQYRPFVDSAPVLEHAIAEKAGIGWTGKHSLTLNKEAGSWFFLGELFINLPLPVDAPIEEGCGSCTACLTICPTNAIIAPYKVDARRCISYLTIESDKDIPEDLRPMMGNRIYGCDDCQLVCPWNRFADITSEQDFHPRQVLHGQSLNALFSWSEETFLRNTEGSPIRRIGFEKWQRNIAVALGNAPYNEQSILLLKERRGCVSDLVDRHIDWALKQQQEKQQVSDAQNRQQSRLIRVIEKGLPRDA

SEQ ID NO: 74428 - protein, 383 aa, Alteromonas stellipolaris
  misc_feature (1)..(383): tr|A0A0S1YQZ4|A0A0S1YQZ4_9ALTE Epoxyqueuosine reductase OS=Alteromonas stellipolaris LMG 21856 OX=1160720 GN=q ueG PE=3 SV=1
MSTINSIDLIQLTQDIKAWGRTLGFQQVGISDIDLHQHEAHLTKWLENGYHGDMAFMANHGMKRARPDELVPGTLRVISVRMNYLPPDASFAKHLSQPDTGYISRYALGRDYHKVLRKRLKQLGEKITTALSDTQYRPFVDSAPVLEHAIAEKAGIGWTGKHSLTINKEAGSWFFLGELFINVPLPIDAPIEEGCGTCTACLTICPTNAIVAPYKVDARRCISYLTIESDKDIPEELRPLMGNRIYGCDDCQLICPWNRYADITEEEDFHPRKVLHGQSLTTLFSWDEATFLTNTEGSPIRRIGFEKWQRNIAVALGNANYSELTVNALQVNLGKVSDKVDRHITWALAQQENKKAGLALEEKANRQQKRLTRAVEKGLPRDA

SEQ ID NO: 74429 - protein, 307 aa, Altibacter sp.
  misc_feature (1)..(307): tr|A0A2D9N3C5|A0A2D9N3C5_9FLAO Epoxyqueuosine reductase OS=Altibacter sp. OX=2024823 GN=queG PE=3 SV=1
MNTKHKHTELIKTEAKRLGFLSCGISKAEFLEEEAPRLEHWLTMNRHGEMGYMENHFDKRLDPTLLVPDAKSVVSLLLNYYPSEFQRDDTYKVSKYAYGTDYHFVIKDKLKEFLHFISEEIGEVQGRAFVDSAPVLDKAWAAKSGLGWMGKHSNLLTKQVGSFYFIAELILDLELDYDSPVTDHCGACTACIDACPTQAIVEPYVVDGSKCISYYTIELKNEIPLSAKGQFEDWMFGCDICQDVCPWNRFSKSHKEPLLQPSPELLSMNKKDWEEITQEVFQDLFQKSAVKRTKFSGLKRNIKFLKD

SEQ ID NO: 74430 - protein, 361 aa, Amantichitinum ursilacus
  misc_feature (1)..(361): tr|A0A0N0XKJ7|A0A0N0XKJ7_9NEIS Epoxyqueuosine reductase OS=Amantichitinum ursilacus OX=857265 GN=queG PE=3 SV= 1
MQNEFPSVESGGLDLTALAARIKAWAQELGFARAAITDTDLSAAEPALTEWLAAGFHGEMDYMARHGLTRARPAELVPGTVSIVSVFMPYLPAGTSNAEAMLQDGSKAYLSRYALGRDYHKVLRNRLQKLAERVQAEIGPFGFRAFVDSAPVLEVELAKKAGLGWRGKHTLLLNREYGSFFFIGELFTDLPLPPDPPEPNEHCGRCTRCLGACPTGAIVAPYKVDARKCISYLTIELKGSIPDEYRPLIGNRVYGCDDCQLVCPWNRFAVDSKEADFAVRHGLDDVSLVELFGWDEATFRERMAGSAILRIGHERWLRNLAVGLGNAPTRPDIVSALQSRINDPSELVREHVAWALNRHAA

SEQ ID NO: 74431 - protein, 367 aa, Amaricoccus sp.
  misc_feature (1)..(367): tr|A0A501WV49|A0A501WV49_9RHOB Epoxyqueuosine reductase OS=Amaricoccus sp. HB172011 OX=2589815 GN=queG PE=3 SV =1
MLDAGPEEIAARIRARALAERFSASGICAPDAIPLAKARLAAFVAAGRHGTMGYMAERMAWRGDPAALWPEARSVIMLAEVYTPEEDPLALLSRPDRGNVSVYARGRDYHDTVKKRLKRLGRWLVAETGAEIKVFVDTAPVMEKPLAEAAGLGWQGKHTNLVGRRLGSWFFLGAIFTTLDLPRDAAERDHCGSCRACLDICPTGAFPAPYQLDARRCVSYLTIEHAGPVDPELRPLLGNRIYGCDDCLAVCPWNKFAGVAREAAYHARENLRAPALAELAGLDDAGFRARFSGSPIKRIGRNRFARNVAYAVGNSGEAALIPVAEGLAADADPVAREAGEWALARLRSASAGSAAPGRPDRSPDGSR

SEQ ID NO: 74432 - protein, 382 aa, Aminobacter aminovorans
  misc_feature (1)..(382): tr|A0A380WEI9|A0A380WEI9_AMIAI Epoxyqueuosine reductase OS=Aminobacter aminovorans OX=83263 GN=queG PE=3 SV=1
MRTSISDSALRQLIEREASRAGFAAIAVTRPDAIPLAPARLAQFVGEGLHGSMAWMAETLERRSEPSVLWPEVRSIVVLAMNYGPDSDPRALQAMPDRAAISVYARNRDYHDVMKGRLKEIAGKIVARAGGDVKVFVDTAPVMEKPLAEAAGLGWQGKHTNLVSREFGSWLFLGTIFTTAELTADDAEIDHCGSCRACLDACPTNAFPAPYRIDARRCISYLTIENKGPIPLEFRQKIGNRIYGCDDCLAACPWNKFAQAASEQKLAARDDLREPRLAELLLLDDATFRTFFSGSPVKRIGRDRFVRNVLIAAGNSADTTLIEPCRTLLSDASPLVRGAAVWALSRLLPDATFSALAEQMLKVEIEDDVIAEWQAGLTQVEL

SEQ ID NO: 74433 - protein, 387 aa, Aminobacter aminovorans
  misc_feature (1)..(387): tr|A0A142LZW2|A0A142LZW2_AMIAI Epoxyqueuosine reductase OS=Aminobacter aminovorans OX=83263 GN=queG PE=3 SV=1
MRTSISESALRQLIEREASRAGFAAIAVTRPDAIPLAPARLAQFVGEGLHGSMAWMAETLERRSEPSVLWPEVRSIVVLAMNYGPDSDPRALQAMSDRAAISVYARNRDYHDVMKGRLKEIAGKIVSRAGGDVKVFVDTAPVMEKPLAEAAGLGWQGKHTNLVSREFGSWLFLGTIFTTAELAPDEAEIDRCGSCRACLDACPTEAFPAPYRIDARRCISYLTIENKGPIPLEFRPKIGNRIYGCDDCLAACPWNKFAQAASEQKLAARDDLREPRLAELLSLDDATFRIFFSGSPVKRIGRDRFVRNVLIASGNSADATLIAPCRTLLSDTSPLVRGAAVWALSRLLPDATFSALAEQMLKVETDNDVIAEWQAGLTQVEQSRTQS

SEQ ID NO: 74434 - protein, 385 aa, Aminobacter sp.
  misc_feature (1)..(385): tr|A0A316GQN0|A0A316GQN0_9RHIZ Epoxyqueuosine reductase OS=Aminobacter sp. AP02 OX=2135737 GN=queG PE=3 SV=1
MRTSISDTALRQLIEREAKRAGFAAVAVTRPDAIPLAPARLAQFVDEGLHGSMGWIAETLERRSEPSVLWPEVRSIIVLAMNYGPDSDPRDLQSQKDCAAISVYARNRDYHDVMKGRLKEIAGKIVARAGGDVKVFVDTAPVMEKPLAEAAGLGWQGKHTNLVSREFGSWLFLGTIFTTAELEPDEAEIDHCGSCRACLDACPTDAFPAPYRLDARRCISYLTIENKGPIPLEFRQKIGNRIYGCDDCLAACPWNKFAQAASEQKLAARDDLREPRLIELLALDDATFRTFFSGSPVKRIGRDRFIRNVLIASGNSADAALVEPCRALLADPSPLVRGAAVWALSRLVSRKTFSALAQLALKSETEADVIAEWQVTQAEPARTQA

SEQ ID NO: 74435 - protein, 387 aa, Aminobacter sp.
  misc_feature (1)..(387): tr|A0A0Q6LI97|A0A0Q6LI97_9RHIZ Epoxyqueuosine reductase OS=Aminobacter sp. Root100 OX=1736420 GN=queG PE=3 SV= 1
MRTSISDTALRQLIEREAKRAGFAAVAVTRPDAIPLAPARLAQFVEEGLHGSMGWMAETLERRAEPSVLWPEVRSIIVLAMNYGPDTDPRDLQAMPDRAAISVYARNRDYHDVMKGRLKEIAGKIVARAGGDVKVFVDTAPVMEKPLAEAAGLGWQGKHTNLVSREFGSWLFLGTIFTTAELVPDEAEADHCGSCRACLDACPTDAFPAPYRIDARRCISYLTIENKGPIPIEFRERIGNRIYGCDDCLAACPWNKFAQSASEAKLAARDDLRQPRLADLLQLDDAAFRSFFSGSPVKRIGRERFIRNVLIAAGNSADSALGWPCRALLSDAAPLVRGAAVWALSRLVTPEAFSALALEALKAETEQDVIAEWQAALTQAEPARTQA

SEQ ID NO: 74436 - protein, 297 aa, Aminomonas paucivorans
  misc_feature (1)..(297): tr|E3CZE2|E3CZE2_9BACT 4Fe-4S ferredoxin iron-sulfur bi nding domain protein OS=Aminomonas paucivorans DSM 1226 0 OX=584708 GN=Apau_2229 PE=4 SV=1
MATLRGAFEARGRRARTVGAERTEELLEDLFRGLERRPLDPHLQKRYIEPFRERAGVFPQARSLVVVASPEPPTPVRFRHRGRRIETLLPPQYAHQKDLEEATRILREHLPPGERFEAVRLPLKLLAARSGLGRYGRNRVLFVPGMGSCCHLAAFALSLPPEEETWGPAEPLPRCSSCGLCVARCPSGALGKGWHDFDSSRCLTRHNEETDPLPGWMDPGWHHSLLGCTRCQELCPANRGIWDHPLSPVDFDEEETEGILRASGFEALPGPVRERLADLGLAEDFAPAARNLRLLLG

SEQ ID NO: 74437 - protein, 383 aa, Ammoniphilus oxalaticus
  misc_feature (1)..(383): tr|A0A419SDI2|A0A419SDI2_9BACL Epoxyqueuosine reductase OS=Ammoniphilus oxalaticus OX=66863 GN=queG PE=3 SV=1
MQTPQQLKDKVINYAASIGIDKIGFASADPFLELKQRLVEHRKLGYESGFEEADLAMRTHPEMILPEAQSIIAIALAYPTKIEEAPRSEPGQYRGMVARAAWGEDYHHVLRRKLKQLEEYILEFVPDAKCESMVDTGALSDRAVAERAGLGWVGKNTSLITPEFGSWVYLGEMITSIPFPPDTPLEDGCGDCTLCMDHCPTDAFEQPGQLNSQKCLAFVTQLKNYVPEAFRESVGNRVYGCDTCQQVCPKNRKINFTHHPEFQPDPELAKPLLKPLLTIGNKRFRETFGPTAAAWRGKKPLQRNAILGLAHFKDVSAVPDLIEVLNQDVRPPLRGTAAWALGKIGGEQARQALDAALSVEKDDEVKEEINHALGMLDEGKKGM

SEQ ID NO: 74438 - protein, 380 aa, Ammoniphilus sp.
  misc_feature (1)..(380): tr|A0A4V1NWZ1|A0A4V1NWZ1_9BACL Epoxyqueuosine reductase OS=Ammoniphilus sp. CFH 90114 OX=2493665 GN=queG PE=3 SV=1
MVDMVELKRMLIDFAHSVGIDKIGFASADPFLELKDRLYKHRELGYESGFEESDIEKRAHPELTIQEAKSIIAIAIAYPARMEDSPKSKPGEYRGMVSRAAWGKDYHHVLREKLRLLEAFIEEKLPGARCESMVDTGVLSDRAVAERAGLGWIGKNTNLITPEFGSWVYLGELITDIPFPPDQPIEESCGDCTLCLDHCPTGAFEQPFQLNAQKCVAFLTQVKDYIPEEYRERVGNRLYGCDTCQQVCPKNRKVNFTHQEDCLPDPELAKPLLKPLLTIGKKEFQTKFGPTSAAWRGKKPIQRNAILALAHFKDRTAVPDLISLMKKDERPVIRGTAAWALGKIGGEEAMQALEEARSSEKDQKVQAEIDQAWSKLRSIL

SEQ ID NO: 74439 - protein, 379 aa, Amphibacillus marinus
  misc_feature (1)..(379): tr|A0A1H8R0A2|A0A1H8R0A2_9BACI Epoxyqueuosine reductase OS=Amphibacillus marinus OX=872970 GN=SAMN04488134_109 112 PE=4 SV=1
MANEQLKEEIISYAKQIGIDKIGFAAANPFAEMKARLQMQQEDGFQSGFEKGTLEERTNPALHLEDAESIIAIAVAYPSRMRDRPLNKKGQRRGNFCRASWGHDYHDVLNSRLELLTAFIAERVPGFRSRSMVDTGELSDRAVAERAGIGWSGKNSFIITPEFGSYVYLGEMITNVPFPSDQPLDDQCGDCTMCLDNCPTGALVAPGRLNAQNCIAFVTQTKGFLADEYRSKIGNQLYGFDTCQLVCPKNKGIDVHHHPELEPDPELVKPELIPLLSISNKEFKERFGKMSGSWRGKKPIQRNAILALAHYREQTAVDELIRLMRDDPRPVIRGTAAWAIGKIGRYDSYDAIRSALEIEQDPEVRNEMEKGLAFEQAQV

SEQ ID NO: 74440 - protein, 379 aa, Amphibacillus xylanus
  misc_feature (1)..(379): tr|K0J464|K0J464_AMPXN 4Fe-4S ferredoxin-type domain-co ntaining protein OS=Amphibacillus xylanus (strain ATCC 51415 / DSM 6626 / JCM 7361 / LMG 17667 / NBRC 15112 / Ep01) OX=698758 GN=AXY_18700 PE=4 SV=1
MANEQLKQDIIEYSKTIGIDKIGFAAANPFAEMKARLKNQQESGFQSGFEKGTIEERTEPTLHLTEAESIIAVAIAYPAKMKERVKNVRGNRRGSFCRASWGTDYHHVVREKLELLETYIASRVPGFRSKIMVDTGELVDKAVAERAGIGWSGKNTLIITPEFGSYVYIGEMITNLPFPADEPVEDGCGDCTLCIDLCPTGALVAPGRLNAQMCLAYQTQTKGFMPDEFRQKMGNQLYGYDNCQVVCPKNRGIDHHLHPELEPDPDLVKPELLPLLTISNREFKEKFGHMAGSWRGKKPIQRNAIIALANYKEESAVDELIKLMNNDPRPVIRGTAAWAIGKIGRQDGYQAIRDAMENETDLDVIEEMEKGLAFEQVAT

SEQ ID NO: 74441 - protein, 386 aa, Amphiplicatus metriothermophilus
  misc_feature (1)..(386): tr|A0A239PKG9|A0A239PKG9_9PROT Epoxyqueuosine reductase OS=Amphiplicatus metriothermophilus OX=1519374 GN=queG PE=3 SV=1
MQTSISEPTRAPLPPPALAAEIRAHAKSLGFDAVGVAPAAAPPEREARLRAFVEAGRHGDMAWMATRLVERGAPQALWPDAKSVVMVGLNYGPDHDPLDDVARRREGAISVYARGRDYHDVMKPRLKRLARWMVERFGGGVKVFVDTAPVMEKPLATEAGVGWQGKHTNLVSREFGSWLFLGAVFTTLDLYPETPETDHCGRCTRCLDICPTKAFPAPYQLDARRCISYLTIEHKGPIPAEFREAIGNRIYGCDDCLAVCPWNKFAQSAREAALAARKELSTPPLAALAALDDAAFRALFRGSPVKRTGRDRFVRNVMIAIGNSGDPTLAETARARLDDASPLVRGAAVWALCRLIGPTALADIRAGRGNDPDPDVEAEWRMALAA

SEQ ID NO: 74442 - protein, 374 aa, Amphritea atlantica
  misc_feature (1)..(374): tr|A0A1H9L230|A0A1H9L230_9GAMM Epoxyqueuosine reductase OS=Amphritea atlantica OX=355243 GN=queG PE=3 SV=1
MTQYDPEILQTLADQIKAMAISLGFQQCGITGTDLSAEAAPLKAWLDKGYQGEMGYLENHFDKRINPALLTEGTQRIICVRMNCLPPDTKTISVLKNLDQAYISRYTMGRDYHKVMRKKLTQLGKQMETLIGQFGYRAFVDSAPVLERPLARNSGLGWQGKHTLILNRQAGSWFLLGELFVDLPLPVDPPYEEEHCGQCQACIDICPTQAIVAPYQLDARRCISYLTIELKGSIPTAFRPLIGNRIFGCDDCQLICPWNRFAKHSDETDFTPRHNLDRISLLELQQWSEATFLKRTEGSAIRRTGYSGWQRNIAVALGNSRGGEQVLNALQSMIDGDDPLVREHALWALQHLQSRNADQQPPILSHRRSATLPD

SEQ ID NO: 74443 - protein, 370 aa, Amphritea balenae
  misc_feature (1)..(370): tr|A0A3P1SRL5|A0A3P1SRL5_9GAMM Epoxyqueuosine reductase OS=Amphritea balenae OX=452629 GN=queG PE=3 SV=1
MTQYDPDSMQSLAKQIKNRAIELGFQQCGITDTDLSSEAEALKAWLDKGYQGEMGYLENHFEKRIDPSLLVENTQRIICVRMNCLPPEIETLKILKNPDQAYISRYTMGRDYHKIMRKKLTRLAKDIEGLIGEFGYRPFVDSAPVMERPLARKAGLGWVGKHTLILNRSAGSWFLLGELLVDLPLPVDTEYKEEHCGKCQACIDICPTAAIVAPYELDARRCISYLTIELKGSIPEEFRPLIGNRIFGCDDCQLICPWNRFAQHSSEADFNPRHKLDSMSLVELLAWDEETFLKRTEGSAIRRTGYQGWLRNIAVAMGNSHGGEAIEAALQELSQYPDDIVQEHALWALKQLNKTKITAPILTHPRAAKL

SEQ ID NO: 74444 - protein, 374 aa, Amphritea sp.
  misc_feature (1)..(374): tr|A0A430KSR4|A0A430KSR4_9GAMM Epoxyqueuosine reductase OS=Amphritea sp. MCCC 1K03512 OX=2490544 GN=queG PE=3 SV=1
MTQYDPETLQNLAIKIKTEAAALGFQQCGITDTDLSAEEAPLKEWLDKGYHGEMSYLENNIDKRINPALLTEGTQRIICVRMNCLPPDIQTLKILKNPDQAYISRYTMGRDYHKIMRKKLTLLGKAIEKLIGEFGYRPFVDSAPVLERPLARKSGLGWQGKHTLILNREAGSWFLLGELFVDLPLPVDPPYTEEHCGQCQACIDVCPTQAIVAPYELDARRCISYLTIELKGAIPVEFRPLIGNRIFGCDDCQLICPWNRFAKHSEETDFTPRHQLDQISLLELQRWDEATFLKRTEGSAIRRTGFSGWQRNIAVALGNSRGGEAVLSALQGMIDGDDPLVREHARWAMEALQSTSTDNSTPILQHPRAAKLPD

SEQ ID NO: 74445 - protein, 349 aa, Amylibacter cionae
  misc_feature (1)..(349): tr|A0A2N5IL98|A0A2N5IL98_9RHOB Epoxyqueuosine reductase OS=Amylibacter cionae OX=2035344 GN=queG PE=3 SV=1
MSAELTRALRDKALAEGFSDFGICRPDAAPHTAQRLAEFVGDGRHGQMGWMAERMNWRGSAAALWPEARSVIMLAENYGPDHDPLEALAHKDRAAISVYAQNKDYHDVVKKRLKRVGRWLIEQADGAEIKVFVDTAPVMEKPLAMAAGLGWQGKHTNVVSRRLGSWFFLGAIFTTLELEETNGEVDHCGSCRKCLDICPTDAFPAPYQLDARRCISYLTIEHRGPVDVALRKGLGNRIYGCDDCLAVCPWNKFASRAAEIKYHGRAELQSPRLGELAVLDETEFRALFSGSPIKRIGRNGFVRNVLYAIGNSEDAGLLSVVQALCEDEDETVADAARWACGELVQTVKD

SEQ ID NO: 74446 - protein, 328 aa, Amylibacter kogurei
  misc_feature (1)..(328): tr|A0A2G5K3H7|A0A2G5K3H7_9RHOB tRNA epoxyqueuosine(34) reductase QueG OS=Amylibacter kogurei OX=1889778 GN=BFP 76_08445 PE=4 SV=1
MGICAPDAIPLAPARLAEFVDAGMHGQMAWMADRMHWRGNPAELWPEAKSVIMLAEPYTPEHDPLDILQHPDRAAISVYAQNRDYHDMVKKRLKRLGRWLIEQAAGTEIKVFVDTAPVMEKPLGAAAGLGWQGKHTNLVGRDLGSWFFLGAIFTTVDFAKDTGEVDHCGSCRACLDVCPTDAFPAPYRLDARRCISYLTIEHKGPVDVDLRPLLGNRIYGCDDCLAVCPWNKFATEARDIGYTARSELTAPKLTELAMLDDAQFRTLFSKNPIKRIGRNQFIRNVLYAIGNSGDAGLRDVAKRLISDGDETVVDAANWALSELERTHG

SEQ ID NO: 74447 - protein, 323 aa, Anabaena cylindrica
  misc_feature (1)..(323): tr|K9ZG24|K9ZG24_ANACC Epoxyqueuosine reductase OS=Anab aena cylindrica (strain ATCC 27899 / PCC 7122) OX=27212 3 GN=queG PE=3 SV=1
MNQPLLTSSMVKEKARELGFHKVGISSVDGLDAIVTQRLQAWMELGYHADMQWMANPKREDIRLVMPEVRSLVCVALNYYTPDQRPEGEEYGKISRYGWGRDYHKILHKKLKQLATGLESWSEGVKARYYADTGPVQDKVWAQKAGIGWIAKNGNVITRDYGSWVFLGEILTNLELESDRPATEHCGTCTRCLQACPTGAITEPFIVDANRCIAYHTIENRADNLPETLTPHLHGWVAGCDICQDVCPWNQRFAQETDVTDFQPYPGNLAPKLVELAQISEEEWDKQFPASALRRIKPEMLRRNARANLDAFRLKNDPESNNI

SEQ ID NO: 74448 - protein, 324 aa, Anabaena sp.
  misc_feature (1)..(324): tr|A0A1W5CNH9|A0A1W5CNH9_9NOST Epoxyqueuosine reductase OS=Anabaena sp. 39858 OX=1710890 GN=queG PE=3 SV=1
MNYCSIVSSNVVKGKAKELGFHKVGIAAVNESTNAEAERLQAWIKLGYHADMEWMNNPKRSDISLIMPEARSLVCVALNYYTPHQRPDSAEYAKISRYGWGRDYHKVMNRKLKALTTWLQSLDPSIQARYYADTGPVQDKVWAQRAGIGWIAKNGNVITRAYGSWVFLGEVVTNLELEKDSPHTEHCGSCTRCLDACPTGAITQPFVVDANRCIAYHTIENRAAELPEAIASQMQGWVAGCDICQDVCPWNQRFAQTTDVVDFQPYPDNIAPKLIELAQISDEEWDKQFPASALRRIKPEMLRRNARANLDASKRNNDPESNHF

SEQ ID NO: 74449 - protein, 324 aa, Anabaena sp.
  misc_feature (1)..(324): tr|A0A1B7VIZ9|A0A1B7VIZ9_9NOST Epoxyqueuosine reductase OS=Anabaena sp. WA113 OX=1710889 GN=queG PE=3 SV=1
MPECTSISSIVVKAKAKELGFHEVGITAVGDLDPTETEKLPAWLKMGYHADMEWMENPQRQQISLIMPDVRSLISVALNYYTPHERPHGNEYGKISRYAWGRDYHRIIHKKLKALSIWLESQGKEIKTRYYADTGPVQDKVWAQKAGIGWIGKNGNVITRKYGSWVFLAEILTNIDLESDRPSSQHCGTCTRCLQACPTGAITAPFVVDANRCIAYHTIENRSPELPPDITPHLQGWVAGCDICQDVCPWNQRFAQTTDVTDFQPYPGNLAPKLVELAQISKEEWDTKFTASALRRIKPEMLRRNARANLDKSRHNNDPEDNNF

SEQ ID NO: 74450 - protein, 324 aa, Anabaenopsis circularis
  misc_feature (1)..(324): tr|A0A1Z4GMM5|A0A1Z4GMM5_9CYAN Epoxyqueuosine reductase OS=Anabaenopsis circularis NIES-21 OX=1085406 GN=queG PE=3 SV=1
MNQSSVTSSRTVKEQALDLGFHKVGIAAVDEVDNTEVQRLQAWIALGYHADMEWMDNPKRQDIRLVMPEARSLVCVALNYYTPHQRPQGEEYAKISRYGWGRDYHKVMHKKLKQLTTWLESLGEGVTARYYADTGPVQDKVWAQKAGIGWIAKNGNVITREYGSWVFLGEVVTNLELECDRPHTQHCGSCTRCLTACPTGAITQPFVVDANRCIAYHTIENRGEKLPEAIAPHLQGWVAGCDICQDVCPWNQRFAKTTDVADFQPYPGNIAPKLIELAKISDEEWDRQFPASALRRIKPEMLRRNARANLDASQQNNDSESNCF

SEQ ID NO: 74451 - protein, 380 aa, Anaerobacillus alkalidiazotrophicus
  misc_feature (1)..(380): tr|A0A1S2MCF3|A0A1S2MCF3_9BACI tRNA epoxyqueuosine(34) reductase QueG OS=Anaerobacillus alkalidiazotrophicus O X=472963 GN=BKP45_01695 PE=4 SV=1
MTLAQLKQEIIAYSISIGIDKIGFASADPFVDLKDKLINQQDLGYQSGFEEPDIDKRVHPELLLPEAKSIIAIALAYPSKMKHAPLSTKGARRGLFCRASWGEDYHKILKRKMEQLEAFILEKAPNARVVSMVDTGELSDRAVAQRAGIGWSGKNCSIITEEFGSYVYLGEIITTLALPPDTPITEQCGSCTKCIDACPTGAIVQGGQLDSNKCIAFLTQTKTFLADEYREKIGNRIYGCDTCQQVCPENKGKDFHLHDEMEPDPEVVKPLLKELLFISNRQFKETYGLLSGAWRGKKPLQRNAIIALAHFKDVNAITDLERLLKEDPRPVIRGTAAWAIGKIAAEKSELILKVAKEREKDADVLREIEKGLNLLENHNI

SEQ ID NO: 74452 - protein, 380 aa, Anaerobacillus alkalilacustris
  misc_feature (1)..(380): tr|A0A1S2LXL0|A0A1S2LXL0_9BACI tRNA epoxyqueuosine(34) reductase QueG OS=Anaerobacillus alkalilacustris OX=393 763 GN=BKP37_00500 PE=4 SV=1
MTLAQLKQEIIAYSISIGIDKIGFASADPFVDLKDKLINQQDLGYQSGFEEPDIDKRVHPELLLPEAKSIIAIALAYPSKMKHAPLSTKGARRGLFCRASWGEDYHKILKRKMEQLEAFILEKAPNARVVSMVDTGELSDRAVAQRAGIGWSGKNCSIITEEFGSYVYLGEIITTLALPPDTPITEQCGSCTKCIDACPTGAIVQGGQLDSNKCIAFLTQTKTFLADEYREKIGNRIYGCDTCQQVCPENKGKDFHLHDEMEPDPEVVKPLLKELLFISNRQFKETYGLLSGAWRGKKPLQRNAIIALAHFKDVNAITGLERLLKEDPRPVIRGTAAWAIGKIAAEKSELILKVAKEREKDADVLREIEKGLNLLENHNI

SEQ ID NO: 74453 - protein, 380 aa, Anaerobacillus isosaccharinicus
  misc_feature (1)..(380): tr|A0A1S2L559|A0A1S2L559_9BACI tRNA epoxyqueuosine(34) reductase QueG OS=Anaerobacillus isosaccharinicus OX=15 32552 GN=AWH56_20565 PE=4 SV=1
MTYAQLKAEIIAYSISIGIDKIGFAATDPFLELKERLITQQKLGYQSGFEEADIEKRVSPELLLPKAKSIIAIALAYPSKMKNAPLSKKLERRGLFCRASWGEDYHTILRNKLAKLEAFILEKDPSAKLVSMVDTGELSDRAVAERAGIGWSGKNCSIITEEFGTYVYLGQMITTIPLPPDKPITEQCGTCTKCIDACPTGAIVQGGQLDSNKCIAFLTQTKTFLADEFREKLGNRIYGCDTCQQVCPENKGKDFHLHEEMEPDPEVVKPLLRELLFISNREFKEKFGSLSGAWRGKKPLQRNAIIGIAHYKDTTALNDLEKLLKEDPRPVIRGTAAWTIGKLATNQSESILKAAKEREKDANVIAEIDKGLNMLKNQII

SEQ ID NO: 74454 - protein, 379 aa, Anaerobacillus macyae
  misc_feature (1)..(379): tr|A0A0J6CTF3|A0A0J6CTF3_9BACI Epoxyqueuosine reductase OS=Anaerobacillus macyae OX=157733 GN=queG PE=3 SV=1
MLNAQLKSDIVAYSKTIGIDKIGFAAADPFKSLKERLRRQQDLGYQSGFEESDIEKRTEPELLLNGATTIISIAIAYPSRMKESPRSKRGERRGLFCRASWGVDYHHVLREKLSLLDAYIKSKVPEVSTSSMVDTGELSDRAVAERAGIGFSGKNTMTITEEFGSWVYLGEMITDLYLEPDEPVEEGCGDCNICVDACPTGALIEGGQLNASKCIAFLTQTKGFLPDQYRSKLGNRLYGCDTCQLVCPKNKGKDFHHHPELEPDPEMVKPKLIPLLTMSNREFKEKFGNAAGSWRGKKPIQRNAILALAHYKDETAIETLIELMQKDPRPVIRGTSAWALGKIGGDKAYHALYMEQMREKDKDAANEIAKGLSMLQNKV

SEQ ID NO: 74455 - protein, 312 aa, Anaerobranca californiensis
  misc_feature (1)..(312): tr|A0A1M6P6N2|A0A1M6P6N2_9FIRM Epoxyqueuosine reductase OS=Anaerobranca californiensis DSM 14826 OX=1120989 GN =SAMN02745227_01350 PE=4 SV=1
MLKEKIREKGKELGFCQVGFTHPAPFEEYKIVLEKLKRLNNYPPFVPEDINLRTDPKLIMENCKTIIAVAFPYINYVKLSLLYPPAKDEGYISPSAWGLDYHILVKDKMEELICFINGQTKGQYQFMSFVDTGPLSDREIAKRAGIGFVGKNSSLITKEMGSFVWLGHILTDLELSPDSIDTIDNLNCGDCNLCIQSCPTNAIKEDWIIDYSKCLANVLIQKGALPLEIQEKMGKRIYGCDTCQLVCPKNKEILKKYCHSNASLGWIKLQELIELSNKSFKNKYGNTAFSWRGKGVLSRNAKTIIEKNKDLQ

SEQ ID NO: 74456 - protein, 312 aa, Anaerobranca gottschalkii
  misc_feature (1)..(312): tr|A0A1I0AFH9|A0A1I0AFH9_9FIRM Epoxyqueuosine reductase OS=Anaerobranca gottschalkii DSM 13577 OX=1120990 GN=S AMN03080614_10218 PE=4 SV=1
MLKEKIREKGKELGFSQVGFTHSLPFEEYKFVLEKLKKINNYPPFVSEDINLRTDPKLIMENCKTIIAVAFPYVNNVKLSLLHPPAEDEGYISPSAWGLDYHILVKDKMEELVQFIDRETKGRYQFMSFVDTGHLSDREIAKRAGIGFVGKNSSLITKEMGSFVWLGHILTDLELAPDSVMNNLDCGHCNLCIQSCPTNAIKEDGFIDYSKCLANVLVQKGELSLEIREKMNKRIYGCDTCQLVCPKNMEVLKKHSPSYASLGWIKLRELLELSNKSFKSKYGNTAFSWRGKGVLSRNAKVIIEKNSKTVEK

SEQ ID NO: 74457 - protein, 294 aa, Anaerococcus prevotii
  misc_feature (1)..(294): tr|A0A449IBC8|A0A449IBC8_9FIRM Epoxyqueuosine reductase OS=Anaerococcus prevotii OX=33034 GN=queG PE=4 SV=1
MDRNQVLKKCGLDVLGFCPGTALKEEKAYLLDRQAHFGLCKYEGQNIEERLDPSLQYSPVKSVLVFGINTKTRPIQLKKGQGLLAGISRIPDYHILLKEAGNKLCGILELEDQAKVLVDSHPLMERAFAQRAGLGYIGKNTALIHPVYGTYLALGLILTEKIFPYDKEEKGTCGSCNLCIKACPGGALKGGGILDPGACLSYQTQTIETSPGQVGPRLYGCDVCQEICPKNKEVPLTRLEQVVDRGINKEEIQDLSNREFKKRYGHLTGAWRGKKQWMENFKSVEAYWARKSKE

SEQ ID NO: 74458 - protein, 352 aa, Anaerocolumna jejuensis
  misc_feature (1)..(352): tr|A0A1M6PWN7|A0A1M6PWN7_9FIRM Epoxyqueuosine reductase OS=Anaerocolumna jejuensis DSM 15929 OX=1121322 GN=SAM N02745136_01768 PE=4 SV=1
MEQIEKLIQRKALELGYEKCGIIPVHLLEGYKEKLNERVQKVAESEAFYKGKQHLAHFEKEFPWAKSVVVLTVPQTQYKVPEAVGGHIAKSYLFDSRVDEQTKEHQHSLSLEAYMKELGLRVSTERKYGIVGLRWAAMQAGLGIIRRNNFFYSESGSWVRLEAFLTDRDMELIEKPRFTPCPKNCDRCIKACPTSSLCDAYTMNPLRCVSFLTTFSGRDLPQEPLAADFGEWIYGCDICQEVCPMNHGKWTGSEEFPGLTELAPSLTVETIMKMDEEFYRQKVQPKFFYLTPDELWKWQVNALNYMNNNYQEHFEQIILEACGSSFEKVREMAVAICKSHEIHVEKELASYE

SEQ ID NO: 74459 - protein, 185 aa, Anaeroglobus geminatus
  misc_feature (1)..(185): tr|G9YJA6|G9YJA6_9FIRM 4Fe-4S ferredoxin-type domain-co ntaining protein OS=Anaeroglobus geminatus F0357 OX=861 450 GN=HMPREF0080_01751 PE=4 SV=1
MFPVVDTSPLADRYMARMAGLGFIGDNQCLIHENYGSYCFIGTIVTTAVLEIDTPSTRECIHCRRCKEICPGRCFDGKNYDYRLCKSYLTQKKGDLSSEEIRIIRKTPYIFGCDECQRVCAHNRTPAPTPIPEFRQNLLTRLDIAAVAAMTNKEFKEAYGKRAFAWRGKKILIRNDGYIKSTPED

SEQ ID NO: 74460 - protein, 380 aa, Anaerolinea sp.
  misc_feature (1)..(380): tr|A0A1W9PVZ5|A0A1W9PVZ5_9CHLR tRNA epoxyqueuosine(34) reductase QueG OS=Anaerolinea sp. 4484_236 OX=1968532 G N=B5M51_06900 PE=4 SV=1
MVPETLLAKKIKEEAQKQGFILAGITTPNPPPHISTYLDWLDAGRHASMGYLADERARTRRADPCLILPECQSILVLAAPYPDPKLASAKPTGDEVRGKGRVSSYAWSDDYHLTLKEKLKNIVTFIEREVGHKIPNRWYTDTGPILEKDLAQRAGLGWIGKNTCLINPKRGSYFFLAEILLGIALPPNEPFTADHCGTCTRCLDACPTQAILLNRTIDANLCISYLTIENKGEIPEEARPKLGQWIFGCDICQTVCPWNQKPDRSLRPVRFGMTIDPRPDLITELALTPQEFNKKFKHNPVKRAKRRGYLRNIAVALGNAGDSAAIPALEKALKDIEPLVRDHAKWALDRIRSKSPHPASPVSKTGNREGTGFPPVNGGS

SEQ ID NO: 74461 - protein, 383 aa, Anaerolinea thermophila
  misc_feature (1)..(383): tr|A0A101FY15|A0A101FY15_9CHLR Epoxyqueuosine reductase OS=Anaerolinea thermophila OX=167964 GN=XD73_0664 PE=4 SV=1
MPAALDQIKTYCHSLGFDLVGFTRPAKYTSFSIFAHWIEAGYHADMQYLASAQSLRLRQSPLVLMPTCQSIIVLAYRYPGDILPTQESQHGNPSIAAYARGRDYHNFLPPRMEQIKAYIQSLFVKPVTALCYTDTAPILEKELGVRAGLGWIGKNTCLINPFIGSYFFLSEILLDVDLLGKRGDEYQLPDRCGTCHRCIDICPTHCIKDDRTLDASNCIAYLTIENKGAIPFSAREQVGNHLFGCDLCQQVCPWNKNTGELIADLPEKQEVLDHLEIATYQQISGNEEFNHYFNKTPIKRANRRGFYRNLAVVLGNSLAKNTYSILEKLLQDTDALVRQHAAWALGKHLSPESLPLLRTALSQETDKKVIKEIELALHRKEAQ

SEQ ID NO: 74462 - protein, 376 aa, Anaerolinea thermophila
  misc_feature (1)..(376): tr|E8MYJ5|E8MYJ5_ANATU Iron-sulfur binding protein OS=A naerolinea thermophila (strain DSM 14523 / JCM 11388 / NBRC 100420 / UNI-1) OX=926569 GN=ANT_23050 PE=4 SV=1
MSLETQIKQFFYERGANGVGITHLESPPHYPQYLQWVEAGLHGSMSYLDNERARALRGNPQAILPSARSVVFVSLPIASSIQSPPANRPLTGRVASYAWGEDYHLVFPKLFQAFVEWLSQQLGRVPEAKWYTDTGPVLERDLASRAGLGWIGKNTCLIHPRKGSFFLLGEIFLDVALEPDEPFKTDHCGTCTRCIEACPTECILPNRTLDASRCISYLTIENKGSIPRELREKMGNWVFGCDICQQVCPWNQRFGQTEPYPAFQPRENVPEPNLLEEIHLDSTGFNRKFKNSPVQRPRRRGYLRNVAVALGNAQDEYAVPALIECTENEPEPLVRQHAIWALGRYSSPRIREFFSQRLKEDNDEGVRLAIVQELER

SEQ ID NO: 74463 - protein, 357 aa, Anaerolineaceae bacterium
  misc_feature (1)..(357): tr|A0A3A4QKG1|A0A3A4QKG1_9CHLR tRNA epoxyqueuosine(34) reductase QueG OS=Anaerolineaceae bacterium OX=2024896 GN=queG PE=4 SV=1
MSTALKQAIKDKARQLGFILAGVTSSKPPAHYKAFENWLNQNMHGTMDYLAEDRSRTRRADLEQILPECKSILVLAIPYSPLPQLSKGKSNQEELEVKIASYALGDDYHDILPQKLQAIVAFIEDQLGHSIPNRYYTDSGPILERELAQRAGLGWIGKNSMLINPQAGSTFFLAEILLGIELEPDDAFATDQCGTCTRCITACPTQCILPNRTLDVRRCISYLTIENKVDIPEDLRPQIGNWVFGCDICQQVCPWNRFSQPADPAFEPKIPLPVLTSDLLLSSVEFNQRFRKSPVKRARRRGYLRNLAVVIGNIGNEKDIPVLEQAAQDDEPLVSEHAKWAGRYLTQEGNMRNRVSG

SEQ ID NO: 74464 - protein, 318 aa, Anaerolineaceae bacterium
  misc_feature (1)..(318): tr|A0A1B3WQM1|A0A1B3WQM1_9CHLR tRNA epoxyqueuosine(34) reductase QueG OS=Anaerolineaceae bacterium oral taxon 439 OX=1889813 GN=BEQ56_07135 PE=4 SV=1
MTSSDRKNWIRAEANRLGFSFTGFTTADPLEAETLRYLDWLRRGCHGEMVYLERADTIAKRADPRALFPDGRSAIVFGVRIGVWPRPDRGYQVADFARYYDYHDTIPVRLNELFERYNRVFASELRWKICADSSPVFERALAVRAGLGWIGRSSMLIHPRFGSKTLLAVAFTDAAFEADAPFIGEWCGSCRRCVEACPMGCIDGEMREIDARRCISYLTIERKSSLEAELWERIGTRVFGCDVCTDVCPWNRSAMRLEITPAKTSSGILIPNGAAFPDERDFELTQATFKEKYCGSPILRRKLPRWLANLENAGRNWR

SEQ ID NO: 74465 - protein, 466 aa, Anaerolineae bacterium
  misc_feature (1)..(466): tr|A0A2U2SMJ0|A0A2U2SMJ0_9CHLR Epoxyqueuosine reductase OS=Anaerolineae bacterium OX=2052143 GN=queG PE=3 SV=1
MNAEELAQAIKALALELGFAAVGITSSEPPPHLDIYSKWLAQGYHGEMGYMAEPRSVYLRSNPAELLPGCQSVIVLAARYPAPPPHPQPRSQGERGKDVSPLSLSNTERREQLHQALSSKEEDYPSPFGRGSKEDEIDHRPPSSSAEEPPISSPSLSRPDGTPSPLSKGDGSEGLSGRVAAYAWGKDYHVVLRQRMEDLMQRLQEKAERTIAYRCFTDSAPILERELAQRAGLGWIGKNTCLIHPHFGSYLFLAEIFTDLPLPPDPPFLPDRCGTCQRCIQACPTQCILPNRTLDARRCLSYLTIEHKSTLPSELRAKLGDWVFGCDICQQVCPWNQRVSASPSFPEFLPQPKRARLPLVEILSLSRAEFKQQFRLSPLSRPKWRGLSRNSAVVLGNLIRQNPSLQPRVAEFLIQALQSHPDPLVRQHLAWSLAQVGAPIAQQALKDHLQVETDPLVKAEIETLLQ

SEQ ID NO: 74466 - protein, 379 aa, Anaerolineae bacterium
  misc_feature (1)..(379): tr|A0A0S8IA90|A0A0S8IA90_9CHLR Uncharacterized protein OS=Anaerolineae bacterium SM23_ 63 OX=1703387 GN=AMJ88_ 03945 PE=4 SV=1
MTNLNTQDLTARIKAEAKRIGFDLVGVTGPAPPSHLDVYHQWLAKGRYGSMSYLADERALKRRSDPLQILPECESILTVAVNYLPEDEQHAKDTPRVAAYARGDDYHDVLIERLERLTEFIATQMGESVPHRMYTDTGPLLERELAQRSGLGWIGKNTCLINPSHGSYFLLAELLLGVQLEPDAPFEEDRCGTCTRCIDACPTSCILPDRTLDARLCISYLTIEHKDSVPLELREKIGNWLFGCDICQQVCPWNRFSMPTKDPTFQTRSLLKPPDIEDLLNLAPGTWPKHLHGSPLLRPRRRGLVRNAAIVAGNQRIQAAVPRLIELLLHDQESLLRGHAAWALGQIGGTSALMALREAKETETDPIVLAEIEAAFIFL

SEQ ID NO: 74467 - protein, 379 aa, Anaerolineales bacterium
  misc_feature (1)..(379): tr|A0A523YX48|A0A523YX48_9CHLR tRNA epoxyqueuosine(34) reductase QueG OS=Anaerolineales bacterium OX=2073117 G N=queG PE=4 SV=1
MEELIELTRFVKEEAHRLGFTLVGITTPDPPSHFDVYQLWLERGNHGSMNYLSSGRALHRRADPRTILPECQSILVCGTMYLPMDSSASTPTSPVQISSYALGEDYHTVLKERLESLIHIIENRLNKPVKHRIYTDTGPLLERELAQRAGLGWIGKNTCLIHPQLGSYLLLAEVLLNIPLQPDPYFPFDRCGTCTRCIDACPTGCILPDRTLDARRCISYLTIEEKQSIDYDLRGAIGNWLFGCDICQQVCPWNQRFAKPTEDPAFQPRPFLKRPAVADFLLLKPETWRKPLRGSPLERPRRKGLVRNAIIVAGNARDRSAILILAELLQSDPEPIIRAHAAWALGQIPGREAQSSLQAAADDETDPIVQGEINRALIT

SEQ ID NO: 74468 - protein, 324 aa, Anaerolineales bacterium
  misc_feature (1)..(324): tr|A0A524HK29|A0A524HK29_9CHLR Epoxyqueuosine reductase OS=Anaerolineales bacterium OX=2073117 GN=queG PE=3 SV =1
MPDNKKLTRKVKQMAHELGFPLVGVTSADPPGHLDFFRAWLASGYQASMDWMGSEQSLERRADPKAILPECKSILALGSPYPAPRGNPKGGNIAAYALNRDYHDVLEKRLQALVGKLEEWVGEPVPNRWYTDTGPILEKELAQRAGLGWIGKNTTLINRNFGSYFFLSEILLGIELITDSPNTESFCGSCSRCLETCPTGALLTPYTLDANRCISYLTIAHREEIPTELRPLMGDWIFGCDICQIVCPWNKPDSETPSILEEFLPREELLAIDLTNELNLSQTEFSAKFTGSPVKRAKYSGYLRNVANALGNLSKNNQKAQTED

SEQ ID NO: 74469 - protein, 294 aa, Anaeromicrobium sediminis
  misc_feature (1)..(294): tr|A0A267MGN6|A0A267MGN6_9CLOT tRNA epoxyqueuosine(34) reductase QueG OS=Anaeromicrobium sediminis OX=1478221 GN=queG PE=4 SV=1
MKEKLKKYCNNIGIEYVGIAPIRPYNELKDIIKKREENNWLSGMEEGDIEKRIDPKLIMDDCRSIIVCLFPYYIKDINSNISNYTYGKDYHMVVKEKLNQIGSYLSSEIEGFKYEAFTDTGPLADRYLAYMAGLGFFGLNQSLINDKYGTYTFIGYIINNYPFKEDTPLNKTCLRCGECIEACPGKALYDDFNMDAKKCVSYLTQKKEELRVDEIEKVKKAKKVFGCDVCQQVCPHNKNVAKTNIIEFKEDLLTSLDKGEIENMSNKGFKREYGNRAFSWRGRKIISRNFSYMD

SEQ ID NO: 74470 - protein, 345 aa, Anaeromyxobacter dehalogenans
  misc_feature (1)..(345): tr|B8JFJ2|B8JFJ2_ANAD2 4Fe-4S ferredoxin-type domain-co ntaining protein OS=Anaeromyxobacter dehalogenans (stra in 2CP-1 / ATCC BAA-258) OX=455488 GN=A2cp1_3034 PE=4 S V=1
MAGLDADRVKAAAARAGFSRCGIARAEPLDPGPLDRVLAGGLEADMVWLRTQRDERLDPARLLPGVRSVVALALSYHAGEPAAPPPGAAAVARYARGRDYHTVVKRKLAALLADLREADPGLGAYASCDIAPVMEKAWAERAGVGWVGKNGCLITPEHGSWVVLATLLLDRELAPDAPHPDRCGTCEACLPACPTGAIPAPGVVDARRCISFWTIERRGPIPDELAGRLGGWAFGCDDCQTVCPWNRGVPAEADLELVPRPGQLALWLDELLALDAEGYRRRFHGTSLARARHDGLVRNALLLAGTSGDRRYLPAIRAHLESPLGDAVRAAARWALERLGEARDP

SEQ ID NO: 74471 - protein, 343 aa, Anaeromyxobacter dehalogenans
  misc_feature (1)..(343): tr|Q2ILU6|Q2ILU6_ANADE 4Fe-4S ferredoxin, iron-sulfur b inding protein OS=Anaeromyxobacter dehalogenans (strain 2CP-C) OX=290397 GN=Adeh_2853 PE=4 SV=1
MAGLDADQVKAAAARAGFSKCGIARAEPLDPGPLDRVLAGGLEADMTWLRTQRDERLDPARLLPGVRSVVALALSYHAGEPAPPPPGAAAVARYARGRDYHTVVKRKLAAMLADLRAADPGLGAYASCDIAPVMEKAWAERAGVGWVGKNGCLITPEHGSWVVLATLLLDRELAPDAPHPDRCGTCEACLPACPTGAIPAPGVVDARRCISFWTIERRGPIPDELAGRLGGWVFGCDDCQTVCPWNRGVPADGDLELVPRPGQLSLWLDELLALDAEGYRRRFHGTSLARARHDGLVRNALLLAGASGDRRHLPAIRAHLASPLGDGVRAAARWALERLGGEP

SEQ ID NO: 74472 - protein, 347 aa, Anaeromyxobacter sp.
  misc_feature (1)..(347): tr|A7HE37|A7HE37_ANADF 4Fe-4S ferredoxin-type domain-co ntaining protein OS=Anaeromyxobacter sp. (strain Fw109- 5) OX=404589 GN=Anae109_2783 PE=4 SV=1
MSQPLDAASVKDAARRCGFAACGIARAERLDPGPLDRMLAAGAEADMVWLRTQREERLDPSRLLPGARSVVALALGYDGAGAEPPAGAGEVARYARGRDYHAVMRGKLKGLVAELRARDPEVRTFASSDLAPVMEKAWAERAGLGWVGKNGCLITERYGSWVLLATVLLDRELEPDAPHPERCGSCDACLSACPTGAIPAPGLVDARRCISFWTIERRGAVPDELAGRLGRWVFGCDACQTVCPWNRHPDAAVDPGLAPRPEQTALGIDELLALTEEEYRRRFYGTALARARHDGLVRNALLAAGREGDPRRLEAVRAHLASPHEGVRAAARWALDELARRAGMRPA

SEQ ID NO: 74473 - protein, 347 aa, Anaeromyxobacter sp.
  misc_feature (1)..(347): tr|A0A1F3BNU9|A0A1F3BNU9_9DELT tRNA epoxyqueuosine(34) reductase QueG OS=Anaeromyxobacter sp. RBG_16_69_14 OX= 1797238 GN=A2V77_16960 PE=4 SV=1
MAVALDTAFVKEASLAIGFHKVGVARAAALDPAPLDRMLASGWDADMTWLRATRAQRLDPARLLPGARSVVALALSYLEGDLATREPAEARVARYARGRDYHAVMKRKLKALVARLRERDPGIGTFASADVAPVMEKAWAQRAGLGWVGKNGCLITTDLGSWVLLATVILDRELEPDAPHKEHCGSCAECLSACPTAALVSPGFVDARRCISFQTIERRGSIPQEVAERLGPWAFGCDDCQTVCPWNRAPAARCDPELSARPGQRGLDLDALLTLTLEQYQRRFYGTALARSRYEGLLRNAVLAAGHAGDARRLPAVRAHLDSPFEGVRQAACWAVTRLERASPTAP

SEQ ID NO: 74474 - protein, 298 aa, Anaerosphaera sp.
  misc_feature (1)..(298): tr|A0A1E9AFA1|A0A1E9AFA1_9FIRM 4Fe-4S ferredoxin-type d omain-containing protein OS=Anaerosphaera sp. HMSC064C0 1 OX=1739304 GN=HMPREF2800_04945 PE=4 SV=1
MIIKHSELDKLIKKYSVDAFRITDASRLDLLGDALNEFTKYNKEERLNPKTLFPNAKSIIVFGLSYNYKKAKRKEGSYLLSRSSYGYDYHKIFKEKLDKIDKELFLDEKSESHVFVDTGPLIERLLAKKSGLGFLGKNTCIINPNLGSFIFIGYIISNEPSDFYDESLKIDCGSCDICERACPNRALCGYKMQMTKCLSYITQKKGDLSEFEKKNIKTYIYGCDICQEVCPYNKNAKKVYHEEFHELDDYGLVYKDDFNLSNREFKEKYKAMAALWRGKKILERNANIIDNNKNDIVK

SEQ ID NO: 74475 - protein, 342 aa, Anaerospora hongkongensis
  misc_feature (1)..(342): tr|A0A4R1QAP8|A0A4R1QAP8_9FIRM Epoxyqueuosine reductase QueG OS=Anaerospora hongkongensis OX=244830 GN=EV210_1 02152 PE=4 SV=1
MQTTAQLIRERAYQLGYEKCGIIPVRALEGYAEKFNERIQKIPASEMFYQRQRHLTQPLEHYPWAKSVVILVAGYGKYKIPEAVRGQIAKAYLFDVRCDASSEEFQNSQAMERFMEGLGLKIATNRKFGVVGLRWAAMQAGLGIIRRNNFFYTQAGSWMHLEAWLTDEEMELREASNTRPCPEGCNRCVKACPTRSLSAPYTMLPNTCVSFLTTFGGRNLPQEPLRKTFGSCIYGCDICQDVCPMNKGKWQEEKEFPGLAELSLALTPENILQMKDDFYRAKVQPKFFYLSPDELWKWQINVLSFMRNNYQAKYKNVILTACESDNEKVREMAQTIAKEVAV

SEQ ID NO: 74476 - protein, 228 aa, Anaerospora hongkongensis
  misc_feature (1)..(228): tr|A0A4R1Q0I1|A0A4R1Q0I1_9FIRM Epoxyqueuosine reductase QueG OS=Anaerospora hongkongensis OX=244830 GN=EV210_1 0785 PE=4 SV=1
MNRIDAAEVKLRATELGMDLCGIAPVGRFADAPQGFHPTDVNKTCKSVIVLAARFPVSSLASPSAAAYTFVRNKVMDKVDAAACQLAAELEMLGGNAVPIPSSDPYEYWDEERRHGQGILSLKHAAVRAGLGQMGKNTLLINDRLGNMLWLGAVLVDQELAADEPVGYQACISGCRICLKACPAQALDGTTIVQKQCRAVSYKQTGGGGGVYACNLCRKLCPSHNGIQ

SEQ ID NO: 74477 - protein, 245 aa, Anaerosporobacter mobilis
  misc_feature (1)..(245): tr|A0A1M7KPE1|A0A1M7KPE1_9FIRM Epoxyqueuosine reductase QueG (Queuosine biosynthesis) OS=Anaerosporobacter mob ilis DSM 15930 OX=1120996 GN=SAMN02746066_02868 PE=4 SV =1
MNKEYNGNEAARDIVFSNVSKEYLRKIILDYGAQVCGFADIERFEDAPKGSHPCDIYSDCKSVVAFGVSLPKGLYMVDSRLIYGHFYDDVCNKVNEIAYKIALLMEKEYGAIAVPIPADGPYEYWDTKNLDGRGWLSMKHVAVQAGLGTLGKNTLFLNQLYGNRLTVGCVLTNIVVNPDSYAEPVCLPNCNECVTNCPSGALHVGSAAQSECRMKAYGKGEKEFNTVDCYRCRTVCPMRFGACVI

SEQ ID NO: 74478 - protein, 334 aa, Anaerosporobacter mobilis
  misc_feature (1)..(334): tr|A0A1M7IJ05|A0A1M7IJ05_9FIRM Epoxyqueuosine reductase OS=Anaerosporobacter mobilis DSM 15930 OX=1120996 GN=S AMN02746066_01878 PE=4 SV=1
MKLEVGNVVKKKIEEFCRSLGLDTFGFVPCRTFDELRELYQIRQEKKLQNEFEEKDIEKRIRPSHYMEDGKTILSIAFPYYHEGEDIDNGFSIYTKRPDYHRVVMQYIDKICEFIISLGGKAKGFVDSNTLPERYIAYLAGVGFIGRNNMIITKKYGSYVFLGEIITDLKIPCEDKHTFDQIREYTQCGECMNCIKECPTKSINKHQINPNICLSYITQKKEISNKEISLLKGNVFGCDFCQLQCPYNQDATCNVLSEFKTVEYMNEDIYTYANMNNQYFKEKISKTSCGWRGKNVIKRNAIIGINYQDKKYDLDEFRGDSPYINEYIDRIQEK

SEQ ID NO: 74479 - protein, 285 aa, Anaerotruncus colihominis
  misc_feature (1)..(285): tr|A0A174RJJ3|A0A174RJJ3_9FIRM Epoxyqueuosine reductase OS=Anaerotruncus colihominis OX=169435 GN=queG PE=4 SV =1
MNSRLETLMRGMAFDEWGVCRFHDALPLLPVRSKARIPQGARSVIVVLFGYYIGDFPNRNISYYAIVDDYHTIVRAVLETAADKLRALYADEQFVPFVDASPVAEVRAAYLAGLGDIGMNGQLLNRTYASRCFIGEIVTTAALEPSRRAAPLCTRCGRCIAACPTGALRPDGFDRALCRSHITQKKGSLTGWERAQIRSGGFVWGCDRCTDACPVNRLAQKSRVPAFYEHPEPVVHAGNAARLCGEKAYGWRGTPVLLRNLEIICGDARDDMDTDARPSPPAGRT

SEQ ID NO: 74480 - protein, 285 aa, Anaerotruncus colihominis
  misc_feature (1)..(285): tr|B0P9B8|B0P9B8_9FIRM Putative iron-sulfur cluster-bin ding protein OS=Anaerotruncus colihominis DSM 17241 OX= 445972 GN=ANACOL_01365 PE=4 SV=1
MNSRLETLMRGMAFDEWGVCRFHDALPLLPVRSKARIPQGARSVIVVLFGYYIGDFPNRNISYYAIVDDYHTIVRAVLETAADKLRALYADEQFVPFVDASPVAEVRAACLAGLGDIGMNGQLLNRTYASRCFIGEIVTTAALEPSRRAAPLCTRCGRCIAACPTGALRPDGFDRALCRSHITQKKGALTGWERAQIRSGGFVWGCDRCTDACPVNRLAQKSRVPAFYEHPEPVVHAGNAAHLCGEKAYGWRGTPVLLRNLEIICGDARDDMDTDARPSPPAGRT

SEQ ID NO: 74481 - protein, 273 aa, Anaerotruncus sp.
  misc_feature (1)..(273): tr|A0A3A9J5T0|A0A3A9J5T0_9FIRM Epoxyqueuosine reductase OS=Anaerotruncus sp. 1XD22-93 OX=2320082 GN=D7Y41_0446 0 PE=4 SV=1
MERLRACMQPFGIDQWGACRFSELPPLLEVRSRERIPQNAQSVLVFLFGYYTEAFPDRNIARYAVPDDYHSILRPLLAEVAASCAERFPGEAFVPFIDSSPIDEVAAAALAGLGEVGLNGLLLNPVYGSYCFIGEIVTTLPLEIPPPQPQQLCTRCGACRAACPSGALAQGRFTRERCRSELTQKKGELTLWEQEQIREGGLVWGCDRCTEACPVNRSAAKSRVEGFYRNPAPVVDAQNAALLCKTKSYGWRGKNILLRNLHILSGETKDVVS

SEQ ID NO: 74482 - protein, 273 aa, Anaerotruncus sp.; identical to SEQ ID NO: 74481
  misc_feature (1)..(273): tr|R9LVM4|R9LVM4_9FIRM Uncharacterized protein OS=Anaer otruncus sp. G3(2012) OX=1235835 GN=C814_01814 PE=4 SV= 1

SEQ ID NO: 74483 - protein, 378 aa, Anaerovirgula multivorans
  misc_feature (1)..(378): tr|A0A239H7P4|A0A239H7P4_9FIRM Epoxyqueuosine reductase OS=Anaerovirgula multivorans OX=312168 GN=SAMN05446037 _102017 PE=4 SV=1
MTLKEQIVNYAKSIGVSMIGFTSAEAFEDIRGILEERKKLEYLSGFEEKDIDLRIDPKKTMPEAKSILVIALPYYIDEENLQQKETPLFHGELARTAWGKDYHDVVKEKLEKIATFIKGKKEKFDYKSFVDTGPLVDRHVAYRAGLGWYGYNSILMNDEYGSWFFIGYMLNNLEIPSDKPLNNRSCQGCNLCIKHCPKGAIEAPYKFNAKKCLSNILQQKEDIKESDRKSLGKSLYGCDICQQVCPHNKEIKKETEEDFYPKEALHKPDLLQLLSMSNKEFKKTYGETSAGWRGKKILQRNAIIALVNHGDKKTIPYLLPLLQDNRPEIRKYAIWAICELDPFKAYQILMKVKKQEKDEEVLKTIEYYCKKISCEKKR

SEQ ID NO: 74484 - protein, 231 aa, Anaerovirgula multivorans
  misc_feature (1)..(231): tr|A0A239BET7|A0A239BET7_9FIRM Epoxyqueuosine reductase QueG (Queuosine biosynthesis) OS=Anaerovirgula multivo rans OX=312168 GN=SAMN05446037_1003188 PE=4 SV=1
MNKQQQIEKMILDLGVEKVGFCQLDDLLPQEFKHLKNGISIAIRLSDQVISDIDLEKGPTHTYFHHYRTVNAFIDQVSFKITNQLQQWGYLAMAIPASQSINDKGWHYKGLFQHRTTATRAGIGWIGKNCCLVTEEVGPRVRLGTILTNMEFKYDIPITASQCGNCNLCITSCPVKALKGETWTAGMEREAFINPELCSSHMKSQYKHIGRGAVCGICVKVCPRGKKVLKK

SEQ ID NO: 74485 - protein, 391 aa, Ancylobacter aquaticus
  misc_feature (1)..(391): tr|A0A4R1I495|A0A4R1I495_ANCAQ Epoxyqueuosine reductase OS=Ancylobacter aquaticus OX=100 GN=queG PE=3 SV=1
MLRGSGFLTPEAARDYLFALAREEGFDAMGIARADAIPHAGPRLIQWISEGAHGEMDWMPDTAARRAAPANMWPDVASILMLGLNYGPDEDPRALLGQPTRGTISVYARGDDYHELIKGKLKRIASRFVPRAGAAGTVEVKVFVDTAPLMEKPLAEAAGLGWQGKHTNLVSRDKGSWLFLGAIATNLALPPDDAEVDHCGSCRACLDACPTGAFPAPYRIDARRCISYLTIELKGAIPRELRPLVGNRIYGCDDCLAACPWNKFAALGREMRLSARDENRAPTLAELARLDDAAFRARFSKSPVKRIGRARFLRNVLVAIGNSGEAGLAVEAERHLGDGHPLVRGAAVWALSRLLPPADFAALRAAHAGEADAQVSAEWRQAPTDSAGEAP

SEQ ID NO: 74486 - protein, 391 aa, Ancylobacter aquaticus
  misc_feature (1)..(391): tr|A0A3S0EH92|A0A3S0EH92_ANCAQ Epoxyqueuosine reductase OS=Ancylobacter aquaticus OX=100 GN=queG PE=3 SV=1
MLRGSGFLTPEAARDYLFALAREEGFDAMGIAAADAIPEAGPRLHQWIAEGAHGDMEWMPETAARRAAPANMWPEVASLLMLGLNYGPDQDPRAILAERAHGAISVYAQGDDYHELIKGKLKRIASRFVPRAGAAGTVEVKVFVDTAPLMEKPLAQAAGLGWQGKHTNLVSRDKGSWLFLGAIATNLALPPDARETDHCGSCRACLDACPTNAFPAPYQIDARRCISYLTIELKGAIPRELRPLVGNRIYGCDDCLAACPWNKFAALGREVRLAAREENRAPPLAELARLDDAAFRARFSKSPVKRIGRARFLRNVLVAIGNSGEPGLAVDAGRHLSDAHPLVRGAAVWALSRLLPPAEFAALRAAHDTETDPEVRAEWRPAPVEPAGVHA

SEQ ID NO: 74487 - protein, 391 aa, Ancylobacter rudongensis
  misc_feature (1)..(391): tr|A0A1G4SMJ6|A0A1G4SMJ6_9RHIZ Epoxyqueuosine reductase OS=Ancylobacter rudongensis OX=177413 GN=queG PE=3 SV= 1
MLRGSGFLTPEAARDYLFALAREEGFDAMGIAAADAIPEAGPRLHQWIAEGAHGDMEWMPETAARRAAPANMWPEVGSLLMLGLNYGPDQDPRAILAERTRGAISVYAQGDDYHELIKGKLKRIASRFVPRAGAAGTVEVKVFVDTAPLMEKPLAQAAGLGWQGKHTNLVSRDKGSWLFLGAIATNLALPPDARETDHCGSCRACLDACPTNAFPAPYQIDARRCISYLTIELKGAIPRELRPLVGNRIYGCDDCLAACPWNKFAALGREVRLAAREENRAPPLAELARLDDAAFRARFSKSPVKRIGRARFLRNVLVAIGNSGEAALAVDAGRHLGDAHPLVRGAAVWALSRLLPPAEFAALRAAHDTETDPEVRAEWRPAPVEPAGVHA

SEQ ID NO: 74488 - protein, 313 aa, Ancylomarina sp.
  misc_feature (1)..(313): tr|A0A425Y285|A0A425Y285_9BACT Epoxyqueuosine reductase OS=Ancylomarina sp. A4 OX=2283628 GN=queG PE=3 SV=1
MNLTLSAKSNLIKAKAIELGLDLCGIAKADFLDEEKENFQSWLDKKYHGEMLYMANNIEKRLDPRLLVENTKSIVVVGLNYFPKQQQQDPEAPVIAKYAYGKDYHFVLKDRLNQLLEYINTEIGEVSGRAFVDSAPILEHAWAKKAGLGWIGKNSLLLNRKIGSFLFLGELLIDMELEYEEEKYQDFCGGCSKCIRACPTGAITEPYVVNGSKCISYFTIELKGEIPEEMKGKFKNRVFGCDICQDVCPWNRMVKSNSVPEFQPDSDLLSLSKAEWEQLDAYKFGEIFKNSAVKRTKFKGLKRNLDFLHTESE

SEQ ID NO: 74489 - protein, 310 aa, Ancylomarina sp.
  misc_feature (1)..(310): tr|A0A4Q1JKH2|A0A4Q1JKH2_9BACT Epoxyqueuosine reductase OS=Ancylomarina sp. SHSM-M15 OX=2501299 GN=queG PE=3 S V=1
MNLTLAAKSQLIKDKALELGFDLCGIAEANFLSEEKERFTDWLDKDYHGEMGYMANNVEKRLDPRLLVENTKSVVVVALNYYPESKQEDAEAPVLAKYAYGKDYHFVIKEKLNALLAYINEEIGETQGRAFVDSAPILEHAWARKAGLGWIGKNSLLLNRKLGSFMFLGELLIDMPLEYNTEIYPDFCGGCNRCIRSCPTDAIVAPKVVNGSKCISYFTIELKDDITEEMKGKFQNRVFGCDICQDVCPWNRMVKPHSVEDFKPNPKILSLSKDEWFAMNAHEFGDLFKNSAVKRTKFKGLKRNLDFLTE

SEQ ID NO: 74490 - protein, 310 aa, Ancylomarina subtilis
  misc_feature (1)..(310): tr|A0A4Q7VAV5|A0A4Q7VAV5_9BACT Epoxyqueuosine reductase OS=Ancylomarina subtilis OX=1639035 GN=queG PE=3 SV=1
MNLTLAAKSQLIKDKAHELGFDLCGIAEANFLSEEKEHFTDWLSKDYHGQMGYMANNVEKRLDPRLLVENTKSVVVVALNYYPESKQEDAKAPVLAKYAYGKDYHFVLKEKLNTLLEYINEEIGETQGRAFVDSAPILEHAWARKAGLGWIGKNSLLLNRKLGSFMFLGELLIDLPLVYETETYPDFCGGCNRCIRSCPTDAIVAPQVVDGSKCISYFTIELKDDIPEEMKGKFQNRVFGCDICQDVCPWNRMVKPHSVEAFKPNPKILSLSKDEWFAMDAHKFGDLFKNSAVKRTKFKGLKRNLDFLIE

SEQ ID NO: 74491 - protein, 310 aa, Anditalea andensis
  misc_feature (1)..(310): tr|A0A074KYJ3|A0A074KYJ3_9BACT Epoxyqueuosine reductase OS=Anditalea andensis OX=1048983 GN=queG PE=3 SV=1
MSLPDKYASIIKSISKGLGFEFCGIAKAKFLEKEAPLLENWLNKNYHGQMAYMANHFDKRLDPTLLVDGAKTVVSLIYNYYPIEKLPSGPEDLKLAKYAYGRDYHFVIKEKLNAMLSVLQKEIGEIGGRAFVDSAPVMERQWAQRSGIGWLGKNSLLLNRSMGSFFFLAELIIDLEVTPDIPSTKDYCGSCTRCVDACPTDAITEAGVVDGSKCISYFTIELKEELPLSAKGKFENWMFGCDICQDVCPWNRFAKPNREPKFLPHPDLKNMTVKDWEEITAETFGKIFQKSAVKRTKLQGLKRNIDFLKP

SEQ ID NO: 74492 - protein, 228 aa, Andreesenia angusta
  misc_feature (1)..(228): tr|A0A1S1VAI0|A0A1S1VAI0_9FIRM Epoxyqueuosine reductase OS=Andreesenia angusta OX=39480 GN=queG_1 PE=4 SV=1
MREKIEKIAKEMGASLVGVGSIERLLSPEHSHLKTGISIAVRLSDQIMNDVVDSPTHTYYHHYRTVNFLIDQICLRISMEIQNRGYLAMGVAASQTVKSESENYKGLISHKMVATRAGIGWIGKSACLVTPEYGPRVRLGTVVTDMEMEYDKPRDISECGDCTICMVNCPSLAIRGVNWEVGKSREEIYDAYACSRHMSEEYRDIGRGSVCGICVSCCPYGKRLQNRT

SEQ ID NO: 74493 - protein, 376 aa, Andreesenia angusta
  misc_feature (1)..(376): tr|A0A1S1V7U7|A0A1S1V7U7_9FIRM Epoxyqueuosine reductase OS=Andreesenia angusta OX=39480 GN=queG_2 PE=4 SV=1
MRIEDKIRAEAERIGIDDLGIARGYDRMRILDILAERRRIGWELEFEHSDIEDRTRPEKLLEDYSSIIAVAVSYNLKRASGRDSGGILRGVMSVSAVGEDYHRVVREKAEKLMESIVAEHPSKYYIGVDTSPLLDREIAAAAGIGFFGKNTSIINPELGSRIFLGYILTTLELECGTKLEDGCGSCEICVKACPTNAIQGDYTMNPRRCIAYLTQTKLKIPFELREKMGFKIYGCDVCQNACPKNKKAKHCRAENFMSAEGLGLEHSTRVDIQKLLSMTNREFKETYGKTSSGWRGKNILKRNAIIALGNSGDRSYVEVIRPLLKDQSKIIKEYALWSLMKLDFEGTANYIEENRELLDKELEGEYRDIHNYLEER

SEQ ID NO: 74494 - protein, 382 aa, Andreprevotia lacus
  misc_feature (1)..(382): tr|A0A1W1XKS4|A0A1W1XKS4_9NEIS Epoxyqueuosine reductase OS=Andreprevotia lacus DSM 23236 OX=1121001 GN=queG PE =3 SV=1
MPDGDVTAQDAARPDPVAVVAQLKAWALELGFARAAVTGTDLSHAEAGLQAWLDAGYHGEMDYMARHGMKRARPAELVPGTQSVVSVFLPYRPPAVANSEAVMADGEKAHISRYALGRDYHKVLRNRLQTLADRLTALIGPFGHRVFVDSAPVLEVELAKQAGLGWRGKHTLLINRDYGSYFFLGELFTDLPLPADPPEQNEHCGRCTKCLDVCPTQAIVAPYTVDARRCISYLTIELKGSIPVEFRPMIGNRVYGCDDCQLCCPWNRFAVDTAEADFHVRHGLDDITLAELFAWSEADFQSRMAGSAIYRIGHAQWLRNLAVGLGNAPSTPRVLAALASRQQSDDETLREHVAWALAQHAARQKGENDDRRGAAPGHTTTG

SEQ ID NO: 74495 - protein, 389 aa, Aneurinibacillus aneurinilyticus
  misc_feature (1)..(389): tr|U1WRP8|U1WRP8_ANEAE Epoxyqueuosine reductase OS=Aneu rinibacillus aneurinilyticus ATCC 12856 OX=649747 GN=qu eG PE=3 SV=1
MKTRHDDTTVTDWSRLKQDVIQYAHHIGIDKIGFASADPFLMLKERLYKHREKGYESGFEEKDIEKRTHPERILPEVKSIIAIALAYPSRMEAPPKSEPGNYRGVMARVAWGEDYHHVLRDRLQKLERFLHERVPEIKTEIMVDTGALSDRAVAERAGLGWVGKNTSLITKEFGSWVYLGEMLTSVPFPPDQSIEEECGECTICIDSCPTGAIVQGGQLDSTRCVAFLTQVKDEIPEEFRSAIGNRLYGCDTCQQVCPKNRKINFTHHQEFTPDSDAAKPLLKPLLTISKKEFASRFGRSSGSWRGKKPIQRNAILALAHFKDKSAVPDLLHVLLEDERSVLRSTAAWALGRIGGEDAMLALKKAKIREKDAMVQKEIEKALINVENVE

SEQ ID NO: 74496 - protein, 388 aa, Aneurinibacillus danicus
  misc_feature (1)..(388): tr|A0A511V0V1|A0A511V0V1_9BACL Epoxyqueuosine reductase OS=Aneurinibacillus danicus OX=267746 GN=queG PE=3 SV= 1
MEQQHEMTATDWSRLKQGVIRYAHDIGIDKIGFAAADPFLVLKERLYKHRELGYESGFEEKDIEKRAHPEHTLPEVKSIIAIALAYPSRMESPPKSEQGNYRGIMARVSWGEDYHHVLRDRLKKLEQFLHEKVPGIRTEIMVDTGALSDRAVAERAGLGWVGKNTSLITPEFGSWVYLGEMLTSAPFPPDQPVIEDCGDCTLCIDFCPTGAIVQGGQLNSQRCVAFLTQLKDEIPEEFRPAIGNRLYGCDTCQQVCPKNRKLNFTHHPEFTPDPEAAKPLLKPLLTISKKQFASTFGRTSGAWRGKKPIQRNAILALAHFKDKSAVPDIIRVLTEDERPALRSTAAWALGRIGGDEAILALKKAKTREKEETVRQEIEKALLSRENVE

SEQ ID NO: 74497 - protein, 387 aa, Aneurinibacillus migulanus
  misc_feature (1)..(387): tr|A0A0D1XTB9|A0A0D1XTB9_ANEMI Epoxyqueuosine reductase OS=Aneurinibacillus migulanus OX=47500 GN=queG PE=3 SV =1
MRHDCTTVTDWSRLKQDVIRYAHHIGIDKIGFASADPFLMLKERLYKHREQGYESGFEEKDIEKRTHPESILPEVKSIIAIALAYPSRIEGPPKSEPGNYRGVMARVAWGEDYHHVLRERLQKLEQFLHEQVPEIKTEIMVDTGALSDRAVAERAGLGWVGKNTSLITKEFGSWVYLGEMLTSAPFPPDHPIEEECGDCTMCIDSCPTGAIIQGGQLDSTRCVAFLTQVKDEIPEEFRSAIGNRLYGCDTCQQVCPKNRKINFTHHPEFTPDPDAAKPLLKPLLTISKKQFASKFGRSSGSWRGKKPIQRNAILALAHFKDKSAVPDLLCVLLEDERSVLRSTAAWALGRIGGEEAMLALKKAKIREKDAVVQEEIEKALMSGESVE

SEQ ID NO: 74498 - protein, 389 aa, Aneurinibacillus migulanus
  misc_feature (1)..(389): tr|A0A1G9B6I7|A0A1G9B6I7_ANEMI Epoxyqueuosine reductase OS=Aneurinibacillus migulanus OX=47500 GN=queG PE=3 SV =1
MEIRHDCTTVTDWSRLKQDVIRYAHHIGIDKIGFASADPFLMLKERLYKHREQGYESGFEEKDIEKRTHPESILPEVKSIIAIALAYPSRIEGPPKSEPGNYRGVMARVAWGEDYHHVLRERLQKLEQFLHEQVPEIKTEIMVDTGALSDRAVAERAGLGWVGKNTSLITKEFGSWVYLGEMLTSAPFPPDHPIEEECGDCTMCIDSCPTGAIIQGGQLDSTRCVAFLTQVKDEIPEEFRSAIGNRLYGCDTCQQVCPKNRKINFTHHPEFTPDPDAAKPLLKPLLTISKKQFASKFGRSSGSWRGKKPIQRNAILALAHFKDKSAVPDLLCVLLEDERSVLRSTAAWALGRIGGEEAMLALKKAKIREKDAVVQEEIEKALMSGESVE

SEQ ID NO: 74499 - protein, 379 aa, Aneurinibacillus soli
  misc_feature (1)..(379): tr|A0A0U5B4L4|A0A0U5B4L4_9BACL Epoxyqueuosine reductase OS=Aneurinibacillus soli OX=1500254 GN=queG PE=3 SV=1
MNIEQLKQEVIAYAYSIGIDKIGFAAADPFLTLKERLYTHRERGYESGFEEKDIEKRVYPERTMEGARSIISIALAYPSRMEAPPKSEPGTYRGVLARVAWGEDYHNVLRDRLQKLEGFLQARVPDVQTVTMVDTGVLSDRAVAARAGLGWVGKNTSLITHEFGSWVYLGEMLTNVPFPPDTPIEDECGDCTLCIDSCPTSAIVQGGQLDSTRCVAFLTQVKDYIPDEFRTAVGNRLYGCDTCQQVCPKNRKKHVNLHPEFVPDNEAAKPLLKPLLSIGKKEFTARFGRSSAAWRGKKPIQRNAILALAHFKDTTAIPELIQLLRKDERPAIRGTAAWALGRIGGEDARVALEMAKNSERDNLAYSEIEKALSKLENVE

SEQ ID NO: 74500 - protein, 389 aa, Aneurinibacillus sp.
  misc_feature (1)..(389): tr|A0A109QE69|A0A109QE69_9BACL Epoxyqueuosine reductase OS=Aneurinibacillus sp. XH2 OX=1450761 GN=queG PE=3 SV =1
MEQKQHKQAETDWSHLKQEIIAYAHKIGIDKIGFASSAPFLTLKERLYKHRELGYESGFEEKDIEKRTHPEQIMPEAKSIIAIALAYPSRMEAPPKSTPGNYRGIMARVSWGEDYHRVLRDRLKKLEQFLHEKVPDIRTEIMVDTGALSDRAVAERAGLGWVGKNTSLITPEFGSWVYLGEMLTSAPFPPDKPIEDECGDCTICIDACPTGAIVQRGQLNSQRCIAFLTQVKDMIPEAFRPAVGNRLYGCDTCQQVCPKNRKINFTHHPEFVPDPEMAKPLLKPLLTISKKEFAAKFGRTSGAWRGKKPIQRNAILALAHFKDKSAVPDLIEIMTNDERPVMRGTAAWALGRIGGDAAITALKKAKTREKVKTVLREIEKALSLTENVE

SEQ ID NO: 74501 - protein, 389 aa, Aneurinibacillus thermoaerophilus; identical to SEQ ID NO: 74500
  misc_feature (1)..(389): tr|A0A1G7WN71|A0A1G7WN71_ANETH Epoxyqueuosine reductase OS=Aneurinibacillus thermoaerophilus OX=143495 GN=queG PE=3 SV=1

SEQ ID NO: 74502 - protein, 381 aa, Anoxybacillus amylolyticus
  misc_feature (1)..(381): tr|A0A160F3G6|A0A160F3G6_9BACI Epoxyqueuosine reductase OS=Anoxybacillus amylolyticus OX=294699 GN=queG PE=3 S V=1
MDIDQLKKEIIVYSQEIGIDKIGFASADPFIELKERLLQQQQLGYQSGFEEPDIEKRTNPSMLLPHAKSIIAIALAYPSKMKGAPRSTKEARRGIFCRASWGEDYHHILRQRLKMLEDFILAKVPSAQVKSMVDTGELADRAVAVRAGIGWSGKNCAVITPEFGSYVYLGEMITTIPFPPDIPIEDRCGTCTKCIEACPTGALVQEGQLNAQRCIAFLTQTKGFLSEEFRDKIGNRLYGCDTCQMVCPANKGKDFHLHPEMEPDPEIVKPLLKPLLHLSNREFKEKYGSLAGSWRGKKPIQRNAILALAHFKDRTAIPDLVHLLKEDSRPVIRGTAAWALGKIGDDSVAKILEQALQHEKDEEVLREIEKGLRMLHTQRKK

SEQ ID NO: 74503 - protein, 380 aa, Anoxybacillus amylolyticus
  misc_feature (1)..(380): tr|A0A4R1FCK7|A0A4R1FCK7_9BACI Epoxyqueuosine reductase OS=Anoxybacillus amylolyticus OX=294699 GN=queG PE=3 S V=1
MDVMALKQEVIEYSRSIGIDKIGFASADPFVELKERLRRQQELGYQSGFEEPDIEKRTNPSLLLPEAKSIIAIALAYPSKMKNAPRGTKTERRGVFCRASWGKDYHDVLRERLQQLEEFLLAKVPHARVRSMVDTGELADRAVAERAGIGWSGKNCSIITPEFGSYVYLGEMITNIPFPPDEPVENRCGTCTKCIDACPTGALVQGGQLNAQRCLSFLTQTKGFLADEFREKIGNRLYGCDTCQQVCPENKGKDFHLHPEFEPDPEAVKPKLIPLLQMSNREFKETFGAMAGSWRGKKPIQRNAILALAHYKDQTAVPHLLRLLKEDSRPVIRGTAAWALGKIGDPSAKPYLEAARQTEADADVIAEIEKGLKLLAEAKE

SEQ ID NO: 74504 - protein, 378 aa, Anoxybacillus ayderensis
  misc_feature (1)..(378): tr|A0A1X6M9R9|A0A1X6M9R9_9BACI Epoxyqueuosine reductase OS=Anoxybacillus ayderensis OX=265546 GN=queG PE=3 SV= 1
MDVKALKEEIIQYSRTIGIDKIGFASADPFFELKERLRQQQQLGYQSGFEEPDIEKRTTPSLLLPEARSIIAIALAYPSKLKNAPRSTKKERRGIFCRASWGRDYHVILRERLQKLEQFILERVPDAKVKSMVDTGELADRAVAERAGIGWSGKNCSIITHEFGSYVYLGEMITNIPFPPDTPIEDECGTCTRCIDACPTGALVQGGQLNAQRCIAFLTQTKTFIPDEFRDKIGNRLYGCDTCQLVCPKNKGKDFHFHPEMEPDPEVVKPLLKPLLHMTNRQFKETFGHISGAWRGKKPIQRNAIIALAHYKDESAIDDLFTLLQEDSRPVIRGTAAWALGKIGNRKVVPMLQQAKQREQDEDVIREIEKALAMFENV

SEQ ID NO: 74505 - protein, 378 aa, Anoxybacillus ayderensis
  misc_feature (1)..(378): tr|A0A0D0HRM4|A0A0D0HRM4_9BACI Epoxyqueuosine reductase OS=Anoxybacillus ayderensis OX=265546 GN=queG PE=3 SV= 1
MDVEALKEEIIQYSRTIGIDKIGFASADPFFELKERLRQQQQLGYQSGFEEPDIEKRTTPSLLLPEARSIIAIALAYPSKLKNAPRSTKKERRGIFCRASWGRDYHVILRERLQKLEQFILERVPDAKVKSMVDTGELADRAVAERAGIGWSGKNCSIITHEFGSYVYLGEMITNIPFPPDTPIEDECGTCTRCIDACPTGALVQGGQLNAQRCIAFLTQTKTFIPDEFRDKIGNRLYGCDTCQLVCPKNKGKDFHFHPEMEPDPEIVKPLLKPLLRMTNRQFKETFGHISGAWRGKKPIQRNAIIALAHYKDESAIDDLFTLLREDSRPVIRGTAAWALGKIGNRKVVPMLQQAKQREQDEDVIREIEKALAMFENV

SEQ ID NO: 74506 - protein, 389 aa, Anoxybacillus flavithermus
  misc_feature (1)..(389): tr|A0A150LKW4|A0A150LKW4_9BACI Epoxyqueuosine reductase OS=Anoxybacillus flavithermus OX=33934 GN=queG PE=3 SV =1
MDAAALKQEIIEYSKTIGIDKIGFASADPFVELKERLRRQQELGYQSGFEEQDIEKRTNPSLLLPEAKSIIAIALAYPSKIKNAPRGTKMERRGIFCRASWGKDYHDVLRERLEKLEAFILEKVPHARVKSMVDTGELADRAVAERAGIGWSGKNCSIITLEFGSYVYLGEMITNIPFPPDEPVESRCGTCTKCIDACPTGALVQGGQLNAQRCISFLTQTKGFLADEFRDKIGNRLYGCDTCQMVCPENKGKDFHLHPEMEPDPEVVKPKLIPLLHISNREFKEKFGSLAGAWRGKKPIQRNAILALAHYKDKTAVPHLLKLLKEDSRPVIRGTAAWALGKIGDMRVIPDLEEAGRTEKDHEVLLEIQKGLQLLRSKQEKGKNRSPAT

SEQ ID NO: 74507 - protein, 378 aa, Anoxybacillus flavithermus
  misc_feature (1)..(378): tr|R4FA23|R4FA23_9BACI Epoxyqueuosine reductase OS=Anox ybacillus flavithermus NBRC 109594 OX=1315967 GN=queG P E=3 SV=1
MDVEALKEEIIQYSRTIGIDKIGFAHADPFFELKERLRHQQQLGYESGFEEPDIEKRTTPSLLLPEARSIIAIALAYPSKLKNAPRSTKTERRGIFCRASWGQDYHVVLRDRLQKLEQFILERVPGAKVKSMVDTGELSDRAVAERAGIGWSGKNCSIITPEFGSYVYLGEMITNIPFPSDAPIEDECGACTRCIDACPTGALVQGGQLNAKRCIAFLTQTKTFIPDEFRDKIGNRLYGCDTCQLVCPKNKGKDFHLHPEMEPDPEVVKPLLKPLLHMTNRQFKETFGHLSGGWRGKKPIQRNAIIALAHYKDESAIDDLLILLQKDSRPVIRGTAAWALGKIGNYEVVPMLKKAKEREQDEDVIREIEKALAMLENV

SEQ ID NO: 74508 - protein, 378 aa, Anoxybacillus gonensis
  misc_feature (1)..(378): tr|A0A0A2SNN6|A0A0A2SNN6_9BACI Epoxyqueuosine reductase OS=Anoxybacillus gonensis OX=198467 GN=queG PE=3 SV=1
MDVAALKEEIIQYSRTIGIDKIGFASADPFSELKERLREQQRLGYESGFEEPDIDKRTTPSLLLKEARSIIAIALAYPSKLKNAPRSTKKERRGIFCRASWGQDYHIILRDRLQKLEQFILTRVPDAKVKSMVDTGELSDRAVAERAGIGWSGKNCSIITPEFGSYVYLGEMITNIPFPPDAPIEDECGTCTRCIDACPTGALVQGGQLNAKRCIAFLTQTKTFIPDEFRDKIGNRLYGCDTCQLVCPKNKGKDFHFHPEMEPDPEVVKPLLKPILHMTNRQFKETFGHLSGAWRGKKPIQRNAIIALAHYKDESAIDDLFVLLQEDSRPVIRGTAAWALGKIGNRKVVPMLQQAKEREQDEDVIREIEKALAMFENV

SEQ ID NO: 74509 - protein, 378 aa, Anoxybacillus gonensis
  misc_feature (1)..(378): tr|M5QSC0|M5QSC0_9BACI Epoxyqueuosine reductase OS=Anox ybacillus gonensis OX=198467 GN=queG PE=3 SV=1
MDVEALKEEIIQYSRTIGIDKIGFASADPFFELKERLRQQQQLGYQSGFEEPDIEKRTTPSLLLPEARSIIAIALAYPSKLKNAPRSTKKERRGIFCRASWGRDYHVILRERLQKLEQFILERVPDAKVKSMVDTGELADRAVAERAGIGWSGKNCSIITHEFGSYVYLGEMITNIPFPPDTPIEDECGTCTRCIDACPTGALVQGGQLNAQRCIAFLTQTKTFIPDEFRDKIGNRLYGCDTCQLVCPKNKGKDFHFHSEMEPDPEVVKPLLKPLLHMTNRQFKETFGHISGAWRGKKPIQRNAIIALAHYKDESAIDDLFTLLREDSRPVIRGTAAWALGKIGNRKVVPMLQQAKQREQDEDVIREIDKALAMLENV

SEQ ID NO: 74510 - protein, 378 aa, Anoxybacillus kamchatkensis
  misc_feature (1)..(378): tr|A0A4S3L0Z7|A0A4S3L0Z7_9BACI Epoxyqueuosine reductase OS=Anoxybacillus kamchatkensis OX=196180 GN=queG PE=3 SV=1
MDVEALKEETIQYSRTIGIDKIGFASADPFFELKERLRQQQQLGYQSGFEEPDIEKRTTPSLLLPEARSIIAIALAYPSKLKNAPQSTKKERRGIFCRASWGRDYHVILRERLQKLEQFILERVPDAKVKSMVDTGELADRAVAERAGIGWSGKNCSIITHEFGSYVYLGEMITNIPFPPDTPIEDECGTCTRCIDACPTGALVQGGQLNAQRCIAFLTQTKTFIPDEFRDKIGNRLYGCDTCQLVCPKNKGKDFHFHPEMEPDPEVVKPLLKPLLHMTNRQFKETFGHISGAWRGKKPIQRNAIIALAHYKDESAIDDLFTLLREDSRPVIRGTAAWALGKIGNRKVVPMLQQAKQREQDEDVIREIDKALAMLENV

SEQ ID NO: 74511 - protein, 378 aa, Anoxybacillus kamchatkensis
  misc_feature (1)..(378): tr|A0A346DEI2|A0A346DEI2_9BACI Epoxyqueuosine reductase OS=Anoxybacillus kamchatkensis G10 OX=1212546 GN=queG PE=3 SV=1
MDVEALKEEIIQYSRTIGIDKIGFASADPFFELKERLRQQQQLGYQSGFEEPDIEKRTTPSLLLPEARSIIAIALAYPSKLKNAPRSTKKERRGIFCRASWGRDYHVILRERLRKLEQFILERVPDAKVKSMVDTGELADRAVAERAGIGWSGKNCSIITHEFGSYVYLGEMITNIPFPPDTPIEDECGTCTRCIDACPTGALVQGGQLNAQRCIAFLTQTKTFIPDEFRDKIGNRLYGCDTCQLVCPKNKGKDFHFHSEMEPDPEVVKPLLKPLLHMTNRQFKETFGHISGAWRGKKPIQRNAIIALAHYKDESAIDDLFTLLREDSRPVIRGTAAWALGKIGNRKVVPMLQQAKQREQDEDVIREIDKALAMLENV

SEQ ID NO: 74512 - protein, 378 aa, Anoxybacillus pushchinoensis
  misc_feature (1)..(378): tr|A0A1I0TU10|A0A1I0TU10_9BACI Epoxyqueuosine reductase OS=Anoxybacillus pushchinoensis OX=150248 GN=queG PE=3 SV=1
MDVAALKEEIIQYSRTIGIDKIGFASADPFSELKERLREQQRLGYESGFEEPDIDKRTTPSLLLKEARSIIAIALAYPSKLKNAPRSTKKERRGIFCRASWGQDYHIILRERLQKLEQFILTRVPDAKVKSMVDTGELSDRAVAERAGIGWSGKNCSIITPEFGSYVYLGEMITNIPFPPDAPIEDQCGTCTRCIDACPTGALVQGGQLNAKRCIAFLTQTKTFIPDEFRDKIGNRLYGCDTCQLVCPKNKGKDFHFHPEMEPDPEVVKPLLKPILHMTNRQFKETFGHLSGAWRGKKPIQRNAIIALAHYKDESAIDDLFVLLQEDSRPVIRGTAAWALGKIGNRKVVPMLQQAKEKEQDEDVIREIDNALAMLKRV

SEQ ID NO: 74513 - protein, 378 aa, Anoxybacillus sp.
  misc_feature (1)..(378): tr|A0A1V3FXU6|A0A1V3FXU6_9BACI Epoxyqueuosine reductase OS=Anoxybacillus sp. 103 OX=1919277 GN=queG PE=3 SV=1
MDVEALKEEIIQYSRTIGIDKIGFAHADPFFELKERLRQQQQLGYESGFEEPDIEKRTNPSLLLPEARSIIAIALAYPSKLKNAPRSTKKERRGIFCRASWGQDYHIILRERLQKLEQFILTRVPDAKVKSMVDTGELSDRAVAERAGIGWSGKNCSIITPEFGSYVYLGEMITNIPFPPDEPIEDQCGTCTRCIDACPTGALVQGGQLNAKRCIAFLTQTKTFIPDEFRDKLGNRLYGCDTCQLVCPKNKGKDFHLHPEMEPDPEVVKPLLKPLLHMTNRQFKETFGHLSGAWRGKKPIQRNAIIALAHYKDESAIDDLLILLQKDSRPVIRGTAAWALGKIGNYEVVPMLKKAKEREQDEDVIREIEKALAMLENV

SEQ ID NO: 74514 - protein, 378 aa, Anoxybacillus sp.
  misc_feature (1)..(378): tr|A0A094M6W9|A0A094M6W9_9BACI Epoxyqueuosine reductase OS=Anoxybacillus sp. KU2-6(11) OX=1535751 GN=queG PE=3 SV=1
MDVEALKEEIIQYSRTIGIDKIGFASADPFFELKERLRQQQQLGYQSGFEEPDIEKRTIPSLLLSEARSIIAIALAYPSKLKNAPRSTKTERRGIFCRASWGQDYHVVLRDRLQKLEQFILERVPDAKVKSMVDTGELADRAVAERAGIGWSGKNCSIITHEFGSYVYLGEMITNIPFPPDTPIEDECGTCTRCIDACPTGALVQGGQLNAKRCIAFLTQTKTFIPDEFRDKIGNRLYGCDTCQLVCPKNKGKDFHLHPEMEPDPEVVKPLLKPLLHMTNRQFKETFGHLSGAWRGKKPIQRNAIIALAHYKDESAIDDLLILVQKDSRPVIRGTAAWALGKIGNRKVMPMLQQAKEREQDEDVIREIEKALAMLENV

SEQ ID NO: 74515 - protein, 378 aa, Anoxybacillus suryakundensis
  misc_feature (1)..(378): tr|A0A0K6GKL2|A0A0K6GKL2_9BACI Epoxyqueuosine reductase OS=Anoxybacillus suryakundensis OX=1325335 GN=queG PE= 3 SV=1
MDVVALKEEIIQYSRTIGIDKIGFTSADPFFELKERLRQQQHLGYQSGFEEPDIDKRTNPSLLLSEARSIIAIALAYPSKLKNAPRSTKTERRGIFCRASWGQDYHVILRDRLQKLEQFILARVPNARVKSMVDTGELADRAVAERAGIGWSGKNCSIITREFGSYVYLGEMITNIPFPPDTPIEDECGTCTRCIDACPTGALVQGGQLNAKRCIAFLTQTKTFIPDEFRDKIGNRLYGCDTCQLVCPKNKGKDFHFHPEMEPDPEVVKPLLKPLLHMTNRQFKETFGHLSGAWRGKKPIQRNAIIALAHYKDESAIDDLLMLLREDSRPVIRGTAAWALGKIGNRKVMPMLQQAKENEQDEDVIQEIDKALVMLENV

SEQ ID NO: 74516 - protein, 378 aa, Anoxybacillus thermarum
  misc_feature (1)..(378): tr|A0A0D0RZ03|A0A0D0RZ03_9BACI Epoxyqueuosine reductase OS=Anoxybacillus thermarum OX=404937 GN=queG PE=3 SV=1
MDVEALKEEIIQYSRTIGIDKIGFASADPFFELKERLRQQQQLGYQSGFEEPDIEKRTTPSLLLPEARSIIAIALAYPSKLKNAPRSTKKERRGIFCRASWGRDYHVILRDRLQKLEQFILERVPDAKVKSMVDTGELADRAVAERAGIGWSGKNCSIITHEFGSYVYLGEMITNIPFPPDTPIEDECGTCTRCIDACPTGALVQGGQLNAQRCIAFLTQTKTFIPDEFRDKIGNRLYGCDTCQLVCPKNKGKDFHFHPEMEPDPEVVKPLLKPLLHMTNRQFKETFGHISGAWRGKKPIQRNAIIALAHYKDESAIDDLFTLLREDSRPVIRGTAAWALGKIGNRKVVPMLQQAKQREQDEEVIREIDKALAMLENV

SEQ ID NO: 74517 - protein, 379 aa, Anoxybacillus vitaminiphilus
  misc_feature (1)..(379): tr|A0A327Y3K9|A0A327Y3K9_9BACI Epoxyqueuosine reductase OS=Anoxybacillus vitaminiphilus OX=581036 GN=queG PE=3 SV=1
MDMVALKKEIIEYSKTIGIDKIGFASADVFTELKERLRRQQELGYQSGFEEPDIEKRTNPSLLLPGAKSIIAIALAYPSKMKNAPRSTREERRGIFCRASWGKDYHHILRERLQKLEEFILEKVPNAQLKSMVDTGELADRAVAERAGIGWSGKNCSIITPEFGSYVYLGEMITNIPFPPDTPIEDRCGTCNKCIEVCPTGALVQGGQLNAQRCIAFLTQTKGFLADEFRDKIGNRLYGCDTCQTVCPENKGKDFHLHPEMEPDPEIVKPKLKPLLHISNREFKEKFGSISGSWRGKKPIQRNAILALAHYKDKTAVSDLLKLLNEDSRPVIRGTAAWALGKIGEKSVIPFLEEAKRAEKDEEVLKEIDKGLHLLLNQD

SEQ ID NO: 74518 - protein, 371 aa, Anoxybacter fermentans
  misc_feature (1)..(371): tr|A0A3Q9HRA3|A0A3Q9HRA3_9FIRM tRNA epoxyqueuosine(34) reductase QueG OS=Anoxybacter fermentans OX=1323375 GN= BBF96_10790 PE=4 SV=1
MTFEERLKKYAKEIGIDLIGITTAKPFYEAYNRLEKMKRLGYLSPWTEMDFKKRCFPKLLMKDAASLIAVGISYLVKEDDGEEDDKTLFYGKLARFAQFEDYHKILRSKMEELVSFIKKKYPEVKAKIFVDTGPLIDREVAYRAGLGFFGKNSALINPEYGSFLALGEILLNIPLKPDKPMKNGCGDCILCLKACPQQAIKAPGEIQTNECLSHYTQEKGLFNEKIRRKLGLRLWGCDTCQEVCPYNQKARPGSGIFKVHKLGKKPDLEQILKLSNREYRKLVGETAMAWRGKRILQRNALINLGNLKDPHAISILKEALKDPRPIIRGAAAWAIGEIGGKEAKTILARALQKEKDEQVREELRKGLEKIL

SEQ ID NO: 74519 - protein, 312 aa, Anseongella ginsenosidimutans
  misc_feature (1)..(312): tr|A0A4R3KS96|A0A4R3KS96_9SPHI Epoxyqueuosine reductase OS=Anseongella ginsenosidimutans OX=496056 GN=queG PE= 3 SV=1
MDQAAAYTKLIKAEAKRLGFLFCGISRADFLEEEAVQLEKWLREGRHGRMQYMENHFDKRLDPRLLVEGARSVISLGLNYYTPRSQEDPEAPRISRYAYGKDYHFVIKDKLKELLFFIQSAIGEVGGRAFVDSAPVMDKAWARRSGLGWTGKNTNLINKQTGSFFFLAELVIDLELEYDNPAADHCGTCTRCIDACPTEAISAPYEIDGSKCISYFTIELKDQLPEGFHGQFENWMFGCDTCQDVCPWNRFSKPHSEPAFDPHPDLLGMKKQEWEELTEETFREVFRGSAVKRTKFSGLKRNIGFLRPNNIS

SEQ ID NO: 74520 - protein, 298 aa, Antarcticibacterium flavum
  misc_feature (1)..(298): tr|A0A5B7XA11|A0A5B7XA11_9FLAO Epoxyqueuosine reductase OS=Antarcticibacterium flavum OX=2058175 GN=queG PE=3 SV=1
MIKTEAKRLGFMSCGISKAEFLEVEAPRLENYLEKGMHGEMHYMENHFDKRLDPTKLVEGSKSVISLLLNYYPEKTQQEGTYKISKYAYGRDYHFIIKDKLKDLLKFISEEIGEVDGRAFVDSAPVLDKAWAAKSGLGWIGKNSNLLTRQVGSFYFIAELIIDLELEYDTPVTDHCGSCTACIDACPTQAIVEPYKVDGSKCISYFTIELKEELPSSVKGQFDDWMFGCDICQDVCPWNRFSKPHNEPLFNPHPQLLEMDKKDWEEITQETFNEIFRKSAVKRTKYSGLKRNIDFLKK

SEQ ID NO: 74521 - protein, 307 aa, Antarcticibacterium sp.
  misc_feature (1)..(307): tr|A0A5B8YQA4|A0A5B8YQA4_9FLAO Epoxyqueuosine reductase OS=Antarcticibacterium sp. PAMC 28998 OX=2585771 GN=qu eG PE=3 SV=1
MNPAYKYSQLIKAEARRLGFMSCGISKAGFLEAEAPRLENYLKKGMHGEMHYMENHFDKRLDPTKLVEGSKSVISLLLNYYPHQLQRQDSFKLSKYAYGTDYHFVIKDKLKDLLNYMRTEIGEIEGRAFVDSAPVLDKAWAAKSGLGWIGKNSNLLTKQVGSFYFIAELIVDLDLVYDSPVTDHCGSCTACIDACPTQAIIEPYKVDGSKCISYFTIELKDEIPPNVGGKFEDWMFGCDICQDVCPWNKFSKSHNEPLFDPHPKLLEMDKKEWQEITKETFNEIFKRSAVKRTKFEGLKRNIKFLED

SEQ ID NO: 74522 - protein, 355 aa, Antarctobacter heliothermus
  misc_feature (1)..(355): tr|A0A222DYI0|A0A222DYI0_9RHOB Epoxyqueuosine reductase OS=Antarctobacter heliothermus OX=74033 GN=queG PE=3 S V=1
MVDLTERLKREALDVGFADCRICRPGDVPEVMARLRGFLHKGYHGQMGWLAERVHWRGAPDVLWPEAQSVIMLAENYGPDDDPLAVLEVRDRAAISVYARNRDYHDVVKKRLKRLGRWLIDTAGGEIKVFVDTAPVPEKPLAQAAGLGWQGKHSNLVSRQLGSWLFLGCVFTTLELTPDGAERDHCGSCRACLDICPTNAFPAPYQVDARLCISYLTIEHKGPVDEGLRPGLGNRIYGCDDCLAVCPWNKFARRAEEVKYHARDDLVAPPLADLAMLDDARFRARFSGSPIKRIGRDRFVRNVCYAIGNSGLPTLIPSVQALCEDTDEAVRDAARWAVLRLQARVSGLSGKQDGR

SEQ ID NO: 74523 - protein, 354 aa, Antarctobacter heliothermus
  misc_feature (1)..(354): tr|A0A239M1D2|A0A239M1D2_9RHOB Epoxyqueuosine reductase OS=Antarctobacter heliothermus OX=74033 GN=queG PE=3 S V=1
MDLTERVKREALEVGFADCRICRPGDVPEVMARLRAFLDRGYHGQMGWMAERVHWRGAPDVLWPEARSVIMLAENYGPDDDPLAVLEARDRAAISVYARNRDYHDVVKKRLKRLGRWLIDTAGGEIKVFVDTAPVPEKPLAQAAGLGWQGKHSNLVSRQLGSWLFLGSVFTTLELTPDGAERDHCGSCRACLDICPTDAFPAPYQVDARRCISYLTIEHKGPIDEDLRPGLGNRIYGCDDCLAVCPWNKFARTAEEVKYHARDDLVAPPLADLAMLDDAGFRARFSGSPIKRIGRDRFVRNVCYAIGNSGLTSLIPSVQALCDDSDEAVQDAARWAVLRLQAGLPGNAGEQDGR

SEQ ID NO: 74524 - protein, 324 aa, Aphanizomenon flosaquae
  misc_feature (1)..(324): tr|A0A0B0QNR4|A0A0B0QNR4_APHFL Epoxyqueuosine reductase OS=Aphanizomenon flos-aquae 2012/KM1/D3 OX=1532906 GN= queG PE=3 SV=1
MNEYISIDSAAVKAKAKELGFHEVGIAAVGDLEKTETEKLQAWLKMGYHADMEWMKNPKREDINLVMPEVRSLISVALNYYTPHQRPQEDEYGKISRYAWGRDYHKVIHKKLKELANWLESLGENVKARYYADTGPVQDKVWAQKAGIGWIAKNGNVITRKYGSWVFLAEILTNLQLESDRPSTQHCGTCTRCLQACPTGAITEPFIVDANRCIAYHTIENRAEELPADITPNLQGWVAGCDICQDICPWNQRFAQATNVKDFQPYPGNLAPKLVELAQISNEEWDKRFTASALRRIKPEMLRRNARANLDKSRHNNDPESNNF

SEQ ID NO: 74525 - protein, 324 aa, Aphanizomenon flosaquae
  misc_feature (1)..(324): tr|A0A1B7X2S5|A0A1B7X2S5_APHFL Epoxyqueuosine reductase OS=Aphanizomenon flos-aquae WA102 OX=1710896 GN=queG P E=3 SV=1
MPECTSISSIVVKAKAKELGFHEVGITAVGDLDPTETEKLPAWLKMGYHADMEWMENPQRQQISLIMPDVRSLISVALNYYTPHERPHGNEYGKISRYAWGRDYHRIIHKKLKALAIWLESQGKEIKTRYYADTGPVQDKVWAQKAGIGWIAKNGNVITRKYGSWVFLAEILTNIDLESDRPSSQHCGTCTRCLQACPTGAITAPFVVDANRCIAYHTIENRSPELPPDITPHLQGWVAGCDICQDVCPWNQRFAQTTDVTDFQPYPGNLAPKLVELAQISKEEWDTKFTASALRRIKPEMLRRNARANLDKSRHNNDPEDNNF

SEQ ID NO: 74526 - protein, 328 aa, Aphanocapsa feldmannii
  misc_feature (1)..(328): tr|A0A524RVJ2|A0A524RVJ2_9CYAN Epoxyqueuosine reductase OS=Aphanocapsa feldmannii 277cI OX=2507554 GN=queG PE= 3 SV=1
MKRGTASRPPAAAMTVRGLAEALKQRARAEGFGPVGIALLETATSLPARTAALRRWLEAGHGASMGWMRDPRRQSIEALLPGVRSVLAVGLNYWVEQRQQDGVPRIGRYGWGRDYHRVIDRRLRAVGRWLSEQQPGCRWRACVDSAPLMDKAWAEAAGLGWIGKHSNLINRSAGSWLLLGHLLTDLCLEGDTAAQPLCGSCSLCLDACPTDAISEPFVVDSRRCIGFHTVENREASLPREISSQLQGWVAGCDICQEVCPWNRDPRPSCDPQLQPRDWVLQAGADALLNRSDGEWDAALRGSALRRIKPWMWRRNIRAAMEGAVPGTD

SEQ ID NO: 74527 - protein, 309 aa, Aphanocapsa feldmannii
  misc_feature (1)..(309): tr|A0A524RFI5|A0A524RFI5_9CYAN tRNA epoxyqueuosine(34) reductase QueG (Fragment) OS=Aphanocapsa feldmannii 288 cV OX=2507555 GN=queG PE=3 SV=1
AEALKQRARAEGFGPVGIALLETATSLPARTAALRRWLEAGHGASMGWMRDPRRQSIEALLPGVRSVLAVGLNYWVEQRQQDGVPRIGRYGWGRDYHRVIDGRLRAVGRWLSEQQPGCRWRACVDSAPLMDKAWAEAAGLGWIGKHSNLINRSAGSWLLLGHLLTDLCLEGDTAAQPLCGSCSLCLDACPTDAISEPFVVDSRRCIGFHTVENREASLPREISSQLQGWVAGCDICQEVCPWNRDPRPSCDPQLQPRDWVLQAGADALLNRSDGEWDAALRGSALRRIKPWMWRRNIRAAMEGAVPGTD

SEQ ID NO: 74528 - protein, 323 aa, Aphanothece cf.
  misc_feature (1)..(323): tr|A0A2T1EVL3|A0A2T1EVL3_9CHRO Epoxyqueuosine reductase OS=Aphanothece cf. minutissima CCALA 015 OX=2107695 GN =queG PE=3 SV=1
MTDPGSLSALAAALRARAEGLGFAPVGLAAVPGSRRLPLRTAALERWLAAGHQAGMGWMEDPRRRRIEALLPGVRSVLAVGWNYHVAHGRAPGSLRVARYGWGRDYHRVIDGRLRQLGRWLEQAAPGSTWRACVDSAPLLDKAWAEEAGLGWIGKNGNLIHRRRGSWMLLGHLLTSLDLPPDRPAEPLCGACTACIDACPTGALDEPFVVDARRCIAYHTIENRQEALPAAIAGRLEGWVAGCDICQEVCPWNRRPLPVATDADVQPRPWLLDLRGAEALGWSDGDWDERLRASALRRIRPAMWRRNIRAALAGGWGQRGTAP

SEQ ID NO: 74529 - protein, 306 aa, Aphanothece hegewaldii
  misc_feature (1)..(306): tr|A0A2T1LXH0|A0A2T1LXH0_9CHRO Epoxyqueuosine reductase OS=Aphanothece hegewaldii CCALA 016 OX=2107694 GN=queG PE=3 SV=1
MVIEEQIKEKAIALGFHKVGIAAVGEEKQAVSHLQTWLAMGYHGDLEWMANPKRQNIKECYPEVRSVICVALNYYTPHQHSTEKEYGKISRYGWGRDYHKVLQKKLKALSRWLESHEEGIQCRYYVDTGPIQDKVWAQQAGIGWIAKNGNVISREYGSWVFLGEVLTNLELIPDVPHTEHCGTCRRCLDACPTGAIVQPFVVDANLCIAYHTIENRAEQLPEAIASKLSGWVAGCDICQDVCPWNQRFSQSTDIADFQPYPGNITPSLKELAELSPESWNERFTGSALRRIKPEMWRRNARANLDV

SEQ ID NO: 74530 - protein, 314 aa, Aphanothece sacrum
  misc_feature (1)..(314): tr|A0A401IBQ0|A0A401IBQ0_APHSA Epoxyqueuosine reductase OS=Aphanothece sacrum FPU1 OX=1920663 GN=queG PE=3 SV= 1
MNAIEWTQLIKEKAIDLGFHQVGIADVNTSFNDEAVNHLETWLGLGYQANMDWMANGKRLDIHNCMPSVKSVICVALNYYTSPQHSNHKEDGKISRYGWGRDYHKVMTKKLKAFSQWLETQAENIETRYYVDTGPIQDKVWAQRAGIGWIAKNGNVITKEYGSWVFLGEILTNLTLIPDQPHTQHCGTCTRCLEACPTGAIPQPFVVDANRCIAYHTIENRAKTLPDTITPHLDGWVAGCDICQDVCPWNQRFAEETDIEDFQPYPQNIAPKLTELANLSLEEWNSRFRSSALRRIKLEMWHRNARANLNREGI

SEQ ID NO: 74531 - protein, 305 aa, Apibacter adventoris
  misc_feature (1)..(305): tr|A0A2S8AB74|A0A2S8AB74_9FLAO Epoxyqueuosine reductase OS=Apibacter adventoris OX=1679466 GN=queG PE=3 SV=1
MNKEQLTYFIKKRAYELSFLECGISPSGFLEEEAPNLERWLKNEYHGKMKYMENHFDKRLNPSLLVEEAKSVLTFSYNYFPKKLQNPETYQIAKYAYGEDYHIVIREKLLKLVEEIKVMVGDFAYRVFTDSAPVMERAWAQKSGIGWIGKNSLLLSKKKGSYFFLAEIICDLELVYDNPFKTDHCGSCTRCIDACPTQAINEPRIIDSKKCISYLTIELKDEIGKEFNGKMNDWIFGCDICQDVCPWNRFSTPNSEEKFQPAPHLLNFTKKDWIHLEETTFNKLFKKSAIKRTKFSGLKRNIFMS

SEQ ID NO: 74532 - protein, 329 aa, Apibacter mensalis
  misc_feature (1)..(329): tr|A0A0X3AR79|A0A0X3AR79_9FLAO Epoxyqueuosine reductase OS=Apibacter mensalis OX=1586267 GN=queG PE=3 SV=1
MIFNFILLKVEIYIFKHINYELNKDQLTYFIKEKSKEYFFIGCGISRSKFLDEEAPKLEKWLKEGYHGSMKYLENNFDKRLDPGLLVEGAKSVISLLYNYYPQEKQDTESYHIAKYAYGEDYHQVIREKLQKLVQEIQDKVGQFSYRVFTDSAPILERAWAQKSGLGWIGKNSLLLSKQKGSFFFLAEIICDLELIYDEAFPTNHCGSCTRCIDACPTHAIIAERVIDSTRCISYLTIELKDQIGEEFDGKLKDWIFGCDICQDVCPWNRFSTPHNEEKFIPKPELLSYTKNDWNDINQETFKIIFKNSAVKRTKFSGFYRNILFNKKS

SEQ ID NO: 74533 - protein, 310 aa, Apibacter sp.
  misc_feature (1)..(310): tr|A0A563D8T6|A0A563D8T6_9FLAO Epoxyqueuosine reductase OS=Apibacter sp. AL1 OX=2509005 GN=queG PE=3 SV=1
MILNKEQLTQFIKQKSQELSFLDCGISKSGFLEEEAPRLEKWLKEGNQGKMSYLENHFDKRLNPSLLVDGAKSVISFSYNYYPSETQKPDTYKIAKYAYGEDYHIVIREKLEFLIHLIKEKVGDFSYRVFTDSAPVMERAWAKKSGLGWIGKNSLLLSKQKGSFFFLAEIICDLELEYDSPFKTNHCGSCTRCIDACPTQAIISEKVIDSRKCISYLTIELKDEIGEEFKGKMNDWIFGCDICQDVCPWNRFSKTNTEIRFQPSSDLLDFTYKDWEDLEEETFRKIFKYSAIKRAKYTGLKGNINFIKKK

SEQ ID NO: 74534 - protein, 308 aa, Apibacter sp.
  misc_feature (1)..(308): tr|A0A2S8A557|A0A2S8A557_9FLAO Epoxyqueuosine reductase OS=Apibacter sp. wkB309 OX=1679467 GN=queG PE=3 SV=1
MNKEQLTYFIKEKAKEYSFIGCGISRSRFLEEEAPKLEKWLKEGYHGNMKYLENNFDKRLNPGLLVDGAKSVISFLYNYYPQEKQNTESYHIAKYAYGEDYHLVIREKLQKFVEEIQDKVGQFSYRVFTDSAPVMERTWAQKSGLGWIGKNSLLLSKQKGSFFFLAEIICDLELNYDEAFPTNHCGSCTRCMDACPTQAIISERVIDSTKCISYLTIELKDQIGKEFDGKLKDWIFGCDICQDVCPWNRFSTPHKEDKFNPHPDLLSYTKNDWNDINEEAFKILFKNSAVKRTKFSGFQRNILFNKKT

SEQ ID NO: 74535 - protein, 389 aa, Aquabacter spiritensis
  misc_feature (1)..(389): tr|A0A4R3M1J9|A0A4R3M1J9_9RHIZ Epoxyqueuosine reductase OS=Aquabacter spiritensis OX=933073 GN=queG PE=3 SV=1
MAPAAAIPPPSDLPGLKARFATLAAAEGFDAFGVADPDAAPDAGPRLAAWIAARRHGEMEWMADTEDRRAHPRALWPDIRALIMLGFNYGPDEDPRAVLAARTKGAISVYARGEDYHDLIKAKLKRLARALLAAAGAGDVKVFVDTAPLMEKPLAMAAGLGWQGKHTNLVSRARGSWLFLGAIATTLPLPPDAPAADHCGACRACLDACPTRAFPAPYQIDARRCVSYLTIEHKGPIPRDLRPLMGNRIYGCDDCLAACPWNKFAQEGREMRLAARAENRAPDLSDLARLDEAGFRARFAKSPIKRTGRARMVRNVLIAMGNSGEPGFAAEAEARLVDEDPLVRGAAVWAVSRLVPAPAFAALAARHVGAETDPDVAEEWRVAGVQAAA

SEQ ID NO: 74536 - protein, 392 aa, Aquabacterium commune
  misc_feature (1)..(392): tr|A0A4R6R821|A0A4R6R821_9BURK Epoxyqueuosine reductase OS=Aquabacterium commune OX=70586 GN=queG PE=3 SV=1
MRHESADTAWNPDEVLASLRQWATELGFSQIGVADVDLSSAEAPLMAWLGRGFHGEMHYMAAHGLKRARPAELVPGTVRVITARMDYLPQALPDGWQAVSWERMATPSAAVVSLYAHGRDYHKVLRNRLQKLAERLAEAIGPFGHRAFTDSAPVLEVELASRSGLGWRGKHSLLLSRQSGSTFFLGEIYVDVPLPLTQPETAHCGQCTACIDVCPTGAIVEEGVVDARRCISYLTIELDGPIPEAMRPHIGNRIYGCDDCQLICPWNKFAQRARLPDFDTRIGLDRATLLQLWAWDEATFLRSTEGSAIRRIGFARWQRNIAVAMGNALAARADATGQPTGHLPDEPTDEPLRQAIRAALQAWLAQPPALGEQQAMVAEHVRWALAQVPADR

SEQ ID NO: 74537 - protein, 393 aa, Aquabacterium olei
  misc_feature (1)..(393): tr|A0A2U8FVW9|A0A2U8FVW9_9BURK Epoxyqueuosine reductase OS=Aquabacterium olei OX=1296669 GN=queG PE=3 SV=1
MRHEIRSPRQPDQAGSSDAPAASQPLSDPRAVLGALREWAAELGFSQIGVADVDLSSAEPGLLDWLARGFHGEMHYMASHGLKRARPAELVPGTVRVITARMDYLPTSLPEGWQRVEWRRLADPSQAGVSMYARGRDYHKVLRARLQKLADRLAAQIGPFGHRVFTDSAPVLEVELASRSGLGWRGKHTLLLSRDAGSTFFLGEIYVDVALPLTEPETAHCGACQACMTVCPTQAIVGEQQVDARRCISYLTIEHPGPVPLALRPLMGNRIYGCDDCQLACPWNKFARRARVPDFDVRPALAAPDLLGLWQWDEATFLRLTEGSPIRRIGHVRWQRNLAVAMGNALASPALAADTREDLVQALRRWADTTPLAGDDHALVAEHVAWALSQSPS

SEQ ID NO: 74538 - protein, 378 aa, Aquabacterium sp.
  misc_feature (1)..(378): tr|A0A5C8BBW7|A0A5C8BBW7_9BURK tRNA epoxyqueuosine(34) reductase QueG (Fragment) OS=Aquabacterium sp. OX=18725 78 GN=queG PE=3 SV=1
MAQLRQWATTLGFSQIGVASVDLSSAEPGLLAWLARGFHGEMHYMASHGLKRARPAELVPGTVRVITARMDYLPASVAAEGWQAVEWARLQRPDAAAVSMYARGRDYHKVLRARLQKLADQLAGLLGPLGYRVFTDSAPVLEVELASRSGVGWRGKHTLLLSREAGSTFFLGEIYVDVPLPLTEPVTAHCGACRSCMDLCPTQAIVGERQVDARRCISYLTIEHDGPIPHELRPLMGNRIYGCDDCQLACPWNKFAQRARVPDFDVRPALNDPTLLQLWQWDEATFLRLTEGSPIRRIGHARWQRNIAVAMGNALAAWRDRDLTADETALRDQLVQALQAWLDTPMVTGGGSGAGGRARALGAGPATRSAVTRDQRWI

SEQ ID NO: 74539 - protein, 384 aa, Aquabacterium sp.
  misc_feature (1)..(384): tr|A0A480APM8|A0A480APM8_9BURK Epoxyqueuosine reductase OS=Aquabacterium sp. W35 OX=2315236 GN=queG PE=3 SV=1
MGDRRGQGQAGPVEVERSRPPVDPAALLLQVQAWGQALGFSQIGVADVDLASAEPGLLAWLAAGHHGRMAYMAAHGLKRARPAELVPGTLRVITARMDYLPRTTNNITADDWQAQEAARLAQPQQAVVSVYARGRDYHKVLRQRLQTLADQLQQAVGPVGHRVFTDSAPVLEVELAARSGIGWRGKHTLLLHREAGSMFFLGEIYIDLALPLTPPVSGHCGACSACITACPTQAIVAPHRLDARRCISYLTIELDGAIPAEFRAAIGNRIYGCDDCQLACPWNKFAQRSPLPDFDERHGLGSASLLQLWDWDEAAFLRHTEGSAIRRIGIGRWRRNLAVALGNAWRATGDAALADALQHALPAADALLAEHIGWALAQRALPAV

SEQ ID NO: 74540 - protein, 389 aa, Aquamicrobium aerolatum
  misc_feature (1)..(389): tr|A0A1I3NT26|A0A1I3NT26_9RHIZ Epoxyqueuosine reductase OS=Aquamicrobium aerolatum DSM 21857 OX=1121003 GN=que G PE=3 SV=1
MACDLSPVQQDRLRGFLNAEAEKLGFDVISITKPGATPLAYGRLHEFIEAQRHGSMEWMAETADRRGDPRSLWPDVRSVIMLAMNYGPDHDPRALLQRKDRAAISVYARHRDYHDVIKGKLKELAQKFAARTGAQVKVFVDTAPVMEKPLAEAAGIGWQGKHTNLVSRDFGSWLFLASIFTEADLAADAPDPRGQCGSCRACLDACPTGAFPAPYQIDARRCISYLTIENKGPIPHEFREAIGNRIYGCDDCLAACPWNKFARTASEAKLVAREDLREPRIADLIGLDDAGFRALFSGSPVKRIGRDRFIRNVLIAAGNSGEMALVPQVRTLLGDASPLVRGAAVWALSRLLSATEFEADTRDMMLLETDAEVLAEFGAPESYKEEVLP

SEQ ID NO: 74541 - protein, 386 aa, Aquamicrobium defluvii
  misc_feature (1)..(386): tr|A0A011UTH9|A0A011UTH9_9RHIZ Epoxyqueuosine reductase OS=Aquamicrobium defluvii OX=69279 GN=queG PE=3 SV=1
MRTSISDPGKLRALIDREALRAGFDLCAVTSPDSIPKAPARLAQFVADRFHGSMEWMEETFERRARPSVLWPEVRSIIVLAMNYGPDHDPRGILSLRDRAAISVYARNRDYHDVMKGRLKEIAGKIVSRAGGDVKVFVDTAPVMEKPLAEAAGLGWQGKHTNLVSRTHGSWLFLGSIFTTAELEPDERDVDRCGSCRACLDACPTHAFPVPYRLDARRCISYLTIENKGPIPLEFREAMGNRIYGCDDCLAACPWNKFARTASEAKLAARADLREPRLADLLELDDPAFRALFSGSPIKRIGRDRFIRNVLIAAGNSGETGLIGQVRALAADASPLVRGAAIWALSRLLPWGEFAALAHPALRDETNADVRAEWVQGMDMAEKARA

SEQ ID NO: 74542 - protein, 388 aa, Aquamicrobium sp.
  misc_feature (1)..(388): tr|A0A4U6BIH0|A0A4U6BIH0_9RHIZ Epoxyqueuosine reductase OS=Aquamicrobium sp. LC103 OX=1120658 GN=queG PE=3 SV= 1
MGASRKPVASDRLRDFLEDEARKAGFAEIAVTTPDATPLAPARLGEYLALGRHASMEWMAETAERRSDPRKLWPDVRSVVVLAMNYGPDKDPLELLGKRERGAISAYARHRDYHDVIKGRLKEIAQKLAARSGADVKVFVDTAPVMEKPLAEAAGLGWQGKHTNLVSRAHGSWLFLGSIFTTAELRADAPERDHCGSCRACLDICPTAAFPAPYQLDARRCISYLTIEHKGPIPHEFRAAMGNRIYGCDDCLAVCPWNKFAQAASEAKLVARADLEEPALGELLALDDAEFRTFFSGSPIKRIGRDRFIRNVLTAAGNSASDALAEPCRRHLLDPSPLVRGAAVWALSQLLDEASFMELAAGARNEEDDDVKAEWSRAAARSHEGALQ

SEQ ID NO: 74543 - protein, 358 aa, Aquaspirillum sp.
  misc_feature (1)..(358): tr|A0A1U9JN35|A0A1U9JN35_9NEIS Epoxyqueuosine reductase OS=Aquaspirillum sp. LM1 OX=1938604 GN=queG PE=3 SV=1
MCPEPAQNRDYPELAQQIKAWAYELGFSGVSIGRAALPESVEQSLLDWLAAGFHGEMDYMARHGVLRARPAELVPGALTVISVRLPYRDPAAADMHAVLADGEKAAIARYALGRDYHKTLRNRLQKLADRLVAAVGPVGYRVFTDSAPLMEVALASQSGLGWRGKHTLLIQRDEGSFFFLGELLTDLPLPLDAPTDAHCGRCTRCLDACPTQAIVAPYQLDARRCISYLTIELAGSIPEPLRALIGNRVYGCDDCQLVCPWNRFAVPTSEADFAVRHGLDHASLASLFAWEASDFTQRMAGSPIYRIGHERWLRNLAVGLGNAPATPAVLAALLARRDHPSALVREHVGWALARQGVI

SEQ ID NO: 74544 - protein, 378 aa, Aquibacillus sp.
  misc_feature (1)..(378): tr|A0A516KDW1|A0A516KDW1_9BACI Epoxyqueuosine reductase OS=Aquibacillus sp. TKL69 OX=2594883 GN=queG PE=3 SV=1
MYYDELKEEIIAYSKSIGIDKIGFASVDVFSELKERLKRQQELGYQSGFEKGTNEERTEPKRLLPEAQSIIAIALAYPSRMKDAPKSVKGDRRGLFCRASWGRDYHDVLRDKLSQLAAYLEKRVPGFYHKMMVDTGELSDRAVAERAGIGFSGKNSMIITPEFGSYVYLGEMITNLPIPPDEPIEDSCGTCTKCIDACPTGALVTGGQLNAQRCIAFLTQTKDFLPDEYRSKIGNRLYGCDTCQLVCPKNHKKDFHLHPEMEPDPEIVKPRLIPLLKLSNREFKETYGEISGSWRGKKPIQRNAIIALAHYKEEGAVEDLIRVMKEDPRPVIRGTAAWALGKIGTDQAFEAIEQAKEKEEDEQVIQEMEKGLHFQVKI

SEQ ID NO: 74545 - protein, 358 aa, Aquicella lusitana
  misc_feature (1)..(358): tr|A0A370GCH0|A0A370GCH0_9COXI Epoxyqueuosine reductase OS=Aquicella lusitana OX=254246 GN=queG PE=3 SV=1
MQQLSHHIKQWGLALGFQQVGITDADLSTYEDRFLNWLAKGLHGKMDYMEKHGLKRSRPAELLPQTVRIISVRMDYLPPDTSIMTVLNDAKKGYISRYALGRDYHRLMRKRLEKLAKKMNEAAGQLGYRVFCDSAPVLEKPIAEKAGLGWIGKHTNLINSKAGSWFFLGEIYTDLPLIIDQPVEKSHCGSCTACLKICPTQAIIGPYQLDARRCISYLTIELRESIPIELRPLIGNRIYGCDDCQLVCPWNKFAKTTREADFHPRHDLQAPPLLDLFTWTEAEFMHKTEGSAIRRIGYECWLRNIAVALGNAPFDPTIVQALRERMEHVSAMVREHIEWALARQLAKNRKELTPTLQD

SEQ ID NO: 74546 - protein, 352 aa, Aquicella siphonis
  misc_feature (1)..(352): tr|A0A5E4PDK9|A0A5E4PDK9_9COXI Epoxyqueuosine reductase OS=Aquicella siphonis OX=254247 GN=queG PE=3 SV=1
MHSIKDKIRQWGRELGFQQIGIADTDLAHYEQRFLQWLAQGMHGKMDYMEKHGSKRARPGELIPGTLRIISARLDYLPPDTHCMQVLRDTQKGYISRYALGRDYHRLMRKRLDHLAEKISLLAGEFGYRAFCDSAPVLEKPIAEKAGLGWIGKHTNLIHPKTGSWFFLGEIYTDLPLPIDEPMTKSHCGSCTACLDVCPTQAIIGPYQLDARRCISYLTIELRDAIPAELRPLIGNRIYGCDDCQLVCPWNKFAKPTQEQDFHPRHDFSSPDLIELFAWTEEIFLKKTEGSAIRRIGHACWLRNIAVALGNAPRSEAVIHSLRSRLQHPSAMVREHTTWALERQLTAAKERT

SEQ ID NO: 74547 - protein, 341 aa, Aquicoccus porphyridii
  misc_feature (1)..(341): tr|A0A5A9Z7Q9|A0A5A9Z7Q9_9RHOB Epoxyqueuosine reductase OS=Aquicoccus porphyridii OX=1852029 GN=queG PE=3 SV=1
MGDDLKTRLVKQAQAEGFAAARVCRPWDVPHVMGNLRGFLAEGYHGSMGWLAERVHWRGDPATLWPEARSVIVLAENYGGGEVEPAPDHAGTVSIYARNRDYHDVLKKRLKRVARWLIEEAGGELKVFVDTAPVPEKPLGQAAGLGWQGKHTNLVSRELGSWFFIGSIFTTLDLPTDTREVDHCGSCRACLDACPTNAFPAPYKIDARRCISYLTIEHKGPVDEELRPMLGNRIYGCDDCLAACPWNKFAVAAHEVKYHAREDLIAPPLAELARLDDAQFRQKFSGSPIKRIGRGRFVRNVLYAVGNSGDPGLIPVAEALVDDEEPVVADAAHWALGRLRG

SEQ ID NO: 74548 - protein, 346 aa, Aquicoccus sp.
  misc_feature (1)..(346): tr|A0A4U7JCG7|A0A4U7JCG7_9RHOB Epoxyqueuosine reductase OS=Aquicoccus sp. SCR17 OX=2541728 GN=queG PE=3 SV=1
MKAALQNRAVEEGFDLCRVCRPGDIPQVPARLGDFLERGRHGQMDWLEARASWRGDPRVLWPEARSVIMLAESYTPEHDPLAVLERPDRAAISVYAQNRDYHDTVKKRLKRLARWLLEEAGRAGHEGAEVKVFVDTAPVAEKPLGEAAGLGWQGKHTNLLSRDLGNWFFIGSVFTTLGLEPDSPETDHCGSCRACLDACPTDAFPAPYQLDARRCISYLTIEHRGPVPVELREKMGNRIYGCDDCLAVCPWNKFAVEAREMKYRAREDLVAPRLADLARLDDAGFRAMFSGSPIKRIGRDRFVRNVLYAVGNSGDAALLPVARDLTGDADPVVAEAAGWAVARLGG

SEQ ID NO: 74549 - protein, 374 aa, Aquificaceae bacterium
  misc_feature (1)..(374): tr|A0A432EXB7|A0A432EXB7_9AQUI Epoxyqueuosine reductase OS=Aquificaceae bacterium OX=2053503 GN=queG PE=3 SV=1
MENDNSSKQVSDRKPIKTEVENALSSRTLQDLALKITIWGKELGFQKIGFSDIDLGKTEQQLQAWVKQGFHADMEWMHHHGSKRTRPAELVENTLSIISVRMDYLPPDGVDPELLLNHPEAAYISRYALGRDYHKLLRKRLQQLATKIQQEIGDFGYRVFVDSAPVMEKPIAAKAGLGWVGKHSNILSKESGSWFFLGEIYTDLPLQASQPVSDHCGSCSACIDVCPTQAIIAPYVVDARRCISYLTIELKGAIPEEFRHAIGNRIYGCDDCQLICPWNRFADYTQQADFAIRNKLDCSHLLTLFSWCEDDFLHRLQGSPIRRIGYERWLRNIAIALGNNPKNKLIISRLKEKRASCTPLVKEHIDWAIQQQSS

SEQ ID NO: 74550 - protein, 314 aa, Aquiflexum balticum
  misc_feature (1)..(314): tr|A0A1W2H1Q5|A0A1W2H1Q5_9BACT Epoxyqueuosine reductase OS=Aquiflexum balticum DSM 16537 OX=758820 GN=queG PE= 3 SV=1
MSNSSQLQKDKYAGIIKAHAKTLGFDFCGIAKAEFLEEEAPKLEAWLNSNYHGQMAYMANHFDKRLDPTKLVEGAKTVVSLVYNYYPDQKLSETKEDFKIAKYAYGKDYHFVIKDKLKSFLQHLKEEIGDIHGRAFVDSAPIMERQWAQKSGLGWLGKNSLLLNRQMGSFFFLAELVLDIDVSPDTPMMKDYCGTCTKCIDACPTDAIVQPGVVDGSKCISYFTIELKENIPSEMKGKFENWIFGCDICQDVCPWNSFSQPHQESQFNPHPDMKEMRKKDWIEITEETFKKVFAKSAVKRTGYNGFLRNIKFNL

SEQ ID NO: 74551 - protein, 309 aa, Aquimarina aggregata
  misc_feature (1)..(309): tr|A0A162YRB3|A0A162YRB3_9FLAO Epoxyqueuosine reductase OS=Aquimarina aggregata OX=1642818 GN=queG PE=3 SV=1
MDSRRKHTQFIKAEAKRLGFLSCGISKAGFLEEEAPRLEKWLHKNMHGQMQYMENHFDKRLDPTKLVEESKSVVSLLLNYYPSETQKDPEAPKISKYAYGTDYHFVIKDKLKELLHTIQEEVGEVHGRAFVDSAPVLDKAWAAKSGLGWIGKNSNLITQRVGSFYFIAELIIDLELEYDTPVTDHCGTCTACIDACPTQAIVEPYVVDGSKCISYFTIELKEEIPQDYRGKFDDWMFGCDVCQDVCPWNRFSKAHNEPLFNPKPELLEMTKKDWEEITQDVFSKVFQKSAVKRTKFSGLNRNIQFLKNK

SEQ ID NO: 74552 - protein, 308 aa, Aquimarina algiphila
  misc_feature (1)..(308): tr|A0A554VI88|A0A554VI88_9FLAO Epoxyqueuosine reductase OS=Aquimarina algiphila OX=2047982 GN=queG PE=3 SV=1
MNSKAKHTQLIKAEAKRLGFLSCGVSKAEFLEQEAPRLEQWLNNNMHGQMQYMENHFDKRLNPTLLVDDAKSVISLLLNYFPSEVQQDSEAPKISKYAYGTDYHFVIKDKLKQLLSFIQEEIGDVYGRAFVDSAPVLDKAWAAKSGLGWIGKNSNLLTQQVGSFYFIAELIVDLELEYDTPVTDHCGTCTACIDACPTQAIVEPYVVDGSKCISYFTIELKEEIPNGYKGQFDDWMFGCDVCQDVCPWNRFSKPHNEPLFHPKPELLEMTKKDWQEITQEVFSKVFQKSAVKRTKFSGLQRNIRFLED

SEQ ID NO: 74553 - protein, 307 aa, Aquimarina amphilecti
  misc_feature (1)..(307): tr|A0A1H7N9E3|A0A1H7N9E3_9FLAO Epoxyqueuosine reductase OS=Aquimarina amphilecti OX=1038014 GN=queG PE=3 SV=1
MSNIALHTQLIKTEAKRLGFLSCGISRAEFLEEEAPRLEKWLHQNMNGQMSYMENHFDKRLDPTKLVPDSKSVISLLLNYFPSETQKDSEAPKISKYAYGHDYHHVIKSKLKQLQEFISEQIGEVHGRAFVDSAPVLDKAWAARSGLGWIGKNSNLLTQKVGSYYFIAELIIDLDLDYDTPVTDHCGTCTACIDACPTQAIVDPYVVDGSKCISYFTIELKEEIPADYKGKFDNWMFGCDVCQDVCPWNRFSKPHSEPLFNPNPELLEMTKKDWEEITQDVFSKIFQKSAVKRTKFSGLNRNIQFLK

SEQ ID NO: 74554 - protein, 309 aa, Aquimarina atlantica
  misc_feature (1)..(309): tr|A0A023BWE5|A0A023BWE5_9FLAO Epoxyqueuosine reductase OS=Aquimarina atlantica OX=1317122 GN=queG PE=3 SV=1
MNPKAKYTQRIKSEAKRLGFLSCGISKAEFLEQEAPRLEKWLNQNMHGEMRYMENHFDKRLDPTKLVDDSKSVISLLLNYFPSEQQKDPEAPKLSKYAYGTDYHFVIKDKLKQLLQFIQEEIGEVHGRAFVDSAPVLDKAWAAKSGLGWIGKNSNLLTQQVGSFYFIAELIIDLDLEYDTPVTDHCGTCTACIDACPTQAIVEPYVVDGSKCISYFTIELKEEIPNSYKNQFDNWMFGCDVCQDVCPWNRFSKPHNEPLFNPKPELLEMSKKDWEEITQEVFSKVFQKSAVKRTKFSGLQRNIDFLYGS

SEQ ID NO: 74555 - protein, 307 aa, Aquimarina brevivitae
  misc_feature (1)..(307): tr|A0A4Q7PEL6|A0A4Q7PEL6_9FLAO Epoxyqueuosine reductase OS=Aquimarina brevivitae OX=323412 GN=queG PE=3 SV=1
MKSIEKHTVLIKSEAKRLGFLSCGVAKAGFLEEEAPRLEAWLQKGMHGEMQYMENHFDKRLDPTKLVEGSKSVISLLLNYFPSETQKDPEAPKISKYAYGKDYHFVIKDKLKALLHFIQENIGEVHGRAFVDSAPVLDKAWAAKSGLGWIGKNSNLLTKQVGSFYFIAELIVDLELAYDTPVTDHCGSCTACIDACPTQAITEPYVVDGSKCISYFTIELRDELPTKYQGKFDNWMFGCDVCQDVCPWNRFSKPHSEPLFDPNPALLTMNKQDWIELTQEVFADIFKKSAVKRTKYSGLMRNIKFLK

SEQ ID NO: 74556 - protein, 307 aa, Aquimarina sp.
  misc_feature (1)..(307): tr|A0A2D9Y019|A0A2D9Y019_9FLAO Epoxyqueuosine reductase OS=Aquimarina sp. OX=1872586 GN=queG PE=3 SV=1
MTLKEKHTALIKSQALKLGFISCGISKAGFLEEEAPRLEHWLNKNMHGEMKYMENHFDKRLDPTKLVEGSKSVVSLLLNYFPSDTQKDPEAPKISKYAYGTDYHFVIKDKLKSLLNYINEEIGDINGRAFVDSAPVLDKAWAAKSGLGWIGKNSNLLTKKVGSFYFIAELIIDLELEYDTPVTDHCGACTACIDACPTNAIVEPYKVDGSKCISYFTIELKEELPNDYKGQFDNWMFGCDVCQDVCPWNRFSKPHNEPLFNPKPELLEMNKREWKELTQEVFSDLFKKSAVKRTKYSGLIRNIKFLE

SEQ ID NO: 74557 - protein, 308 aa, Aquimarina sp.
  misc_feature (1)..(308): tr|A0A5B1BAS9|A0A5B1BAS9_9FLAO Epoxyqueuosine reductase OS=Aquimarina sp. RZ0 OX=2607730 GN=queG PE=3 SV=1
MTLKSKYTKIIKEEARRLGFLSCGISKAAFLEEEAPRLEKWLQKNMNGQMSYMENHFDKRLDPTLLVEGSKSVISLLLNYFPSASQKDPDAPKISKYAYGHDYHHVIKGKLKQLLEFISEEIGEVHGRAFVDSAPVLDKAWAAKSGLGWVGKNSNLITQKVGSYYFIAELILDLELEYDTPVTDHCGTCTACIDACPTQAIVDPYVVDGSKCISYFTIELKDEIPATVQGKFDNWMFGCDICQDVCPWNRFSKSHNEPLFDPNPELLEMTQKDWEEITQEVFSKVFQKSAVKRTKFSGLTRNIQFLKK

SEQ ID NO: 74558 - protein, 318 aa, Aquimarina spongiae
  misc_feature (1)..(318): tr|A0A1M6E9Y9|A0A1M6E9Y9_9FLAO Epoxyqueuosine reductase OS=Aquimarina spongiae OX=570521 GN=queG PE=3 SV=1
MSFEIINFLLSQKAKYTNLIKTEAKRLGFLSCGISKAAFLEEEAPRLESWLKKEMHGEMKYMENHFDKRLDPTKLVEGSKSVVSLLLNYFPSTSQTDPEAPKISKYAYGTDYHFVIKEKLKQLLHFIQEEIGDVHGRAFVDSAPVLDKAWAAKSGLGWIGKNSNLLTQQVGSFYFIAELIIDLELDYDTPVTDHCGTCTACIDACPTQAIVEPYVVDGSRCISYFTIELKDQIPESFRGSFDDWMFGCDICQDVCPWNRFSKPHNEPLFNPKPELLEMTKKDWEEITQEVFSKVFQKSAVKRTKFSGLQRNIQFLKEK

SEQ ID NO: 74559 - protein, 344 aa, Aquimixticola soesokkakensis
  misc_feature (1)..(344): tr|A0A1Y5R709|A0A1Y5R709_9RHOB Epoxyqueuosine reductase OS=Aquimixticola soesokkakensis OX=1519096 GN=queG PE= 3 SV=1
MALTKEALVARAGDEGFSKVGFARPQLPDAMARLKTFVEEGRHGQMAWMADRMHWRGAPDALWPEAKSVVMLAEVYTPDVDPMAVVGQPDRGAISVYARGKDYHDLVKKRLKRVGRWMIEQGAGEIKVFVDTAPVMEKPLAQAAGLGWQGKHTNLLARDLGSWFFLGAIFTTHDFAPDPEESEHCGSCTACLDACPTDAFPAPFQIDARRCISYLTIEHHGPVDLALRAKLGNRIYGCDDCLAACPWNKFAQDARELRYAGGPATDAPALAQLARLDDAGFRAQYSGSPIKRIGRDRFVRNVLYAIGNSGDAALREVARSLTADEDPVVAEAARWAVGRLAQAQ

SEQ ID NO: 74560 - protein, 364 aa, Aquimonas voraii
  misc_feature (1)..(364): tr|A0A1G6XL60|A0A1G6XL60_9GAMM Epoxyqueuosine reductase OS=Aquimonas voraii OX=265719 GN=queG PE=3 SV=1
MKAPIDEAEGSAAPALPEREELERWARALGFAAIGVSGIDLGEDEAHLLDWLAQGCHGEMDYMQRHGTVRSRPEALVPGTLRVISVRMDYLPEGQAEAEAVLADPQRAYVSRYALGRDYHKLMRARLQKLADRVTEAIGPFGYRVFTDSAPVLEKALARNAGLGWIGKHSNLIDSKSGSWFFLGEILTDLPLPIDAPASNHCGTCTRCLAACPTAAIVAPYRVDARRCISYLTIELHGPIPEEFRAAMGNRIYGCDDCQLACPWNKFAKLSAEPDFRARHALDSSSLVELFGWSEEEFLRKTEGSAIRRIGHERWLRNIAVALGNAPPSPTVREALARQQQHPSALVREHVAWALQRQEAALRG

SEQ ID NO: 74561 - protein, 379 aa, Aquisalibacillus elongatus
  misc_feature (1)..(379): tr|A0A3N5AYU0|A0A3N5AYU0_9BACI Epoxyqueuosine reductase OS=Aquisalibacillus elongatus OX=485577 GN=EDC24_2921 PE=4 SV=1
MDVNQLKQDLIEYSKEIGIQEIGFTTTDTFETLKQRLVVQQSLKFQSGFEKGSIEERTTPTTLMPKAQSIISIALAYPSRMKDAPKSKKGDRRGIFARASWGKDYHDVLREKLNLLGEFLQSRIDGAAYKAMVDTGELSDRAVAERAGVGFVGKNCALITEDYGSWVYLGEMITNIPFEPDEPIEEGCGDCNICVDSCPTGALVQGGQLNASRCVAYQTITKDFLPDEFREKLGNRLYGCDTCQIVCPKNKKKDFHIHPELEPEPERVKPKLIPLLKISNREFKETYGYMAGSWRGKKPIQRNAIVALAHYKDETAVDTLADLMVNDPRPVIRGTAAWAIGKIGREDAAQMIEEAMVKESDDEVLFEMEKGLDLCKQKA

SEQ ID NO: 74562 - protein, 397 aa, Aquisalimonas asiatica
  misc_feature (1)..(397): tr|A0A1H8R047|A0A1H8R047_9GAMM Epoxyqueuosine reductase OS=Aquisalimonas asiatica OX=406100 GN=queG PE=3 SV=1
MGCSIPAGARPAHGRPLVDTGASCPRRGTLAPMNATSDHALADHDLQTLAGDIRGWARALGFQQVGITDTRLETAEQRLDQWLAEGRQGDMDWMARHGRKRTRPEQLLPGTRRVISVRMDYHPADTAADGDATLNDPARAFVSRYALGRDYHKLMRKRLQQLASRIEDASGSAGYRVFVDSAPVMEKPLAEKAGLGWIGKHTLLLNHQAGSWFFLGELYTDLPLPVDTPATDHCGTCRACIDVCPTGAITGPYQLDARRCVSYLTIEHKGSIPESLRPLMGNRIFGCDDCQMVCPWNKFARPTDESAFHPRHGLDAASLITLFQWDEQTFLRNTEGSAIRRLGHERWLRNLAVALGNAPSGPAVIEALRHRRDHPSPLVREHVAWALQRHQPQGDHS

SEQ ID NO: 74563 - protein, 397 aa, Aquisphaera giovannonii
  misc_feature (1)..(397): tr|A0A5B9WBS0|A0A5B9WBS0_9BACT Epoxyqueuosine reductase OS=Aquisphaera giovannonii OX=406548 GN=queG_2 PE=4 SV =1
MTPSELSQALKAEALRLGFDGVGIAPAVSPPGYEHYLDWLRAERHAGMRYMERQAEARRHPGSVLDGVRSVVMLSAVYGRPGRGGEAAPSDDPARGKIARYALGEDYHRVLWIKLDALLGWLEGVHPGVRGRGVVDTAPLLERDYARLAGLGWVGKNTMLIDRRLGSFTFLGALLVDVELAPDEPHARGHCGTCTRCLDACPTDAFAGPYQLDASRCISYWTIEHRGPVPGPIAERLDGWVFGCDVCQDVCPWNRKAPGTRMPELDGTAEVADGPRPDLLAWLDRDEDAWSEALRGTALKRAKRAGLVRNAALVLGTRRVAEAVPSLGRRLADEAEEPAARAAAAWALGSIGGDRARDALMRGRHASPDSVREAVVAAEAAIDLRDAATEGRPARPA

SEQ ID NO: 74564 - protein, 442 aa, Aquisphaera giovannonii
  misc_feature (1)..(442): tr|A0A5B9W9D3|A0A5B9W9D3_9BACT Epoxyqueuosine reductase OS=Aquisphaera giovannonii OX=406548 GN=queG_1 PE=4 SV =1
MARLDEHPTVVRHRARAERAEAGPLDAAWLRRLCLEAGADDVGFVSIDRAEVADQRAEILAAFPGTRALISIACRLHPEPIRSPARSVSNQEFHANYEHLNDVARRIVRGLADAGVPALNPSSAFPMEMDRYPGKIWVVSHKPIAVAAGLGQVGVHRCVIHPVFGSFINLGTILVARDVSSQAAPVDFNPCLSCKLCVAACPVGAIGADGHFNFSACVTHNYREFMSGFTDWVSTIADSKDGRDYRRRVPASESASMWQSLSFKANYKAAYCVAVCPAGEDVIGPFLDDRGKFLKDVVDPLTAKEEPIYVVPGSDAESHVARRFPRKTIRRVRGVTATSVRGFLFGMRLTFQREASRGLSAVYHFTFTGREPAEATVTIRDRAIRVEDGLIGEPDFRVVADGDAWLGVLAGDRSLIWSILRRRIRARGPLRLLAAFRRCFPR

SEQ ID NO: 74565 - protein, 362 aa, Aquitalea magnusonii
  misc_feature (1)..(362): tr|A0A3G9G8D5|A0A3G9G8D5_9NEIS Epoxyqueuosine reductase OS=Aquitalea magnusonii OX=332411 GN=queG PE=3 SV=1
MTEKSYQKLDYPELAGQIKAWAQDLGFAAARISKAALPPQAEAQLQAWLDEGCHGQMDYMARHGSLRVKPADLVPGTLSIVSVRLPYWPAQAQASEEVLADGRLAYLSRYALGRDYHKVLRARLQKLADKVAEHIGPFGYRVFTDSAPVAEVALAAQSGLGWRGKHTLLLNREQGSLFFLGELFTDLPLPADPAEEGHCGRCTRCIDICPTQAITAPYKVDARRCISYLTIELKTAIPPEFRSMIGNRVYGCDDCQLTCPWNRFAVNTVEPDFAVRHGLDQVSLLELFGWSEAMFKEKLAGSPIYRIGYAKWLSNLAVGLGNAPYDPQIVLALQQRLDYPDELVAEPVRWALQQQRLRQLDE

SEQ ID NO: 74566 - protein, 361 aa, Aquitalea magnusonii
  misc_feature (1)..(361): tr|A0A0F3KP87|A0A0F3KP87_9NEIS Epoxyqueuosine reductase OS=Aquitalea magnusonii OX=332411 GN=queG PE=3 SV=1
MTEKSYQKLDYPELAGQIKAWAQDLGFAAARISKAQLPAQAEAQLQAWLDEGCHGQMDYMARHGSLRVKPADLVPGTLSIVSVRLPYWPAEALASEDVLADGRLAYLSRYALGRDYHKVLRARLQKLADKVAEHIGPFGYRVFTDSAPVAEVALAAQSGLGWRGKHTLLLNREQGSLYFLGELFTDLPLPADVSEPEHCGRCTRCIDVCPTQAITAPYKVDARRCISYLTIELKTAIPLEFRPMIGNRVYGCDDCQLTCPWNRFAVHTREPDFAVRHGLDQVSLLELFGWSEAMFKEKLAGSPIYRIGYAKWLSNLAVGLGNAPYDPDIVAALQQRQDYPDELVAEPVRWALERQRQAQGK

SEQ ID NO: 74567 - protein, 363 aa, Aquitalea sp.
  misc_feature (1)..(363): tr|A0A3N7D1W1|A0A3N7D1W1_9NEIS Epoxyqueuosine reductase OS=Aquitalea sp. FJL05 OX=2153366 GN=queG PE=3 SV=1
MTEKSYQNMDYPELARQIKAWARELGFADARIGHARLPAEAEHKLQAWLDEGCHGEMDYMARHGALRVKPAELLPGTLTIISVRMHYWPADAQASESVLQDGRLAYLSRYALGRDYHKVIRARLQKLADQIRQAIGDFGYRVFTDSAPVAEVALAAQSGLGWRGKHTLLLNRKQGSLFFLGELFTDLPLPVNEEEDGHCGRCTRCIDICPTQAITAPYKVDARRCISYLTIELKSAIPLELRPLIGNRVYGCDDCQLVCPWNRFAVNTAEADFAVRHGLDHVSLLELFGWSEAMFKEKLAGSPIYRIGYPKWLSNLAVGLGNAPYDPAIVAALEGHQHADEALVAEPVRWALQQQRLRAADSQ

SEQ ID NO: 74568 - protein, 363 aa, Aquitalea sp.
  misc_feature (1)..(363): tr|A0A4P6THP0|A0A4P6THP0_9NEIS Epoxyqueuosine reductase OS=Aquitalea sp. USM4 OX=1590041 GN=queG PE=3 SV=1
MTEKSYQKLDYPELAGQIKAWAQDLGFAAARISKAQLPVQAEVQLQAWLDEGCHGQMDYMARHGSLRVKPADLVPGTLSIVSVRLPYWPAEALASEDVLADGRLAYLSRYALGRDYHKVLRARLQKLADKVAEHIGPFGYRVFTDSAPVAEVALAAQSGLGWRGKHTLLLSREQGSLYFLGELFTDLPLPADVSEPEHCGRCTRCIDVCPTQAITAPYKVDARRCISYLTIELKTAIPLEFRPMIGNRVYGCDDCQLTCPWNRFSVHTREPDFAVRHGLDQVSLLELFGWSEAMFKEKLAGSSIYRIGYAKWLSNLAVGLGNAPYDPDIVAALQQRQDYPDELVAEPVRWALACQHQRQPQAK

SEQ ID NO: 74569 - protein, 311 aa, Arachidicoccus rhizosphaerae
  misc_feature (1)..(311): tr|A0A1H4CCB8|A0A1H4CCB8_9BACT Epoxyqueuosine reductase OS=Arachidicoccus rhizosphaerae OX=551991 GN=queG PE=3 SV=1
MDLETRTHIIKTIAAALGFEHCGIAKAAPLDQDARRLEAWLNKGMHGNMHYMENYFELRTDPTKLVPGARSVITLLKNYYPSETQKPDRPKISKYAYGNDYHEIIRARLHEFIHQLREKIGDVQGRGFVDSAPVLERTWAGRSGLGWVGKNGMLINKGAGSYHFIASLIIDWELIYDQPLAKDFCGSCTRCIDACPTDAILPDKVIQGNKCISYFTIELKDLLLPGDLKSDFQNWAFGCDICQEVCPWNRFSTPHKDAAFTPIAEILDFTTEQWLDLTEDAFKKIFRLSPLKRSKYQGIMRNLKFISQDGI

SEQ ID NO: 74570 - protein, 310 aa, Arachidicoccus sp.
  misc_feature (1)..(310): tr|A0A191TGY5|A0A191TGY5_9BACT Epoxyqueuosine reductase OS=Arachidicoccus sp. BS20 OX=1850526 GN=queG PE=3 SV= 1
MNKAQRTHFVKQTAQECGFEFCGIAKAAKLGEDARRLEAWLNKGMHGTMHYMEKYFELRTDPTKLVPNAKSVITLLKNYYPETSQNTDAPKVSKYAYGNDYHETIKVQLNVFLDRLKASFGEFQGRGFVDSAPVLERAWAEKSGLGWLGKNGMLINKGAGSFYFIATLIVDVELEYDAPLAKDFCGTCTRCIDECPTDAILPNKVVDGSKCISYFTIELKDALLPDDMRPKFDNWLFGCDVCQDVCPWNRFSKPTNDEAFKPIAEILNFTEKDWSDLTEDGFRQIFKHSPLKRSKYKGIMRNLKFIMSEP

SEQ ID NO: 74571 - protein, 308 aa, Arachidicoccus sp.
  misc_feature (1)..(308): tr|A0A386HLN8|A0A386HLN8_9BACT Epoxyqueuosine reductase OS=Arachidicoccus sp. KIS59-12 OX=2341117 GN=queG PE=3 SV=1
MNIRERTHIIKQIAAELGFDFCGIAQAVKLDEDARRLEAWLNKGMHGNMHYMEKYFELRVDPTQLVPGAKSVITLLKNYYPEAKQNIEAPKISKYAYGNDYHEIIKEKLNLFFDKLNDTFGEIHGRGFVDSAPVLERTWAQKTGLGWIGKNGMLINKGSGSFFFIASLIIDWELEYDLPMAKDFCGSCTRCIDACPTEAILPEKVINGSKCISYFTIELKDLLIPDQMRPKFDNWMFGCDICQDVCPWNRFSKPTTDTAFKPIFEILNFSEKEWNDLSEESFRAIFKHSPIKRSKYKGIMRNLKFISS

SEQ ID NO: 74572 - protein, 382 aa, Arboricoccus pini
  misc_feature (1)..(382): tr|A0A212R249|A0A212R249_9PROT Epoxyqueuosine reductase OS=Arboricoccus pini OX=1963835 GN=queG PE=3 SV=1
MTIRISKAELPGRIRERAEALGFSSIRFTKADLPPVVQDRYRQAIGLGRHGSMAWLAAEPDRRSSPVHLWPEARSAITLAMNYGPSADPRPELEAKGRAYISVYARHRDYHEVIKGRLKELGQWLHRVGGGEIKVFVDTAPLLEKPLAQQAGLGWQGKHTNLVSRQFGSWLFLGEILTSIDLPSDPPEADHCGQCRRCLDVCPTAAFPAPYQLDARRCISYLTIEHKGPIDREFRHLLGNRIYGCDDCLAACPWNKFASAASEVKLAALPDRVTPSLEELSHLDDASFRVRFSGSPIKRIGRDRFMRNVVLAMGNSGDARFVQPLTRRLGDASPLVRGAAVWALAQLVSQAELESFASAHAGESDPSVREEWRQASRDKAFA

SEQ ID NO: 74573 - protein, 339 aa, Archangium gephyra
  misc_feature (1)..(339): tr|A0A0G3A7K1|A0A0G3A7K1_9DELT Epoxyqueuosine OS=Archan gium gephyra OX=48 GN=AA314_08605 PE=4 SV=1
MTPLPTAHLRQLTEQVGFDLVGFARAEPIPPEFLFGWLESGCAADMDWMGTRAAERLDVSKLLPGARTVIAFATNYYRDEPRAVDSPIARYARSRDYHSTLRDKLKAFRKLFSDAYPEVHHYGSVDSGPLMEKVWAARAGLGYVGKNGCFITEPFGSWVLLSALVLDAEVDAYAGGPASDRCGHCRKCIMSCPTGALLGQGRVDARACLSYQTIENRHAEVPESFRVEMDNIVFGCDICQDVCPLNRSPVFTPNERFAPRAVAELGVMELAALTPEDYERLIPGTPLARAKYDGLRRNAVYALGAVKQAEARSLLEKLSQDSSEQVRHAAQWALRHLDA

SEQ ID NO: 74574 - protein, 339 aa, Archangium sp.
  misc_feature (1)..(339): tr|A0A1Q3H6X1|A0A1Q3H6X1_9DELT tRNA epoxyqueuosine(34) reductase QueG OS=Archangium sp. Cb G35 OX=1920190 GN=B O221_48240 PE=4 SV=1
MTPLPTAHLRQLSEQAGFDLVGFARAEPIPPEYLFGWLESGCAADMDWMGSRAAERLDVSKLLPGARTVIAFATNYYRDEPRAEDSPIARYARSRDYHSTLRDKLKAYRKLFSDAYPGVQHYGSVDSGPLMEKVWAARAGLGYVGRNGCFITEPFGSWVLLSALILDAEVDAYAGGPASDRCGHCRKCLMSCPTGALLGQGRVDARACLSYQTIENRHAEVPESFRVEMDNIVFGCDICQDVCPLNRSPVFTPNERFSPRAVAELGVMELAALTPEQYEQLIPGTPLARAKYDGLRRNAVYALGAMKQAEARSLLETLSQDPSEQVRHAAQWALRHLDA

SEQ ID NO: 74575 - protein, 339 aa, Archangium violaceum
  misc_feature (1)..(339): tr|A0A084SXY1|A0A084SXY1_9DELT [Fe-S]-binding protein O S=Archangium violaceum Cb vi76 OX=1406225 GN=Q664_10070 PE=4 SV=1
MTPLPSAHLRQLSEQVGFDLVGFARAEPIPPEFLFGWLESGCAADMDWMGSRAAERLDVSKLLPGARTVIAFATNYYRDEPRAEDSPIARYARSRDYHSTLRDKLKAYRKLLSAAYPGVHHYGSVDSGPLMEKVWAARAGLGYVGKNGCFITAPFGSWVLLSALILDAEVDSYAGGPASDRCGHCRKCIMSCPTGALLGHGRVDARACLSYQTIENRHAEVPESFRVEMDNIVFGCDICQDVCPLNRGPVFTPNERFSPRAVAELGVMELAALTPEQYEQLIPGTPLARARYDGLRRNAVYALGAMKQAEARSLLETLSQDPSEQVRHAAQWALRHLDA

SEQ ID NO: 74576 - protein, 308 aa, Arcicella aurantiaca
  misc_feature (1)..(308): tr|A0A316EB28|A0A316EB28_9BACT Epoxyqueuosine reductase OS=Arcicella aurantiaca OX=591202 GN=queG PE=3 SV=1
MQNPTKYTQQIKQKAHELGFDFCGISKAGFLEEEAPRLENWLKANQHGKMQYMENHFDKRLDPRLLVDDAKSVVSLLFNYYPDQRLPEGKDDIKLSKYAYGTDYHFVIKDKLKHFLSFIHQEIGEVGGRAFVDSAPVMDKVWAKKGGLGWIGKHSNLINKKQGSFFFIAELIIDLELEYDHEIKDYCGTCTRCIDACPTGAIVEPFVVDGSKCISYFTIELKEAIPIDMRGKFDNWVFGCDVCQDVCPWNRFSKPHQEPHFNLHPDLQHFTNADWQEITEDVFKEIFKKSPLKRTKFDGLRRNVEFLG

SEQ ID NO: 74577 - protein, 313 aa, Arcticibacter pallidicorallinus
  misc_feature (1)..(313): tr|A0A2T0TXM6|A0A2T0TXM6_9SPHI Epoxyqueuosine reductase OS=Arcticibacter pallidicorallinus OX=1259464 GN=queG PE=3 SV=1
MYNNAGRYSQLIKEEARRLGFMFCGISKAGFLDKEAPRLENWLKNGYHGKMSYMENHFDKRLDPTKLVEGSRSVISLALNYYTDEKQHDPAAPRISKYAYGADYHDVIKSKLKDLLQFIKEHIGDVSGRAFVDSAPVLDRAWAIQSGFGWIGKNSNLINKKSGSFFFLAELITDLDLQYDLASDKDYCGTCTKCLDACPTDAIVSPQVVDGSKCISYLTIELKDELPNEFKGKTDNWMFGCDICQDVCPWNRFSSRHDEPAFEPSFDLLKMSASDWEEITEDVFKQLFKGSPIKRTKFTGLKRNIEFLKPIKQ

SEQ ID NO: 74578 - protein, 311 aa, Arcticibacter svalbardensis
  misc_feature (1)..(311): tr|R9GW83|R9GW83_9SPHI Epoxyqueuosine reductase OS=Arct icibacter svalbardensis MN12-7 OX=1150600 GN=queG PE=3 SV=1
MYNNPQKYSQLIKQEASRLGFMFCGISKAGFLEEEAPRLENWLKHNYNGKMAYMENNFDKRLDPRKLVEGARSVISLALNYYSDSLQSNAETLKISKYAYGKDYHDIIKGKLKELLSFIRLEIGDVAGRAFVDSAPVLDRVWAKKAGFGWIGKNSNLINKKSGSFFFLAELIVDLDLNYDISADKDYCGTCTKCIDACPTQAIVAQSIVDGSKCISYLTIELKEELPSEFKGKMDNWIFGCDICQDVCPWNRFSTNHSEPGFNPHPDFFNMKKFDWKEITEDVFKKLFKGSAVKRTKFIGLKRNIDFLNID

SEQ ID NO: 74579 - protein, 314 aa, Arcticibacterium luteifluviistationis
  misc_feature (1)..(314): tr|A0A2Z4G718|A0A2Z4G718_9BACT Epoxyqueuosine reductase OS=Arcticibacterium luteifluviistationis OX=1784714 GN =queG PE=3 SV=1
MLRNSFNNAQLIKNKAHELGFDFCGISKAGFLEKEAPRLEKWLNQNYNGKMAWMANHFDKRLDPTKLVPGAKSVISVMLNYYPEKRLPEGDDDLKISKYAYGKDYHYVLKDKLKALFNFINEEIGEVDGRIFVDSAPVMDKVWAEKSGLGWVGKHSNLLNKEMGSFFFLGEIICDLVLEEDGPVKDYCGTCTACIDACPTDAIVEPYVVDGSKCISYYTIELKEAIPEEAKGKMENWIFGCDICQDVCPWNRFSKPNTTPDFNLKPELAGFTNSDWEEITEEVFRELFRHSPIKRTKLEGVRRNVNFIKPNTKD

SEQ ID NO: 74580 - protein, 351 aa, Ardenticatenia bacterium
  misc_feature (1)..(351): tr|A0A2U2S5H4|A0A2U2S5H4_9CHLR Epoxyqueuosine reductase OS=Ardenticatenia bacterium OX=2099665 GN=queG PE=3 SV =1
MANTSHVSTLIKEYAAALGFDLVGIAPATRVPHAEAYGAWVEAGYAGDMAYMTREPERRQDPRLVLPEARSVVVVAVSYFTADPPAALWDDPARGRVARYAWGQDYHDVLTPRLRQLAGFLQRHVDGTVLWRAYVDTGPLLERDLALMAGLGFIGKNTCLIHPEWGSYLFLGELLVSAELAYDAPITTGICGRCTRCLDACPTGALVAPYRLDSRKCISYLTIELRTAIPQALRAPMGNWIFGCDVCQSVCPWTRRFARTGRQDFLSFEPARCVPSLLELLALDEAQFRARFGRTPVRRSKWHGLLRNVVVALGNCGDPAAIPALQHAATESHPLVREHAAWALHRIRSAG

SEQ ID NO: 74581 - protein, 306 aa, Arenibacter algicola
  misc_feature (1)..(306): tr|A0A221UWK8|A0A221UWK8_9FLAO Epoxyqueuosine reductase OS=Arenibacter algicola OX=616991 GN=queG PE=3 SV=1
MKNIHEHTQLIKAEAKRLGFLSCGISKAEFLEEEAPRLENWLKKNMHGEMGYMENHFDKRLDPTKLVEGSKSVISLLLNYFPGESQKENTYKLSKYAYGQDYHHVIKSKLKELQNFISEEIGEVSGRAFVDSAPVLDKAWAAKSGLGWIGKHSNLLTQQVGSFYFIAELIVDLELEYDHRVTDHCGTCTACIDACPTQAIVEPYVVDGSKCISYLTIELKNEIPSEFQGKMDDWMFGCDVCQDVCPWNRFSKSHREPLFNPNPDLLSMTKKDWEEITEDVFKKVFQKSAVKRTKFSGLKRNIEFLK

SEQ ID NO: 74582 - protein, 317 aa, Arenibacter echinorum
  misc_feature (1)..(317): tr|A0A327R6M7|A0A327R6M7_9FLAO Epoxyqueuosine reductase OS=Arenibacter echinorum OX=440515 GN=queG PE=3 SV=1
MYLYCLPKDNFLKNTHKHTQLIKTQAKRLGFLSCGISKAEFLEEEAPRLENWLNKNMHGEMGYMENHFDMRLDPTKLVEGSKSVISLLLNYFPEESQNENTFKISKYAYGQDYHHVIKSKLKELQNFISEEIGEVSGRAFVDSAPVLDKAWAAKSGLGWIGKHSNLLTQQVGSFYFIAELIVDLELEYDHRVTDHCGTCTACIDACPTQAIIEPYVVDGSKCISYLTIELKNEIPTDFKGKMDDWMFGCDVCQDVCPWNRFSKPHREPLFNPNPELLSMTKKDWDEITEDVFKKVFQKSAVKRTKFSGLKRNIEFLK

SEQ ID NO: 74583 - protein, 306 aa, Arenibacter nanhaiticus
  misc_feature (1)..(306): tr|A0A1M6GN28|A0A1M6GN28_9FLAO Epoxyqueuosine reductase OS=Arenibacter nanhaiticus OX=558155 GN=queG PE=3 SV=1
MTAHQKNTELIKTEAKRLGFLSCGISKAEFLEEEAPRLEKWLNNNMNGEMQYMENHFDKRLDPTKLVEGSKSVVSLLLNYYPEEKQVDGTYKISKYAYGQDYHHVIKTKLRQLQEFISEEIGAVDGRAFVDSAPVLDKAWAAKSGLGWIGKHSNLITQKVGSFYFIAELILDLELEYDAPVTDHCGSCTACLDACPTQAIVAPYVVDGSKCISYFTIELKNEIPSGFQGKFDDWMFGCDVCQDVCPWNRFSKPHSEPLFQPNPELLSMTKKDWEEITEDVFRKVFQKSPVKRTKFSGLERNIKFLK

SEQ ID NO: 74584 - protein, 306 aa, Arenibacter palladensis
  misc_feature (1)..(306): tr|A0A1M5CG51|A0A1M5CG51_9FLAO Epoxyqueuosine reductase OS=Arenibacter palladensis OX=237373 GN=queG PE=3 SV=1
MKNIHKHTQLIKAEAKRLGFLSCGISKAQFLEEEAPRLEKWLNKNMHGEMGYMENHFDKRLDPTKLVEGSKSVISLLLNYFPGEVQEENTFKVSKYAYGQDYHHVIKSKLKELQNFISEEIGEVNGRAFVDSAPVLDKAWAAKSGLGWIGKHSNLLTQQVGSFYFIAELIVDLELEYDHRVTDHCGTCTACIDSCPTQAIIEPYVVDGSKCISYLTIELKNEIPSEFKGKMDDWMFGCDVCQDVCPWNRFSQSHREPLFHPHPELLSMTKKDWEEITEDVFKKVFQKSAVKRTKFSGLKRNIEFLK

SEQ ID NO: 74585 - protein, 306 aa, Arenibacter palladensis
  misc_feature (1)..(306): tr|A0A543W931|A0A543W931_9FLAO Epoxyqueuosine reductase OS=Arenibacter palladensis OX=237373 GN=queG PE=3 SV=1
MKNIHEHTQLIKAEAKRLGFLSCGISKAEFLEEEAPRLENWLKKNMHGEMGYMENHFDKRLDPTKLVEGSKSVISLLLNYFPGESQKENTYKLSKYAYGQDYHHVIKSKLKELQNFISEEIGEVSGRAFVDSAPVLDKAWAAKSGMGWIGKHSNLLTQQVGSFYFIAELIVDLELEYDHRVTDHCGTCTACIDACPTQAIVEPYVVDGSKCISYLTIELKNEIPSEFQGKMDDWMFGCDVCQDVCPWNRFSKSHREPLFNPNPDLLSMTKKDWEEITEDVFKKVFQKSAVKRTKFSGLKRNIEFLK

SEQ ID NO: 74586 - protein, 306 aa, Arenibacter sp.
  misc_feature (1)..(306): tr|A0A318IB04|A0A318IB04_9FLAO Epoxyqueuosine reductase OS=Arenibacter sp. ARW7G5Y1 OX=2135619 GN=queG PE=3 SV =1
MKNILKHTQLIKTEAKRLGFLSCGISKAEFLEEEAPRLEKWLNKNMQGEMGYMENHFDKRLDPTNLVEGSKSVISLLLNYFPEETQNENTFKLSKYAYGQDYHHIIKSKLKELQEFIGKEIGEVNGRAFVDSAPVLDKAWAAKSGLGWIGKHSNLLTQQVGSFYFIAELIVDLELEYDHRVTDHCGTCTACIDACPTQAIVEPYVVDGSKCISYLTIELKNEIPTDFKGKMDDWMFGCDVCQDVCPWNRFSKPHREPLFHPHPDLLSMTKKDWEEITDDVFKKVFQKSAVKRTKFSGLKRNIEFLK

SEQ ID NO: 74587 - protein, 306 aa, Arenibacter sp.
  misc_feature (1)..(306): tr|A0A372H1W0|A0A372H1W0_9FLAO Epoxyqueuosine reductase OS=Arenibacter sp. P308M17 OX=2303391 GN=queG PE=3 SV= 1
MNSIHEHTQLIKTEAKRLGFLSCGISKAEFMEEEAPRLEKWLNNNMHGEMGYMENHFDLRLDPTKLVEGSKSVISLLLNYFPEATQKEDTFKVSKYAYGQDYHHVIKSKLRELQNFISEEIGEVYGRAFVDSAPVLDKAWAAKSGLGWIGKHSNLLTRQVGSFYFIAELIVDLELEYDHRVTDHCGSCTACMDACPTQAIVEPYVVDGSKCISYLTIELKNEIPSEFKGKMDDWMFGCDVCQDVCPWNRFSKPHREPLFNATPELLSFTKKDWEEITEDVFRKVFQKSAVKRTKFSGLKRNIEFLE

SEQ ID NO: 74588 - protein, 306 aa, Arenibacter troitsensis
  misc_feature (1)..(306): tr|A0A1X7HYP8|A0A1X7HYP8_9FLAO Epoxyqueuosine reductase OS=Arenibacter troitsensis OX=188872 GN=queG PE=3 SV=1
MKNIHKHTQLIKAEAKRLGFLSCGISKAQFLEEEAPRLEKWLNKNMHGEMGYMENHFDKRLDPTKLVEGSKSVISLLLNYFPGEVQNENTFKVSKYAYGQDYHHVIKSKLRELQNYISEEIGEVNGRAFVDSAPVLDKAWAAKSGLGWIGKHSNLLTQQVGSFYFIAELIVDLELEYDQRVTDHCGTCTACIDACPTQAIVQPYVVDGSKCISYLTIELKNEIPSEFKGKMDDWMFGCDVCQDVCPWNRFSKSHREPLFDPNPQLLSMTKKEWEEITEDVFKKVFQKSAVKRTKFSGLKRNIEFLK

SEQ ID NO: 74589 - protein, 376 aa, Arenicella xantha
  misc_feature (1)..(376): tr|A0A395JN61|A0A395JN61_9GAMM Epoxyqueuosine reductase OS=Arenicella xantha OX=644221 GN=queG PE=3 SV=1
MTSPTSNSHESLSTEQLNALAKQIKDWGLDLGFDAVGISDTDLSEHEAHLENWVAAGMHGEMDYMHKHGVKRTQPSKLVEGTRRVISVRMDYAPADIRNAETMLAQDSIGYISRYALGRDYHKVLRARLKKLAQRIQEKIGDFGYRVFTDSAPVMEKAIAEKAGLGWIGKHSNLLDSKTGSWFFLGELYVDLPLPTDQTATNHCGSCQRCIDVCPTQAIIGPYQVDARLCISYLTIELKGAIPTELRAKMGNRIYGCDDCQFVCPWNKFAQTTKEPDFTPRAELTDQKLVDLFGWTEEQFLRNTEGTAIRRIGYESWLRNIAIALGNASPTAASIKALKARRESATELVKEHIDWALTQHQAANLPTSAEELSTHK

SEQ ID NO: 74590 - protein, 351 aa, Arenimonas caeni
  misc_feature (1)..(351): tr|A0A2P6M769|A0A2P6M769_9GAMM Epoxyqueuosine reductase OS=Arenimonas caeni OX=2058085 GN=queG PE=3 SV=1
MREPADMNALARSIRDWGAELGFQQVGIAGIDLSRDMEHLRDWLARGQHGTMDYMARHGDKRGRPEELVPGTLRVVSVRFDYGTGEDAAAWATLAEGERAYVARYALGRDYHKLMRNRLQKLADRIAAQTGPFGYRVFVDSAPVLERALARDAGLGWIGKHTCLINKDAGSWFFLGEIYTDLPLPVDAPASAHCGTCTRCIEVCPTGAIVAPYRVDARRCISYLTIELRESIPEELRPLMGNRIFGCDDCQLACPWNKFAVRHEVPDFAPRNELDSATLAELFAWEEDEFLRRTEGSAIRRTGHAGWLRNIAVALGNAPTTPAVLAALASRREHPDPMVREHVAWALARHE

SEQ ID NO: 74591 - protein, 353 aa, Arenimonas composti
  misc_feature (1)..(353): tr|A0A091BC06|A0A091BC06_9GAMM Epoxyqueuosine reductase OS=Arenimonas composti TR7-09 = DSM 18010 OX=1121013 G N=queG PE=3 SV=1
MPDLAALAADIRIWARELGFQQTGIAGVELGEDEAHLQAWLARGFHGGMDYMARHGDKRARPGELVPGTLRVISVRMDYGTGDEDAAWARLADGEAAYVARYALGRDYHKLMRNRLQKLADRIAGAIGPFGHRVFVDSAPVLERALARDAGLGWIGKHTCLINRDAGSWFFLGELYTDLALPVDEPASAHCGTCTRCLQVCPTGAIVAPYQVDARRCISYLTIENRDAIPEELRPLIGNRIFGCDDCQLACPWNKFAVAHGEADFAPRNGLDGARLVELFAWTEEEFLKRTEGSAIRRTGYRGWLRNIAVALGNAPTTPSVLAALASRRDEPDEMVREHVAWALARHPKVVLD

SEQ ID NO: 74592 - protein, 354 aa, Arenimonas donghaensis
  misc_feature (1)..(354): tr|A0A087MKK1|A0A087MKK1_9GAMM Epoxyqueuosine reductase OS=Arenimonas donghaensis DSM 18148 = HO3-R19 OX=11210 14 GN=queG PE=3 SV=1
MHDRADMDQLALAIKAWGSELGFQQVGIAGITLDQDAAHLRDWLAKGQHGRMDYMARHGDKRARPEELVPGTVRVVSVRLDYGTADDGAAWDTLAEGERAYVARYALGRDYHKLMRNRLQKLADRIAEETGPFGYRAFVDSAPVLERALARDAGLGWIGKHSCLINRSAGSWFFLGEIYTDLPLPVDAPASAHCGTCTRCIEVCPTGAIVAPYRVDARRCISYLTIELREAIPEELRPLIGNRIFGCDDCQLACPWNKFAQRHDEPDFRARNDLDQASLADLFAWEEDEFLRRTEGSAIRRTGHEGWLRNIAVALGNAPTTPGVLAALASRRDHASALVREHVAWALARHEGRD

SEQ ID NO: 74593 - protein, 354 aa, Arenimonas malthae
  misc_feature (1)..(354): tr|A0A091BKN2|A0A091BKN2_9GAMM Epoxyqueuosine reductase OS=Arenimonas malthae CC-JY-1 OX=1384054 GN=queG PE=3 SV=1
MRDPADMTALARAIRAWGAELGFQQVGIAGIELGEDEAHLRDWLAKGQHGAMDYMARHGDKRSRPAELVPGTLRVLSARMDYGTGDDTAAWATLERGEDAYVARYALGRDYHKVMRNRLQKLADRIAGEIGPFGYRAFVDSAPVLERALARDAGLGWIGKHSCLINKSAGSWFFLGEIYTDLPLPVDVPASAHCGTCTRCLQVCPTQAIVAPYRVDARRCISYLTIELKEAIPEELRPLMGNRIFGCDDCQLACPWNKFAVRHDEPDFVARNGLERASLAELFAWEEEEFLRRTEGSAIRRTGHEGWLRNIAVALGNAPTTPAVLAALASRRDHPSALVREHVAWALARHEREK

SEQ ID NO: 74594 - protein, 350 aa, Arenimonas metalli
  misc_feature (1)..(350): tr|A0A091BTC2|A0A091BTC2_9GAMM Epoxyqueuosine reductase OS=Arenimonas metalli CF5-1 OX=1384056 GN=queG PE=3 SV =1
MPDLAALAERIKTWSRELGFQQLGVAGIELGEDAAHLRRWLDEGLHGRMEYMARHGDLRARPEELVPGTLRVLSVRMDYGTGDDAAAWDTLAEGERAYVARYALGRDYHKVMRNKLQKLADRIAGEIGPFGYRAFVDSAPVLERALARDAGLGWIGKHTCLINRDAGSWFFLGEILTDLPLPVDAPASAHCGTCTRCITVCPTGAIVAPYRVDARRCISYLTIELKEAIPEELRPLMGNRIFGCDDCQLACPWNKFAVKHAQPDFQPRHGLDAAGLAELFAWDEATFLQRTEGSAIRRTGHAGWLRNIAVALGNAPTTPGVLAALASRREDPDPMVREHVAWALSRHPKA

SEQ ID NO: 74595 - protein, 351 aa, Arenimonas oryziterrae
  misc_feature (1)..(351): tr|A0A091B9N0|A0A091B9N0_9GAMM Epoxyqueuosine reductase OS=Arenimonas oryziterrae DSM 21050 = YC6267 OX=112101 5 GN=queG PE=3 SV=1
MPNLPALAEDIKRWGRELGFQQVGITGIELAPDEGHLQDWLEQGQHGEMDYMARHGDKRSRPAELQPGTLRVVSVRMDYGTGEDEEAWRTLAQGERAYVARYALGRDYHKVMRNRLQKLSDRIADAIGPFGYRVFVDSAPVLERALARNAGLGWIGKNACVINRNAGSWFFLGEIFIDLPVPVDTPASAHCGTCTRCIDICPTQAIIAPNRIDARRCISYLTIELKGSIPEEFRAAIGNRIFGCDDCQLICPWNKFATRFDEPDFRARNDLDRATLVELFAWTETEFLQRTEGSAIRRTGYEGWLRNIAVALGNAPRSAEVLSALESRREDASEIVREHVAWALAHSTQKD

SEQ ID NO: 74596 - protein, 292 aa, Arenimonas sp.
  misc_feature (1)..(292): tr|A0A352QQU9|A0A352QQU9_9GAMM tRNA epoxyqueuosine(34) reductase QueG OS=Arenimonas sp. OX=1872635 GN=queG PE= 4 SV=1
  misc_feature (227)..(228): Xaa can be any naturally occurring amino acid
MRDPADMTALARAIRAWGAELGFQQVGIAGVELGEDEAHLRDWLAKGQHGAMDYMARHGDKRSRPAELVPGTLRVLSVRMDYGTGDDAAAWATLERGEDAYVARYALGRDYHKVLRNRLQKLADRIAGEIGPFGYRAFVDSAPVLERALARDAGLGWIGKHSCLINKSAGSWFFLGEIYTDLPLPVDVPASAHCGTCTRCLQVCPTQAIVAPYRVDARRCISYLTIXXLRRTEGSAIRRTGHEGWLRNIAVALGNAPTTPAVLAALASRRDHPSALVREHVAWALARHEAQK

SEQ ID NO: 74597 - protein, 356 aa, Arenimonas sp.
  misc_feature (1)..(356): tr|A0A1D2RWT2|A0A1D2RWT2_9GAMM Epoxyqueuosine reductase OS=Arenimonas sp. SCN 70-307 OX=1660089 GN=queG PE=3 S V=1
MHAPADMPALARSIKDWGAELGFQQVGIAGIDLDKDAEHLRDWLAKGQHGTMDYMARHGDKRSRPGELVPGTLRVVSVRMDYGTGEDAAAWATLAEGERAYVARYALGRDYHKLMRNRLQKLADRIAAETGPFGYRVFVDSAPVLERALARDAGLGWIGKHSCLINKDAGSWFFLGEIYTDLPLPVDAPASAHCGTCTRCIEVCPTGAIVAPYRVDARRCISYLTIELREAIPEELRPLMGNRIFGCDDCQLACPWNKFAERHSVPDFMPRNQLDTATLAELFAWDEDEFLRRTEGSAIRRTGHAGWLRNIAVALGNAPGSPAVLAALATRREHPDPMVREHVAWALQRHGKPGSA

SEQ ID NO: 74598 - protein, 307 aa, Arenitalea lutea
  misc_feature (1)..(307): tr|A0A1M6EZB6|A0A1M6EZB6_9FLAO Epoxyqueuosine reductase OS=Arenitalea lutea OX=1178825 GN=queG PE=3 SV=1
MNSKSKYTELIKTEAKRLGFLSCGVSKAEFLEAEAPRLEKWLNNQMHGEMHYMENHFDKRLDPTKLVEGSKSVISLLLNYYPSEEQNKNSFKISKYAYGTDYHFVIKDKLKSLLHVIQDEIGDVHGRAFVDSAPVLDKAWAAKSGLGWIGKHSNLLTQQVGSFYFIAELIIDLELEYDTVTTDHCGSCTACIDACPTEAITEPFVVDGSKCISYFTIELKENIPTEFKGKMDDWMFGCDVCQDVCPWNRFSKSHKEPLFNPHPELLSMSKKEWEEITEETFQKVFKNSAVKRTKFSGLKRNINFLKD

SEQ ID NO: 74599 - protein, 323 aa, Armatimonadetes bacterium
  misc_feature (1)..(323): tr|A0A399X699|A0A399X699_9BACT tRNA epoxyqueuosine(34) reductase QueG OS=Armatimonadetes bacterium OX=2033014 GN=queG PE=4 SV=1
MDCSGAHDGGGLKRRALEEGFDAAGICDAQPPPHYGAYVRWLQQGFHATMAYLDRHRALKNHPQNLLPGVRSILAVALNYNQPAEQRPGHPRVARYALGRDYHKIIRPKLRRVGEWAVRELGGNYRVCVDSAPILERDYAQLAGLGWYGKNTCLIDSRRGSWFLIGLLLLTERFRPDAPAVGGCGSCRLCIDACPTGAIVPAEEGWRVDARRCVSYLTIEHRGPIDPGIQARIGDWTFGCDVCQEVCPFNQPRPQQPFRAPATETADLLRRTELPPLDRLATLSEDEWDPLTRGSALRRAGFEGLRRNAEINLRNCRRPDFPR

SEQ ID NO: 74600 - protein, 314 aa, Armatimonadetes bacterium
  misc_feature (1)..(314): tr|A0A1Y0H8K9|A0A1Y0H8K9_9BACT tRNA epoxyqueuosine(34) reductase QueG OS=Armatimonadetes bacterium Uphvl-Ar2 O X=2004468 GN=CCB81_09580 PE=4 SV=1
MESLESQLKSKARKLGFGLVGITDAAPPLSYEAYRQWVADGHHGTMAYMARSHELRADLNTLLPGVQSVVAVGAFYRQPEELPADHPKFARYALGRDYHKVLRGRLRTLDRWLHAEEGQGRICVDSAPVLEREYAHRAGLGWYGKNTMLINTHAGSWFVIGLLLSTRKLAPDAPAQGGCGTCRACIDACPTGAIVHRHGRWQVDARDCISYLTIEHRGEIESDREAKLDDWVFGCDVCQEVCPFNTVRPHQPGRAPVLTIEDFRARTWPPVEELAHLTSEAWDTLTAGSPVRRAGYDGLRRHARRARRMRDARV

SEQ ID NO: 74601 - protein, 363 aa, Aromatoleum aromaticum
  misc_feature (1)..(363): tr|Q5P217|Q5P217_AROAE Epoxyqueuosine reductase OS=Arom atoleum aromaticum (strain EbN1) OX=76114 GN=queG PE=3 SV=1
MKNPNHQGASGHAAPHESLATVAEQLNIWARELGFAAVGIADIDLAGAELGLEAWLASGFHGEMDYMARHGMKRARPAELVPGTLRVISVRMNYWPQAAAAQATLDEPAQAYVSRYALGRDYHKLMRNRLQKLAERIATEAPHGYRVFVDSAPVLEVELATRAGLGWRGKHTLTLDRSAGSFFFLGEIFTDLPLPVDVPTKPHCGSCRACLDACPTGAIVEPYRVDARRCISYLTIELKEAIPEDLRPLIGNRIYGCDDCQLVCPWNRFAQLTAEPDFAPRHGLDRASLVELFAWTEADFSTRMAGSAIYRIGFERWLRNLAVALGNAPTSPAIVAALRARADDPSELVREHVAWALKRHDAA

SEQ ID NO: 74602 - protein, 323 aa, Arsenicibacter rosenii
  misc_feature (1)..(323): tr|A0A1S2VP95|A0A1S2VP95_9BACT Epoxyqueuosine reductase OS=Arsenicibacter rosenii OX=1750698 GN=queG PE=3 SV=1
MQQHLNATARHTALIKQQAVALGFDFCGISAAGFLDDEAPRLENWLKQERHGQMGYMANHFDKRLDPRLLVDGAKSVITVLLNYFPEAPLAEGADDLKISKYAYGEDYHFVLKDKLKSLLTFIQENVGEVGGRAFVDSAPVMDKAWAQRSGAGWMGKHTNIINRKMGSFFFIGELILDLELTPDGPIGDYCGTCTRCIDACPTGAIVEPYVVDGSRCISYFTIELKEAIPATVSGQFDNWIFGCDICQDVCPWNRFAKPHQTPAFDPHPTLRQLTKTDWQDITEDVFREVFRRSAVKRTKLEGLQRNIAFVQQTSQAANLDLD

SEQ ID NO: 74603 - protein, 364 aa, Arsenicitalea aurantiaca
  misc_feature (1)..(364): tr|A0A433X8P4|A0A433X8P4_9RHIZ tRNA epoxyqueuosine(34) reductase QueG OS=Arsenicitalea aurantiaca OX=1783274 G N=queG PE=4 SV=1
MALGFTALGVTRADARPDLPGRLDAALAAGWHGDMAWMEETALRRGHPNALWPEARSILMLGFNYGPQSDPLADLARRSTGNISVYARNRDYHELIKGRLKELAGLLARRSGAEVKVFVDTAPLMEKPLAEAAGIGWQGKHSVLVSRDAGSWLFLGAILTTAELPADPPHPESCGSCTRCLDICPTNAFPAPFRLDARRCLAYLTIEHQGQIPVAFRAALGNRIYGCDDCLAVCPWNKFARATAESRLAAREDLRAPALSDLVALDDWGFRALFAGSPIKRLGLARFLRNVLIAIGNSADPALLPAARARLADEDARVRGAAIWAVRRLEDPDAVAQLAARHAPVEPDPAVRAEWTAPLVSQEP

SEQ ID NO: 74604 - protein, 377 aa, Arsukibacterium ikkense
  misc_feature (1)..(377): tr|A0A0M2V2A2|A0A0M2V2A2_9GAMM Epoxyqueuosine reductase OS=Arsukibacterium ikkense OX=336831 GN=queG PE=3 SV=1
MATDYQQLALQIKRWAQELGFQQLGITATDLSSEEPRLEAWLAQGYHGDMHYMSEHGMLRARPADLLPGTLRVLSVRMDYLPAQAGFATNLANPAKAYISRYALGRDYHKLVRNRLKQLAQKISNEIPELGFRPFVDSAPVLERPLAQRAGLGWVGKHSLLLNHGVGSWFFLGELLLDIPLPVDEPHQGDCGSCVACITSCPTGAIVAPYVVDGRRCISYLTIELKTAIPEELRPLIGNRIYGCDDCQLVCPENREAPVSIEADFQRRSQWQDQDLLQLFAWDESTFLRLTEGSAIRRIGFERWQRNIAVALGNAPYQPDIAAALHAAKPAASELVTEHIDWALAQQKRKSWQAENILPRSTERLVRIIQKGLPRDA

SEQ ID NO: 74605 - protein, 377 aa, Arsukibacterium sp.
  misc_feature (1)..(377): tr|A0A0M2VCB8|A0A0M2VCB8_9GAMM Epoxyqueuosine reductase OS=Arsukibacterium sp. MJ3 OX=1632859 GN=queG PE=3 SV= 1
MAIDYQLLATQIKQWALELGFQQLGITGTDISSEEPRLAAWLAQGFHGDMQYMAEHGMLRARPAELLPGTLRVLSVRMDYLPGQAGFATNLADPTKAYISRYALGRDYHKLVRKRLKQLAEKIKLAVPELGFRPFVDSAPVLERPLAQRAGLGWVGKHSLLLNHGSGSWFFLGELLVDIPLPVDEPHQGDCGSCVACITSCPTGAIVAPYVVDGRRCISYLTIELKTAIPEELRPLIGNRIYGCDDCQLVCPQNRDAPLSIESDFQRREQWQDQGLLQLFAWDETTFLRHTEGSAIRRIGFERWQRNIAVALGNAPYEANIVASLQAAKATSTALVLEHINWAVAQQQRKSWQAANLLPRATERLVRIIQKGLPRDA

SEQ ID NO: 74606 - protein, 341 aa, Arthromitus sp.
  misc_feature (1)..(341): tr|F9VLR1|F9VLR1_ARTSS Iron-sulfur cluster-binding prot ein OS=Arthromitus sp. (strain SFB-mouse-Japan) OX=1029 718 GN=SFBM_1309 PE=4 SV=1
MIINKMDNELRKTLIDYMNSLDILYGFTECRKFIELYDYLKIKSDRRYLTEFESLDIEDRINPFLYLENGETIISIAVPYYRENSSYNQMFSKYTQGEDYHKVVLSYLEKISHFIELSGYEYRLFCDTNNLPERYIAYLCGIGHIGRNSMVYTSKYGSYVFLGEIITNAKLSMKNSCEYYEKKFNDIGLFEKCGICNKCLHRCPNKVLFDKNFRCCVSNLTQQKKLGLHDIEGLNGMIFGCDICQDKCPKNKNVEYSSIDRFDALEFIKNISDEDIVNMNNSFFKKNFKKVACSWRGKKILQRNSLIKNRYNKDFLCRLSLENNDELNNYKNLFLDNNFEE

SEQ ID NO: 74607 - protein, 309 aa, Arthrospira maxima
  misc_feature (1)..(309): tr|B5VYS7|B5VYS7_LIMMA Epoxyqueuosine reductase OS=Arth rospira maxima CS-328 OX=513049 GN=queG PE=3 SV=1
MAASVDRSQIQQYLLDLGFDQVGFTPATSTPEEVEGLRLWLKAGYQADLAWMDNPKRQDIRLVMPEVRSLICVAINYYTPHQHKHEPQYAKISRYGWGRDYHRILHKKLKQFCQWLKQQGEHIEARYYADTGPIQDKLWAQRAGLGWIAKNGNLITRNYGSWVFLGEVLTNLVLEYDRPHTEHCGTCTRCLSACPTNAIAQPFVVDANRCIAYHTIENRAETLPPEIATNLHNWVAGCDICQDVCPWNQRFAKPTKEAAFNPYPENLAPTLEELATISDETWSERFTASALRRIKPYMWRRNAQANMKS

SEQ ID NO: 74608 - protein, 309 aa, Arthrospira platensis
  misc_feature (1)..(309): tr|D4ZNR3|D4ZNR3_ARTPN Epoxyqueuosine reductase OS=Arth rospira platensis (strain NIES-39 / IAM M-135) OX=69674 7 GN=queG PE=3 SV=1
MAASVDRSQIQQYLLDLGFDQVGFTPATTTPEEVEGLRLWLQAGYQADLAWMDNPKRQDIRLVMPEVRSLICVAINYYTPHQHKNEPEYAKISRYGWGRDYHRILHKKLKQFCQWLKQQGEDIEARYYADTGPVQDKLWAQRAGLGWIAKNGNLITRNYGSWVFLGEVLTNLVLEYDRPHTEHCGTCTRCLSACPTNAIAEPFVVDANRCIAYHTIENRAENLPPEIATNLNNWVAGCDICQDVCPWNERFAKPTKEAAFNPYPENLAPTLEELATISDETWNERFTASALRRIKPYMWRRNAQANMKF

SEQ ID NO: 74609 - protein, 309 aa, Arthrospira platensis; identical to SEQ ID NO: 74607
  misc_feature (1)..(309): tr|K1W1H5|K1W1H5_ARTPT Epoxyqueuosine reductase OS=Arth rospira platensis C1 OX=459495 GN=queG PE=3 SV=1

SEQ ID NO: 74610 - protein, 281 aa, Arthrospira sp.
  misc_feature (1)..(281): tr|A0A328V2C0|A0A328V2C0_9CYAN tRNA epoxyqueuosine(34) reductase QueG (Fragment) OS=Arthrospira sp. O9.13F OX= 1982223 GN=queG PE=4 SV=1
STPEEVEGLRLWLKAGYQADLAWMDNPKRQDIRLVMPDVRSLICVAINYYTPHHHKHEPQYAKISRYGWGRDYHRILHKKLKQFCQWLKQQGEHIEARYYADTGPIQDKLWAQRAGLGWIAKNGNLITRNYGSWVFLGEVLTNFVLEYDRPHTEHCGTCTRCLSACPTNAIAQPFVVDANRCIAYHTIENRAETLPPEIETNLNNWVAGCDICQDVCPWNQRFAKPTKEAAFNPYPENLAPTLEELATISDETWSERFTASALRRIKPYMWRRNAQANMKS

SEQ ID NO: 74611 - protein, 300 aa, Asaccharospora irregularis
  misc_feature (1)..(300): tr|A0A1M5JHF6|A0A1M5JHF6_9FIRM Epoxyqueuosine reductase OS=Asaccharospora irregularis DSM 2635 OX=1121321 GN=S AMN04488530_101136 PE=4 SV=1
MDKLKLREFCNSIGLKCMGIAGVGPYYDLEKKLIDRIEKNYITGMEEEALEKRINPKLTLEDANSVIVIAFPYYIGECGNSNISKYCYGKDYHIVVKDKLQQICDYIDKEVEGFNYKIFSDNGPLVDRYMAYLSGIGYFGINNNIITDQYGSYVFIGYIINNYEFVLDKPTDKTCLKCGKCVKYCPGNALLGNYNMDPRKCLSYISQKKGDLSKDEEKKLNKNKKVFGCDICQEVCPHNIGIKTTDIDEFKEDLIKVIDHEEINNISNKEFKRRYKDRAFSWRGKNIIKRNLEIISKEFE

SEQ ID NO: 74612 - protein, 353 aa, Asaia bogorensis
  misc_feature (1)..(353): tr|A0A0P0YEH9|A0A0P0YEH9_9PROT Epoxyqueuosine reductase OS=Asaia bogorensis NBRC 16594 OX=1231624 GN=queG PE=3 SV=1
MSKSIEDRIADHARHLGFDAIGFCDATLPEEARTRLRQFVEDGRHGTMSWMEQRIDQRGDPKALWPEVRSVISLGLSYAPKADPAETLDQPDTGTISVYARHRDYHDVLKGMLKHLAQFVVRQDVGGDGTQVKVFVDTAPVMEKPLAEQAQLGWQGKHTNVVSRDHGSWLLLGEIYTTLDLTPSPPRAGSCGSCTRCLTACPTDAFPRPYALDARRCIAYLTIEHDGPIPVEFRKSMDNRIYGCDDCLNACPWNRFAATSRHMKLQPRADLMAPRLDDLARLDDAGFRSFFSGSPIKRIGRNRFVRNVLIALGNSRNTDHLALIETLTGDENPMVAEAAEWARAELLGNEDNE

SEQ ID NO: 74613 - protein, 353 aa, Asaia platycodi
  misc_feature (1)..(353): tr|A0A060QLC0|A0A060QLC0_9PROT Epoxyqueuosine reductase OS=Asaia platycodi SF2.1 OX=1382230 GN=queG PE=3 SV=1
MSKSIEDRIADHARHLGFDAIGFCDATLPEEARTRLKQFVEDGRHGTMSWMEQRIDQRGDPKALWPEVRSVISLGLSYAPEADPAETLDQPDKGTISVYARHRDYHDVLKGMLKHLAQFVVRQEVGGDGTQVKVFVDTAPVMEKPLAEQAQLGWQGKHTNVVSRDHGSWLLLGEIYTTLDLTPSPPRAGSCGSCTRCLTACPTDAFPRPYALDARRCIAYLTIEHDGPIPVEFRKAMGNRIYGCDDCLNACPWNRFAATSRHMKLQPRADLMAPRLEDLARLDDAGFRSFFSGSPIKRIGRNRFVRNVLIALGNSHNTDHLALIETLTGDENPMVAEAAEWARAELLGQEDNE

SEQ ID NO: 74614 - protein, 353 aa, Asaia sp.
  misc_feature (1)..(353): tr|A0A433WZB5|A0A433WZB5_9PROT Epoxyqueuosine reductase OS=Asaia sp. W19 OX=2067395 GN=queG PE=3 SV=1
MSKSIEDRIADHARHLGFDAIGFCDASLPEEARTRLRQFVEDGRHGTMSWMEQRIEQRGDPKALWPEVRSVISLGLSYAPEADPAETLDQPDTGTISVYARHRDYHDVLKGMLKHLAQFVVRQDVGGDGTQVKVFVDTAPVMEKPLAEQAQLGWQGKHTNVVSRIHGSWLLLGEIYTTLELTPSPPRAGSCGSCTRCLTACPTDAFPRPYALDARRCIAYLTIEHDGPIPVEFRKAMGNRIYGCDDCLNACPWNRFAATSRHMKLQPRADLMAPRLDDLARLDDAGFRSFFSGSPIKRIGRNRFVRNVLIALGNSGNRAHLPLVTHLTQDESPIVADAAAWAQTELQEAASNE

SEQ ID NO: 74615 - protein, 347 aa, Ascidiaceihabitans donghaensis
  misc_feature (1)..(347): tr|A0A2R8B900|A0A2R8B900_9RHOB Epoxyqueuosine reductase OS=Ascidiaceihabitans donghaensis OX=1510460 GN=queG P E=3 SV=1
MDDLKDRLVARALEEGFVMARVCRPDAVPDVPARLSAFVDAGFHGQMGWMADRIAWRGDPSALWPDARSVLMLAESYAPEFDPRDVLAMSEKGAISVYAQNRDYHDIVKKRLKRLARWLIAEAGGEVKVFVDTAPVPEKALGMAAGLGWQGKHTNLVSRDWGNWAFLGSVFTTLDLIPDTPEVDHCGSCRACLDACPTDAFPAPYQLDARRCISYLTIEHKGPVAEELRSLMGNHIYGCDDCLAACPWNKFAVAASDIRYAARDDLAAPDLAALVGLDDAAFRAKFSGSPVKRIGRDRFVRNVLYAIGNSGVLTFRDAAQALCEDPDATVSDAARWAVTQLDKTCRT

SEQ ID NO: 74616 - protein, 375 aa, Asticcacaulis benevestitus
  misc_feature (1)..(375): tr|V4RRF9|V4RRF9_9CAUL 4Fe-4S ferredoxin-type domain-co ntaining protein OS=Asticcacaulis benevestitus DSM 1610 0 = ATCC BAA-896 OX=1121022 GN=ABENE_05425 PE=4 SV=1
MTLADAIRTEAHSLGFSAARFAALPEVWAASERLKVFVEAGFHGDMRWMEETLERRQHPQNMWHGAQSALVLGYNYGPDSDPLELLDKTGAANISVYARGDDYHDLIKKKLKQLAGWIVNETGCELKVFVDTAPLMEKPLAALAGIGWQGKHTNVVSREFGSWLFLGVILLDRVIADDAPERDHCGSCQACLDICPTQAFVGPYRLDARKCLSYLTIEYRGPWPETYRRAMGNRIYGCDDCLAACPWNKFAQATHETKLQARQGFDNLKLTDLAGLDDASFRTLFSKSPIKRIGRESFLRNVNYAMGNHFRKTGSAEVETALRQGMTDENPVVRGAAIWALKQGLSVASFSAIRSEVSVCEHDDRVLAEWEGRYD

SEQ ID NO: 74617 - protein, 376 aa, Asticcacaulis biprosthecum
  misc_feature (1)..(376): tr|F4QL17|F4QL17_9CAUL Epoxyqueuosine reductase OS=Asti ccacaulis biprosthecum C19 OX=715226 GN=queG PE=3 SV=1
MIDLAQAIRQEAQSLGFAAARFAALPDVWDAADRLSAFVAAGYHGDMAWMEETLDRRRHPRNMWPDAQSALVLAYNYGPDSNPLELLAEPETANISVYARGDDYHDLIKKKLKQLATWIVNQTGCELKVFVDTAPLMEKPLAQLAGLGWQGKHTNLVSRDLGSWFFLGVILFDCVFEAGQPERDHCGSCQACLTACPTDAFTGPYQLDARRCLSYLTIEFRGAWPESFRHAMGNRIYGCDDCLAACPWNKFATAAADIKLQTRQGFDKLLLTDLAGLDDTAFRALFSKAPIKRIGRTSFLRNVQYALGNAVKSSKNPELLVAIHRGLTDREPVIRGAAVWALNQTGDADAIEQASELYRDSEADEAVKRAWEGRYD

SEQ ID NO: 74618 - protein, 388 aa, Asticcacaulis excentricus
  misc_feature (1)..(388): tr|A0A3G9G474|A0A3G9G474_9CAUL Epoxyqueuosine reductase OS=Asticcacaulis excentricus OX=78587 GN=queG PE=3 SV= 1
MDAPPDNPAAHRETGFKADITARAKALGFSSVGFTNLPQAWDAAQRLKAFIAAGFHGEMTWMEETLERRLHPQNMWNGAKSAIVLGFNYGPDSDPLLGLSERDLANISVYARGDDYHDVIKKKLKQLASDIVAAYGCELKVFVDTAPLMEKPLAQLAGLGWQGKHTNLVSREFGSWLFLGSILTDMELPQSLTERDHCGSCRACLDACPTDAFVGPYQLDARECLSYLTIEFRGHWPDRFRAAMGNRVYGCDDCLAACPWNKFAVEASEAKLKAREGFNALSLVELAQLDDAAFRTLFSKSPIKRIGLATFLRNVHYALGNSFDDLVDPDKVAVLTRNLNHDSPVVRGSAVWALSRGLSAEDFRALRAQHLPQEDDPDVWSEWSRHVA

SEQ ID NO: 74619 - protein, 388 aa, Asticcacaulis excentricus
  misc_feature (1)..(388): tr|E8RLK5|E8RLK5_ASTEC Uncharacterized protein OS=Astic cacaulis excentricus (strain ATCC 15261 / DSM 4724 / VK M B-1370 / CB 48) OX=573065 GN=Astex_2088 PE=4 SV=1
MDMRPDSPAAHKVTGFKADITTRAMALGFSSVGFTNLPQEWDAAQRLKAFIGAGYHGEMKWMEETLERRLHPQNMWNGAKSAIVLGFNYGPDSDPLLGLSERDLANISVYARGDDYHDVIKKKLKQLATDIVAAYGCELKVFVDTAPLMEKPLAQLAGLGWQGKHTNLVSREFGSWLFLGSILTDMELPQSLIERDHCGSCRACLDACPTDAFVGPYQLDARECLSYLTIEFRGHWPDRFRTAMGNRVYGCDDCLAACPWNKFAVAASEAKLKAREGFNALSLVELAQLDDAAFRALFSKSPIKRIGLATFLRNVHYAMGNSFDDLVDPDKIAALTRNLSHDSPVVRGSAVWALSRGLSAEDFGALRSQHLPQEDDPDVWSEWSRHVA

SEQ ID NO: 74620 - protein, 359 aa, Asticcacaulis sp.
  misc_feature (1)..(359): tr|A0A258B7M3|A0A258B7M3_9CAUL tRNA epoxyqueuosine(34) reductase QueG (Fragment) OS=Asticcacaulis sp. 32-58-5 OX=1970317 GN=B7Z26_08220 PE=4 SV=1
MKAKPKTLPPELFSAAFKAAVRAEALALGFADLRYLNIPSSWAASERLRAFVKAGLHGQMHWIEDTLDRRAHPTAMWPDAKSAIVLGFNYGPDSDPLEQLEHPQTANISVYARGDDYHDLIKKKLKALGGFIAQNFDCQLKVFVDTAPLMEKPLAHLSGLGWQGKHTNLVSRQFGSWLFLGVILTDRVLESDRFEPDHCGSCQACLTACPTEAFIGPYQLDARKCLSYLTIEYKGGWPEVFRHQMGNRIYGCDDCLAACPWNKFAQTTQEIKLAQRDGFDQLRLVDLARLDDEAFRALFAKSPIKRIGLASFLRNVHYAIGNAVAGTKDAEMIAVLNDNLTREQSVVRASAVWALKQAM

SEQ ID NO: 74621 - protein, 390 aa, Asticcacaulis sp.
  misc_feature (1)..(390): tr|V4QPT4|V4QPT4_9CAUL 4Fe-4S ferredoxin-type domain-co ntaining protein OS=Asticcacaulis sp. YBE204 OX=1282363 GN=AEYBE204_02275 PE=4 SV=1
MQPPHPRRAAPNPLPKGARGLIEQKALDLGFATVGFVNLPQTWDAAERLKAFVAEGYHGAMTWMEETLERRQHPQNMWNGAKSAIVLGFNYGPDSDPLLGLGTPDIANISVYARGDDYHELIKKKLKLLATDVVKLAGCEVKVFVDTAPLMEKPLAQLAGLGWQGKHTNLVSREFGSWMFLGVILTDMELPEDAAEKDHCGSCRSCLDVCPTNAFVAPYQLDARSCLSYLTIEYRGPWPKRFREQMGNRIYGCDDCLAACPWNKFAQSATEAKLMARDGATAMPLFELAQLDDPAFRALFSKSPIKRIGLATFLRNVHYAIGNSFGELVDFEKIDPLVRNLRHESPVVRGSAVWALSRGLPPQDFEYLRDMCLADETDPDVLAEWRQDIA

SEQ ID NO: 74622 - protein, 377 aa, Asticcacaulis taihuensis
  misc_feature (1)..(377): tr|A0A1G4T4H8|A0A1G4T4H8_9CAUL Epoxyqueuosine reductase OS=Asticcacaulis taihuensis OX=260084 GN=queG PE=3 SV= 1
MSDLAASIRQQAHVLGFSAARFAALPDVWAASERLQVFVEAGFHGEMTWMEETLERRKHPRNMWSGAQSALVLGYNYGPDSDPLALLAETDTASISVYARGDDYHELIKKKLKQLATWIVGQIGCELKVFVDTAPLMEKPLAALAGLGWQGKHTNLVSREFGSWLFLGVILLDRVIAEDTPERDHCGSCRACLDICPTNAFEGPYRLDARKCLSYLTIEYRGPWPEIYRRAMGNRIYGCDDCLAVCPWNKFASATHEIKLQVREGFESLKLTDLVGLDDASFRALFSKSPVKRIGRESFLRNVHYALGNHFRVSRHPETGAVLERSLDEENPVVRGAAVWALKQGLGPEAFARLRVQKVAGETDADVLKEWEGGHAQ

SEQ ID NO: 74623 - protein, 305 aa, Atelocyanobacterium thalassa
  misc_feature (1)..(305): sp|D3ENT3|QUEG_ATETH Epoxyqueuosine reductase OS=Ateloc yanobacterium thalassa (isolate ALOHA) OX=1453429 GN=qu eG PE=3 SV=1
MLSITEEIKNKGRDIGFHKIGIANPHIAYQDNAVSNLQGWLSSGYQADMTWMDNPKRFDITQCMPDIQSVITVALNYYTPHQHSSNSRYGKVSRYAWGKDYHKVLSQKLKLFCKWLNNRGIKTTCYVDTGPIQEKVWAERSGVGWIAKNGNVITKEFGSWVFLGVVLTNLSLTSDTPHAKYCGTCRKCLDICPTKAIVHPFVVDSRRCIAYNTIENRSNDFPEYIKNNLNGWIAGCDLCQDVCPWNKRFSKETNIQDFYPQPGNISLDLKEISNLTEIQWQQKFSSSSLKRIKVKAWRRNAKANL

SEQ ID NO: 74624 - protein, 379 aa, Atlantibacter hermannii
  misc_feature (1)..(379): tr|A0A447LU33|A0A447LU33_ATLHE Epoxyqueuosine reductase OS=Atlantibacter hermannii OX=565 GN=yjeS PE=3 SV=1
MSQPLDLTLLAQKIKQWGTELGFQHVGITDTDLSPHEPALQAWLDKQYHGEMEWMARHGMMRARPHELLPGTLRVISVRMNYLPADAAFARTLKEPSLGYISRYALGRDYHKLMRNRLKKLGETIQAQYASLNFRPFVDSAPVLERPLAAKAGLGWTGKHSLILDRNAGSFFFLGELLVDIPLPVDKPVEEGCGRCVACMTICPTGAIVEPYTVDARRCISYLTIELEGAIPEEFRPLIGNRIYGCDDCQLICPWNRFSQLTDEADFSPRQALHNPKLIELFGWSEAHFLKMTEGSAIRRIGHIRFLRNIAVALGNAEWDPANIDALTKRKGEHPLLDEHIEWAIAQQLTKRNANAVDVQSSQKQRLVRVIEKGLPRDA

SEQ ID NO: 74625 - protein, 379 aa, Atlantibacter hermannii; identical to SEQ ID NO: 74624
  misc_feature (1)..(379): tr|H5UZB0|H5UZB0_ATLHE Epoxyqueuosine reductase OS=Atla ntibacter hermannii NBRC 105704 OX=1115512 GN=queG PE=3 SV=1

SEQ ID NO: 74626 - protein, 379 aa, Atlantibacter subterranea
  misc_feature (1)..(379): tr|A0A427UU88|A0A427UU88_9ENTR Epoxyqueuosine reductase OS=Atlantibacter subterranea OX=255519 GN=queG PE=3 SV =1
MSEPLDLNLLAQNIKQWGAELGFQHVGITDTDLSPHEPALQAWLDKQYHGEMEWMARHGMMRARPHELLPGTLRVISVRMNYLPTNAAFARTLKDPSLGYISRYALGRDYHKLMRNRLKKLGETIQQQYASLNFRPFVDSAPVLERPLAAKAGLGWTGKHSLILDRNAGSFFFLGELLVDIPLPVDQPVEEGCGRCVACMTICPTGAIVEPYTVDARRCISYLTIELEGAIPEEFRPLIGNRIYGCDDCQLICPWNRFSQLTVEADFSPRQALHSPKLIELFGWSEAHFLKMSEGSAIRRIGHVRFLRNIAVALGNAAWDEANIAALTKRKGEHPLLDEHIDWAIAQQLTRRNADAVEVQLPQKQRLVRVIEKGLTRDA

SEQ ID NO: 74627 - protein, 389 aa, Atopobacter sp.
  misc_feature (1)..(389): tr|A0A421BHA1|A0A421BHA1_9LACT tRNA epoxyqueuosine(34) reductase QueG OS=Atopobacter sp. AH10 OX=2315861 GN=qu eG PE=4 SV=1
MKAEEYKQAIRHYAMEELNIQKIGFTDASPFLEYEEGLRKKQREGLLSGFEHPIIEERIYPDRIFDQPKTILSLALAYPTKPKEKLERKKGERRGAFARVSWGVDYHTLMAKKLALLEDYIKELIPGVRCKSMVDTGELIDVAVAQRAGLGFIGYNGLLVTKEYGSYVYLGDMILSVALPPDKAMANQCGECRRCVQFCPTGALLGNGSMNPHRCLSFQTQNKQFMGKEFRRKMSHVIYGCDICQQVCPYNRGMDFHLHPEMEDDPQTIFPELTELLTLSNREFKEKFGHLSGAWRGKKPLQRNAIIALANYKDKTAVPSLLELMEKDARPVIVGTSAWAVAEIIATSSVELERFFKEVQERFPEDEDFQTEMNQALHRLREKETDRSS

SEQ ID NO: 74628 - protein, 385 aa, Atopostipes suicloacalis
  misc_feature (1)..(385): tr|A0A1M4Y2D3|A0A1M4Y2D3_9LACT Epoxyqueuosine reductase OS=Atopostipes suicloacalis DSM 15692 OX=1121025 GN=SA MN02745249_01583 PE=4 SV=1
MVNVALKELIREKAYDIGIDKIGFTHAEPFYELEESLKKQHKKGHQSGFEHKILKERIYPELIFDQPETIISIALAYPSKIKNQPKRVRGERRGEFARASRGRDYHFVLQEHIDQLVDYMKNVLGEEAEFKSMVDTGELIDVAVASRAGIGFIGRNGLLITKEFGSYVYLGEIITNIPFEPDPPVGYNCGDCWRCINGCPTQALLGNGEMNAKKCLSYQTQTKSYMPENYRKSMRHVIYGCDICQIVCPYNQGIDFHLHEEMEPDYERVHPRLEPMLTISNKKFREQFGQMAGSWRGKKPLQRNAIIALANYRDRRSIPTLLKLIEDDPRPMIRGTAAWAISKIMVKNPNKEIISFLQEALTIEEDSETIDEFTQAIKRLEENIE

SEQ ID NO: 74629 - protein, 324 aa, Aulosira laxa
  misc_feature (1)..(324): tr|A0A1Z4U6S8|A0A1Z4U6S8_9CYAN Epoxyqueuosine reductase OS=Aulosira laxa NIES-50 OX=1541988 GN=queG PE=3 SV=1
MNSSSITTSDVVKKKAQELGFHKVGIAAVDGVDETAAQRLQAWLALGYNAEMAWMANPKRQDIHLIMPEARSLICVALNYYTPHQRPEGKEYGNISRYGWGRDYHKVMHKKLKALNNWVQSLSENIQARYYADTGPVQDKLWAQKSGIGWIAKNGNVITREYGSWVFLGEIITNLELECDRPATEHCGTCTRCLEACPTSAITQPYVVDANRCIAYHTIENRAEQLPPNVKPHLQGWVAGCDICQDVCPWNQRFAKSTDVEQFNPYPGNLAPKLLELAEISEEEWERQFTASALRRIKPEMLRRNARANLDASRQQNDADSDYF

SEQ ID NO: 74630 - protein, 381 aa, Aurantimonas manganoxydans
  misc_feature (1)..(381): tr|Q1YEV5|Q1YEV5_AURMS Epoxyqueuosine reductase OS=Aura ntimonas manganoxydans (strain ATCC BAA-1229 / DSM 2187 1 / SI85-9A1) OX=287752 GN=queG PE=3 SV=1
MTARETLTDFIRKDAGRLGFSAVGIAPGTGDVAAGPRLDEFIAKGRYGTMGWMPETAERRRSARALWPDVRSIVVLGMNYGPQDDPLAILQRPDRGAISVYARHRDYHDVIKGRLKELAGRMVAKARQSGLGEHDAKVFVDTAPVMEKPLGEMAGLGWQGKHTNLVSREHGSWLFLGSIFTTLEMTPDAPGRDLCGSCRACQDVCPTDAFPEPYKLDARRCISYLTIETRKPVPQEFRAAMGNRIYGCDDCLAVCPWNKFAGKASEAKLIAREDLNAPTLADLLALDDAAFRALFSGSPIKRIGRDKFVSNCLIAAGNSGDATLLGAVREHLTDAAPLVRAMAIWALARLSPEDALQRRSAALDREDDPVVRSEWHALQGP

SEQ ID NO: 74631 - protein, 381 aa, Aurantimonas sp.
  misc_feature (1)..(381): tr|A0A2D9K8I4|A0A2D9K8I4_9RHIZ Epoxyqueuosine reductase OS=Aurantimonas sp. OX=1872654 GN=queG PE=3 SV=1
MTARETLTDFIRKDAGRLGFSAVGIAPGTGDVAAGPRLDEFIAKGRYGTMGWMPETAERRRSARALWPDVRSIVVLGMNYGPQDDPLAILERPDRGAISVYARHRDYHDVIKGRLKELAGRMVARARQSGLGDHDAKVFVDTAPVMEKPLGEMAGLGWQGKHTNLVSREHGSWLFLGSIFTTLEMTPDAPGRDLCGSCRACQDVCPTDAFPEPYKLDARRCISYLTIETRKPVPQEFRAAMGNRIYGCDDCLAVCPWNKFAGKASEAKLIAREDLNAPKLADLLALDDAAFRALFSGSPIKRIGRDKFVSNCLIAAGNSGDAALLGAVREHLADAAPLVRAMAIWALARLSPEDALQRRPAALDREDDPVVRSEWHALKGP

SEQ ID NO: 74632 - protein, 376 aa, Aurantimonas sp.
  misc_feature (1)..(376): tr|A0A0Q6EPE3|A0A0Q6EPE3_9RHIZ Epoxyqueuosine reductase OS=Aurantimonas sp. Leaf443 OX=1736378 GN=ASG48_12000 PE=4 SV=1
MTPDALKAFARTDAARLGFDAFGVAPGTGDVTAADRLDAFVEAGRHGTMDWLPETAGRRRSARALWPDVRSILVLGMNYGPDEDPLSILERRERGAISVYARHRDYHDVIKGRLKELGQRLLARAGQGEMKVFVDTAPVMEKPLGQMAGLGWQGKHTNLVSRDFGSWLFLGSVFTTLDLLPDAPGRDLCGSCTACQTACPTDAFPQPYQLDARRCLSYLTIETRNPIPRAFRAAMGNRIYGCDDCLAVCPWNKFAVSAREAKLVARQDLKAPALADLLALDETGFRTLFSGSPIKRVGHAKFVSNCLVAAGNSGKAELLPAVLARLADPAPLVRAMAVWALARLSARDALERRADALHNEEDAMVRSEWHVLAQED

SEQ ID NO: 74633 - protein, 379 aa, Aureibacillus halotolerans
  misc_feature (1)..(379): tr|A0A4R6TR27|A0A4R6TR27_9BACI Epoxyqueuosine reductase OS=Aureibacillus halotolerans OX=1508390 GN=EV213_1215 7 PE=4 SV=1
MLKEDLIAYSKTIGIDDIGFASADPFLTLKERLKQQQALNYQSGFEESDIEKRTHPELLLPQAKSIIAIALAYPSKMKNTPKSTKEDPRGLFCRASWGEDYHTVLRDRLDKLQAYLQERVPEAYVTSMVDTGELSDRAVAERAGIGFSAKSCAIISPIYGSYIYLGEMITSVPFEPDTPVEDGCGTCNICVEACPTGALVQGGQLDAKKCISFLTQTKGFLQDEYRKVIGNRLYGCDTCQTVCPKNRGVDFHTQPEFEPDPEKVKPLLKPLLTISNREFKDTYGRMSGSWRGKKPIQRNAILALAIYKDDTALPLLEELIKSDPRPVIRGTAAWSYGKIAANKQPEALRFLSERLEVEEDEEVREEIQKGLRFEKEITP

SEQ ID NO: 74634 - protein, 309 aa, Aureicoccus marinus
  misc_feature (1)..(309): tr|A0A2S7T7E0|A0A2S7T7E0_9FLAO Epoxyqueuosine reductase OS=Aureicoccus marinus OX=754435 GN=queG PE=3 SV=1
MIQQSLREKHTEMIKTEAQRLGFLSCGVSKADFLEEEAPRLEQWLKQGMHGQMHYMENHFDKRLDPRLLVPGAQSVISLLLNYYPDEQQNEESYKISKYAYGEDYHFVIRDKLKELLAFIRDHIGEVDGRGFVDSAPVLDKAWAAKSGLGWIGKHSNLLSQKVGSFYFIAELIVDLPLVYDTPVTDHCGSCTACIDACPTQAIIAPYQVDGSKCISYFTIELKDELPSAMSGQFDDWMFGCDVCQDVCPWNRFSSPHAEPRFNPHPELLSMTKRDWEEITEEVFRKVFKKSAVKRTKFSGLNRNITFLE

SEQ ID NO: 74635 - protein, 386 aa, Aureimonas altamirensis
  misc_feature (1)..(386): tr|A0A0B1Q2R7|A0A0B1Q2R7_9RHIZ 4Fe-4S ferredoxin OS=Aur eimonas altamirensis OX=370622 GN=LA66_17235 PE=4 SV=1
MSPPAEDRFRSFLETEARRLGFDAVGIASARTDDVVVERFDTFVEEGRYGTMGWIAETAARRRGVTSMWAEARSVIVLGMNYGPGFDPLEALENKAQGVISVYARNRDYHDVIKGRLKELAGRLMGRIRQMRPDENHSVKVFVDTAPLLEKPLGQAAGLGWQGKHTNLVSREHGSWLFLGSIATTLSLTPDTAATDACGSCRACQDICPTDAFPAPYQLDARRCISYLTIETKALVPRALRPAMGNRIYGCDDCLAVCPWNKFASTAREARLQARDDLKAPSLESLMRLTDADFRVFFSGSPVKRIGRDKFVSNCLIAAGNSGLAALLPEVTRLLRDEAALVRAMAVWAFGRLSPAGALAARDAALVYENDDLVRGEWHALVETSR

SEQ ID NO: 74636 - protein, 389 aa, Aureimonas altamirensis
  misc_feature (1)..(389): tr|A0A1M6N890|A0A1M6N890_9RHIZ Epoxyqueuosine reductase OS=Aureimonas altamirensis DSM 21988 OX=1121026 GN=SAM N02745911_3683 PE=4 SV=1
MDALPPPAEDRFRSFLETEAHRLGFDAVGVASARTDEVVVERFDTFVEEGRYGTMGWIAETAERRRGVTSMWAEARSVIVLGMNYGPGFDPLEALENKAQGVISVYARNRDYHDVIKGRLKELAGRLMGRIRQMRPDESHSVKVFVDTAPLLEKPLGQAAGLGWQGKHTNLVSREHGSWLFLGSIATTLALTPDTAASDACGSCRACQDICPTDAFPAPYQLDARRCISYLTIETKALVPRALRPAMGNRIYGCDDCLAVCPWNKFASTAREARLQARDDLNAPSLESLMRLTDADFRALFSGSPVKRIGRDKFVSNCLIAAGNSGLDALLPQVTRLLGDEAALVRAMAVWAFGRLSPSGALAARDAALVNEDDDLVRGEWHALVETSR

SEQ ID NO: 74637 - protein, 384 aa, Aureimonas flava
  misc_feature (1)..(384): tr|A0A3A1WGI1|A0A3A1WGI1_9RHIZ Epoxyqueuosine reductase OS=Aureimonas flava OX=2320271 GN=queG PE=3 SV=1
MADTLPSAALRRFLEADARRLGFEAVGVARAAQDALAGERLDAFVAAGHHGTMDWLPETVERRRSVTALWPAARSVIVLGLNYGPDEDPLAILRRADRGAISVYARHRDYHDVVKGKLKELAGRLVARAGPGADGRAHDAKVFVDTAPLMEKPLGQAAGLGWQGKHTNLVSRHFGSWLFLGSVVTTIALEPDRAGADLCGSCRACQDACPTGAFPAPYRIDARRCISYLTIETRAPVPRSLRPSMGNRIYGCDDCLAVCPWNKFAATAREAKLRARDDLRAPRLADLLALDDAAFRRLFSGSPVKRIGRDKFVSNCLIAAGNSGDPALLDPVRRRLADAASAVRAMAVWALATLARDEALAMRPAAVHNEADHDVRSEWHAIDA

SEQ ID NO: 74638 - protein, 363 aa, Aureimonas frigidaquae
  misc_feature (1)..(363): tr|A0A0P0Z097|A0A0P0Z097_9RHIZ Iron-sulfur cluster-bind ing protein OS=Aureimonas frigidaquae OX=424757 PE=4 SV =1
MGVAPAAGRDASGARLEQFVNEGLHGTMDWMADTLERRRTVGALWHEARSVIVLGMNYGPAHDPLADLQRRDRGVISVYAQNRDYHDVIKGRLKELAAKLLARARQVLPGEEHGVKVFVDTAPLMEKPLGEAAGLGWQGKHTNLVSREFGSWLFLGSILTTLDLSPDAPGRDLCGSCTACQDICPTKAFPAPYRLDARRCISYLTIETRRPIPRALRAAMGNRIYGCDDCLAVCPWNKFAQAAREARLIGRPELRAPALRDLMALDDAGFRDGFAGSPVKRIGRDKFVSNCLIAAGNAADPSLLPDVEARLDDAAPIVRAMAVWAYGRLAPDRAAARSRQALADEPDAGVRAEWLAVGGTDAA

SEQ ID NO: 74639 - protein, 387 aa, Aureimonas jatrophae
  misc_feature (1)..(387): tr|A0A1H0IT95|A0A1H0IT95_9RHIZ Epoxyqueuosine reductase OS=Aureimonas jatrophae OX=1166073 GN=queG PE=3 SV=1
MADPLSPAALRRFLDADARRLGFDAVGVARASENTAAAAGLEAFVDAGFHGTMGWLPETASRRRSVGSLWPEARTVIVLGLNYGPDEDPLAINARPDRGAISVYARHRDYHDVVKGKLKELAGRLLARAGTQADGEPHGVKVFVDTAPLMEKPLGQAAGLGWQGKHTNLVSRAHGSWLFLGSILTTLDLAPDEPGEDSCGSCRRCQDACPTHAFPEPYRLDARRCISYLTIETRHVVPRDLRAPIGNRVYGCDDCLAVCPWNKFASAAREAKLRARDDLRAPALSELLALDDRAFRALFAGSPIKRIGRDKFVSNCLIAAGNSADPALLPPVRERLGDAAPLVRAMAVWALARLAPADALAARAAALHNERDDLVRSEWDAIDRQDA

SEQ ID NO: 74640 - protein, 391 aa, Aureimonas phyllosphaerae
  misc_feature (1)..(391): tr|A0A1I2GY89|A0A1I2GY89_9RHIZ Epoxyqueuosine reductase OS=Aureimonas phyllosphaerae OX=1166078 GN=SAMN0521656 6_1055 PE=4 SV=1
MADALPLPALRRFLDADARRLGFDAVGVATPAEDALAGERLDAFLAAGHHGTMAWLPETAERRRAVTALWDEARSVVVLGLNYGPDEDPLAVNARTDRGAISVYARHRDYHDVVKGKLKELAGRMVARAGARPDGRPHDAKVFVDTAPLMEKPLGQAAGLGWQGKHTNLVSREFGSWLFLGSIATTIAFEPDAPGVDSCGSCRSCQDACPTGAFPQPYRIDARRCISYLTIETRAPVPRALRPLMGNRIYGCDDCLAVCPWNKFARTAREAKLQAREDLRAPRLEALLRLDDAAFRTLFSGSPVKRIGRDKFVSNCLIAAGNAGRPDLLPDVRRRLGDAAPVVRAMAVWALGRLAPEEALAARGEALAHEMNDEVRMEWDAIEGGRTNESC

SEQ ID NO: 74641 - protein, 403 aa, Aureimonas sp.
  misc_feature (1)..(403): tr|A0A0S2EIV5|A0A0S2EIV5_9RHIZ 4Fe-4S ferredoxin-type d omain-containing protein OS=Aureimonas sp. AU20 OX=1349 819 GN=M673_00745 PE=4 SV=1
MADPLSPSALRQFLDDDACRLGFSALGVAPAAEQGLSGARLDAFIADGFHGTMGWLPETAERRRSVEALWPEARAVIVLGLNYGPDEDPLALLDRPDRGAISVYARHRDYHDVIKGKLKELAGRLVARAGSRPDGRLHDAKVFVDTAPLMEKPLGEAAGLGWQGKHTNLVSRAFGSWLFLGSIATTIPLLPDRPGRDLCGSCRACQDACPTQAFPEPYRLDARRCISYLTIETRHPIPRAFRAPMGNRIYGCDDCLAVCPWNKFAQSAAEAKLRAREDLKAPALADLLELDDASFRALFSGSPVKRVGRDKFVSNCLIAAGNSGLPALLPSVERHLADPAPIVRAMAVWALAKLDPLRCLDLRPSALAGEEDQMVREEWDAALDALEIPPSAPGPTFPQRSHA

SEQ ID NO: 74642 - protein, 379 aa, Aureimonas sp.
  misc_feature (1)..(379): tr|A0A0Q6EI51|A0A0Q6EI51_9RHIZ Epoxyqueuosine reductase OS=Aureimonas sp. Leaf460 OX=1736384 GN=queG PE=3 SV=1
MNLHVTAPTALRAFLDADARRLGFDSLGIAAAGEGGVAGGRLEAFVAEGRHGTMGWMPETLERRRSARSLWPEVRSIIVLGMNYGPEEDPRALQGRPERGAISVYARNRDYHDVIKGRLKELGQRLIAKAGGGEMKVFVDTAPVMEKPLGEAAGLGWQGKHTNLVSRDFGSWLFLGSIFTTLDLVPDAPGRDLCGSCTACQEACPTDAFPRPYQLDARRCISYLTIETARPVPAEFRAAMGNRIYGCDDCLAACPWNKFASAAREAKLVAREELKAPPLADLLELDDAAFRAFFSGSPVKRAGRDKFVSNCLIAAGNSADPALLPAVRRRLEDEAGLVRAMAVWALSRLAPAEALAMRDAARHKEADAVARAEWDALLA

SEQ ID NO: 74643 - protein, 400 aa, Aureimonas ureilytica
  misc_feature (1)..(400): tr|A0A175RH20|A0A175RH20_9RHIZ 4Fe-4S ferredoxin OS=Aur eimonas ureilytica OX=401562 GN=NS365_19730 PE=4 SV=1
MADPLSLSALRRFLDEDARRLGFSSLGVAPAFDEGVSGARLEAFIASGFHGTMGWLPETAERRRSVNALWPEARAVIVLGLNYGPDENPLDLLQRPDRGAISVYARHRDYHDVIKGKLKELAGRLVARAGVQADGQPHDVKVFVDTAPLMEKPLGQAAGLGWQGKHTNLVSRTFGSWLFLGSIATTIPLEPDRAGQDLCGSCRACQDACPTQAFPEPYRLDARRCISYLTIETRRPIPREFRAAMGNRIYGCDDCLAVCPWNKFAQEASEAKLRAREDLKAPSLASLLALDDAGFRALFAGSPVKRIGRDKFVSNCLIAAGNSGDLAFVPLVTPHLSDAAPLVRAMAVWALGQLGAPDLASMRKAALAHEDDPLVREEWAATIALPSDIFSPASSGDLTR

SEQ ID NO: 74644 - protein, 400 aa, Aureimonas ureilytica
  misc_feature (1)..(400): tr|A0A147DAY7|A0A147DAY7_9RHIZ 4Fe-4S ferredoxin OS=Aur eimonas ureilytica OX=401562 GN=NS226_00425 PE=4 SV=1
MADPLSLSALRRFLDEDARRLGFSSLGVAPAFDEGVSGARLEAFIASGFHGTMGWLPETAERRRSVNALWPEARAVIVLGLNYGPDENPLDLLHRPDRGAISVYARHRDYHDVIKGKLKELAGRLVARAGVQTDGRPHDVKVFVDTAPLMEKPLGQAAGLGWQGKHTNLVSRTFGSWLFLGSIATTIPLEPDRAGQDLCGSCRACQDACPTQAFPEPYRLDARRCISYLTIETRRPIPREFRAAMGNRIYGCDDCLAVCPWNKFAQEASEAKLRAREDLKAPSLASLLALDDAGFRALFAGSPVKRIGRDKFVSNCLIAAGNSGDLSFVPLVTPHLSDAAPLVRAMAVWALARLGAPDLASMREAALTHEDDPLVREEWAATIALPSDISSLASSGDLTR

SEQ ID NO: 74645 - protein, 307 aa, Aureitalea marina
  misc_feature (1)..(307): tr|A0A2S7KRB0|A0A2S7KRB0_9FLAO Epoxyqueuosine reductase OS=Aureitalea marina OX=930804 GN=queG PE=3 SV=1
MNKSHYTTLIKEEASRLGFLACGISKAEFLEEEAPRLENWLEQNMHGSMNYMENHFDKRLDPRLLVPGAKSVVSLLYNYYPDKEPEWNGPKISKYALGVDYHKVIRKKLKALLRFIQESIGQVDGRAFVDSAPVLDKAWAAKSGLGWMGKHSNLLTKQMGSFYFIAELIIDLDLDYDTPVTDHCGSCTACIDACPTQAIVEPYVVDGSKCISYLTIELKESIPEGFRGKMDDWIFGCDVCQDVCPWNRFSQSHREPLFNASPQLLSMTRTDWMDLTHDVFEELFPRSAVKRTGYEGLRRNIRFADET

SEQ ID NO: 74646 - protein, 307 aa, Aureitalea sp.
  misc_feature (1)..(307): tr|A0A2S0HUF7|A0A2S0HUF7_9FLAO Epoxyqueuosine reductase OS=Aureitalea sp. RR4-38 OX=2094025 GN=queG PE=3 SV=1
MSRPATNTDLIKSEATRLGFLSCGISKAGFLEEEAPRLEKWLNDNMQGEMSYMENHFDKRLDPTLLVPGAKSVVSLLLNYFPKQTQREDSYKISKYAYGTDYHFVIKDKLKQLLNFIREEIGDVHGRAFVDSAPVLDKAWAAKSGLGWMGKHSNLLTKQLGSFYFIAELIIDLDLEYDTPVTDHCGSCTACIDACPTQAIVEPYVVDGSKCISYFTIELKNEIPSKFSGKFDDWMFGCDVCQDVCPWNRFSRAHREPLFDPNPELLQLSKGDWEEITEEVFMRLFKNSAVKRTGFKGLKRNISFLKD

SEQ ID NO: 74647 - protein, 381 aa, Auricoccus indicus
  misc_feature (1)..(381): tr|A0A1Q1G0F2|A0A1Q1G0F2_9STAP tRNA epoxyqueuosine(34) reductase QueG OS=Auricoccus indicus OX=1849491 GN=BVH5 6_02355 PE=4 SV=1
MNYYQLKRDIIDYAHSIGIDDIGFTSAEPFEELRPKLEEYYAKGYDSGFEVGTIDERINPKLSLPSAQSIIAIAVGYPNKLKDAPRSTKNERRGIFARASWGQDYHTLLNDRLNKLEAYIKRRVPEAECMNMVDTGVLSDRAVAERAGLGFTGRNGFVINPKLGTWTYLGEMLINLPFPSDNPIIDSCGDCTICVDRCPTGALLGEGGLDSKKCISFQTQLKGMMDVHYRKKIGNRLYGCDTCQQVCPLNKGINTTHEDIAVEPNVVQPLLIPLLRMSNREFKETYGHLAGAWRGKKPIQRNAMIALANFKDDSAIPELKKVISEDVRPMIVATAYWAIAEIEGVSSIEFIERALQKETEQIVLDELNDIMNTLRREQYAD

SEQ ID NO: 74648 - protein, 348 aa, Azoarcus communis
  misc_feature (1)..(348): tr|A0A2U8GQ34|A0A2U8GQ34_9RHOO Epoxyqueuosine reductase OS=Azoarcus communis OX=41977 GN=queG PE=3 SV=1
MAALAEHVRLWARELGFGAITVADTGLESAEPGLERWLEAGFHGEMHYMARHGLKRARPAELLPGTLRVISVRMDYWPDARPAEAVLSDPTLAYVSRYALGRDYHKVMRSRLQKLADRIAGASPSAYRVFVDSAPVLEVELGAKSGLGWRGKHTLLIDRSLGSFFFLGEIFTDLPLPVDEPVSAHCGTCVACIDACPTGAIVAPYRLDARRCISYLTIELHGSIPEAFRPLIGNRIYGCDDCQLVCPWNRFARRAVETDFEVRNGLDSASLVELFGWTEEAFGRLTAGSPIHRIGHERWLRNIAVALGNGPGTPEVVAALSARADHPSEIVREHVAWALMRHQKGAEA

SEQ ID NO: 74649 - protein, 348 aa, Azoarcus communis
  misc_feature (1)..(348): tr|A0A323UTL8|A0A323UTL8_9RHOO Epoxyqueuosine reductase OS=Azoarcus communis SWub3 = DSM 12120 OX=1121029 GN=q ueG PE=3 SV=1
METTMSVLATQLRAWAQDLGFGALTIADVQLGDAESGLQQWLDAEYHGEMDYMARHGMKRARPAELVPGTLRVVSVRMNYWPDAAPAERVLCDDGLAYISRYALGRDYHKVLRARLQRLADRLVAAAPSSYRVFVDSAPVLEVELGTRGGLGWRGKHTLLIDRTAGSYFFLGEIYTDLPLPVGDRVGAHCGRCEACIDACPTGAIVAPFRLDARRCISYLTIEHPGSIPMEFRSLIGNRIYGCDDCQLVCPWNRFAVVTDEPDFKVRHGLDAPGLVALFAWSAEDFRERTAGSPIHRIGHERWLRNVAVALGNSSGGAEVVAALKARAHDDSPLVREHVAWALGRLIE

SEQ ID NO: 74650 - protein, 298 aa, Azoarcus indigens
  misc_feature (1)..(298): tr|A0A4R6DXS0|A0A4R6DXS0_9RHOO Epoxyqueuosine reductase OS=Azoarcus indigens OX=29545 GN=C7389_110179 PE=4 SV= 1
MARHGLMRARPAELVPGAVRVITARLNYWPGGREPGEVLADAKLAYISRYALGRDYHKVLRARLQVLAERIHERAPHGYRVFTDSAPVMEVALAAKGGLGWRGKHTLLLDRSVGSYFFLGEIFTDLPLPLTSEVSPHCGSCSACIEACPTGAIVGPYRLDARRCISYLTIELKGAIPEPLRPLIGNRIYGCDDCQLVCPWNRFAKSTEVPDFLPRHGLDGVELCELFMWSEADFNERMAGSPIRRIGYIAWLRNIAVALGNAQASPEVIAALQARANHASQLVREHVEWALARLIEAE

SEQ ID NO: 74651 - protein, 352 aa, Azoarcus sp.
  misc_feature (1)..(352): tr|A1K4V7|A1K4V7_AZOSB Epoxyqueuosine reductase OS=Azoa rcus sp. (strain BH72) OX=62928 GN=queG PE=3 SV=1
MTGADAEHLAGLVQRIREWGKALGFSAVTIGGVDLADAEPGLMDWLAAGFHGEMDYMARHGLKRARPAELLPGTLRVISARMDYLPDAADARAALDDPARAYVSRYALGRDYHKVLRKRLQQLADRIAAEVPHGYRVFVDSAPVLEVELASRSGAGWRGKHTLLLDRTGSWFFLGELFTDLPLPVDAPVQPHCGSCSACIGACPTGAIVAPYQVDARRCISYLTIELQGAIPEALRPLLGNRIYGCDDCQLACPWNRFAQLSAEPDFAPRHRLDEATLCELFAWSAEDFATRTAGSAIHRIGHERWLRNIAVALGNAPATPEVIAALRSRADDESALVREHVAWALAQHGVG

SEQ ID NO: 74652 - protein, 373 aa, Azoarcus sp.
  misc_feature (1)..(373): tr|A0A2I6SB41|A0A2I6SB41_9RHOO Epoxyqueuosine reductase OS=Azoarcus sp. SY39 OX=2067960 GN=queG PE=3 SV=1
MCGEAAAGIIDGVNVLNHAQASDGPVDADGAAFVARIRAWGAELGFDAVAVTGVDLREAEPGLAAWLAAGFHGEMDYMARHGMKRARPAELLPDTVRVISARMNYWPDAADAEAALADPARAYVSRYALGRDYHKLMRARLAKLAKRIEAEVPHGHRVFVDSAPVLEVELATRAGLGWRGKHTLLLNREAGSTFFLGEIFTDLPLPVDAPQAEHCGTCTACIDACPTGAIVAPYEVDARLCISYLTIELKGAIPEELRPMIGNRIYGCDDCQLVCPWNRFARITAEPDFAPRNALDAATLVELFAWTEADFHERTAGSAIHRIGYERWSRNLAVALGNAPTTPEIVAALRARAEDRSELVREHVCWALEQHAG

SEQ ID NO: 74653 - protein, 340 aa, Azoarcus tolulyticus
  misc_feature (1)..(340): tr|A0A1N6WUI6|A0A1N6WUI6_9RHOO Epoxyqueuosine reductase OS=Azoarcus tolulyticus OX=34027 GN=queG PE=3 SV=1
MKVWAGELGFADLAVSGVDLSSAEPGLEAWLADGFHGDMDYMARHGMMRARPAELVPGTLRVVSVRMNYWPQAADAQAALDDPQRAYVSRYALGRDYHKLMRNRLQKLAERIAAEAPHGFRVFVDSAPVLEVELASRSGLGWRGKHTLLLNRRAGSYFFLGEIFTDLPLPLDAPETPHCGSCRACLDACPTGAIVAPYRVDARRCISYLTIELKGAIPEALRPLIGNRIYGCDDCQLACPWNRFARLGAEADFAPRHRLDEASLVELFAWSESEFRDRMAGSAIHRIGFERWSRNLAVALGNAPGTPAVLAALRARADDPLELVREHVAWALERHGLRQG

SEQ ID NO: 74654 - protein, 363 aa, Azomonas agilis
  misc_feature (1)..(363): tr|A0A562J1R1|A0A562J1R1_9GAMM Epoxyqueuosine reductase OS=Azomonas agilis OX=116849 GN=queG PE=3 SV=1
MSAPSASPTPTPLSSTQLSALSQNIKHWAQALGFQQVGISGVDPGIQAEYLEQWVAAGYHGEMHYMAAHGRKRAYPAELEPGTLRLICVRMDYLPADTQMAQCLSNPEQAYISRYALGRDYHKLIRKRLQQLAERIQATIGPFGHRAFVDSAPVLEKAFAQQAGLGWMGQNTLLINPKAGSWFFLGELFVNLPLPVDPPYTKNHCGSCQSCLKRCPTGALLGNGLMDARRCISYLSIELKGSIPEPLRPLMGNRIYGCDDCQIACPWNRFARPTSEADFLPRHQLETSSLMQLFQWTEAEFLTRTEGSPIRRAGYERWSRNLAVALGNVPSNPAIQQALKQRLNSASPLVAEHINWALKQHTI

SEQ ID NO: 74655 - protein, 410 aa, Azonexus fungiphilus
  misc_feature (1)..(410): tr|A0A495WCG2|A0A495WCG2_9RHOO Epoxyqueuosine reductase OS=Azonexus fungiphilus OX=146940 GN=queG PE=3 SV=1
MAERPDQCPRQRRLAGAEVALEVDHQARLQRQREVGAETLGRRLVGQIENGGNIRAMHDQDSTVDIAALKARIRELGRGLGFAEIGIARAEPGAAVDRLRAWLAAGMHGEMDYMARHAELRADPQLLQPGTLTVISAAVDYLPHAKSADAPGQAAISRYAQGRDYHKVVRGRLQKLASAIGELAGPYGYRVFSDSAPVMEVEYARQAGIGWRGKHTLLLSRQGSWRFLGEIYCDLPLPPDAPVDEHCGSCRACLDACPTGAIVAPYVVDARRCISYLTIELAGAIPEEFRPLLGNRIYGCDDCQSCCPWNRFAQLGDREFAPRHGLDSASLVTLFAWTEQQFDDRLAGNPIRRIGHERWLRNIAVGLGNGPCTVDALQALKMRADDPSPLVREHVAWALARLERKQAAAD

SEQ ID NO: 74656 - protein, 350 aa, Azonexus hydrophilus
  misc_feature (1)..(350): tr|A0A1R1I587|A0A1R1I587_9RHOO Epoxyqueuosine reductase OS=Azonexus hydrophilus OX=418702 GN=queG PE=3 SV=1
MHDGDSTMNGTELKASIRRIGQELGFAEIGVTRADPGAAVDGLRAWLADGLHGEMDYMARHLELRANPQQLQPGTITVISAAVDYLPHAKTTEAPAQAAISRYAQGRDYHKVVRSRLQKLATAIGELAGPFGYRVFSDSAPVMEVEFARQAGLGWRGKHTLLLSKQGSWRFLGEIYCDLPLPPDTPIDEHCGSCTRCLSACPTGAIIAPYKVDARRCISYLTIELAGAIPEEFRPLLGNRIYGCDDCQTCCPWNRFARLGDREFAPRHGLDSASLIELFAWSEAQFDERLAGNPIRRIGHERWLRNIAVALGNGPATVDALNALKMRADHPSALVREHVSWALKALGERN

SEQ ID NO: 74657 - protein, 448 aa, Azorhizobium caulinodans
  misc_feature (1)..(448): tr|A8I1X5|A8I1X5_AZOC5 Epoxyqueuosine reductase OS=Azor hizobium caulinodans (strain ATCC 43989 / DSM 5975 / JC M 20966 / NBRC 14845 / NCIMB 13405 / ORS 571) OX=438753 GN=queG PE=3 SV=1
MRLSPPQPSPASGRGSEVTRVQRCHAQHGKSPLPLAGKGWEGAKRRLSSPRRGSPPMSAPARKTAPLSPSDLKDQLRALALEEGFDAFGIADPDAVGDAGTRLRHWVAEERYGDMGWMAETLDRRVHARAMWPEALRVVMLGMNYGPDEDPRTVLAERSLGAISVYARGEDYHDIIKPKLKRLARALLALAGTGDVKVFVDTAPLMEKPLAMAAGLGWQGKHTNLVSRARGSWLFLGAIATTLDLPVDAPMGDHCGQCRACLDACPTAAFPAPYQIDARRCVSYLTIEHKGPIPRDLRPLMGNRIYGCDDCLAACPWNKFAELGREAKLAARDENRAPDLADLATLDDAAFRARFPKSPIKRVGRGRFLRNVLTAIGNSGDPALVASARAHLGDPDALVRGAAVWALSRLLPAAEFATLAAVQAGAEADAEVAAEWTAALEADAPPRT

SEQ ID NO: 74658 - protein, 300 aa, Azorhizobium sp.
  misc_feature (1)..(300): tr|A0A257XV80|A0A257XV80_9RHIZ tRNA epoxyqueuosine(34) reductase QueG (Fragment) OS=Azorhizobium sp. 12-66-6 O X=1970318 GN=B7Z45_05140 PE=4 SV=1
MRDLARAEGFDAFGVADPDAAGAAGPRLRAWLAAGHHGDMDWLAETVERRVHVRAMWPDALRVIMLGLNYGPDEDPRAVLAQRSQGAISVYARGEDYHELIKAKLKRLARALLAQAGSGDVKVFVDTAPLMEKPLAQAAGLGWQGKHTNLVSRERGSWLFLGAIATTLDLPADPPAADHCGQCRACLDACPTAAFTAPYRIDARRCVSYLTIEHKGPIPRDLRPLMGNRIYGCDDCLAACPWNKFAATGREMKLAARAENRAPDLAALAALDDTAFRARFAKSPIKRTGRTRMMRNVLVA

SEQ ID NO: 74659 - protein, 421 aa, Azorhizobium sp.
  misc_feature (1)..(421): tr|A0A258K9K5|A0A258K9K5_9RHIZ Epoxyqueuosine reductase OS=Azorhizobium sp. 32-67-21 OX=1970319 GN=queG PE=3 S V=1
MVCAPEVAADLPRPAERQHSGHAGFPDLCGPRLLTTAPAPEGPLPDRLKDRLRDLARNEGFDAFGVADPDAIPQAGPRLAEWVAQGCHGDMGWMGETLERRAAPRALWPDMRAIVMLGYNYGPDEDPRAVLARRAHGAISVYARGEDYHELIKAKLKRIARALLADAGGGDVKVFVDTAPLMEKPLAQAAGLGWQGKHTNVVSRERGSWLFLGAIATTLPLPADPPSRDHCGGCRACLDACPTAAFPAPYRLDARRCVSYLTIEHRGPIPRDLRPLMGNRIYGCDDCLAACPWNKFAQEGRDLKLAARAENRAPALADLVALDDDAFRARFARSPIKRTGRVRMVRNVLVAIGNSGDASFIPQVRARLTDDAPLVRGAAVWALERLLASPDFADIAAQHMCSETDPDVLGEWRAGLERHAA

SEQ ID NO: 74660 - protein, 358 aa, Azospira oryzae
  misc_feature (1)..(358): tr|A0A2W5FSV2|A0A2W5FSV2_9RHOO Epoxyqueuosine reductase OS=Azospira oryzae OX=146939 GN=queG PE=3 SV=1
MQGDSLCCARLEGAALVQAIKRWGRELGFQRVGVTHADLGDAEARLLDWLAHGYHGDMDYMARHGVKRSRPSALVPGTVSVICARMNYLPPQARASRSVLDDPERAFVSRYALGRDYHKVVRSRLTQLARRIARHVEGFAWRAFADSAPVMEVELASRAGVGWRGKHTLLLARDAGSWFFLGEIYTNLSLPADPPEADHCGTCTRCIDACPTQAIIAPYRIDARRCISYLTIEHKGEIPEALRPLMGNRIYGCDDCQLVCPWTRFAKTSREPDFAVRNGLDDASLAALFGWSEQQFLERFAGSPIRRLGYERWLRNIAVALGNAPSTPAVVAALEARRDHPSALVRVHVAWALARHGR

SEQ ID NO: 74661 - protein, 372 aa, Azospira oryzae
  misc_feature (1)..(372): tr|G8QLB7|G8QLB7_AZOOP Epoxyqueuosine reductase OS=Azos pira oryzae (strain ATCC BAA-33 / DSM 13638 / PS) OX=64 0081 GN=queG PE=3 SV=1
MQQTEAGTPARPAAAGEAAPDWPGLAARLKAWGRELGFAEVAIGRAEIGEAGQRLLAWLEQGHHGSMDYMAKHAPLRLDPGQLVPGVQTVISVRLPYLPRGAEPEQVLADPALGYVSRYALGRDYHKVIRNRLQKLADRLQAEIGDFGYRVFSDSAPVMEVEFARKSGLGWRGKHTLLLTREGSWHFLGEIYTDLPLPADAEVSDHCGACTRCIDACPTRAIVAPYQVDARRCISYLTIELDGAMPEELRPLLGNRIYGCDDCQLCCPWNRFGQLGDAEFTTRQGLDAARLSALMAWSEADFLERMAGSPIRRIGIERWRRNIAVALGNGPATEEARAALAARREDDSAVVREHVAWAERQLEKKTPPTGGV

SEQ ID NO: 74662 - protein, 372 aa, Azospira sp.
  misc_feature (1)..(372): tr|A0A5H2YJ95|A0A5H2YJ95_9RHOO Epoxyqueuosine reductase OS=Azospira sp. I09 OX=1765049 GN=queG PE=4 SV=1
MQQTGAGTPARPAAAGEATPDWPGLAARLKAWGRELGFAEVAIGRAEIGEAGQRLLAWLEQGRHGSMDYMAKHAPLRLDPGQLVPGVQTVISVRLPYLPRGAEPEQVLADPALGYVSRYALGRDYHKVIRNRLQKLADRLQAEIGDFGYRVFSDSAPVMEVEFARKSGLGWRGKHTLLLTREGSWHFLGEIYTDLPLPADAEVSDHCGACTRCIDVCPTRAIIAPYQVDARRCISYLTIELDGAMPEELRPLLGNRIYGCDDCQLFCPWNRFGQLGDVEFTPRQGLDSARLSALMAWSEADFLERMAGSPIRRIGIERWRRNIAVALGNGPATEEARTALAARREDDSAVVREHVAWAERQLEKKTPPTGGV

SEQ ID NO: 74663 - protein, 369 aa, Azospira sp.
  misc_feature (1)..(369): tr|A0A2R5EFT1|A0A2R5EFT1_9RHOO Epoxyqueuosine reductase OS=Azospira sp. I13 OX=1765050 GN=queG PE=3 SV=1
MTQTGADAANSTVPAARDWAGLIARLRGWARELGFANLTISRAEVGSAGQGLLQWLEQGYHGTMDYMAKHAPLRLDPDLLVSGVQTVLSVRLPYLPEGRSPGEVLADAELGYVSRYALGRDYHKVVRNRLQKLADRLQAEVGPFGYRVFSDSAPVMEVEFGRKSGLGWRGKHTLLLTREGSWHFLGEIYTDLPLPPDAPVSDHCGACTRCIEVCPTRAIVAPYEVDARRCISYLTIEQDGPIPEDLRPLLGNRIYGCDDCQLFCPWNRFGQLGDPDFTPRQGLDSARLSTLMVWSEADFLERLAGSPIRRIGIASWRRNIAVALGNGPATAEAKAALAARRNDDSPLVREHVAWAQRQLESKTPPEGGV

SEQ ID NO: 74664 - protein, 360 aa, Azospirillum brasilense
  misc_feature (1)..(360): tr|A0A4D8PUD4|A0A4D8PUD4_AZOBR Epoxyqueuosine reductase OS=Azospirillum brasilense OX=192 GN=queG PE=3 SV=1
MSDPDTSTREAIRDRALSLGFDAVGFARAELGEEARARLAEFLSQGRHGDMGWMEDKANRRVHPQALWPEARTVIALGTSYAPAEDPRALLAHPDRGIVSVYAKNRDYHDLIKGRLKTLGQWIAHRFKAELKVFVDTAPVMEKPLAEKAGLGWQGKHTNLVSRTHGSWLFLGEVYTTLELPPDPPGVDRCGQCRRCLDACPTAAFPAPNQLDARRCISYLTIEHKGPIPEELRPLMGNRIYGCDDCLAACPWNKFAQRSREAAFLPRAELTAPRLADLAQLDDAGFRQVFSGSPIKRIGRDRFVRNVLVALGNTGDARHTAAAERAAERLLEDPSEVVRDAAGWALARLRAARPPSDPSD

SEQ ID NO: 74665 - protein, 391 aa, Azospirillum brasilense
  misc_feature (1)..(391): tr|G8AK97|G8AK97_AZOBR Epoxyqueuosine reductase OS=Azos pirillum brasilense Sp245 OX=1064539 GN=queG PE=3 SV=1
MPDPITSTREAIRDRALSLGFDAVGFARAELGEEAKARLAEFLSQGRHGDMGWMEDKADRRVHPQALWPEARTVIALGTSYAPAEDPRALLAHPDRGIVSVYARNRDYHDLIKGRLKTLGQWIAHRFKAELKVFVDTAPVMEKPLAEKAGLGWQGKHTNLVSRTHGSWLFLGEVYTTLELPPDPPAVDRCGQCRRCLDACPTAAFPAPNQLDARRCISYLTIEHKGPIPEELRPLMGNRIYGCDDCLAVCPWNKFARRSREAAFLPRAELTAPRLADLAQLDDAGFRQVFSGSPIKRIGRDRFVRNVLVALGNSGDARHAALAERAAERLLEDPSEVVRDTAGWALARAQGRPTPFGPFRLSQSRPPGSDDRVTDSPIINDRASASVAPSP

SEQ ID NO: 74666 - protein, 356 aa, Azospirillum doebereinerae
  misc_feature (1)..(356): tr|A0A3S0WK67|A0A3S0WK67_9PROT Epoxyqueuosine reductase OS=Azospirillum doebereinerae OX=92933 GN=queG PE=3 SV =1
MAGAEPAPADPTRLRERIRDRALSLGFDAVGFAPAALGGDAREKLAAFLAEGRHGDMGWMAERADQRAHPQTLWAEARTVIALGTSYAPHEDPRRMLGHPERGIVSVYARNRDYHDLIKGRLKTLAQWLHSQTKAGVKVFVDTAPVMEKPLAERAGLGWQGKHTNLVSRDHGSWLFLGEVYTTLELPADATGRDRCGSCTACQTACPTDAFPAPYQLDARRCVSYLTIENKGPIPDALKPLMGNRIYGCDDCLSACPWNKFARTTREPAFLPRAELTAPRLADLAQLDDAGFRQVFSGSPVKRIGRDRFVRNVLVALGNSGDPRLRFVAEGLLDDPSDVVRDSARWAVERLGGAAV

SEQ ID NO: 74667 - protein, 361 aa, Azospirillum humicireducens
  misc_feature (1)..(361): tr|A0A160JG47|A0A160JG47_9PROT Epoxyqueuosine reductase OS=Azospirillum humicireducens OX=1226968 GN=queG PE=3 SV=1
MAAAKPATVQSDPSRLREAIRDRALRIGFDAVGFAPAALGPEARERLARFVAEGRHGDMGWMAERSDQRSHPQSLWDEARTVIALGTSYAPHDDPRRLAEHPDRGIVSVYARNRDYHDLIKGRLKTLAQWLAHQTKAGVKVFVDTAPVMEKPLAAQAGLGWQGKHTNLVSRDHGSWLFLGEIYTTLELPPDPPARDRCGSCDRCQVACPTEAFPAPYQIDARRCISYLTIEHKGPIPDELKPLMGNRIYGCDDCLAACPWNKFARATAEPAFLPRAELTAPRLADLAQLDDAGFRQVFSGSPIKRIGRDRFVRNVLVAIGNSGDPALIAVAERLRQDDSDVVREAAGWAAARLAATARTPI

SEQ ID NO: 74668 - protein, 353 aa, Azospirillum lipoferum
  misc_feature (1)..(353): tr|A0A1X7Q5P7|A0A1X7Q5P7_AZOLI Epoxyqueuosine reductase OS=Azospirillum lipoferum OX=193 GN=queG PE=3 SV=1
MAGAERPPSDPALLRERIRDRALALGFDAVGFAPAALGPEARAKLAAFLAAGRHGDMGWMAERGDQRSHPRDLWDEARTVIALGTSYAPHADPRGLLEHPDRGIVSVYARNRDYHDLIKGRLKTLGHWLHHQTKAGVKVFVDTAPVMEKPLAERAGLGWQGKHTNLVSRDHGSWLFLGEIYTTLELPADEPGRDRCGSCTACQTACPTNAFPAPYQLDARRCISYLTIENKGPIPDDLKPLIGNRVYGCDDCLAACPWNKFARATREPAFLPRAELTAPRLADLAQLDDPGFRQVFSGSPVKRIGRDRFVRNVLVALGNSGDRRLRPAAEALIDDPSDVVRDSARWAMERLTR

SEQ ID NO: 74669 - protein, 362 aa, Azospirillum lipoferum
  misc_feature (1)..(362): tr|G7Z8T2|G7Z8T2_AZOL4 Epoxyqueuosine reductase OS=Azos pirillum lipoferum (strain 4B) OX=862719 GN=queG PE=3 S V=1
MAAAKPTPLASADPARLRDAIRDRALAVGFDAVGFAPAALGPEARERLARFVAEGRHGDMGWMAERSDQRSHPQSLWDEARTVIALGTSYAPHDDPRRLAEHPDRGIVSVYARNRDYHDLIKGRLKTLAQWLAHQTKAGVKVFVDTAPVMEKPLAAQAGLGWQGKHTNLVSRDHGSWLFLGEIYTTLELPPDPPARDRCGSCDRCQTACPTAAFPAPYQIDARRCISYLTIEHKGPIPDELKPLMGNRIYGCDDCLAACPWNKFARATGEPAFLPRAELTAPRLADLAQLDDAGFRQVFSGSPIKRIGRDRFVRNVLVAIGNSGDPALRPVAAALCEDPSDVVREAAGWAAARLSGAADTHA

SEQ ID NO: 74670 - protein, 361 aa, Azospirillum oryzae
  misc_feature (1)..(361): tr|A0A1X7H6W6|A0A1X7H6W6_9PROT Epoxyqueuosine reductase OS=Azospirillum oryzae OX=286727 GN=queG PE=3 SV=1
MAAAKSGTLPSDPARLREAIRDRALAVGFDAVGFAPAALGPEARERLARFVAEGRHGDMGWMAERSDQRSHPQSLWDEARTVIALGTSYAPHDDPRRLAEHPDRGIVSVYARNRDYHDLIKGRLKTLAQWLAHQTKAGVKVFVDTAPVMEKPLAAQAGLGWQGKHTNLVSRDHGSWLFLGEIYTTLELPPDPPARDRCGSCDRCQTACPTAAFPAPYQIDARRCISYLTIEHKGPIPDEFKPLLGNRIYGCDDCLAACPWNKFARATVEPAFLPRAELTAPRLADLAQLDDASFRQVFSGSPIKRIGRDRFVRNVLVAIGNSGDPTLKPVAEALCQDASDVVREAAGWAADRLSRAANAHP

SEQ ID NO: 74671 - protein, 362 aa, Azospirillum oryzae
  misc_feature (1)..(362): tr|A0A5A9G604|A0A5A9G604_9PROT Epoxyqueuosine reductase OS=Azospirillum oryzae OX=286727 GN=queG PE=3 SV=1
MAAAKPAPLASADPARLRDAIRDRALAVGFDAVGFAPAALGPEARERLARFVAEGRHGDMGWMAERSDQRSHPQSLWDEARTVIALGTSYAPHDDPRRLAEHPDRGIVSIYARNRDYHDLIKGRLKTLAQWLAHQTKAGVKVFVDTAPVMEKPLAAQAGLGWQGKHTNLVSRDHGSWLFLGEIYTTLELPPDPPARDRCGCCDRCQVACPTAAFPAPYQIDARRCISYLTIEHKGPIPDELKPLMGNRIYGCDDCLAACPWNKFARATSEPAFLPRAELTAPRLADLAQLDDAGFRQVFSGSPIKRIGRDRFVRNVLVAIGNSGDPALKPVAEALCLDASDAVREAAGWAVAQLSGATNEHA

SEQ ID NO: 74672 - protein, 362 aa, Azospirillum palustre
  misc_feature (1)..(362): tr|A0A2B8AWJ0|A0A2B8AWJ0_9PROT Epoxyqueuosine reductase OS=Azospirillum palustre OX=2044885 GN=queG PE=3 SV=1
MAAAKPAPLSSAGPARLRDAIRDRALAAGFDAVGFAPAALGPEARERLAQFVAEGRHGDMGWMAERSDQRSHPQSLWDEARTVIALGTSYAPHDDPRRLAEHPDRGIVSVYARNRDYHDLIKGRLKTLAQWLAHQTKAGVKVFVDTAPVMEKPLAAQAGLGWQGKHTNLVSRDHGSWLFLGEIYTTLDLPPDPPARDRCGSCDRCQVACPTAAFPAPYQIDARRCISYLTIEHKGPIPDDLKPLMGNRIYGCDDCLAACPWNKFARATREPAFLPRAELTAPRLADLAQLDDAGFRQVFSGSPIKRIGRDRFVRNVLIAIGNSGDPSLRPVAEALAQDVSDVVREAAGWAAARLSGATSPDA

SEQ ID NO: 74673 - protein, 356 aa, Azospirillum sp.
  misc_feature (1)..(356): tr|D3NWF9|D3NWF9_AZOS1 Epoxyqueuosine reductase OS=Azos pirillum sp. (strain B510) OX=137722 GN=queG PE=3 SV=1
MAAAKAGPPPSADPARLRDAIRARALAAGFDAVGFAPAALGPEARERLARFVAEGRHGDMGWMAERADQRSHPQALWDEARTVIALGTSYAPHEDPRRLLDHPERGIVSVYARNRDYHDLIKGRLKTLAQWLAHQTKAGVKVFVDTAPVMEKPLAAQAGLGWQGKHTNLVSRDHGSWLFLGEIYTTLELPPDPPGRDRCGSCDRCRTACPTAAFPAPYQLDARRCISYLTIEHKGAIPDDLKPLMGNRIYGCDDCLAACPWNKFARATREPAFLPRAELTAPRLADLAQLDDAGFRQLFSGSPIKRIGRDRFVRNVLVAIGNSGDPMLKPVAESLIDDGSEIVREAAGWAAVRLGG

SEQ ID NO: 74674 - protein, 354 aa, Azospirillum sp.
  misc_feature (1)..(354): tr|A0A2U1YS87|A0A2U1YS87_9PROT Epoxyqueuosine reductase OS=Azospirillum sp. TSO5 OX=716760 GN=queG PE=3 SV=1
MASADPARLRDAIRDRALAVGFDAVGFAPAALGPEARERLAQFVAEGRHGDMGWMDERSDQRSHPQSLWDEARTVIALGTSYAPHDDPRRLADHPDRGVVSVYARNRDYHDLVKGRLKTLAQWLAHQTKAGVKVFVDTAPVMEKPLAAQAGLGWQGKHTNLVSRDHGSWLFLGEIYTTLELPPDPPARDRCGSCDRCQTACPTAAFPAPYQIDARRCISYLTIEHKGPIPDDLKPLMGNRIYGCDDCLAACPWNKFARATSEPAFLPRAELTAPRLADLAQLDDAGFRQVFSGSPIKRIGRDRFVRNVLVAIGNSGDPALRPVAEALREDASDVVSEAAGWAAARLSSAENSHA

SEQ ID NO: 74675 - protein, 360 aa, Azospirillum thiophilum
  misc_feature (1)..(360): tr|A0A0F2KV82|A0A0F2KV82_9PROT Epoxyqueuosine reductase OS=Azospirillum thiophilum OX=528244 GN=queG PE=3 SV=1
MAIAPARLRDAIRNRALAAGFDAVGFAPAALGPEARERLARFIAEGRHGDMGWMAERSDQRSHPQALWEEARTVIALGTSYAPHEDPRRLLEHPDRGIVSVYARNRDYHDLIKGRLKMLAQWLASSKAHGAKAGVKVFVDTAPVMEKPLAAQAGLGWQGKHTNLVSRDHGSWLFLGEIYTTLELPPDPPGHDRCGSCDRCQVACPTAAFPAPYQLDARRCISYLTIEHKGPIPDELKPLMGNRIYGCDDCLAACPWNKFARATTEPAFLPRAELTAPRLADLAQLDDAGFRQVFSGSPIKRIGRDRFVRNVLVAIGNSGDVRLRPVAETLRLDASDVVREAAGWAAARLARLDESEAADG

SEQ ID NO: 74676 - protein, 354 aa, Azotobacter beijerinckii
  misc_feature (1)..(354): tr|A0A1H9CGZ6|A0A1H9CGZ6_9GAMM Epoxyqueuosine reductase OS=Azotobacter beijerinckii OX=170623 GN=queG PE=3 SV= 1
MSARAPDPARLAQSIKDWGHELGFQQVGIAGIDLHEHEAHLQRWLAAGYQGEMDYMAAHGDKRSRPAELVPGTLRVVSLRMDYLPGDTRMAKRLAAPEQAYLSRYALGRDYHKLIRKRLQQLAERIQGEIGPFGYRAFVDSAPVLEKALAEQAGLGWIGKNTLLLNKKAGSWFFLGELYVDLPLPMDAPHAGEHCGRCTACLDACPTGAFVGPKVLDARRCISYLTIELKGPIPVELRPLIGNRVFGCDDCQLVCPWNRFARPTAESDFQPRHGLDNAELAALFLWSEAEFLARSEGSPLRRAGYQRWLRNLAVGLGNAPSTVPVLAALEARREHPSALVREHVLWALRRHGRD

SEQ ID NO: 74677 - protein, 354 aa, Azotobacter beijerinckii
  misc_feature (1)..(354): tr|A0A1H6U5H2|A0A1H6U5H2_9GAMM Epoxyqueuosine reductase OS=Azotobacter beijerinckii OX=170623 GN=queG PE=3 SV= 1
MSARAPDPARLAQSIKDWGHELGFQQVGIAGIDLHEHEAHLQRWLAAGYQGEMDYMAAHGDKRSRPAELVPGTLRVVSLRMDYLPGDTRMAERLAAPEQAYLSRYALGRDYHKLIRKRLQQLAERIQGEIGPFGYRAFVDSAPVLEKALAEQAGLGWIGKNTLLLNKKAGSWFFLGELYVDLPLPVDAPHAGEHCGRCTACLDICPTGAFVGPKVLDARRCISYLTIELKGPIPVELRPLIGNRVFGCDDCQLVCPWNRFARPTAESDFQPRHGLDNAELAALFLWSEAEFLARSEGSPLRRAGYQRWLRNLAVGLGNAPSTVPVLAALEARREHPSALVREHVLWALRRHGRD

SEQ ID NO: 74678 - protein, 354 aa, Azotobacter chroococcum
  misc_feature (1)..(354): tr|A0A4Q9UUN6|A0A4Q9UUN6_9GAMM Epoxyqueuosine reductase OS=Azotobacter chroococcum OX=353 GN=queG PE=3 SV=1
MSATPPDPARLAQSIKDWGRELGFQQVGIAGLELGEHEAHLRRWLAAGYQGEMDYMAAHGDKRSRPAELVPGTLRVISLRMDYLPGDTRMAERLAAPEQAYLSRYALGRDYHKLIRKRLQQLAERIQAEIGPFGYRAFVDSAPVLEKALAEQAGLGWIGKNTLLLNKKAGSWFFLGELYVDLPLPVDAPHAGEHCGRCSACLDSCPTGAFVGPRQLDARRCISYLTIELKGPIPVELRPLIGNRVFGCDDCQLVCPWNRFARPTAEGDFQPRHGLDNAELAALFRWSEAEFLARSEGSPLRRAGYERWLRNLAVGLGNAPSTIPVLEALEVRREHPSELVREHVLWALRQHGRA

SEQ ID NO: 74679 - protein, 354 aa, Azotobacter chroococcum
  misc_feature (1)..(354): tr|A0A0C4WVM4|A0A0C4WVM4_9GAMM Epoxyqueuosine reductase OS=Azotobacter chroococcum NCIMB 8003 OX=1328314 GN=qu eG PE=3 SV=1
MSATPPDPARLAQSIKDWGRELGFQQVGIAGLELGEHEAHLQRWLAAGYQGEMDYMAAHGDKRSRPAELVPGTLRVVSLRMDYLPGDTRMAERLAAPEQAYLSRYALGRDYHKLIRKRLQQLAERIQGEIGPFGYRAFVDSAPVLEKALAEQAGLGWIGKNTLLLNKKAGSWFFLGELYVDLPLPTDEPHAGEHCGRCSACLEACPTGAFVGPRLLDARRCISYLTIELKGPIPVELRPLVGNRVFGCDDCQLVCPWNRFARPTAEGDFQPRHGLDNAELAALFRWSEAEFLARSEGSPLRRAGYERWLRNLAVGLGNAPSTIPVLEALEARREHPSALVREHVLWALRRHGRV

SEQ ID NO: 74680 - protein, 354 aa, Azotobacter vinelandii
  misc_feature (1)..(354): tr|C1DLP6|C1DLP6_AZOVD Epoxyqueuosine reductase OS=Azot obacter vinelandii (strain DJ / ATCC BAA-1303) OX=32271 0 GN=queG PE=3 SV=1
MSANTPDLVRLAQSIKDWGRELGFQQVGIAGIELSRHEAHLRRWLAAGYQGEMDYMAAHGDKRSRPAELVPGTLRAISLRMDYLPADTRMAERLAAPEKAYLSRYALGRDYHKLIRKRLQHLAERIQGEIGPFGHRAFVDSAPVLEKALAEQAGLGWIGKNTLLLNKKAGSWFFLGELYVDLPLPTDAPHVGEHCGRCSACLDSCPTGAFVGPRLLDARRCISYLTIELKGSIPEELRPLVGNRVFGCDDCQLVCPWNRFARPTREGDFQPRHGLDNAELAALFLWSEAEFLARSEGSPLRRAGYERWLRNLAVGLGNAPSTIPVLEALEARREHPSALVREHVLWALRRHGRD

SEQ ID NO: 74681 - protein, 354 aa, Azotobacter vinelandii; identical to SEQ ID NO: 74680
  misc_feature (1)..(354): tr|M9YFC8|M9YFC8_AZOVI Epoxyqueuosine reductase OS=Azot obacter vinelandii CA6 OX=1283331 GN=queG PE=3 SV=1

SEQ ID NO: 74682 - protein, 377 aa, Bacillaceae bacterium
  misc_feature (1)..(377): tr|A0A3E0JV50|A0A3E0JV50_9BACI Epoxyqueuosine reductase OS=Bacillaceae bacterium OX=1889774 GN=queG PE=3 SV=1
MDFAVLKQEIIEYSKQIGIDKIGFASADVFETLKERLIVQQQLGYQSGFEEPDIEKRTNPELLLPKAKSIISIALAYPSKMKNAPRSTKKERRGLFCRASWGTDYHVILKDRLKKLERFILEKVDGAQVKSMVDTGELSDRAVAERAGIGWSGKNCMIITPEFGSYVYLGEMITNIPFSPDSPIEDRCGSCNICVDSCPTGALVQGGQLDSKKCIAFLTQTKGFLPDEYRGKIGNRLYGCDTCQLVCPENKGKDFHIHSEMEPDPEIAKPKLKPLLHISNREFKEKFGHIAGSWRGKKPIQRNAIIALAHYKDRTALPDLIKLMHEDSRPIIRGTAAWAIGRIGDQSVLFELEKALEKEQDEEVKNEIVKGIEMLKA

SEQ ID NO: 74683 - protein, 378 aa, Bacillaceae bacterium
  misc_feature (1)..(378): tr|A0A261QDS6|A0A261QDS6_9BACI Epoxyqueuosine reductase OS=Bacillaceae bacterium SAS-127 OX=2015203 GN=queG PE =3 SV=1
MNYDVLKQEIIAYSREIGIDKIGFASAAPFVELKDRLIRQQELNYASGFEEKDIEKRVDPAKIFDQPRSIIAIALAYPSKMKEVVKGKRGERRGIFCRASWGEDYHNVLRDRLSQLEVFIQSKVPESRFRSMVDTGELADRAVAERAGIGWSGKNCSIITPEFGSYVYLGEMITNLPFEPDQPIEDRCGTCTKCIDACPTGALVQGGQLNSNRCIAFLTQTKDFLPEEFRDHLGNRLYGCDTCQTVCPENKGMDFHFHEEMEPSGEEVKPLLEPLLQISNKEFKERFGYMSGSWRGKKPIQRNAMIALAHFKEASALPSLIDVLTKDVRPVMRGTAAWTIAKIGGPEAKDALVKAKEKETELEVIKEIDQGLASLNQY

SEQ ID NO: 74684 - protein, 381 aa, Bacilli bacterium
  misc_feature (1)..(381): tr|A0A0K0GAP6|A0A0K0GAP6_9FIRM Uncharacterized protein OS=Bacilli bacterium VT-13-104 OX=1637974 GN=WH51_08690 PE=4 SV=1
MRTEELQQEIREYAMKIGIDKIGFATADVFTELKERLRRQQELNYQSGFEKGTIEERTEPVRLLPEAQSIISIALAYPSRMKNAPKSTKEERRGLFARASWGIDYHEVLRDRLNKLADFIHEKVPEAITKIMVDTGELSDRAVAERAGIGFSGKNTSIITPEFGSFVYLGEMITNIPFIPDNPVEDSCGDCRKCLDACPTGALVGEGGQLNANRCIAFLTQTKDYLEDEFRIKLGNRLYGCDTCQQVCPKNKEIDFHTHPEFEPDPEISKPKLIPMLRISNREFKEKFGSISGSWRGKKPLQRNALIALAHYKDKTAVTEIIEVMKNDPRPVIRGTAAWSLGKIGTEEAFLAIKEAIKVEKDDRVKYEMEKGLEFAETAFK

SEQ ID NO: 74685 - protein, 382 aa, Bacillus aerius
  misc_feature (1)..(382): tr|A0A3A9DE58|A0A3A9DE58_9BACI Epoxyqueuosine reductase OS=Bacillus aerius OX=293388 GN=queG PE=3 SV=1
MDVKKLKQDVIEFAQEIGIDKIRFASADTFETLKERLIENRTLGYESGFEEPDLEKRTNPDLLLPKAKSIIAIALAYPSKMKDAPRSKKGERRGIFCRASWGKDYHHVLREKLDQLEEFLKAQRSDVRTKSMVDTGELSDRAVAERAGIGWSGKNCMIITPEFGSYVYLAEMITNIPFEPDERIEDQCGSCNKCIEACPTGALVNPGQLNSQRCIAFQTQTKGFLPDEFRTKIGNRIYGCDTCQMVCPKNKGVDFHLHPEMEPDPEIAKPLLKPLLTMSNREFKEKFGHVAGSWRGKKPIQRNAIIALAHFKETDALPELIELMHKDPRPVIRGTAAWAVGKIGGADVMGELERALAHEQDEEAKAEIQKGIGLLKETSATN

SEQ ID NO: 74686 - protein, 382 aa, Bacillus aerophilus
  misc_feature (1)..(382): tr|A0A410KXP9|A0A410KXP9_9BACI tRNA epoxyqueuosine(34) reductase QueG OS=Bacillus aerophilus OX=293389 GN=queG PE=4 SV=1
MHVGQLKEELIQYANEIGVDKIRFASADTFDSLKDRLILHESLGYLSGFEEPDIEKRTNPALLLPKAKSIVAIALAYPSKMKDAPRSTKDARRGIFCRASWGTDYHVVLKKKLDMLEEFLRSKHEDIRTKSMVDTGELSDRAVAERAGIGFSAKNCMIITPEFGSYVYLAEMITNVPFEPDEKIEDQCGTCNKCVDSCPTGALVNPGQLNSQRCISFLTQTKGFLPDEFRSKIGNRLYGCDTCQTVCPINKGKDFHLHPEMEPDPEIAKPLLKPLLTISNREFKEKYGHVSGSWRGKKPIQRNAILALAHFKDTSALPDLVDLMHKDPRPVIRGTAAWAIGKIGDGQQLSELEKALERESDEEAKQEIIKGIELLQTPLNTK

SEQ ID NO: 74687 - protein, 379 aa, Bacillus akibai
  misc_feature (1)..(379): tr|W4QX65|W4QX65_BACA3 Epoxyqueuosine reductase OS=Baci llus akibai (strain ATCC 43226 / DSM 21942 / JCM 9157 / 1139) OX=1236973 GN=queG PE=3 SV=1
MTLAQLKDELIAYSKTIGVDKIGFASADPFLQLKDRLLTQQQLGFQSGFEEPDIEKRVNPAKVLTEARTIISIALAYPSKMSNPPKNTKEDRRGIFCRASWGRDYHDVLRDRLKKIEQFLLERIPEAKTVSMVDTGELSDRAVAERAGIGWSGKNCAIITPEFGSYVYLGEIITTIPFDPDTPITEQCGTCTKCIDACPTDALVQGGQLDSNKCIAFLTQTKDFLPDQYRKKLGNRIYGCDTCQQVCPENKGKDFHHHPEMEPDPEIAKPKLIPLLTISNRDFKEKFGHVSGSWRGKKPIQRNAIIALAHFKDQKALPVLADLAKKDPRPVIRGTAAWAIGVIGSLEEKKLLNQLKNIEKDDKVLGEIEKGLNILENKE

SEQ ID NO: 74688 - protein, 380 aa, Bacillus albus
  misc_feature (1)..(380): tr|A0A1J9U4M6|A0A1J9U4M6_9BACI Epoxyqueuosine reductase OS=Bacillus albus OX=2026189 GN=queG PE=3 SV=1
MDFEQLKQDVIAYSKTIGIDKIGFASASPFEELKQRLIQQQQLNYQSGFEEPDIEKRTNPQLLLPGAKSIIAIALAYPSKLKNAPLSKRGERRGIFCRASWGQDYHLVLRDRLQKLEAYLIEKLPNIEVKSMVDTGELSDRAVSERAGIGWSGKNCAIITPEFGSYVYLGEMITNVPFPPDQPIEDQCGSCTKCIDICPTGALIQGGQLDSKKCIAFLTQTKGFLPEEYRDKIGNRIYGCDTCQTVCPKNKGMDFHNHPEMEPDPELVKPLLTPLLTISNRDFKEKYGIMSGSWRGKKPLQRNAILALAHFKEASAIPDLIGVMKDDPRPVLRGTAAWALGKIGGDGVGEAIEKAMQREKDEEVLHEMNRGLELLAQKKE

SEQ ID NO: 74689 - protein, 388 aa, Bacillus alcalophilus
  misc_feature (1)..(388): tr|A0A4S4JXW1|A0A4S4JXW1_BACAO Iron-sulfur cluster-bind ing protein OS=Bacillus alcalophilus ATCC 27647 = CGMCC 1.3604 OX=1218173 GN=AJ85_13405 PE=4 SV=1
MINAQLKKELLAYSVSIGIDKIGFASADPFTTLKERLIKQRELGYQSGFEESDIEKRVDPSLTLPKAQTIISIAVAYPSKMKNPPKSTKEERRGIFCRASWGMDYHDVLRERLGKVEEFIKAKVPDAKTVSMVDTGVLSDRAVAERAGIGWSAKNCAIITPEFGSYVYLGNIITTVAIEPDTPITDQCGSCTKCIDACPTGALIQGGQLDSQKCVAFLTQTKGFIADEYRKKIGNRLYGCDTCQQVCPKNKGIDEHRHPELEPDPEIAKPKLIPLLTMSNREFKEKFGHVSGAWRGKKPIQRNAILALGHFKDKNALPVLKKLLKEDPRPVIRGTAAWAIGKIGHVEGEIWLKTAKEKEKDEQVLVEIEKGLNLLENTNFTDGNQMNV

SEQ ID NO: 74690 - protein, 382 aa, Bacillus altitudinis; identical to SEQ ID NO: 74686
  misc_feature (1)..(382): tr|A0A5C2CHB0|A0A5C2CHB0_9BACI Epoxyqueuosine reductase OS=Bacillus altitudinis OX=293387 GN=queG PE=4 SV=1

SEQ ID NO: 74691 - protein, 386 aa, Bacillus amyloliquefaciens
  misc_feature (1)..(386): tr|A0A4V7TKN4|A0A4V7TKN4_BACAM Epoxyqueuosine reductase OS=Bacillus amyloliquefaciens OX=1390 GN=queG PE=3 SV= 1
MNIHKLKEELIEYAKSIGVDKIGFTTADTFDSLRDRLILQESLGYLSGFEEPDIEKRVTPSLLLPKAKSIVAIALAYPSKMKDAPRSTRDGRRGIFCRASWGKDYHDVLREKLDLLENFLQSKHEDIRTKSMVDTGELSDRAVAERAGIGFSAKNCMITTPEYGSYVYLAEMITNLPFEPDVPIEDMCGSCTKCLDACPTGALVNPGQLNAQRCISFLTQTKGFLPDEFRTKIGNRLYGCDTCQTVCPINKGKDFHLHPQMEPDPEIAKPLLKPLLTISNREFKEKFGHVSGSWRGKKPIQRNAILALAHFKDASSLPELTALMHQDPRPVIRGTAAWAIGKIGDPEYAAELEKALHKEQDEEAIQEIKKGMELLSVSDKTKTGQS

SEQ ID NO: 74692 - protein, 389 aa, Bacillus amyloliquefaciens
  misc_feature (1)..(389): tr|I2C2U2|I2C2U2_BACAM Epoxyqueuosine reductase OS=Baci llus amyloliquefaciens Y2 OX=1126211 GN=queG PE=3 SV=1
MQKMNIHKLKEELIEYAKSIGVDKIGFTTADTFDSLRDRLILQESLGYLSGFEEPDIEKRVTPSLLLPKAKSIVAIALAYPSKMKDAPRSTRDGRRGIFCRASWGKDYHDVLREKLDLLENFLQSKHEDIRTKSMVDTGELSDRAVAERAGIGFSAKNCMITTPEYGSYVYLAEMITNLPFEPDVPIEDMCGTCTKCLDACPTGALVNPGQLNAQRCISFLTQTKGFLPDEFRTKIGNRLYGCDTCQTVCPINKGKDFHLHPQMEPDPEIAKPLLKPLLTISNREFKEKFGHVSGSWRGKKPIQRNAILALAHFKDASSLPELTALMHQDPRPVIRGTAAWAIGKIGDPDYAEELEKALQKEQDEEAIREIEKGLELLSVSDKTKTGRS

SEQ ID NO: 74693 - protein, 380 aa, Bacillus anthracis
  misc_feature (1)..(380): sp|Q81YT7|QUEG_BACAN Epoxyqueuosine reductase OS=Bacill us anthracis OX=1392 GN=queG PE=3 SV=1
MDFEQLKQDVIAYSKTIGIDKIGFASASPFEELKQRLIQQQQLNYQSGFEEPDIEKRTNPQLLLSGAKSIIAIALAYPSKLKNAPLSKRGERRGIFCRASWGQDYHLVLRDRLQKLEAYLIEKLPDIEVKSMVDTGELSDRAVSERAGIGWSGKNCSIITPEFGSYVYLGEMITNVPFPPDQPIEDQCGSCTKCIDICPTGALIQGGQLDSKKCIAFLTQTKGFLPEEYRDKIGNRIYGCDTCQTVCPKNKGMDFHNHPEMEPDPELVKPLLTPLLTISNRDFKEKYGIMSGSWRGKKPLQRNAILALAHFKEASAIPDLIGVMKDDPRPVLRGTAAWALGKIGGDGVGEAIEKAMQREKDEEVLHEMNRGLELLAQKKE

SEQ ID NO: 74694 - protein, 380 aa, Bacillus anthracis
  misc_feature (1)..(380): tr|A0A2A8L0U7|A0A2A8L0U7_BACAN Iron-sulfur cluster-bind ing protein OS=Bacillus anthracis OX=1392 GN=queG PE=3 SV=1
MDFEQLKQDVIAYSKTIGIDKIGFASASPFEELKQRLIQQQQLNYQSGFEEPDIEKRTNPQLLLPGAKSIIAIALAYPSKLKNAPLSKRGERRGIFCRASWGQDYHLVLRDRLQKLEAYLIEKLPDIEVKSMVDTGELSDRAVSERAGIGWSGKNCSIITPEFGSYVYLGEMITNVPFPPDQPIEDQCGSCTKCIDICPTGALIQGGQLDSKKCIAFLTQTKGFLPEEYRDKIGNRIYGCDTCQTVCPKNKGMDFHNHPEMEPDPELVKPLLTPLLTISNRDFKEKYGIMSGSWRGKKPLQRNAILALAHFKEASAIPDLIGVMKDDPRPVLRGTAAWALGKIGGDGVGEAIEKAMQREKDEEVLHEMNRGLELLAQKKE

SEQ ID NO: 74695 - protein, 380 aa, Bacillus aquimaris
  misc_feature (1)..(380): tr|A0A1J6W0F2|A0A1J6W0F2_9BACI Epoxyqueuosine reductase OS=Bacillus aquimaris OX=189382 GN=queG PE=3 SV=1
MDFDQLKQDIIEYSKEIGIDKIGFTTADSFSEMKNRLIRQEILGYQSGFEEKDIEKRVDPSLIFDGPKSIIAIALAYPSRMKDAPQSKRGERRGIFCRASWGTDYHHVLRDRLATLEDYIVSRVPQARFKSMVDTGELVDRAVAERAGIGWSGKNCSIITPEFGSYVYLGEMVTNLPFEPDEPMEDQCGTCNKCVDVCPTGALIEGGQLDAQKCIAFLTQTKGFLADEYRVKLGNRLYGCDTCQTVCPENKGKDFHFHKEMEPDPEIAKPLLKPLLTISNREFKERYGHVSGSWRGKKPIQRNAIIALAHYKDETAIEDLIEVMKNDVRPVMRGTAAWALGKIGGSEAEEALLTQQVIEEDDEVLAEIEKGMVMLAPDAG

SEQ ID NO: 74696 - protein, 377 aa, Bacillus aquimaris
  misc_feature (1)..(377): tr|A0A5D4UE55|A0A5D4UE55_9BACI Epoxyqueuosine reductase OS=Bacillus aquimaris OX=189382 GN=queG PE=3 SV=1
MDMDQLKQDIIDYSKEIGIDKIGFTTAGAFSEMKNRLLRQEMLGYQSGFEEKDIEKRVDPSLIFESPKSIIAIALAYPSKMKNAPQSKRGERRGIFCRASWGTDYHHVLRDRLSKLEEYIVSRVPQARFKSMVDTGELVDRAVAERAGIGWSGKNCSIITPEFGSYVYLGEMVTNLPFAPDTPMEDQCGTCNKCVDVCPTGALIEGGQLDAQKCIAFLTQTKGFLADEYRVKLGNRLYGCDTCQTVCPENKGMDFHFHEEMEPDPEIAKPLLKPLLTISNREFKEKYGHVSGSWRGKKPIQRNAIIALAHYKDTTAIDDLIDVLKKDVRPVIRGTSAWALGKIGGVEAEVALLAQQSVETDEEVLNEIQKGLNLITK

SEQ ID NO: 74697 - protein, 378 aa, Bacillus aryabhattai
  misc_feature (1)..(378): tr|A0A264YV43|A0A264YV43_9BACI Epoxyqueuosine reductase OS=Bacillus aryabhattai OX=412384 GN=queG PE=3 SV=1
MDFQQLKKEVIAYSKEIGIDKIGFASASTFETLKDRLLKQQELGYASGFEEPDIEKRTNPTLLVPKAKSIIAIALAYPSKMPGAPRSTKEDRRGIFCRASWGQDYHTILRDRLQKLESFLKEKVQGVEVKSMVDTGELSDRAVAERAGIGWSGKNCAIITPEFGSYVYLGEIVTNIPFEPDQPIEDQCGTCNKCVEVCPTGALVTGGQLNSQRCIAFLTQTKGFLADEFRDKIGNRLYGCDTCQTVCPENKGKDFHFHPEMEPDPEIAKPKLKPLLTMSNREFKEKYGHVSGSWRGKKPIQRNAIIALAHFKDETAIPDLIKVMKEDVRPVIRGTAAWALGKIGNDEVLPLLEQLKEKESDEEAKQEFEKGIALLVKS

SEQ ID NO: 74698 - protein, 378 aa, Bacillus aryabhattai
  misc_feature (1)..(378): tr|A0A1G7FF05|A0A1G7FF05_9BACI Epoxyqueuosine reductase OS=Bacillus aryabhattai B8W22 OX=1358420 GN=queG PE=3 SV=1
MNAYQLKEEIISYSKEIGIDKIGFASASMFDELKNRLLAQQELGYASGFEEPDIEKRVDPTLVVPKARSIISIALAYPSKLKDAPKSTKEDRRGIFCRASWGQDYHTVLRDRLQKLEAFIKEKVPAAILQSMVDTGELSDRAVAERAGIGWSGKNCAIITPEFGSYVYLGEMITDIPFPPDKPIEDGCGTCNKCVDACPTGALVTGGQLNSQRCIAFLTQTKGFLAEEFRSKLGNRLYGCDTCQTVCPENKGKDFHFHPEMEPDPELAKPKLKPLLTMSNREFKEKFGHVSGSWRGKKPIQRNAIIALAHFKDQTAVPDLIELIKNDVRPVIRGTAAWALGKIGDKEALDTLMNLREKEKDQEVIEEMSKGIEMLQEI

SEQ ID NO: 74699 - protein, 377 aa, Bacillus asahii
  misc_feature (1)..(377): tr|A0A398B895|A0A398B895_9BACI Epoxyqueuosine reductase OS=Bacillus asahii OX=228899 GN=queG PE=3 SV=1
MYMKELKKELIAYSQEIGIDKIGFTTASTFDSLRNRLLEQQTLDYQSGFEEPNIEKRVRPELIIEHPQSIISIALAYPSKMKDAPLSTKGERRGIFCRASWGTDYHVVLREKLQLLESFIKEKVPNALTKTMVDTGELSDRAVAERAGIGWSGKNTMIITPEFGSYVYLGDLITNVPFEPDQPMEDQCGTCNKCVDVCPTGALVQGGQLNAKRCIAFLTQTKGFLPDEFRSKIGNRLYGCDTCQTVCPKNKGIDFHIHAEMEPDPDIAKPLLKPLLTISNKEFKEKYGHVSGSWRGKKPIQRNVILALAHFKDETALPELIQVMEEDPRPVIRGTAAWAIGKIGGGEAEGILQRALDKEKDEDVLAEIKKGLMLAAY

SEQ ID NO: 74700 - protein, 377 aa, Bacillus asahii
  misc_feature (1)..(377): tr|A0A3T0KM22|A0A3T0KM22_9BACI Epoxyqueuosine reductase OS=Bacillus asahii OX=228899 GN=queG PE=3 SV=1
MYMKELKKELIAYSKEIGIDKIGFTTASTFDSLRNRLLEQQTLDYQSGFEEPNIEKRVRPELIIEHPQSIISIALAYPSKMKDAPLSTKGERRGIFCRASWGTDYHVVLREKLQLLESFIKEKIPNALTKSMVDTGELSDRAVAERAGIGWSGKNTMIITPEFGSYVYLGDLITNVPFEPDQPMEDQCGTCNKCVDVCPTGALVQGGQLNAKRCIAFLTQTKGFLPDEFRSKIGNRLYGCDTCQTVCPKNKGIDFHIHAEMEPDPDIAKPLLKPLLTISNKEFKEKYGHVSGSWRGKKPIQRNAILALAHFKDETALPELIQVMKEDPRPVIRGTAAWAIGKIGGGEAEGILQSALDKEKDEDVLAEIKKGLMLAAH

SEQ ID NO: 74701 - protein, 386 aa, Bacillus atrophaeus
  misc_feature (1)..(386): tr|A0A080UM08|A0A080UM08_BACAT Epoxyqueuosine reductase OS=Bacillus atrophaeus OX=1452 GN=queG PE=4 SV=1
MNIRQLQEELIEYAKSIGVDKIGFTTADTFESLKDRLILQESLGYLSGFEEPDVEKRVTPTLLLPKAKSIVAIALAYPSKMKDAPRSTKDARRGIFCRASWGKDYHDVLREKLDLLEAFLQSKHEEIRTKSMVDTGELSDRAVAERAGIGFSAKNCMITTPEYGSYVYLAEMITNVPFEPDVPIEDMCGSCTKCLDACPTGALVNPGQLNAQRCISFLTQTKGFLPDEFRTKIGNRLYGCDTCQTVCPINKGKDFHLHPQMEPDPEIAKPLLKPLLTISNREFKEKFGHVSGSWRGKKPIQRNAILALAHFKDQSALPELAALMHQDPRPVIRGTAAWAIGKIGDQEYAEELNRALAKEKDEEAKREIEKGIDLLKAANKTKQGLS

SEQ ID NO: 74702 - protein, 386 aa, Bacillus atrophaeus; identical to SEQ ID NO: 74701
  misc_feature (1)..(386): tr|A0A0H3DX37|A0A0H3DX37_BACA1 YhbA OS=Bacillus atropha eus (strain 1942) OX=720555 GN=BATR1942_02050 PE=4 SV=1

SEQ ID NO: 74703 - protein, 382 aa, Bacillus australimaris
  misc_feature (1)..(382): tr|A0A0P7FLM7|A0A0P7FLM7_9BACI Epoxyqueuosine reductase OS=Bacillus australimaris OX=1326968 GN=AKG37_11965 PE =4 SV=1
MHVGELKEELIQYAKEIGVDKIRFASADTFDSLKDRLILHESLGYLSGFEEPDIEKRTNPSLLLPKAKSIVAIALAYPSKMKDAPRSTKDARRGIFCRASWGTDYHVVLKKKLDMLEEFLRSKHVDIRTKSMVDTGELSDRAVAERAGIGFSAKNCMIITPEFGSYVYLAEMITNVPFEPDEKIEDQCGTCNKCVDSCPTGALVNPGQLNSQRCISFLTQTKGFLPDEFRSKIGNRLYGCDTCQIVCPINKGKDFHLHPEMEPDPEIAKPLLKPLLTISNREFKEKYGHVSGSWRGKKPIQRNAILALAHFKDASALPVLVELMHKDPRPVIRGTAAWAIGKIGDNQQLPELEKALERESDDEAKQEIEKGIELLQTPLNTK

SEQ ID NO: 74704 - protein, 382 aa, Bacillus azotoformans
  misc_feature (1)..(382): tr|K6DYX1|K6DYX1_BACAZ Epoxyqueuosine reductase OS=Baci llus azotoformans LMG 9581 OX=1131731 GN=queG PE=3 SV=1
MDIAKLKDEIIAYSKEIGIEKVGFTSADPFVELKQRLYTQQKLNYQSGFEESDIEKRTNPKLLLSGAESIISIALAYPSKLKDAPRSIREERRGLFCRASWGTDYHHILRDRLNKLEEFILEKIPDAQIKSMVDTGELSDRAVAERAGIGWSGKNCAVITPEFGSYVYLGEMITTIPFPSDQPIEDMCGTCTKCLEACPTGALVQGGQINATKCIGFLTQTKGFIEDEYRVKIGNRVYGCDTCQMVCPHNKGKNFDFHVEMDPDPEVVKPKLKSLLFISNKEFKEKFGPLAGSWRGKKPIQRNAIIGLAHYKDETAINDLAKVLSEDTRPVLRGTAAWAIGKIGAPEGKSILERAKEKEKDEQVLHEIDKGLKLLETSIERS

SEQ ID NO: 74705 - protein, 382 aa, Bacillus azotoformans
  misc_feature (1)..(382): tr|A0A072NR71|A0A072NR71_BACAZ Epoxyqueuosine reductase OS=Bacillus azotoformans MEV2011 OX=1348973 GN=queG PE =3 SV=1
MDIAKLKDEIIAYSKEIGIDKIGFTSADPFVELKQRLYTQQKLNYQSGFEESDIEKRTNPKLLLSGAESIISIALAYPSKLKDAPRSTREERRGLFCRASWGTDYHHILRDRLNKLEEFILEKIPDAQIKSMVDTGELSDRAVAERAGIGWSGKNCAVITPEFGSYVYLGEMITTIPFPSDQPIEDMCGTCTKCLEACPTGALVQGGQINATKCIGFLTQTKGFIEDEYRVKIGNRVYGCDTCQMVCPHNKGKDFHFHVEMDPDPEVVKPELKSLLFISNKEFKEKFGPLAGSWRGKKPIQRNAIIGLAHYKDETAINDLAKVLSEDTRPVLRGTAAWAIGKIGAPEGKSILERAKEKEKDEEVLHEIDKGLKLLETSIERS

SEQ ID NO: 74706 - protein, 377 aa, Bacillus bacterium
  misc_feature (1)..(377): tr|A0A3D0E4K9|A0A3D0E4K9_9BACI Epoxyqueuosine reductase OS=Bacillus bacterium OX=2053512 GN=queG PE=3 SV=1
MDYKKLKHEIIAYSREIGIDKIGFTSADPFVEMKNLLIRQEELGYQSGFEHKNIEERTHPELIFDEPRAIIAIALAYPSKMNDAPRGEPGNRRGIFCKASWGVDYHVLVREKLEQLAAFIDSKIRDARFKLMVDTGELVDRAVAERAGIGWSGKNCSIITPEFGSYVYLGEMITNLPFEPDEPMQDQCGECTKCLDACPTGALVQPGQLDAQSCIAFLTQTKGLLPDEFRDKVGNRLYGCDTCQVVCPKNKGVDFHLHPEMEPDPDIAKPLLKPLLDISNREFKEKYGEVSGSWRGKKPIQRNAIIALAHFKEASAVNDLIKILNEDVRPEIRGTAAWTLGKIGGEKAREALMLAQAGEENPLVLGEIDKGLQFFEK

SEQ ID NO: 74707 - protein, 380 aa, Bacillus bacterium
  misc_feature (1)..(380): tr|A0A506Q2W7|A0A506Q2W7_9BACI Epoxyqueuosine reductase OS=Bacillus bacterium OX=2053512 GN=queG PE=3 SV=1
MDFEQLKQDVIAYSKTIGIDKIGFASASPFEELKQRLIQQQQLNYQSGFEEPDIEKRTNPQLLLPGAKSIIAIALAYPSKLKNAPLSKRGERRGIFCRASWGQDYHLVLRDRLQKLEAYLIEKLPDIEVKSMVDTGELSDRAVSERAGIGWSGKNCAIITPEFGSYVYLGEMITNVPFPPDQPIEDQCGSCTKCIDICPTGALIQGGQLDSKKCIAFLTQTKGFLPEEYRDKIGNRIYGCDTCQTVCPKNKGMDFHNHPEMEPDPELVKPLLTPLLTISNRDFKEKYGIMSGSWRGKKPLQRNAILALAHFKEASAIPDLIGVMKDDPRPVLRGTAAWALGKIGGDGVGEAIEKAMQRENDEEVLHEMNRGLELLAQKKE

SEQ ID NO: 74708 - protein, 376 aa, Bacillus badius
  misc_feature (1)..(376): tr|A0A162Y4D6|A0A162Y4D6_BACBA Epoxyqueuosine reductase OS=Bacillus badius OX=1455 GN=queG PE=3 SV=1
MDYRALKQEIIEYSREIGIDKIGFASAAPFTELKDRLLRQQALDYQSGFEEKDINKRVEPSRIFDEPRSIIAIALAYPSKMRESVKGKQGARRGIFCRASWGEDYHTVLRDRLSKLEAFIAAKAPEARFRSMVDTGELSDRAVAERAGIGWSGKNTSIITPEFGSYVYLGEMITNLPLEPDKPIENRCGTCTKCLDACPTGALVQGGQLNVKRCIAFLTQTKDFMPAEFRDKLGNRLYGCDTCQTVCPENKGIDFHLHEEMEPDPEAVKPLLEPLVSMSNKEFKQTFGSMSGSWRGKKPIQRNAIIALAHFKEESALPSLMDVLFHDVRPVLRGTAAWAIAKIGGEKAREALILAKEKESDPAVKEEIEKGISLLN

SEQ ID NO: 74709 - protein, 376 aa, Bacillus badius
  misc_feature (1)..(376): tr|A0A0C2Y6F2|A0A0C2Y6F2_BACBA Epoxyqueuosine reductase OS=Bacillus badius OX=1455 GN=queG PE=3 SV=1
MDYRALKQEIIEYSREIGIDKIGFASAAPFTELKDRLLRQQALDYQSGFEEKDINKRVEPSRIFDEPRSIIAIALAYPSKMRESVKGKQGARRGIFCRASWGEDYHTVLRDRLSKLEAFIAAKAPEAHFRSMVDTGELSDRAVAERAGIGWSGKNTSIITPEFGSYVYLGEMITNLPLEPDKPIENRCGTCTKCLDACPTGALVQGGQLNAKRCIAFLTQTKDFMPAEFRDKLGNRLYGCDTCQTVCPENKGIDFHLHEEMEPDPEAVKPLLEPLVSMSNKEFKQTFGSMSGSWRGKKPIQRNAIIALAHFKEESALPSLMDVLFHDVRPVLRGTAAWAIAKIGGEKAREALILAKEKESDSAVKEEIEKGISLLN

SEQ ID NO: 74710 - protein, 377 aa, Bacillus bataviensis
  misc_feature (1)..(377): tr|A0A561CEI0|A0A561CEI0_9BACI Epoxyqueuosine reductase OS=Bacillus bataviensis OX=220685 GN=queG PE=3 SV=1
MDNHELKEELIAYSKEIGIDKIGFTTASPFSQLKNRLLRQQELGYQSGFEEPDIDKRVTPEMLLEGAQSIISIALAYPAKMTIRVESKKGERRGIFSRASWGLDYHHILRDRLTKLEEFIINKIPNAKLKSMVDTGELSDRAVAERAGIGWSGKNCSIITPEFGSYVYLGEMITNIPFEPDTPIEDNCGSCTKCLDACPTGALIQGGQINANRCISFLTQTKELIPDEFREKIGNRVYGCDSCQTACPINKGINFHFHEEMEPDPVVAKPLLKPILKLSNREFKKRFGSISGAWRGKKPIQRNAIIALAHFKDESAVPDLIDVLQTEASPVTRGTAAWALGKIGGETAYAALRKAKELETDIEVQSEIEKGLNFYNN

SEQ ID NO: 74711 - protein, 376 aa, Bacillus bataviensis
  misc_feature (1)..(376): tr|K6BU59|K6BU59_9BACI Epoxyqueuosine reductase OS=Baci llus bataviensis LMG 21833 OX=1117379 GN=queG PE=3 SV=1
MDVQKFKQELIAYSKEIGIDKIGFTTADPFSELKNRLIRQQELGYHSGFEEPDIEKRVTPTLLLDEPRSIISIALAYPSKMKDRVVSKKGERRGIFSRASWGLDYHHLLRDKLKKLEEFIKMKVPDARLKSMVDTGELSDRAVAERAGIGWSGKNCAIITPEFGSYVYIGEMITSIPFEPDTPIEDQCGSCTKCLEACPTGALVQGGQINAQRCISFLTQTKGFIPDEFREKIGNRVYGCDSCQTACPHNKVKNFHFHEEMEPDPEVAKPLLRPILQLSNREFKNKFGDVSGSWRGKKPIQRNAMIALAHFKDESAVSDLIEVLKNEASPVARGTAAWALGKIGGETAFAALEKAKAVETDSAVQIEIEKALSLNK

SEQ ID NO: 74712 - protein, 381 aa, Bacillus beveridgei
  misc_feature (1)..(381): tr|A0A1D7QWS9|A0A1D7QWS9_9BACI Iron-sulfur cluster-bind ing protein OS=Bacillus beveridgei OX=632773 GN=BBEV_21 04 PE=4 SV=1
MKASELKNKLIEKSRELEIDKIGFASADPFVTLKSRLEDQQSLGFETGFEKGSVKERTEPERLLPEAKTIVSIAMAYPSKLKNPPRSVKGDRRGVFCRASWGEDYHHILKRKLKALEAYLHELMPDERTAVMVDTGELSDRAVAERAGIGWSAKNCAIITPEFGSYVYLGEMLMTAYVEPDTPLEDQCGSCTKCIDACPTDALIQGGQLDSSKCIAYLTLTKSMIPKEYRQKLGNRLYGCDTCQVVCPENKGKNHTHHEEMTPDPEKAKPQLIPLLSLSNKEFKRTFGEVSGSWRGKKPIQRNALIALANFKDVSAVPAIEEVLKNDQRPVMRATAAWALSEIKGDEAMPRLEAHLDDETADEVIAEIADVMKHLSRTTRL

SEQ ID NO: 74713 - protein, 380 aa, Bacillus bombysepticus
  misc_feature (1)..(380): tr|A0A023P1K8|A0A023P1K8_9BACI Epoxyqueuosine reductase OS=Bacillus bombysepticus str. Wang OX=1330043 GN=queG PE=3 SV=1
MDFEQLKQDVIAYSKTIGIDKIGFASASPFEELKQRLIQQQQLNYQSGFEEPDIEKRTNPQLLLPGAKSIIAIALAYPSKLKNAPLSKRGERRGIFCRASWGQDYHLVLRDRLQKLEAYLIEKLPDIEVKSMVDTGELSDRAVSERAGIGWSGKNCSIITPEFGSYVYLGEMITNVPFPPDKPIEDQCGGCTKCIDICPTGALIQGGQLDSKKCIAFLTQTKGFLPEEYRDKIGNRIYGCDTCQTVCPKNKGMDFHNHPEMEPDPELVKPLLTPLLTISNRDFKEKYGIMSGSWRGKKPLQRNAILALAHFKETSAIPDLIGVMKDDPRPVLRGTAAWALGKIGGDGVGEAIEKAMEREKDEEVLHEMNRGLELLAQKKE

SEQ ID NO: 74714 - protein, 385 aa, Bacillus boroniphilus
  misc_feature (1)..(385): tr|W4RUE4|W4RUE4_9BACI Iron-sulfur cluster-binding prot ein OS=Bacillus boroniphilus JCM 21738 OX=1294265 GN=JC M21738_5091 PE=4 SV=1
MDMVNLKKDIIEYSKTIGIDKIGFASPSAFEEMKVRLYRQQELQYQSGFEEKDIEKRTEPSLIFDHPKSIISIALAYPSKMKTKVVSKKWERRGIFCRASWGIDYHVVLRDRLKKLEDYIASKVPGSMFKSMVDTGELVDRAVAERAGIGWSGKNCSIITPEFGSYVYLGEMITNIPFEPDTPMEDRCGSCNKCVEVCPTGALVQGGQLDAQKCIAFVTQTKGFLADEFREKLGNRLYGCDTCQTVCPENKGKDFHFHEEMEPDPEIAKPLLKPLLTMSNRDFKEKFGHVSGSWRGKKPIQRNAIIALAHYKDDTAMPELIKVMQDDPRPVLRGTAAWALGKIGGSVALDALKHASAVERDEEVLNEISKGLEFFKDNLESNITV

SEQ ID NO: 74715 - protein, 379 aa, Bacillus butanolivorans
  misc_feature (1)..(379): tr|A0A2A7WDQ8|A0A2A7WDQ8_9BACI tRNA epoxyqueuosine(34) reductase QueG OS=Bacillus butanolivorans OX=421767 GN= queG PE=4 SV=1
MDMNTLKQEVIIYSKEIGIDKIGFTSASNFTELKSRLIRQQELDYQSGFEESDIEKRVRPELIFDKPQSIISIALAYPSKLKNAPQSTKSERRGIFCRASWGTDYHTVLRNKLQLLEDFIKDKVPGAMVKSMVDTGELSDRAVAERAGIGWSAKNSMIITPEFGSYVYLGDMITNLPFIPDQPMEDQCGTCNKCVDVCPTGALVQGGQLNSKRCIAFLTQTKGFLPDEFRTKIGNRLYGCDTCQTVCPKNKGMDFHFHEEMEPDPEVAKPLLKPLLTISNRDFKETYGYVSGSWRGKKPIQRNAILALAHFKDETSLPELIQIMKEDPRPVLRGTAAWAIGKIGRKQVVSILEETLMNETDEEVRAEIEKGLQFTLEHQ

SEQ ID NO: 74716 - protein, 379 aa, Bacillus butanolivorans
  misc_feature (1)..(379): tr|A0A0M0ERC8|A0A0M0ERC8_9BACI Iron-sulfur cluster-bind ing protein OS=Bacillus butanolivorans OX=421767 GN=AKG 34_02730 PE=4 SV=1
MDMNSLKQEVIIYSKEIGIDKIGFTSASNFTELKSRLIRQQELDYQSGFEEPDIEKRVRPELIFDKPQSIISIALAYPSKLKNAPQSTKSERRGIFCRASWGTDYHTVLRNKLQLLEDFIKDKVPGAMAKSMVDTGELSDRAVAERAGIGWSAKNSMIITPEFGSYVYLGDMITNLPFIPDQPMEDQCGTCNKCVDVCPTGALVQGGQLNSKRCIAFLTQTKGFLPDEFRTKIGNRLYGCDTCQTVCPKNKGMDFHFHEEMEPDPEVAKPLLKPLLTISNRDFKETYGYVSGSWRGKKPIQRNAILALAHFKDETSLPELIQIMKEDPRPVLRGTAAWAIGKIGRKQVVSILEEALMNETDEEVRAEIEKGLQFTLEHQ

SEQ ID NO: 74717 - protein, 380 aa, Bacillus caldolyticus; identical to SEQ ID NO: 74503
  misc_feature (1)..(380): tr|A0A2H5KH22|A0A2H5KH22_BACCL Epoxyqueuosine reductase OS=Bacillus caldolyticus OX=1394 GN=queG PE=3 SV=1

SEQ ID NO: 74718 - protein, 382 aa, Bacillus camelliae
  misc_feature (1)..(382): tr|A0A2N3LPP2|A0A2N3LPP2_9BACI tRNA epoxyqueuosine(34) reductase QueG OS=Bacillus camelliae OX=1707093 GN=queG PE=4 SV=1
MIMDLLQFKEDLIQYSKSIGIDKIGFTTADPFTEMKNRLLKQQELQYQSGFEEKDIDKRTNPSLIFDKPQSIISIALAYPSKMENAPKGKVGERRGIFCKASWGEDYHHILRRKLSELEAFIMEYNPEARCKSMVDTGELVDRAVAERAGIGWSGKNCSIITPEFGSYVYLGEMITNIPFEPDTPMEDQCGSCTKCLDACPTGALVQGGQLNAQKCIAFLTQTKGFLAEEFRVKLGNRLYGCDTCQSVCPKNKGIDFHFHEEMEPEPNLVKPELTPLLSISNREFNDSFGKMSGSWRGKKPIQRNALIALAHFKETSAVPDIITVLKNDPRPVLRGTAAWALGKIGGDEAKNALLEAKANESDEEVLKEVIEGLSKLINEDI

SEQ ID NO: 74719 - protein, 383 aa, Bacillus campisalis
  misc_feature (1)..(383): tr|A0A0M2SP10|A0A0M2SP10_9BACI Iron-sulfur cluster-bind ing protein OS=Bacillus campisalis OX=1408103 GN=WQ57_2 3270 PE=4 SV=1
MDIRQLQEEVIAYSKTIGIDKIGFASPSPFTEMKSRLLRQQELGYQSGFEEKDIEKRVRPDLIFDQPHSIIAIAVAYPSKMKVRVVSKKGQRRGIFCRASWGVDYHHVLRNKLKKLEEFILSKVPEARFKSMVDTGELVDRAVAERAGIGWSGKNCSILTPEFGSYVYLGEMITNLPFIPDAPMEDQCGSCTKCLDACPTGALVQGGQLDSQRCIAFLTQTKGFLPDEFRDKLGNRLYGCDSCQTACPVNKGKDFHFHPETEPDPEVAKPLLKPILHISNKDFKEKFGPVSGSWRGKKPIQRNAILALAHFKDDSAVPDLIKVMQEDPRPVIRGTAAWSLGKIGGEGAKTALENALVQEKDEDVLVEVKKGLDFFRESQPATR

SEQ ID NO: 74720 - protein, 377 aa, Bacillus canaveralius
  misc_feature (1)..(377): tr|A0A2N5GFY0|A0A2N5GFY0_9BACI Epoxyqueuosine reductase OS=Bacillus canaveralius OX=1403243 GN=queG PE=3 SV=1
MNSIELKQDIIAYSKTIGIDKIGFTSTNTFSEMKSRLLRQQELNYQSGFEEPDIEKRTDPSLLLDKSQSIIAIALAYPSKMKEQVLSKKGERRGIFCRASWGTDYHMILRDRLKKLEEYILSKVPEAKLKSMVDTGELVDRAVAQRAGIGWSGKNCSIITPEFGSYVYLGEMITNIPFEPDTPMEDQCGSCNKCVEVCPTGALIQGGQLNAQRCIAFLTQTKGFLPDEFRDKLGNRLYGCDTCQTVCPVNKGKDFHFHSEMEPDPEIAKPLLKPLLRIGNREFKEKYSKISGSWRGKKPIQRNALIALAHYKDETAIPDIIEVLKNDARPVIRGTAAWSLGKIGGNEAREALQHAVQTEKDEEVIKEIEKGLTFYVH

SEQ ID NO: 74721 - protein, 378 aa, Bacillus caseinilyticus
  misc_feature (1)..(378): tr|A0A1H3R1C1|A0A1H3R1C1_9BACI Epoxyqueuosine reductase OS=Bacillus caseinilyticus OX=1503961 GN=SAMN05421736_ 107152 PE=4 SV=1
MANAQLKKEIVAYSKHIGIDKIGFASVDPFLTLKNRLVQQQKLNYQSGFEKGTMEERTNPKIHLQEAKTIIAIALAYPSKMKNARRSVKGERRGLFCRASWGEDYHKILRKKLERLEQFVLANYPEEKCLSMVDTGELSDRAVAERAGIGWSGKNCAIITPEFGSYVYLGEMITTLAIEPDVPLEDQCGSCNKCVEACPTGALVQGGQLDAKKCIAFLTQTKDMLPEQYRKKIGNRLYGCDTCQVVCPKNKGKDFHHHPEMEPDPEIVKPKLLPLLAISNREFKEQFGAIAGSWRGKKPIQRNAIIALAHFKETAALPALHELLWKDPRPVIRGTAAWAIGEIAGAGSREQLEAAKKREKDTIVLKEIEKALESVKNG

SEQ ID NO: 74722 - protein, 379 aa, Bacillus cavernae
  misc_feature (1)..(379): tr|A0A433HED8|A0A433HED8_9BACI Epoxyqueuosine reductase OS=Bacillus cavernae OX=1674310 GN=queG PE=3 SV=1
MDYQKLKEEIIIYSKEIGIDKIGFTTADTFSEMKNRLIRQAELGFQSGFEEPDINKRVHPEQIFPEPRSIISIAIAYPSKMKDAPQSKRGERRGIFARASWGTDYHVILRDRLKQLEEFINSKVPEVVTKSMVDTGELADRAVAERAGIGWSGKNCSIITPEFGSYVYLGEMITSLPFEPDTPMEDRCGACNKCIDVCPTGALVAGGQLNAQRCIAFLTQTKGFLPDEFRTKIGNRLYGCDTCQTVCPENKRKDFHFHPETEPDPEIAKPLLKPLLSIGNREFKEKFGHVSGSWRGKKPIQRNAILALAHYKDETALPDLIKVMKEDTRPVIRGTAAWAIGKIGGQEAAAELHLALEAENDQEVINEIRKGLQLQEASQ

SEQ ID NO: 74723 - protein, 379 aa, Bacillus cellulosilyticus
  misc_feature (1)..(379): tr|E6TTI3|E6TTI3_BACCJ Iron-sulfur cluster binding prot ein OS=Bacillus cellulosilyticus (strain ATCC 21833 / D SM 2522 / FERM P-1141 / JCM 9156 / N-4) OX=649639 GN=Bc ell_1354 PE=4 SV=1
MANAQLKKEIIAYSKDIGIDKIGFATADPFITLKGRLLEQQTHGFESGFEKGTIEERTEPERLLPEAKTIISIALAYPSKMKHAPRSKMGERRGLFCRASWGEDYHNILREKLSLLESFIMEKVPSAICLSMVDTGELSDRAVAERAGIGWSGKNCAIITPEFGSYVYLGEMITTLNLPVDNPIEDQCGSCNKCVDACPTGALVQGGQLDSNKCIAFLTQTKDLLPEQYRKKIGNRLYGCDTCQVVCPENKGKDFHHHPEMEPDPEVVKPLLIPLLSISNREFKEKFGKISGSWRGKKPIQRNAIIALAHFKEKAAIPYLYELVKKDPRPVIRGTAAWAISEIGDKELVGQLGEALEKEQDPKAYDEMKKALNKLETVT

SEQ ID NO: 74724 - protein, 380 aa, Bacillus cereus
  misc_feature (1)..(380): tr|A0A2B9E1M8|A0A2B9E1M8_BACCE Epoxyqueuosine reductase OS=Bacillus cereus OX=1396 GN=queG PE=3 SV=1
MDFEQLKQDVIAYSKTIGIDKIGFASASPFEELKQRLIQQQQLNYQSGFEEPDIEKRTNPQLLLPGAKSIIAIALAYPSKLKNAPLSKRGERRGIFCRASWGQDYHLVLRDRLQKLEAYLIEKLPDIEVKSMVDTGELSDRAVSERAGIGWSGKNCAIITPEFGSYVYLGEMITNVPFPPDKPIEDQCGGCTKCIDICPTGALIQGGQLDSKKCIAFLTQTKGFLPEEYRDKIGNRIYGCDTCQTVCPKNKGMDFHNHPEMEPDPELVKPLLTPLLTISNRDFKEKYGIMSGSWRGKKPLQRNAILALAHFKEASAIPDLIGVMKDDPRPVLRGTAAWALGKIGGDGVGEAIEKAMEREKDEEVLHEMKRGLELLAQKKE

SEQ ID NO: 74725 - protein, 380 aa, Bacillus cereus
  misc_feature (1)..(380): tr|R8PM70|R8PM70_BACCE Epoxyqueuosine reductase OS=Baci llus cereus VDM053 OX=1053249 GN=queG PE=3 SV=1
MDFEQLKQEVIAYSKTIGIDKIGFASASPFEELKQRLIQQQQLNYQSGFEEPDIEKRTNPQLLLPGAKSIIAIALAYPSKLKNAPLSKRGERRGIFCRASWGQDYHLVLRDRLQKLEAYLIEKLPDIEVKSMVDTGELSDRAVSERAGIGWSGKNCAIITPEFGSYVYLGEMITNVPFPPDQPIEDQCGSCTKCIDICPTGALVQGGQLDSKKCIAFLTQTKGFLPEEYRDKIGNRIYGCDTCQTVCPKNKGMDFHNHPEMEPDPELVKPLLTPLLTISNRDFKEKYGIMSGSWRGKKPLQRNAILALAHFKETAAIPDLIGVMKDDPRPVLRGTAAWALGKIGGDGIGEAIEKAMEREKDEEVLHEMNRGLELLAQKKE

SEQ ID NO: 74726 - protein, 377 aa, Bacillus circulans
  misc_feature (1)..(377): tr|A0A553SG27|A0A553SG27_BACCI tRNA epoxyqueuosine(34) reductase QueG OS=Bacillus circulans OX=1397 GN=queG PE =4 SV=1
MDYDQLKQDIIDYSKTIGIDKIGFTTASTFEEMRIRLIKQQELNYQSGFEEKDIEKRVNPSLLLDQPKSIISIALAYPSKMKERVTSKKGARRGIFCRASWGTDYHVVLRDRLSKLEKYIMERVPDALCKSMVDTGELVDRAVAQRAGVGWSAKNCAIITPEFGSYVYLGEMITNLPLTPDTPMEDQCGECNKCIDACPTGALIQGGQLDAQRCIAFQTQTKGFLAEEFREKLGNRIYGCDTCQTICPKNKGMDFHNHIEMEPDPEIAKPLLVPLLTISNKEFKEKYGHISGSWRGKKPIQRNAIIALAHFKEESAVPDIIGVMKNDPRPVIRGTAAWALGKIGGTESKQALEAISNSETDQEVLQEMQDALARLSS

SEQ ID NO: 74727 - protein, 377 aa, Bacillus circulans
  misc_feature (1)..(377): tr|A0A561H923|A0A561H923_BACCI Epoxyqueuosine reductase OS=Bacillus circulans OX=1397 GN=FHW50_11232 PE=4 SV=1
MDYREFKKDIIAYSKTIGIDKIGFTSASTFEEMKVRLITQQELNYQSGFEEKDIEKRVNPSLLLHQPKSIISIALAYPSKMKERVVSKKGERRGIFCRASWGTDYHVVLKDRLQKLEDYIKERIPDALCKSMVDTGELVDRAVAQRAGIGWSGKNCAIITPEFGSYVYLGEMITNLPIEPDTPMEDQCGTCNKCIDVCPTGALVQGGQLNAQRCIAFQTQTKGFLAEEFREKLGNRIYGCDTCQTVCPKNKGMDFHNHPEMEPDPEIAKPLLQPLLFISNKEFKEKYGHISGSWRGKKPIQRNAIIALAHFKEEGAISDLITVMKKDPRPVIRGTAAWALGKIGGDESKTALELARQQEADHEVLKEMDDALQRLAK

SEQ ID NO: 74728 - protein, 383 aa, Bacillus clausii
  misc_feature (1)..(383): tr|A0A268NXM1|A0A268NXM1_BACCS tRNA epoxyqueuosine(34) reductase QueG OS=Bacillus clausii OX=79880 GN=queG PE= 4 SV=1
MDYAQLKADLLAYSAEIGVDKLRIASADPFLSLKDRLIEHQEKGYASGFEHPVLEERVDPRLSLPSARTIISIAVAYPTKMKKAPKSIPGARRGVFSRSSWGQDYHTVLNDRLKKLEAFLRARVGETEMVRMVDTGALSDRAVAERAGIGWSAKNTFTITPEFGSFVFLGNLLTSLPFPLDEPLEDLCGSCTKCIDACPTGALVGPGELNAQACLSYQTQTKGFMPDEYREKIGNYLYGWDTCQLVCPYNKGIDSHHHQEMEPDPELCKPLLEPLLSISNRKFKEQFGHMAGSWRGKKPIQRNAIIALAHYKEKSALPKLCELLASDPRPVIRGTAAWAIGKIGGSEKEEKALLKAKETETDQLVQIEIEKGLDLLKKQNGSQ

SEQ ID NO: 74729 - protein, 383 aa, Bacillus clausii
  misc_feature (1)..(383): tr|Q5WI04|Q5WI04_BACSK 4Fe-4S ferredoxin-type domain-co ntaining protein OS=Bacillus clausii (strain KSM-K16) O X=66692 GN=ABC1466 PE=4 SV=1
MDYAQLKADLLAYSAEIGVDKLRIASAEPFLSLKDRLIEHQEKGYASGFEHPVLEERVDPRLSLPSARTIISIAVAYPTKMKKAPKSIPGARRGVFSRSSWGQDYHTVLNDRLKKLEAFLRERVGETEMVRMVDTGALSDRAVAERAGIGWSAKNTFTITPEFGSFVFLGNLLTSLPFPLDEPLEDLCGSCTKCIDACPTGALVGPGELNAQACLSYQTQTKGFMPDEYREKIGNYLYGWDTCQLVCPYNKGIDSHHHQEMEPDPELCKPLLEPLLSISNRKFKEQFGHMAGSWRGKKPIQRNAIIALAHYKEKSALPKLCELLASDPRPVIRGTAAWAIGKIGGSEKEEKALLKAKETETDQLVQIEIEKGLDLLKKQNGSQ

SEQ ID NO: 74730 - protein, 376 aa, Bacillus coagulans
  misc_feature (1)..(376): tr|A0A412GRA5|A0A412GRA5_BACCO Epoxyqueuosine reductase OS=Bacillus coagulans OX=1398 GN=queG PE=3 SV=1
MDTAELKKEIIAFSKKIGIDKIGFASPDPFTELKQRLIRQQELGYQSGFEEKDIEKRVNPSLIFDSPQSIIAVALAYPSKIKDPPKGKKGARRGIFCRASWGEDYHTILRDKLSKLEDFLKEKVEGARCKSMVDTGELSDRAVAERAGIGWSGKNCSIITPEFGSYVYLGEMITNIPFEPDTPVEDQCGDCRKCLDVCPTGALVSAGQLNAKRCISFLTQTKDYLPDEFKGKIGNRVYGCDSCQTICPKNKGMDFHFHEEMEPEPETAKPLLEPILRLSNRAFKERFGHMAGSWRGKKPIQRNAMIALAHFKEESAVPELIRILQEDPRPVIRGTAGWALGKIGGEEAKAALLSAREQEEDPDARNEIEKGLAFFE

SEQ ID NO: 74731 - protein, 376 aa, Bacillus coagulans; identical to SEQ ID NO: 74730
  misc_feature (1)..(376): tr|A0A0B5WTW2|A0A0B5WTW2_BACCO Epoxyqueuosine reductase OS=Bacillus coagulans DSM 1 = ATCC 7050 OX=1121088 GN= queG PE=3 SV=1

SEQ ID NO: 74732 - protein, 382 aa, Bacillus coahuilensis
  misc_feature (1)..(382): tr|A0A147KBE2|A0A147KBE2_9BACI Iron-sulfur cluster-bind ing protein OS=Bacillus coahuilensis p1.1.43 OX=1150625 GN=Q75_02740 PE=4 SV=1
MNYSEFKKDIIAYSKTIGIDKIGFTTPNPFTEMKNLLIRQEELDYQSGFEEKDIEKRVNPSLLFNQPRSIISIALAYPSKMKEAPRSKEGERRGIFCRASWGTDYHVVLRDRLQKLETYILSRVPDARMKSMVDTGELVDRAVAERAGVGWSGKNCSIITPEFGSYVYLGEMITNLPFAPDEPMQEGCGTCNKCVDVCPTGALIQGGQLDAKRCIAFLTQTKGFLPDEFRGKIGNRLYGCDTCQTVCPKNKGIDVHHHIEMEPDPEIAKPLLLPLLTMSNREFNETYGHVSGSWRGKKPIQRNAILALAHFKERAAVEVLIHLLKTDPRPVIRGTAAWALGKIGGKEAYEALKLYREKEQDQEVVGEIEKGLRFFDPELAER

SEQ ID NO: 74733 - protein, 379 aa, Bacillus cohnii
  misc_feature (1)..(379): tr|A0A223KLD1|A0A223KLD1_9BACI Epoxyqueuosine reductase OS=Bacillus cohnii OX=33932 GN=queG PE=3 SV=1
MNFTKLKEEIIQYSKQIGIDKIGFTSASPFVELKERLRVQQENGYQSGFEESDIEKRTNPQLLLPQAKSIIAIAIAYPSKMKDAPRSTRKDPRGIFCRASWGTDYHLVLRDRLSKLEEFIKQKVPEATLKSMVDTGELADRAVAERAGIGWSGKNCAIITPEFGSYVYLGEMITNIPFDPDQSIEDRCGSCNKCVDACPTGALIQGGQLDSNKCIAFLTQTKGFLKEEYRTKLGNRLYGCDTCQTVCPENKGKDFHLHAELEPDPELVKPRLKPLLTMSNREFKEKYGHMSGSWRGKKPIQRNAIIALAHYRDKTAVPVLLELIENDPRPVIRGTAAWALGKIGEQSSLPRLMHLMEKEQDSDAREEMEKGIALLKSES

SEQ ID NO: 74734 - protein, 377 aa, Bacillus cucumis
  misc_feature (1)..(377): tr|A0A2N5H981|A0A2N5H981_9BACI Epoxyqueuosine reductase OS=Bacillus cucumis OX=1740721 GN=queG PE=3 SV=1
MDIQKFKKELIAYSTEIGIDKIGFTTAAPFTKLKSRLIKQQELGYQSGFEEPDIDKRVTPAMLLEGAQSIISIALAYPAKMNDRVESKKGDRRGIFSRASWGLDYHHILRERLNKLEKFIFSKLPEAKLKSMVDTGELSDRAVAERAGIGWSGKNCSIITSEFGSYVYLGEIITNIPFEPDLPIEDQCGSCTKCIDACPTGALIQGGQINANRCISFLTQTKELIPDEFRDKIGNRVYGCDSCQTACPVNKGVNFHLHEEMEADPEVAKPLLKPILKLSNREFKKRFGSVSGAWRGKKPIQRNAIIALAHFKDESAVPDLIDILKNEPSSVTRGTAAWALGKIGGEAALRALKKAKELEKDIDVQKEIEKGLNFYNN

SEQ ID NO: 74735 - protein, 380 aa, Bacillus cytotoxicus
  misc_feature (1)..(380): tr|A0A2S1A8E4|A0A2S1A8E4_9BACI Epoxyqueuosine reductase OS=Bacillus cytotoxicus OX=580165 GN=queG PE=3 SV=1
MDFEKLKQDVIAYSKTIGIDKIGFASASPFEELKQRLIQQQQLNYQSGFEEPDIEKRTNPQLLLPGAKSIIAIALAYPSKLKNAPLSKRGERRGIFCRASWGQDYHLVLRDRLKKLETYLIEKLPGIEVKSMVDTGELSDRAVSERAGIGWSGKNCSIITPEFGSYVYLGEMITNVPFPPDQPIEDQCGSCTKCIDICPTGALVQGGQLNAKKCIAFLTQTKGFLPEEYRDKIGNRIYGCDTCQTVCPKNKGKDFHNHPEMEPDPELVKPLLIPLLTISNREFKEKYGIMSGSWRGKKPLQRNAILALAHFKETAAVPHLIDVMKDDPRPVIRGTAAWALGKIGGDGVGVAIERAMEREKDEEVLHEMKRGLELLAQKKE

SEQ ID NO: 74736 - protein, 380 aa, Bacillus cytotoxicus; identical to SEQ ID NO: 74735
  misc_feature (1)..(380): tr|A7GL15|A7GL15_BACCN Epoxyqueuosine reductase OS=Baci llus cytotoxicus (strain DSM 22905 / CIP 110041 / 391-9 8 / NVH 391-98) OX=315749 GN=queG PE=3 SV=1

SEQ ID NO: 74737 - protein, 383 aa, Bacillus daliensis
  misc_feature (1)..(383): tr|A0A1H0I6F8|A0A1H0I6F8_9BACI Epoxyqueuosine reductase OS=Bacillus daliensis OX=745820 GN=queG PE=3 SV=1
MNADIKNKIIKYSKEIGIDKIGFASADPFVTMKERLRVQQENGFQSGFEKGTLEERTKPDLLLPQAKTVISIALAYPSKMKNAPRSVKGDRRGIFCRASWGEDYHHVLRRKLNLLEEFITNMYPEERCRSMVDTGELSDRAAAERAGIGWSGKNCAVITPEFGSYVYLGEMITTLSMEEDTPIEDQCGTCNKCVDACPTGALVQGGQLDATKCIAFLTQTKTMLPERYRKKLGNRLYGCDTCQTVCPENKGIDEHRHPEMEPDPEIVKPSLEPLLTISNKEFKNKYGKISGSWRGKKPIQRNALIALAVFKEETSLPSIIKVMNEDPRPVMRGTAVWALKEIAPTAETKHLLQSFKTKEEAPEVLEEVEKALADLSSQGGMYV

SEQ ID NO: 74738 - protein, 379 aa, Bacillus deserti
  misc_feature (1)..(379): tr|A0A2N5M4D5|A0A2N5M4D5_9BACI Epoxyqueuosine reductase OS=Bacillus deserti OX=673318 GN=queG PE=3 SV=1
MDYNQLKSDIIAYSKTIGIDKIGFTTSSTFDEMKNKLIRQQELGFQSGFEEPDINKRTDPGLILEKPRSIISIALAYPSKLKNAPLSKRGERRGIFCRASWGEDYHTVLRDRLQKLEEYIYRRVPNARCRSMVDTGELVDRAVAQRAGIGWSGKNCSIITPEFGSYVYLGEMITNLPLESDAPMEDRCGSCNKCIDVCPTGALVQGGQLNAQRCIAFLTQTKGFLPDEFRNKLGNRIYGCDTCQTVCPENKGKNFHFHPEMEADPEIAKPLLTPMLRMSNKEFKEKFGKISGAWRGKKPLQRNAIIALAHYKEESAIPELIEVLEKDPRPVIRGTAAWALGKIGGPGSRQALDKAKNTDQDAEVLEEIEKGMQLLSADQ

SEQ ID NO: 74739 - protein, 380 aa, Bacillus enclensis
  misc_feature (1)..(380): tr|A0A0V8HHK1|A0A0V8HHK1_9BACI Epoxyqueuosine reductase OS=Bacillus enclensis OX=1402860 GN=queG PE=3 SV=1
MDFDQLKQDIIEYSKEIGIDKIGFTTANTFSEMKNRLIRQEMLGYQSGFEEKDIEKRVDPSLIFDGPKSIIAIALAYPSRMKDAPQSKRGERRGIFCRASWGADYHHVLRDRLAKLEDYIVSRIPEARFKSMVDTGELVDRAVAERAGIGWSGKNCSIITPEFGSYVYLGEMVTNLPFEPDEPMEDQCGTCNKCVDVCPTGALIEGGQLDAQKCIAFLTQTKGFLADEYRVKLGNRLYGCDTCQTVCPENKGKDFHFHQEMEPDPEIAKPLLKPLLTISNREFKEKYGHVSGSWRGKKPIQRNAIIALAHYKDETAVEDLINVMKNDVRPVMRGTAAWALGKIGGAEAEKALLAKQSVETDDEVLAEIEKGMRMLAPDAG

SEQ ID NO: 74740 - protein, 377 aa, Bacillus endophyticus
  misc_feature (1)..(377): tr|A0A329F324|A0A329F324_9BACI Epoxyqueuosine reductase OS=Bacillus endophyticus OX=135735 GN=queG PE=3 SV=1
MDINQLKEEVIAYSKEIGIDKIGFASASTFQTLKNRLERHRELGYESGFEEKDLEKRTNPDLLLEEAKSIIAIAVAYPSKMKDAPRGTKEDRRGIFCRASWGHDYHNVLRDRLNKLEAFIKEKVPSARLKSMVDTGELSDRAVAERAGIGWSGRNCAIITPEFGSYVYLGEMVTTLPFEPDQPVEDGCGTCNKCIDVCPTGALVQGGQLNSHRCIAFLTQTKGFLPDEFRTKIGNRLYGCDTCQTVCPENKGKDFHLHAELEPDPEIAKPKLKPLLQMSNREFKEKYGHVSGSWRGKKPIQRNAIIALAHFKDETAVPELIKLLKGDVRPVIRGTAAWALGKIGTNEAVRELETALLKEKEEEVIEEIKKGLRLVNS

SEQ ID NO: 74741 - protein, 377 aa, Bacillus endophyticus
  misc_feature (1)..(377): tr|A0A3N6C0D7|A0A3N6C0D7_9BACI Epoxyqueuosine reductase OS=Bacillus endophyticus OX=135735 GN=queG PE=3 SV=1
MDINQLKEEVIAYSKEIGIDKIGFASASTFQTLKNRLERHRELGYESGFEEKDLEKRTNPDLLLEEAKSIIAIAVAYPSKMKDAPRGTKEDRRGIFCRASWGHDYHNVLRDRLNKLEAFITEKVPSARLKSMVDTGELSDRAVAERAGIGWSGKNCAIITPEFGSYVYLGEMITTLPFEPDQPVEDGCGTCNKCIDVCPTGALVQGGQLNSNRCIAFLTQTKGFLPDEFRTKIGNRLYGCDTCQTVCPENKRKDFHLHAELEPDPEIAKPKLKPLLQMSNREFKEKYGHVSGSWRGKKPIQRNAIIALAHFKDETAVPELIKLLKADVRPVIRGTAAWALGKIGTDEAVSELETALLKEKEEEVIEEIKKGLRLVNS

SEQ ID NO: 74742 - protein, 373 aa, Bacillus endozanthoxylicus
  misc_feature (1)..(373): tr|A0A5J5I5U9|A0A5J5I5U9_9BACI tRNA epoxyqueuosine(34) reductase QueG OS=Bacillus endozanthoxylicus OX=2036016 GN=queG PE=4 SV=1
MNYSQLKQEVIEYSKTIGIDKIGFTTASPFNDLRNRLIRQRELNFQSGFEEKDIEKRTNPSLLMSGAQSIISIAVAYPSKMKNRTISKEGERRGIFSRASWGLDYHIVLRRRLEKLEEFIRDKVPEVRLKSMVDTGELADRAVAERAGIGWSGKNCAIITPEFGSYVYLGEMITSLPFEPDTPLEDQCGTCNKCIEACPTGALVAGGQINAQRCISFLTQTKEAIPEEFRNKIGNRLYGCDSCQTACPVNKGKDFHLHAEVEADPDIAKPLLQPLLSLSNRQFKEKFGHVSGAWRGKNPIQRNAVIALAHFKDQTALDDLIDILKHDPRPVMRETAAWAIGKIDGKNSRAALEEALEKETDEAVIFEINKVLS

SEQ ID NO: 74743 - protein, 377 aa, Bacillus filamentosus
  misc_feature (1)..(377): tr|A0A1X7FGH7|A0A1X7FGH7_9BACI Epoxyqueuosine reductase OS=Bacillus filamentosus OX=1402861 GN=queG PE=3 SV=1
MDINQLKEEIIAYSKEIGIDKIGFASASAFQTLKNRLERHRELGYESGFEEPDLEKRTNPELLLEEAKSIIAIAVAYPSKMKDAPRGTKEDRRGIFCRASWGHDYHNVLRDRLNKLEAFITEKVPGARLKSMVDTGELSDRAVAERAGIGWSGKNCAIITPEFGSYVYLGEMITTLPLEPDQPVEDGCGTCNKCIDVCPTGALVQGGQLNSNRCIAFLTQTKGFLPDEFRTKIGNRLYGCDTCQTVCPENKGKDFHLHAELEPDPEIAKPKLKPLLQMSNREFKEKYGHVSGSWRGKKPIQRNAIIALAHFKDETAVPELIKLLKADVRPVIRGTAAWALGKIGTNEAVSELEMALLKEKEEEVIEEIKKGLRLVNS

SEQ ID NO: 74744 - protein, 377 aa, Bacillus firmus
  misc_feature (1)..(377): tr|A0A380XFZ7|A0A380XFZ7_BACFI Putative iron-sulfur clu ster-binding protein OS=Bacillus firmus OX=1399 GN=queG PE=4 SV=1
MDFAQFKQEVIEYSRTIGIDKIGFTTAGTFDEMKNRLIRQQELQYHSGFEEPDIEKRVNPGLLMDKPRSIISIAVAYPSKMKVRVVSKRGERRGIFCRASWGKDYHHILRERLQKLEEFIKSRIPEAVCKSMVDTGELVDRAVAQRAGIGWSGKNCSIITPEFGSYVYLGEMITNLPFEPDKPMEDRCGSCNKCVDVCPTGALIQGGQLDAQKCIAFLTQTKGFLAEQYREKLGNRLYGCDTCQTVCPENKGKDFHLHDEMEPDPEVAKPLLRPLLFISNREFKEKYGPVSGSWRGKKPIQRNAIIALAHYKDETAAEDLIKVMREDPRPVIRGTAAWALGKIGGEKSLPALKQALHQEKDGEVIAEIEKGLSFFEQ

SEQ ID NO: 74745 - protein, 377 aa, Bacillus firmus
  misc_feature (1)..(377): tr|W7LAY8|W7LAY8_BACFI Iron-sulfur cluster binding prot ein OS=Bacillus firmus DS1 OX=1307436 GN=PBF_02465 PE=4 SV=1
MDFAQFKQEVIEYSRTIGIDKIGFTTAGTFDEMKNRLIRQQELQYHSGFEEPDIEKRVNPGLLMDKPRSIISIAVAYPSKMKVRVVSKRGERRGIFCRASWGKDYHHILRERLQKLEEFIQSRIPEAICKSMVDTGELVDRAVAQRAGIGWSGKNCSIITPEFGSYVYLGEMITNLPFEPDKPMEDRCGSCNKCVDVCPTGALIQGGQLDAQKCIAFLTQTKGFLAEPYREKLGNRLYGCDTCQTVCPENKGKDFHLHEEMEPDPEVAKPLLRPLLFISNREFKEKYGPVSGSWRGKKPIQRNAIIALAHYKDETAAEDLIKVMSEDPRPVIRGTAAWALGKIGGEKSLTALKQALQQEKDGEVIAEIEKGLSYFEQ

SEQ ID NO: 74746 - protein, 378 aa, Bacillus flexus
  misc_feature (1)..(378): tr|A0A4P8XBT0|A0A4P8XBT0_9BACI Epoxyqueuosine reductase OS=Bacillus flexus OX=86664 GN=queG PE=3 SV=1
MDFQQLKKEVIAYSKEIGIDKIGFASASTFETLKDRLLRQQELGYASGFEEPDIEKRTNPTLLVPKAKSIIAIALAYPSKMPNAPRSTKEDRRGIFCRASWGQDYHTILRDRLQKLESFLKEKVQGVEVKSMVDTGELSDRAVAERAGIGWSGKNCAIITPEFGSYVYLGEIVTNIPFEPDQPIEDQCGTCNKCVEVCPTGALVTGGQLNSQRCIAFLTQTKGFLVDEFRDKIGNRLYGCDTCQTVCPENKGKDFHFHPEMEPDPEIAKPKLKPLLTMSNREFKEKYGHVSGSWRGKKPIQRNAIIALAHFKDETAIPDLIKVMKEDVRPVIRGTAAWALGKIGNDEVLPILEQLKEKEQDEEAKQEFEKGIALLVKS

SEQ ID NO: 74747 - protein, 376 aa, Bacillus foraminis
  misc_feature (1)..(376): tr|A0A4R2BLL2|A0A4R2BLL2_9BACI Epoxyqueuosine reductase OS=Bacillus foraminis OX=279826 GN=EV146_101479 PE=4 S V=1
MNIHQLQQDIIEYSKTIGIDKIGFASPSPFMELKNRLLRQQELGYQSGFEEPDIEKRVRPDLLFDQPQSIIAIAVAYPSKMKIRVVSKKGERRGIFCRASWGKDYHHVLRERLKKLEDYIASRVPEAKFKSMVDTGELVDRAVAERAGIGWSGKNCSIITPEFGSYVYLGEMITNIPFVPDSPMEDQCGTCNKCIEACPTGALVQGGQLNSQKCIAFLTQTKGFLPDEFRDKIGNRIYGCDSCQTACPVNKGRDYHFHDEMEPDPETAKPLLKPILKISNREFKEKFGPVSGSWRGKKPIQRNAIIALAHYKDETAVPELIQVMKEDPRPVLRGTAAWSLGKIGGAKAKEALEQAAESEKDEEVLAEVAKGLSFFH

SEQ ID NO: 74748 - protein, 379 aa, Bacillus fortis
  misc_feature (1)..(379): tr|A0A443J2D8|A0A443J2D8_9BACI Epoxyqueuosine reductase OS=Bacillus fortis OX=254758 GN=queG PE=3 SV=1
MDYGKLKDEIIAYSREIGIDKIGFTSADPFIEMKNLLIRQEELGYQSGFEHKNIEERTHPELIFDEPRSIIAIALAYPSKMNNAPRGKPGARRGIFCKASWGVDYHVLVREKLEQLAAFIDSKVCDARFKLMVDTGELVDRAVAERAGIGWSGKNCSIITPEFGSYVYLGEMITNLPFAPDEPMHDQCGECTKCLDACPTGALVQPGQLDAQSCIAFLTQTKGLLPDEFRDKIGNRLYGCDTCQAVCPKNKGVDFHLHPGMEPDPDIAKPLLQPLLDISNREFKEKYGAVSGSWRGKKPIQRNAIIALGHFKDQSAVSDLIKVLNEDVRPEIRGTAAWSLGKIGGEQAKEALMRAQEMEEDPVVLEEIEKGLQFFELEM

SEQ ID NO: 74749 - protein, 382 aa, Bacillus freudenreichii
  misc_feature (1)..(382): tr|A0A3S4TW55|A0A3S4TW55_9BACI Epoxyqueuosine reductase OS=Bacillus freudenreichii OX=1783501 GN=queG PE=3 SV= 1
MDYGKLKNEIIEYSKKIGIDKIGFTSADPFVEMKNLLIRQEELGYQSGFEHKNIEERTHPELIFDEPRSIIAIALAYPSKMKDAPRGEHGARRGIFCKASWGVDYHVLVREKLEQLASFIDDKVQDARFKLMVDTGELVDRAVAERAGIGWSGKNCSIITPEFGSYVYLGEMITNLPFAPDEPMEDQCGECTKCLDACPTGALIQPGQLDAQSCIAFLTQTKGLLPDEFRDKIGNRLYGCDTCQVVCPKNKGIDSDWHEQMKPDPEIAKPLLQPLLEISNREFKEKFGEVSGSWRGKKPIQRNAILALAHFKEQPAVGDLIKVLNEDVRPEIRGTAAWSLGKIGGIQAEKALIHAKSKEEHPEVLEEINKGLRFFESHENIK

SEQ ID NO: 74750 - protein, 380 aa, Bacillus gaemokensis
  misc_feature (1)..(380): tr|A0A073KLZ8|A0A073KLZ8_9BACI Epoxyqueuosine reductase OS=Bacillus gaemokensis OX=574375 GN=queG PE=3 SV=1
MDFEQLKQDVIAYSKTIGIDKIGFASASPFEELKQRLIQQQQLNYQSGFEEPDIEKRTNPQLLLPGAKSIIAIALAYPSKLKNAPLSKRGERRGIFCRASWGQDYHLVLRDRLQKLEAYLIEKLPDIEVKSMVDTGELSDRAVSERAGIGWSGKNCAIITPEFGSYVYLGEMITNVPFPPDQPIEDQCGSCTKCIDICPTGALVQGGQLDSKKCIAFLTQTKGFLPEEYRDKIGNRIYGCDTCQTVCPKNRGKDFHNHPEMEPDPELVKPLLLPLLTISNRDFKEKYGIMSGAWRGKKPLQRNAILALAHFKETAAIPDLISVMKDDPRPVIRGTAAWALGKIAGEGVGEAIEKAMEREKDEEVLHEMNRGLELLAQKKQ

SEQ ID NO: 74751 - protein, 381 aa, Bacillus ginsengihumi
  misc_feature (1)..(381): tr|A0A0A6VDE3|A0A0A6VDE3_9BACI Iron-sulfur cluster-bind ing protein OS=Bacillus ginsengihumi OX=363870 GN=NG54_ 14705 PE=4 SV=1
MDITKLKKEVIAFSQLIGIDKIGFTTADPFTEMKQRLIRQQQLNYQSGFEEKDIEKRVNPSLIFDGPQSIIAIALAYPAKIENPPKGVKGDRRGVFCKASWGQDYHHILKEKLQQLETFIKEKVEGAQCKSMVDTGELVDRAVAERAGIGWSGKNCSIITPEFGSYVYLGEMITNIPFDPDVPMEDQCGECRKCLDVCPTGALVQPGQLNAKRCIAFITQTKGFVDDEFKEKIGNRLYGCDSCQTICPKNKGIDFHFHEEMEPDPEIAKPKLTPLLKISNREFKEVFGHVSGSWRGKKPIQRNAIIALAHFKEKSAVPDLIKVLREDSRPVMRGTAAWALGKIGGEEAKVALEVAELREEDSEALQEIRKGLAFFKENTAD

SEQ ID NO: 74752 - protein, 382 aa, Bacillus glycinifermentans
  misc_feature (1)..(382): tr|A0A1C3SAA2|A0A1C3SAA2_9BACI Epoxyqueuosine reductase OS=Bacillus glycinifermentans OX=1664069 GN=yhbA PE=3 SV=1
MNVKQLKEDVIEFAQQIGIDKIRFASADTFETLKERLIENRKLGYESGFEEPDLEKRTNPQLLLPKAKSIIAIALAYPSKMKNAPRSVKGDRRGIFCRASWGKDYHHVLREKLDQLEEFLQSQHEDVRTKSMVDTGELSDRAVAERAGIGWSGKNCMIITPEFGSYVYLAEMITNIPFEPDERIEDQCGSCNKCIEACPTGALVNPGQLNSQRCISFQTQTKGFLPDEFRTKIGNRIYGCDTCQMVCPKNKGVDFHLHPEMEPDPEIAKPLLKPLLTISNREFKEKFGHIAGSWRGKKPIQRNAIIALAHFKETGALPELVSLMHQDPRPVIRGTAAWAIGKIGEADMLEELEKALSREEDDEAKAEIQKGIRLLTETAMTK

SEQ ID NO: 74753 - protein, 382 aa, Bacillus glycinifermentans
  misc_feature (1)..(382): tr|A0A0T6BLU5|A0A0T6BLU5_9BACI Epoxyqueuosine reductase OS=Bacillus glycinifermentans OX=1664069 GN=queG PE=3 SV=1
MNVKQLKADVIEFAQQIGIDKIRFASADTFETLKERLIENRKLGYESGFEEPDLEKRTNPKLLLPKAKSIIAIALAYPSKMKNAPRSVKGERRGIFCRASWGKDYHHVLREKLDQLEEFLQSQHEDVRTKSMVDTGELSDRAVAERAGIGWSGKNCMIITPEFGSYVYLAEMITNIPFEPDERIEDQCGSCNKCIEACPTGALVNPGQLNSQRCISFQTQTKGFLPDEFRTKIGNRIYGCDTCQMVCPKNKGVDFHLHPEMEPDPEIAKPLLKPLLTISNREFKEKFGHIAGSWRGKKPIQRNAIIALAHFKETGALPELISLMHQDPRPVIRGTAAWAIGKIGEADMLEELEKALSREEDDEAKAEIQKGIQLLTETAMTK

SEQ ID NO: 74754 - protein, 383 aa, Bacillus gobiensis
  misc_feature (1)..(383): tr|A0A0M4FEC1|A0A0M4FEC1_9BACI Epoxyqueuosine reductase OS=Bacillus gobiensis OX=1441095 GN=queG PE=3 SV=1
MDVTKLKQEVIEYAHQIGIDKIGFASADTFESLKQRLITQQALQYESGFEERDIEKRTNPDLLLPKARSIIAIALAYPSKMKNAPRGTRTDRRGIFCRASWGKDYHHVLREKLSKLEEYLREKREDIRTKSMVDTGELSDRAVAERAGIGWSGKNCAIITPEFGSYVYLGEMITNIPFEPDTPIEDKCGTCNKCVDVCPTGALIQGGQLNAKRCIAFLTQTKGFLPEEFRSKIGNRLYGCDTCQTICPENKGKDFHLHPEMEPDPEVVKPRLKPLLTISNREFKEKFGDISGSWRGKKPIQRNSIIALAHYKDITALPELASLLKNDPRPVIRGTAAWAIGKIGGEDYTNQLNEAWMAEGDEEAKKEIEKGLKMAMNTKSSQS

SEQ ID NO: 74755 - protein, 391 aa, Bacillus halodurans
  misc_feature (1)..(391): tr|A0A4Y7WZR9|A0A4Y7WZR9_BACHO Epoxyqueuosine reductase OS=Bacillus halodurans OX=86665 GN=queG PE=3 SV=1
MTPAQLKDELIAYSKTIGIDKIGFASADPFLTLKERLQTQQALGYQSGFEEPDIDKRVYPEKILPKARSIISIALAYPSKMKNPPKSKKGERRGVFCRASWGKDYHDILRDRLKKLEDFLLERVPDMKVLSMVDTGALSDRAVAERAGIGWSGKNCAVITPEFGSYVYLGDLVTTIPFPPDIPLTDQCGTCNKCVDACPTGALIQGGQLDSQKCIAFLTQTKGFLPEKYRKKLGNRLYGCDTCQQVCPANKGKNFHFHEEMEPDPEIAKPKLIPLLTMSNREFKEKFGHVSGSWRGKKPIQRNAILALAHFKEEAALPILADLLRQDPRPVIRGTAGWALGKIGGPEVETWLKDALKREKDEDVRAEISRGLEILAYGDSGNGKETEDSIR

SEQ ID NO: 74756 - protein, 391 aa, Bacillus halodurans
  misc_feature (1)..(391): tr|Q9KE38|Q9KE38_BACHD Epoxyqueuosine reductase OS=Baci llus halodurans (strain ATCC BAA-125 / DSM 18197 / FERM 7344 / JCM 9153 / C-125) OX=272558 GN=queG PE=3 SV=1
MTPAQLKDELIAYSKTIGIDKIGFASADPFLTLKERLQTQQALGYQSGFEEPDIDKRVYPEKILPKARSIISIALAYPSKMKNPPKSKKGERRGVFCRASWGKDYHDILRDRLKKLEDFLLERVPDMKVLSMVDTGALSDRAVAERAGIGWSGKNCGVITPEFGSYVYLGDLVTTIPFPPDIPLTDQCGTCNKCVDACPTGALIQGGQLDSQKCIAFLTQTKGFLPEKYRKKLGNRLYGCDTCQQVCPANKGKNFHFHEEMEPDPEIAKPKLIPLLTMSNREFKEKFGHVSGSWRGKKPIQRNAILALAHFKEEAALPILADLLRQDPRPVIRGTAGWALGKIGGPEVETWLKDALKREKDEDVRAEISRGLEILAYGDSGNGKETEDSIR

SEQ ID NO: 74757 - protein, 381 aa, Bacillus halotolerans
  misc_feature (1)..(381): tr|A0A2S9WF75|A0A2S9WF75_9BACI tRNA epoxyqueuosine(34) reductase QueG OS=Bacillus halotolerans OX=260554 GN=qu eG PE=4 SV=1
MNVYQLKEELIEYAKSIGVDKIGFTTADTFDSLKDRLILQESLGYLSGFEEPDIEKRVTPTLLLPKAKSIVAIALAYPSRMKDAPRSTRTERRGIFCRASWGKDYHDVLREKLDLLEDFLRSKHEDIRTKSMVDTGELSDRAVAERAGIGFSAKNCMITTPEYGSYVYLAEMITNIPFEPDVPIEDMCGSCTKCLDACPTGALVNPGQLNAQRCISFLTQTKGFLPDEFRTKIGNRLYGCDTCQTVCPINKGKDFHLHPEMEPDPEIAKPLLKPLLTISNREFKEKFGHVSGSWRGKKPIQRNAILALAHFKDTSALPELTELMHKDPRPVIRGTAAWAIGKIGDNTYAEELEKALKNENDEEAKQEIEKGIELLKAGMTK

SEQ ID NO: 74758 - protein, 381 aa, Bacillus halotolerans
  misc_feature (1)..(381): tr|A0A3T0L766|A0A3T0L766_9BACI tRNA epoxyqueuosine(34) reductase QueG OS=Bacillus halotolerans OX=260554 GN=qu eG PE=4 SV=1
MNVYQLKEELIEYAKSIGVDKIGFTTADTFDSLKDRLILQESLGYLSGFEEPDIEKRVTPTLLLPKAKSIVAIALAYPSRMKDAPRSTRTERRGIFCRASWGKDYHDVLREKLDLLEDFLRSKHEDIRTKSMVDTGELSDRAVAERAGIGFSAKNCMITTPEYGSYVYLAEMITNIPFEPDVPIEDMCGSCTKCLDACPTGALVNPGQLNAQRCISFLTQTKGFLPDEFRTKIGNRLYGCDTCQTVCPINKGKDFHLHPEMEPDPEIAKPLLKPLLTISNREFKEKFGHVSGSWRGKKPIQRNAILALAHFKDTSALPELTELMHKDPRPVIRGTAAWAIGKIGDNTYAEELEKALEKENDEEAKQEIEKGIELLKAGMTK

SEQ ID NO: 74759 - protein, 382 aa, Bacillus haynesii
  misc_feature (1)..(382): tr|A0A1R1RWG0|A0A1R1RWG0_9BACI Epoxyqueuosine reductase OS=Bacillus haynesii OX=1925021 GN=queG PE=3 SV=1
MDVKKLKQDVIEFAQQIGIDKIRFASADTFETLKERLIENRTLGYESGFEEPDLEKRTNPDLLLPKAKSIIAIALAYPSKMKDAPRSKKGERRGIFCRASWGKDYHHVLREKLDQLEEFLKAQRSDIRTKSMVDTGELSDRAVAERAGIGWSGKNCMIITPEFGSYVYLAEMITNIPFEPDERIEDQCGSCNKCIEACPTGALVNPGQLNSQRCIAFQTQTKGFLPDEFRTKIGNRIYGCDTCQMVCPKNKGVDFHLHPEMEPDPEIAKPLLKPLLTMSNREFKEKFGHVAGSWRGKKPIQRNAIIALAHFKEADALPELIELMHKDPRPVIRGTAAWAVGKIGGADVMGELERALAHEQDEEAKAEIQKGIGLLKETSATN

SEQ ID NO: 74760 - protein, 382 aa, Bacillus haynesii
  misc_feature (1)..(382): tr|W7RK67|W7RK67_9BACI Epoxyqueuosine reductase OS=Baci llus haynesii OX=1925021 GN=queG PE=3 SV=1
MDVKKLKQDVIEFAQQIGIDKIRFASADTFETLKERLIENRTLGYESGFEEPDFEKRTNPDLLLPKAKSIIAIALAYPSKMKDAPRSKKGERRGIFCRASWGKDYHHVLREKLDQLEEFLKAQRSDIRTKSMVDTGELSDRAVAERAGIGWSGKNCMIITPEFGSYVYLAEMITNVPFEPDERIEDQCGSCNKCIEACPTGALVNPGQLNSQRCIAFQTQTKGFLPDEFRTKIGNRIYGCDTCQMVCPKNKGVDFHLHPEMEPDPEIAKPLLKPLLTMSNREFKEKFGHVAGSWRGKKPIQRNAIIALAHFKEADALPELIELMHKDPRPVIRGTAAWAVGKIGGADVMGELERALAHEQDEEAKAEIQKGIGLLKETSATN

SEQ ID NO: 74761 - protein, 380 aa, Bacillus hemicellulosilyticus
  misc_feature (1)..(380): tr|W4QF88|W4QF88_9BACI Epoxyqueuosine reductase OS=Baci llus hemicellulosilyticus JCM 9152 OX=1236971 GN=queG P E=3 SV=1
MTLAQLKDEIIAYSKSIGIDKIGFASADPFLQLKDRLLTQKQLGYQSGFEEPDIDKRVTPERLLPHAKTIISIALAYPSKMKNPPKNTREERRGIFCRASWGKDYHHILRERLQKLEQFIRERAPEARTVSMVDTGELSDRAVAERAGIGWSGKNCAIITPEFGSYVYLGDLITTLSIEPDVPLTDQCGSCTKCIDACPTGALVQGGQLNSQKCIAYLTQTKDFLTDQYRKKLGNRLYGCDTCQQVCPVNKGKDAHIHSEMEPDPEIAKPKLIPLLTMSNRSFKEKFGHVSGSWRGKKPIQRNAIIALAHFKDERSLPVLTDLVKNDPRPVIRGTAAWAIGVIGSYQEKKLLTELKKSECEEKVLEEIEKGLNIIENKSF

SEQ ID NO: 74762 - protein, 374 aa, Bacillus hisashii
  misc_feature (1)..(374): tr|A0A267TUY8|A0A267TUY8_9BACI Epoxyqueuosine reductase OS=Bacillus hisashii OX=996558 GN=queG PE=3 SV=1
METQALKKEIIDYAISIGIDKIGFATAAPFTTLKARLIRQQELNYQSGFEESDIDKRTNPALLFDNPQSIISIALAYPTKMNKHVRGTKGERRGLFARASWGEDYHLVLRDRLSKLEQFIYSKMPDARCKSMVDTGELSDRAVAERAGIGWSGKNCAIITPEYGSFVYLGEMITNIPFEPDTPIENMCGTCNKCIEACPTGALVQPGQINAKICISYLTQTKDFLPDEYRSVIGNRLYGCDTCQIVCPYNKGKDFHFHEEFEPEPEVAKPLLKPLLKISNKEFKEKYGRVSGAWRGKKPIQRNAIIALGHFKDETAIDELSDVIRNDPRPVIRGTAAWALGKIGTEKAKQILTKAKIEEKDEDVLQEIEVALAE

SEQ ID NO: 74763 - protein, 379 aa, Bacillus horikoshii
  misc_feature (1)..(379): tr|A0A1Y0CKN9|A0A1Y0CKN9_9BACI tRNA epoxyqueuosine(34) reductase QueG OS=Bacillus horikoshii OX=79883 GN=B4U37 _05415 PE=4 SV=1
MNEENIKLKEELIAYSKQIGIDKIGFASAGVFTGLKERLITQQELNYQSGFEEPDIKKRTNPELIVPKAKSIIAIALAYPSKMKDAPRSTREERRGIFCRASWGVDYHDILREKLRLLEAFIKEKRPDALMKSMVDTGELSDRAVAERAGIGWSGKNCAIITPEFGSYVYLGEMITTLPFEPDTPLEDNCGTCNKCVEVCPTGALVQGGQLDSNKCIAFLTQTKGFLAEEYRTKLGNRLYGCDTCQTVCPENKGKDFHLHPEMEPDPEIVKPKLKPLLTISNREFKENFGKISGSWRGKKPIQRNAIIALAHYKDTSAIPDLLSLLENDPRPVIRGTAAWAVGRIGDKQALVSLQNYKATEKDPEVLKELENGINMLTE

SEQ ID NO: 74764 - protein, 379 aa, Bacillus horikoshii
  misc_feature (1)..(379): tr|A0A5D4SCQ0|A0A5D4SCQ0_9BACI tRNA epoxyqueuosine(34) reductase QueG OS=Bacillus horikoshii OX=79883 GN=queG PE=4 SV=1
MNEENIKLKEELIAYSKQIGIDKIGFASAGVFTGLKERLITQQELNYQSGFEEPDIEKRTNPELIMPKAKSIIAIALAYPSKMKDAPRSTREERRGIFCRASWGVDYHDILREKLRLIEAFIKEKHPDALMKSMVDTGELSDRAVAERAGIGWSGKNCAIITPEFGSYVYLGEMITTIPFEPDTPLEDNCGTCNKCVEVCPTGALVQGGQLDSNKCIAFLTQTKGFLAEEYRTKLGNRLYGCDTCQTVCPENKGKDFHLHPEMEPDPEIVKPKLKPLLTISNREFKENFGKISGSWRGKKPIQRNAIIALAHYKDTSAIPDLLSLLENDPRPVIRGTAAWAVGRIGDKQALVSLQNYKATEKDPEVLKELEKGIGMLTE

SEQ ID NO: 74765 - protein, 377 aa, Bacillus horneckiae
  misc_feature (1)..(377): tr|A0A2N0ZHJ4|A0A2N0ZHJ4_9BACI Epoxyqueuosine reductase OS=Bacillus horneckiae OX=549687 GN=queG PE=3 SV=1
MKISTLKNDLIAYSKTIGIDKIGFTTASTFNGLRNRLMKQQELGYQSGFEEPDIEKRVNPALLMDEPQSIISIALAYPTKMKTRVVSKQGERRGIFCRASWGEDYHLVLKDRLTKLEAYLIEKVPDVKFKAMVDTGELSDRAVAERAGIGWSGKNCSIITPEFGSYVYLGEIITNIPFEPDTPLEDRCGTCNKCIDACPTGALVQGGQLNAQRCISFLTQTKGFLPDEFRDELGNRIYGCDTCQTVCPENKGKDFHFHSEMEPDPEIVKPLLKPLLRISNREFKEKFGRLSGSWRGKKPIQRNAIIALAHFKDKTAVKDLQELMSSDSRPVIRGTAAWSLGKIGGEDAYEALQKALKEEKDQEVIDEINKGLLFIEK

SEQ ID NO: 74766 - protein, 379 aa, Bacillus hwajinpoensis
  misc_feature (1)..(379): tr|A0A4U1ME87|A0A4U1ME87_9BACI Epoxyqueuosine reductase OS=Bacillus hwajinpoensis OX=208199 GN=queG PE=3 SV=1
MINAQLKSDIVAYSKTIGIDKIGFAAADPFKSLKERLKRQQDLGYQSGFEESDIEKRTEPELLLNGATTIISIAIAYPSRMKESPRSKRGERRGLFCRASWGVDYHHVLREKLSLLDAYIKSKVPEASTSSMVDTGELSDRAVAERAGIGFSGKNTMTITEEFGSWVYLGEMITDLYMEPDEPVEEGCGDCNICVDACPTGALIEGGQLNANKCIAFLTQTKGFLPDEYRAKLGNRLYGCDTCQLVCPKNKGKDFHHHPELEPDPEMVKPKLIPLLTMSNREFKERFGNAAGSWRGKKPIQRNAILALAHYKDESSVDTLIELMEKDPRPVIRGTSAWALGKIGGDKAYQALYKEQMREKDKDAADEIAKGLSMLENKA

SEQ ID NO: 74767 - protein, 377 aa, Bacillus indicus
  misc_feature (1)..(377): tr|A0A084GIM5|A0A084GIM5_BACID Epoxyqueuosine reductase OS=Bacillus indicus OX=246786 GN=queG PE=3 SV=1
MNAAELKQDLIAYSKSIGIDKIGFAQATVFEELKQRLIVHEQKGYMSGFEEPDIEKRTNPDLLVPGAKSIISIALAYPSKLKDAPRSTKEDRRGIFCRASWGQDYHDVLRDRLKKLEAYILEKLPDAELKSMVDTGELSDRAAAERAGIGWSGKNCAIITPEFGSYVYLGEIITNIALPPDTPMEDRCGSCTICVDACPTGALVQGGQLDSSKCIAFLTQTKGFLEERYRKKLGNRLYGCDTCQTVCPENKGKDFHLHPEMEPDPEIAKPKLKPLLTMSNREFKEKFGHVSGSWRGKKPIQRNAIIALAHFKDTTAVPELTFLMQKDPRPVIRGTAAWALGVIGEAASLPDLKKALQQEQDEEARAEMEKGLALLQQ

SEQ ID NO: 74768 - protein, 376 aa, Bacillus infantis
  misc_feature (1)..(376): tr|A0A5D4QZH7|A0A5D4QZH7_9BACI tRNA epoxyqueuosine(34) reductase QueG OS=Bacillus infantis OX=324767 GN=queG P E=4 SV=1
MNYSELKQDIIDYSKTIGIDKIGFASASTFGEMKGRLIRQQELDYQSGFEEPDIDKRTEPALLLDEPMSIISIALAYPSKMKTRVVSKRGERRGIFCRASWGTDYHTVLRDRLGKLEAYINERLPEAKLKSMVDTGELVDRAVAERAGIGWSGKNCSIITPEFGSYVYLGEMITNLPLEPDEPIEDGCGSCNLCVDVCPTGALVGGGQLDSKRCIAFLTQTKGFLEKEFRVKIGNRLYGCDTCQTVCPKNKGMDFHFHEEMEPDPEIAKPLLKPLLHMSNREFKEKFGHVSGSWRGKKPIQRNAIIALAHYKDETAVYDLIQVMKSDPRPVIRGTAAWALGKIGGLEAREAVESALEKETDEDVLREMENSLYMFN

SEQ ID NO: 74769 - protein, 376 aa, Bacillus infantis
  misc_feature (1)..(376): tr|U5L8Z9|U5L8Z9_9BACI Iron-sulfur cluster-binding prot ein OS=Bacillus infantis NRRL B-14911 OX=1367477 GN=N28 8_05940 PE=4 SV=1
MNYSELKQDIIDYSKTIGIDKIGFASASTFGEMKSRLIRQQELDYQSGFEEPDIDKRTEPALLLDEPMSIISIALAYPSKMKTRVVSKRGERRGIFCRASWGTDYHTVLRDRLGKLEAYIRERLPEARLKSMVDTGELVDRAVAERAGIGWSGKNCSIITPEFGSYVYLGEMITNLPLEPDEPIEDGCGSCNLCVDVCPTGALVGGGQLDSKRCIAFLTQTKGFLEEEFRVKIGNRLYGCDTCQTVCPKNKGMDFHFHEEMEPDPEIAKPLLKPLLHMSNREFKDKFGHVSGSWRGKKPIQRNAIIALAHYKDESAVDDLIQVMVSDPRPVIKGTAAWALGKIGGLKAREAVEAALVKETDEEVRREMENSLYMFS

SEQ ID NO: 74770 - protein, 386 aa, Bacillus intestinalis
  misc_feature (1)..(386): tr|A0A0K6LTV5|A0A0K6LTV5_9BACI Epoxyqueuosine reductase OS=Bacillus intestinalis OX=1963032 GN=queG PE=3 SV=1
MNVYQLKEELIEYAKSIGVDKIGFTTADTFDSLKDRLILQESLGYLSGFEEPDIEKRVTPKLLLPKAKSIVAIALAYPSRMKDAPRSTRTERRGIFCRASWGKDYHDVLREKLDLLEEFLRSKHEDIRTKSMVDTGELSDRAVAERAGIGFSAKNCMITTPEYGSYVYLAEMITNIPFEPDVPIEDMCGSCTKCLDACPTGALVNPGQLNAQRCISFLTQTKGFLPDEFRTKIGNRLYGCDTCQTVCPLNKGKDFHLHPEMEPDPEIAKPLLKPLLTISNREFKEKFGHVSGSWRGKKPIQRNAILALAHFKDASALPELTELMHKDPRPVIRGTAAWAIGKIGDHAYAEELEKALEKEKDEEAKLEIEKGIELLKASGMTKQGLS

SEQ ID NO: 74771 - protein, 379 aa, Bacillus kochii
  misc_feature (1)..(379): tr|A0A248TDV6|A0A248TDV6_9BACI tRNA epoxyqueuosine(34) reductase QueG OS=Bacillus kochii OX=859143 GN=queG PE= 4 SV=1
MNIAELKEEIIRYSKTIGIDKIGFTTASTFDGLRNRLMKQQELGYQSGFEEPDIEKRVNPALLMDQPMSIISIALAYPTKMRERVVSKPGERRGIFCRASWGDDYHLVLKDRLSKLEAYLEELVPDVRFTSMVDTGALSDRAVAERAGIGWSGKNCSIFTPEFGSYVYLGETITNIPFEPDEPLESKCGTCTKCIDACPTGALVQGGQLNAQRCISFITQTKGFMPDEFREELGNRIYGCDTCQTICPENKGKDFHFHEEMEPDSEIVKPLLKPILHMSNREFKEKFGRLSGSWRGRKPIQRNSIIALAHFKDESAVGDLIMLMKKDPRPVIRGTAAWALGKIGGEEAEKALQAMQATEEDPEVQQEIEKGLKMFNPIM

SEQ ID NO: 74772 - protein, 377 aa, Bacillus koreensis
  misc_feature (1)..(377): tr|A0A0M0L7R4|A0A0M0L7R4_9BACI Epoxyqueuosine reductase OS=Bacillus koreensis OX=284581 GN=queG PE=3 SV=1
MNMLQLKQQIIDYSKEIGIDKIGFASASPFIELKDRLYQQQELNYQSGFEEPDIKKRTTPELLVPKARSIIAIALAYPSKMKDAPRSTKSERRGIFCRASWGRDYHDVLREKLKLLEEFVQGMVPDVMTKSMVDTGELSDRAVAERAGIGWSAKNCSIITPEFGSYVYLGEIVTNLPLEPDSPIEDRCGTCNKCVEACPTDALVTGGQLNSNRCIAFLTQTKGMLAEEFRDKLGNRLYGCDTCQTVCPENKGKDLHLHPEMEPDPEVAKPLLKPLLTISNRDFKETYGHVSGSWRGKKPIQRNAIIALAHFKDETAVPDLLNLLKDDPRPVIRGTAAWALAKIAPARIEEKLQEATVKETDEEVLLELEKALARLEQ

SEQ ID NO: 74773 - protein, 379 aa, Bacillus krulwichiae
  misc_feature (1)..(379): tr|A0A1X9M6M6|A0A1X9M6M6_9BACI Epoxyqueuosine reductase OS=Bacillus krulwichiae OX=199441 GN=queG PE=3 SV=1
MTLAQLKDELIAYSKTIGVDKIGFASADPFAELKNRLLTQQQLGYQSGFEESDIEKRVYPEKLLQGARTIISIALAYPSKMSNSPRNTKEERRGIFCRASWGKDYHDILRDRLKKLEIFLKERAPEAKTISMVDTGELSDRAVAERAGIGWSGKNCATITPEFGSYVYLGELVTTLPFEPDTPMIEQCGSCTKCIDACPTGALVQGGQLDSNKCIAFLTQTKDFLPDQYRKKLGNRLYGCDTCQQVCPENKGKDFHNHPEMEPDPEIAKPKLIPLLTISNREFKERFGHISGSWRGKKPIQRNAIIALAHFKDQQALPILADLLKKDPRPVIRGTAAWAIGVIGSIEEKRLLDEVKNTEKDDKVLREIDKGLNIMEYKE

SEQ ID NO: 74774 - protein, 377 aa, Bacillus kyonggiensis
  misc_feature (1)..(377): tr|A0A4U1D5Z8|A0A4U1D5Z8_9BACI tRNA epoxyqueuosine(34) reductase QueG OS=Bacillus kyonggiensis OX=1037680 GN=q ueG PE=4 SV=1
MDYDQLKQEIIEYSETIGIDKIGFTTASTFDELKNRLIRQQELGYQSGFEEPDIEKRVNPSLLMEQPRSIIAIALAYPSKMNGRVTSKKGERRGLFSRASWGLDYHIILRERLKKLEEFIMEKVPDAKCKSMVDTGELSDRAVAERAGIGWSGKNCAIITPEFGSYVYLGEMITNLPFAPDDPMEDRCGDCNKCIDACPTGALVQGGQINAQRCIAFLTQTKDFIPEEFREKIGNRLYGCDSCQTSCPENKGKDYHFHDEMEAEPEVVKPLLKPILQLSNRQFREGFGQLSGSWRGKNPIQRNAIIALAHFKDDTAVNDLVQVMKEDARPVLRGTAAWALGKIGGEQAEQELLGAKEQETDANVLREIEKGLQMIKR

SEQ ID NO: 74775 - protein, 380 aa, Bacillus lehensis
  misc_feature (1)..(380): tr|A0A4Y7WHN5|A0A4Y7WHN5_9BACI tRNA epoxyqueuosine(34) reductase QueG OS=Bacillus lehensis OX=300825 GN=queG P E=4 SV=1
MDYERLKQKLVMYSQSIGVDKLRITTADPFLSLKDRLIQQQEQGYASGFEHPNIDERVDPSLTLKEVRTIISIAVAYPSKLPNAPKSEKGSRRGFFSRSSWGIDYHDVLNDRLKKIEEFLFEECGTVETVRMVDTGALSDRAVAERAGIGWSAKNTFIITPELGSYVFLGNILTTLPFPPDEPIEDLCGSCQKCIDACPTGALVEPGVLNAQACLSYQTQTKGFMPEEYRSKIGNHLYGWDTCQLVCPYNKHKDHHQHEEMKPDPEKVKPLLLPLLTMSNKTFKAEFGHMAGSWRGKKPIQRNAIIALAHYKEESALPTLCELLRNDPRPVIRGTSAWAIGKISNSEKEEKALEDAKKNEQDENVLSEIEKGLSFIREKK

SEQ ID NO: 74776 - protein, 350 aa, Bacillus lehensis
  misc_feature (1)..(350): tr|A0A060LRG1|A0A060LRG1_9BACI Electron transport prote in OS=Bacillus lehensis G1 OX=1246626 GN=BleG1_1283 PE= 4 SV=1
MSLKDRLIQQQEQGYASGFEHPNIDERVDPSLTLKEVRTIISIAVAYPSKLPNAPKSEKGSRRGFFSRSSWGIDYHDVLNDRLKKIEEFLFEECGTVETVRMVDTGALSDRAVAERAGIGWSAKNTFIITPELGSYVFLGNILTTLPFPPDEPIEDLCGSCQKCIDACPTGALVEPGVLNAQACLSYQTQTKGFMPEEYRSKIGNHLYGWDTCQLVCPYNKHKDHHQHEEMKPDPEKVKPLLLPLLTMSNKTFKAEFGHMAGSWRGKKPIQRNAIIALAHYKEESALPTLCELLRNDPRPVIRGTSAWAIGKISNSEKEEKALEDAKKNEQDENVLSEIEKGLSFIREKK

SEQ ID NO: 74777 - protein, 381 aa, Bacillus lentus
  misc_feature (1)..(381): tr|A0A2X4WRD5|A0A2X4WRD5_BACLE Putative iron-sulfur clu ster-binding protein OS=Bacillus lentus OX=1467 GN=queG PE=4 SV=1
MDYGKLKEDIIAYSKSIGIDKIGFASSDPFIEMKNLLIRQQELGYQSGFEEKDIEKRTHPELIFEGPRSIIAIALAYPSKLPDAPRGKKGERRGIFCRASWGIDYHVLVREKLEDLARYIEGRVKQSRFKLMVDTGELVDRAVAERAGIGWSGKNCSIITPEFGSYVYLGEMITNLPFEPDTPMLDQCGDCNKCRDACPTGALVQPGQLDAQRCIAFLTQTKGFMPDEFRTKIGNRLYGCDTCQTSCPINKGKDFREHPKMEPAPEVVKPLLIPLLKISNREFRESYGELSGSWRGKKPIQRNAILALAHFKDSSAVGDLIDVLRKDVRPVLRGTAAWALGKIGGDEAQEALLKAQLVEEDNEVLVEIEKGLEFFAVKDEV

SEQ ID NO: 74778 - protein, 382 aa, Bacillus licheniformis
  misc_feature (1)..(382): tr|A0A447SCZ2|A0A447SCZ2_BACLI Epoxyqueuosine reductase OS=Bacillus licheniformis OX=1402 GN=yhbA PE=3 SV=1
MDVKKLKQDVIEFAQEIGIDKIRFASADTFETLKERLIENRTLGYESGFEEPDLEKRTNPDLLLPKAKSIIAIALAYPSKMKDAPRSKKGERRGIFCRASWGKDYHHVLREKLDQLEEFLKAQRSDVRTKSMVDTGELSDRAVAERAGIGWSGKNCMIITPEFGSYVYLAEMITNIPFEPDERIEDQCGSCNKCIEACPTGALVNPGQLNSQRCIAFQTQTKGFLPDEFRTKIGNRIYGCDTCQMVCPKNKGVDFHLHPEMEPDPEIAKPLLKPLLTMSNREFKEKFGHVAGSWRGKKPIQRNAIIALAHFKETDALPELIELMHKDPRPVIRGTAAWAVGKIGGADVMGELERALAHEQDEEAKAEIQKGIALLKETSATN

SEQ ID NO: 74779 - protein, 382 aa, Bacillus licheniformis
  misc_feature (1)..(382): tr|T5HIN3|T5HIN3_BACLI Epoxyqueuosine reductase OS=Baci llus licheniformis CG-B52 OX=1368424 GN=queG PE=3 SV=1
MDVKKLKQDVIEFAQQIGIDKIRFASADTFETLKERLIENRALGYESGFEEPDLEKRTNPDLLLPKAKSIIDIALAYPSKMKDAPRSKKGERRGIFCRASWGKDYHHVLREKLDQLEEFLKAQRSDVRTKSMVDTGELSDRAVAERAGIGWSGKNCMIITPEFGSYVYLAEMITNIPFEPDERIEDQCGSCNKCIEACPTGALVKPGQLNSQRCIAFQTQTKGFLPDEFRTKIGNRIYGCDTCQMVCPKNKGVDFHLHPEMEPDPEIAKPLLKPLLTMSNREFKEKFGHVAGSWRGKKPIQRNAIIALAHFKETDALPELIELMHKDPRPVIRGTAAWAVGKIGGADVMSELERALAHEQDEDAKAEIQKGIGLLKETSATN

SEQ ID NO: 74780 - protein, 379 aa, Bacillus litoralis
  misc_feature (1)..(379): tr|A0A179SQR1|A0A179SQR1_9BACI Epoxyqueuosine reductase OS=Bacillus litoralis OX=152268 GN=queG PE=3 SV=1
MNTEQLKKEVIEYSKEIGIDKIGFTSATMFEELKQRLMTQQELGYQSGFEESDIEKRVTPVKLLPKASSIISIALAYPSKLKNAPKSTREDRRGIFCRASWGQDYHTVLRDRLSKLENFLREKVPNIQIKSMVDTGELSDRAVAERAGIGWSGKNCSIITPEFGSYVYLGEMITNFPFPPDKPMEDQCGSCTKCLDVCPTGALVQGGQLDSSKCIAFLTQTKGFLPDEYRSKIGNRIYGCDTCQTVCPVNKGKDFHLHEEMEPDPEIAKPKLKPLLKISNRDFKEKYGHISGSWRGKKPLQRNAILALAHFKDTTALPDLIDLMHNDSRPVIRGTAAWAIGKIANNIDVAKELHKAYMTEKDEEVKEEISKGLAFIEKK

SEQ ID NO: 74781 - protein, 379 aa, Bacillus litoralis
  misc_feature (1)..(379): tr|A0A5C6VYZ6|A0A5C6VYZ6_9BACI Epoxyqueuosine reductase OS=Bacillus litoralis OX=152268 GN=queG PE=3 SV=1
MNIEQFKQEVIEYSKEIGIDKIGFTSAGLFEELKQRLITQQELGYQSGFEEPDIEKRVTPVKLLPKASSIISIALAYPSKLKDAPKSTKEDRRGIFCRASWGQDYHTVLRDRLKKLEEFLKKRIPDIQLKSMVDTGELSDRAVAERAGIGWSGKNCSIITPEFGSYVYLGEMITNFPFPPDQPMEDQCGSCRKCIDVCPTGALVQPGQLDSSKCIAFLTQTKGFLADEYRTKIGNRIYGCDTCQTVCPINKGKDFHFHEEMEPDPEIAKPKLKPLLTISNREFKEKYGHISGSWRGKKPLQRNAILALAHFKDKTATQDLIMLVHQDPRPVIRGTAAWALGKIGDASAEVELLKAFEKEKDEQVKEEIQKGLALLHETS

SEQ ID NO: 74782 - protein, 379 aa, Bacillus loiseleuriae
  misc_feature (1)..(379): tr|A0A0K9GQG9|A0A0K9GQG9_9BACI Epoxyqueuosine reductase OS=Bacillus loiseleuriae OX=1679170 GN=queG PE=3 SV=1
MDIDAFKQEVIQYSKEIGIDKIGFTTASTFQEMKNLLIRQQELNYQSGFEEPDIDKRVDPTLIFNEPRSIISIALAYPSKMKNAPQSKKGERRGIFCRASWGQDYHVVLRKKLQLLEDFIKEKVPGAMAKSMVDTGELVDRAVAERAGIGWSGKNCAIITPEFGSYVYLGDMITNIPFASDQPIEDQCGTCNKCVDVCPTGALVQGGQLNAKRCIAFLTQTKGFLPDEFRTKIGNRLYGCDTCQTVCPKNKGMDFHFHEEMEPDPELVKPLLKPLLTISNREFKEKYGQASGSWRGKKPIQRNAILALAHFKDETALPDLISVMKEDPRPVIRGTAAWAIGKIGGDDSVSVLKEARERETDEEVLTEIEKGLSFSAITE

SEQ ID NO: 74783 - protein, 379 aa, Bacillus lonarensis
  misc_feature (1)..(379): tr|A0A1G6GJD7|A0A1G6GJD7_9BACI Epoxyqueuosine reductase OS=Bacillus lonarensis OX=1464122 GN=SAMN05421737_1011 38 PE=4 SV=1
MRYDELKQDLIEYSNKIGIDKIGFTTGDPFLLLKERLIAQQEKGYASGFEHADIDERVFPELSMDNVQSIISIAVAYPTKLRDAPKNVPGARRGMFSRSSWGNDYHVALKARAQKLVSFLHERVPEAASLTMVDTGALADRAVAERAGVGWSAKNTFIITEEFGSFVFLGNVLTSIPFEPDEPLEDLCGECTKCLDACPTGALVEPGVLNTQACLSYQTQTKDFMPDEYREKTGHFLYGWDTCQVVCPYNKGINYDHHVDMLPDPETVKPLLLPILTMSNKEFKEKFGYLAGAWRGKKPIQRNAILALAHFREKSALPTLKTLLHEDTRPVIRGTAAWAIGKIGQLVTEENALLEAKKREKDIEVIAEIDKGLNMLRAK

SEQ ID NO: 74784 - protein, 374 aa, Bacillus luciferensis
  misc_feature (1)..(374): tr|A0A1E2W294|A0A1E2W294_9BACI tRNA epoxyqueuosine(34) reductase QueG OS=Bacillus luciferensis OX=178774 GN=BE D47_18840 PE=4 SV=1
MNIKEFQKKLISYSKEIGIDKIGFTTVDPFLTLKNRLYRQQELNYQSGFETKDIERRVDARKIMTEANSIIAIALAYPSKLKNPPKSKKGSTRGIFCRASWGEDYHVVVKKKLLQLESFILLHYPNANVQSMVDTGELVDRAVAERAGIGWSAKNCSIITPEFGSYVYLGEMITSLPFEPDSPIEEQCGECTKCIDVCPTSAIVSPGQLNAKNCIAFLTQSKEMIPVEFRKELGNRIYGCDTCQTVCPKNKGINFTHHTEMEPDPETVKPLLRSVLKVSNREFKSQFGQMSGSWRGKNPIQRNAIIALAHFKDESALDDLKELAKKDARPVIRGTAIWAIFEIEGKNSTPFIESCLQKEQDEIVLKEINAVLSR

SEQ ID NO: 74785 - protein, 380 aa, Bacillus luti
  misc_feature (1)..(380): tr|A0A1K0ALF3|A0A1K0ALF3_9BACI Epoxyqueuosine reductase OS=Bacillus luti OX=2026191 GN=queG PE=3 SV=1
MDFEQLKQDVIAYSKTIGIDKIGFASASPFEELKQRLIQQQQLNYQSGFEESDIEKRTNPQLLLPGAKSIIAIALAYPSKLKNAPLSKRGERRGIFCRASWGQDYHLVLRDRLQKLEAYLIEKLPEIEVKSMVDTGELSDRAVSERAGIGWSGKNCSIITPEFGSYVYLGEMITNVPFPPDQPIEDQCGSCTKCIDICPTGALIQGGQLDSKKCIAFLTQTKGFLPEEYRDKIGNRIYGCDTCQTVCPKNKGMDFHNHPEMEPDPELVKPLLTPLLTISNRDFKEKYGIMSGSWRGKKPLQRNAILALAHFKEASAIPDLIGVMKDDPRPVLRGTAAWALGKIGGDGVGEAIEKAMQREKDEEVLHEMNRGLELLAQKKE

SEQ ID NO: 74786 - protein, 381 aa, Bacillus manliponensis
  misc_feature (1)..(381): tr|A0A073K4S6|A0A073K4S6_9BACI Epoxyqueuosine reductase OS=Bacillus manliponensis OX=574376 GN=queG PE=3 SV=1
MNFEQLKQDVIAYSKTIGIDKIGFASASPFEELKQRLIQQQQLGYQSGFEESDIEKRTNPQLLLPGAKSIIAIALAYPSKLKNAPVSKRGERRGIFCRASWGKDYHLVLRDRLEKLEAYLIERLPGIEVKSMVDTGELSDRAVSERAGIGWSAKNCSIITPEFGSYVYLGEMITNIPFPPDKPIEDQCGSCTKCIDICPTGALVQGGQLNSQKCIAFLTQTKGFLPEEYRDKIGNRIYGCDTCQTVCPKNKGIDFHNHPEMEPDPELVKPLLKPLLTISNREFKEKYGIMSGSWRGKKPLQRNAILALAHFKDTTAIPDLISLMKEDPRPVIRGTAAWALGKIGGEGVREEIQKAMGKEKDEEVIHEMNRGLELLAEKSSR

SEQ ID NO: 74787 - protein, 377 aa, Bacillus marisflavi
  misc_feature (1)..(377): tr|A0A0M0GS07|A0A0M0GS07_9BACI Epoxyqueuosine reductase OS=Bacillus marisflavi OX=189381 GN=queG PE=3 SV=1
MDMEQLKSDIISYSKTIGIDKIGFTTADTFTEMKNRLIRQEMAGYQSGFEEPDIEKRVDPSLTFDQPRSIIAIALAYPSRMKDAPRSKRGERRGIFCRASWGTDYHHVLRDRLKKLEEYIVSRIPEARFRSMVDTGELVDRAVSERAGIGWSGKNCSIITPEFGSYVYLGEMITNLPFSPDKPIEDGCGTCNKCVDVCPTGALIEGGRLDAQKCIAFLTQTKGFLKDEYRLKLGNRIYGCDTCQTVCPENKGKDFHFHEEMEPDPEVAKPLLKPLLTISNRDFKETYGHISGSWRGKKPIQRNAIIALAHYKDETAIPDLIGVLKNDVRPVMRGTSAWALGKIGGQEAEEALKHQIEKEVDPEVLEEIQKGLQLMTE

SEQ ID NO: 74788 - protein, 377 aa, Bacillus marisflavi
  misc_feature (1)..(377): tr|A0A163ITJ7|A0A163ITJ7_9BACI Epoxyqueuosine reductase OS=Bacillus marisflavi OX=189381 GN=queG PE=3 SV=1
MDMEQLKSDIISYSKTIGIDKIGFTTADTFTEMKNRLIRQEMAGFQSGFEEPDIDKRVDPSLTFDQPRSIIAIALAYPSRMKDAPRSKRGERRGIFCRASWGTDYHHILRDRLKKLEEYIVSRIPEARFRSMVDTGELVDRAVSERAGIGWSGKNCSIITPEFGSYVYLGEMITNLPFSPDKPIEDGCGTCNKCVDVCPTGALIEGGRLDAQKCIAFLTQTKGFLKDEYRVKLGNRLYGCDTCQTVCPENKGKDFHLHKEMEPDPEVAKPLLKPLLTISNRDFKETYGHISGSWRGKKPIQRNAIIALAHYKDETAIPDLIGVLRNDVRPVMRGTSAWALGKIGGQEAEEALKHQIEKEADPEVLEEIEKGLHMLTE

SEQ ID NO: 74789 - protein, 385 aa, Bacillus marmarensis
  misc_feature (1)..(385): tr|U6SKH9|U6SKH9_9BACI Epoxyqueuosine reductase OS=Baci llus marmarensis DSM 21297 OX=1188261 GN=queG PE=3 SV=1
MILAQLKEELIAYSKTIGVDKIGFTTADPFITLKDRLVTQQKLGYQSGFEEPDIDKRVHPEQNLEEARSIISIALAYPSKMKDAPKNTKDARRGIFCRASWGQDYHDVLRDRLSKIEKFLDEKVPQAKKVSMVDTGALSDREVAKRAGIGWTGKNCAIITPEFGSYVYLGEIITTIPFEPDTPITDQCGTCNKCVEACPTDALVQGGQLNSQACIAYLTQTKGFLPEPYREKLGNRLYGCDTCQQVCPENKGKDFHHHPEMEPDPEIAKPLLKPLLTISNREFKETFGHVSGSWRGKKPIQRNAIIALAHFKDESALPLLAELMKSDPRPVIRGTAAWAIGKISRMKENRRNEEETRLILAKEREKDDEVLREIDRALEMLENAR

SEQ ID NO: 74790 - protein, 378 aa, Bacillus megaterium
  misc_feature (1)..(378): tr|A0A2B8J5R6|A0A2B8J5R6_BACME Epoxyqueuosine reductase OS=Bacillus megaterium OX=1404 GN=queG PE=3 SV=1
MNAYQLKEEIISYSKEIGIDKIGFASASMFDELKNRLLAQQELGYASGFEEPDIEKRVDPTLVVPKARSIISIALAYPSKLKDAPKSTKEDRRGIFCRASWGQDYHTVLRDRLQKLETFIKEKVPAAILQSMVDTGELSDRAVAERAGIGWSGKNCAIITPKFGSYVYLGEMITDIPFPPDKPIEDGCGTCNKCVDACPTGALVTGGQLNSQRCIAFLTQTKGFLAEEFRSKLGNRLYGCDTCQTVCPENKGKDFHFHPEMEPDPELAKPKLKPLLTMSNREFKEKFGHVSGSWRGKKPIQRNAIIALAHFKDQTAVPDLIELIKNDVRPVIRGTAAWALGKIGDKEALDILMNLREKEKDQEVIEEMSKGIEMLQEI

SEQ ID NO: 74791 - protein, 378 aa, Bacillus megaterium
  misc_feature (1)..(378): tr|D5DA30|D5DA30_BACMD Epoxyqueuosine reductase OS=Baci llus megaterium (strain DSM 319) OX=592022 GN=queG PE=3 SV=1
MNAYQLKEEIISYSKEIGIDKIGFASASMFDELKNRLLAQQELGYASGFEEPDIEKRVNPTLVVPKARSIISIALAYPSKLKDAPKSTKEDRRGIFCRASWGQDYHTVLRDRLQKLETFIKEKVPASILQSMVDTGELSDRAVAERAGIGWSGKNCAIITPEFGSYVYLGEMITDIPFPPDKPIEDGCGTCNKCVDACPTGALVTGGQLNSQRCIAFLTQTKGFLAEEFRSKLGNRLYGCDTCQTVCPENKGKDFHFHPEMEPDPELAKPKLKPLLTMSNREFKEKFGHVSGSWRGKKPIQRNAIIALAHFKDQTAVPDLIELIKNDVRPVIRGTAAWALGKIGDKEALDILMNLREKEKDQEVIEEMSKGIEMLQEI

SEQ ID NO: 74792 - protein, 376 aa, Bacillus mesonae
  misc_feature (1)..(376): tr|A0A3Q9QQT3|A0A3Q9QQT3_9BACI tRNA epoxyqueuosine(34) reductase QueG OS=Bacillus mesonae OX=1193713 GN=queG P E=4 SV=1
MDVNKLKQEIIAYSKTIGIDKIGFTTADPFTELKNRLIRQQELGYQSGFEEPDIEKRTNPALLLEEPRSILSIALAYPAKMKIRVESKKGERRGIFCRASWGLDYHHIIKDRLQKLEAFILTKVPDARLKSMVDTGELSDRAVAVRAGIGWSGKNCAVITPEFGSYVYIGEMITSIPFAPDTQVEDQCGSCTKCLDACPTGALVQGGQINAQRCISFLTQTKGLIPDEFRDKIGNRVYGCDSCQTACPYNKGKDFHFHDEMEPNPEVAKPLLTPILKLSNREFKLKFGQVSGAWRGKKPIQRNAMIALAHFKDETAVPDLIEVLEKEASPVAKGTAAWALGKIGGEQALEALKRAKESETDLEVLQEIEKGLSFIS

SEQ ID NO: 74793 - protein, 376 aa, Bacillus methanolicus
  misc_feature (1)..(376): tr|I3E778|I3E778_BACMM Epoxyqueuosine reductase OS=Baci llus methanolicus (strain MGA3 / ATCC 53907) OX=796606 GN=queG PE=3 SV=1
MDVRLLKKEIIEYSKTIGIDKIGFTSASPFTEMKNRLRIQQELNYQSGFEEQDIEKRVTPSLLMDSPQSIISIALAYPSKMKERVIGKKGERRGIFCRASWGTDYHIILKDRLKKLEEFIAEKVPGAQFKSMVDTGELVDRAVAQRAGIGWSGKNCSIITPEFGSYVYLGEMITNIRFEPDTPMEDRCGSCNKCVEACPTGALVQGGQLNAKRCIAFLTQTKGFLPEEFREKLGNRLYGCDTCQTVCPENKGKDFHFHPEMEPDPEIAKPLLKPLLHISNREFKERYGHVSGSWRGKKPIQRNAIIALAHFKDETAVNDLIKVLNEDPRPVIRGTAAWALGKIGGENAKNALLKAKETEADLEVLNEIEKGIELCS

SEQ ID NO: 74794 - protein, 376 aa, Bacillus methanolicus
  misc_feature (1)..(376): tr|I3E6A6|I3E6A6_BACMT Fe-S protein OS=Bacillus methano licus PB1 OX=997296 GN=PB1_03780 PE=4 SV=1
MDVRLLKKEIIAYSKTIGIDKIGFTSASPFTEMKNRLRIQQVLNYQSGFEEPDIEKRVTPSLLLDSPQSIISIALAYPSKMKERVIGKKGERRGIFCRASWGTDYHIILKDRLKKLEEFIAKKVPGAQFKSMVDTGELVDRAVAQRAGIGWSGKNCSIITPEFGSYVYLGEMITNIPFEPDTPMEDRCGSCNKCVEACPTGALVQGGQLNAKRCIAFLTQTKDFLPEEFREKLGNRLYGCDTCQTVCPENKGKDFHLHPEMEPDPEIAKPLLKPLLHMSNREFKDKYGHISGSWRGKKPIQRNAIIALAHFKDETSISDLIQVLNEDPRPVIRGTAAWALGKIGGENAKKALLKAKKTEADQLVLNEIEKGLELCS

SEQ ID NO: 74795 - protein, 380 aa, Bacillus mobilis
  misc_feature (1)..(380): tr|A0A386UVG4|A0A386UVG4_9BACI Epoxyqueuosine reductase OS=Bacillus mobilis OX=2026190 GN=queG PE=3 SV=1
MDFEQLKQDVIAYSKTIGIDKIGFASASPFEELKQRLIQQQQLNYQSGFEEPDIEKRTNPQLLLPGAKSIIAIALAYPSKLKNAPLSKRGERRGIFCRASWGQDYHLVLRDRLQKLEAYLIEKLPDIEVKSMVDTGELSDRAVSERAGIGWSGKNCAIITPEFGSYVYLGEMITNVPFPPDQPIEDQCGSCTKCIDICPTGALIQGGQLDSKKCIAFLTQTKGFLPEEYRDKIGNRIYGCDTCQTVCPKNKGMDFHNHPEMEPDPELVKPLLTPLLTISNRDFKEKYGIMSGSWRGKKPLQRNAILALAHFKEASAIPDLIGVMKDDPRPVLRGTAAWALGKIGGDAVGEAIEKAMQREKDEEVLHEMNRGLELLAQKKE

SEQ ID NO: 74796 - protein, 380 aa, Bacillus mobilis
  misc_feature (1)..(380): tr|A0A1K0B8P6|A0A1K0B8P6_9BACI Epoxyqueuosine reductase OS=Bacillus mobilis OX=2026190 GN=queG PE=3 SV=1
MDFEQLKQDVIAYSKTIGIDKIGFASASPFEELKQRLIQQQQLNYQSGFEEPDIEKRTNPQLLLPGAKSIIAIALAYPSKLKNAPLSKRGERRGIFCRASWGQDYHLVLRDRLQKLEAYLIEKLPDIEVKSMVDTGELSDRAVSERAGIGWSGKNCAIITPEFGSYVYLGEMITNVPFPPDQPIEDQCGSCTKCIDICPTGALIQGGQLDSKKCIAFLTQTKGFLPEEYRDKIGNRIYGCDTCQTVCPKNKGMDFHNHPEMEPDPELVKPLLTPLLTISNRDFKEKYGIMSGSWRGKKPLQRNAILALAHFKEASAIPDLIGVMKDDPRPVLRGTAAWALGKIGGDGVGEAIEKAMQREKDEEVLHEMNRGLELLAQKKE

SEQ ID NO: 74797 - protein, 379 aa, Bacillus muralis
  misc_feature (1)..(379): tr|A0A1B3XK67|A0A1B3XK67_9BACI tRNA epoxyqueuosine(34) reductase QueG OS=Bacillus muralis OX=264697 GN=ABE28_0 04550 PE=4 SV=1
MDMNTFKQEVIIYSKKIGIDKIGFASATTFTELRSRLIRQQELNYQSGFEEPDIEKRVRPELIFDKPQSIISIALAYPSKLKNAPQSKKGERRGIFCRASWGTDYHAVLRKKLQLLEDFITDKAPGAISKSMVDTGELSDRAVAERAGVGWSAKNSMIITPEFGSYVYLGDLITNLPFEPDQPMEDQCGTCNKCVDVCPTGALVQGGQLNAKRCIAFLTQTKGFLPDEFRTKIGNRLYGCDTCQTVCPKNKGIDFHLHEEMEPDPELAKPLLKPLLTISNRDFKETYGHVSGSWRGKKPIQRNAILALAHFKDVTALPLLVKVMKEDPRPVIRGTAAWAVGKIGRHEAVSVLEEARMKETDEEVLEEIEKGLQFTLETQ

SEQ ID NO: 74798 - protein, 380 aa, Bacillus mycoides
  misc_feature (1)..(380): tr|A0A1D3MGM7|A0A1D3MGM7_BACMY Epoxyqueuosine reductase OS=Bacillus mycoides OX=1405 GN=queG PE=3 SV=1
MDFEQLKQDVIAYSKTIGIDKIGFASASPFEELKQRLIQQQQLNYQSGFEEPDIEKRTNPQLLLPGAKSIIAIALAYPSKLKNAPLSKRGERRGIFCRASWGQDYHLVLRDRLQKLEAYLIEKLPDIEVKSMVDTGELSDRAVSERAGIGWSGKNCAIITPEFGSYVYLGEMITNVPFPPDRPIEDQCGSCTKCIDICPTGALVQGGQLDSKKCIAFLTQTKGFLPEEYRDKIGNRIYGCDTCQTVCPKNKGMDFHNHPEMEPDPELVKPLLTPLLTISNRDFKEKYGVMSGSWRGKKPLQRNAILALAHFKETAAIPDLIGVMKDDPRPVLRGTAAWALGKIGGDGVGEDIEKAMEREKDEEVLHEMNRGLELLAQKKE

SEQ ID NO: 74799 - protein, 380 aa, Bacillus mycoides
  misc_feature (1)..(380): tr|A9VTN0|A9VTN0_BACMK Epoxyqueuosine reductase OS=Baci llus mycoides (strain KBAB4) OX=315730 GN=queG PE=3 SV= 1
MDFEQLKQDVIAYSKTIGIDKIGFASASPFEELKQRLIQQQQLNYQSGFEEPDIEKRTNPQLLLPGARSIIAIALAYPSKLKNAPLSKRGERRGIFCRASWGQDYHLVLRDRLQKLEAYLIEKLPDIEVKSMVDTGELSDRAVSERAGIGWSGKNCAIITPEFGSYVYLGEMITNVPFPPDRPIEDQCGSCTKCIDICPTGALVQGGQLDSKKCIAFLTQTKGFLPEEYRDKIGNRIYGCDTCQTVCPKNKGMDFHNHPEMEPDPELVKPLLTPLLTISNRDFKEKYGIMSGSWRGKKPLQRNAILALAHFKETAAIPDLIGVMKDDPRPVLRGTAAWALGKIGGDGVGEAIEKAMEREKDEEVLHEMNRGLELLAQKKE

SEQ ID NO: 74800 - protein, 386 aa, Bacillus nakamurai
  misc_feature (1)..(386): tr|A0A150F972|A0A150F972_9BACI Epoxyqueuosine reductase OS=Bacillus nakamurai OX=1793963 GN=queG PE=3 SV=1
MNIHKLKEELIEYAKSIGVDKIGFTTADTFDSLRDRLILQESLGYLSGFEEPDIEKRVTPTLLLPKAKSIVAIALAYPSKMKDAPRSTRDGRRGIFCRASWGKDYHDVLREKLDLLEKFLQSKHKDIRTKSMVDTGELSDRAVAERAGIGFSAKNCMITTPEYGSYVYLAEMITNLPFEPDVPIEDMCGSCTKCLDACPTGALVNPGQLNAQRCISFLTQTKGFLPDEFRTKIGNRLYGCDTCQTVCPINKGKDFHLHPQMEPDPEIAKPLLKPLLTISNREFKEKFGHVSGSWRGKKPIQRNAILALAHFKDTSALPELTALMHQDPRPVIRGTAAWAVGKIGDQAYAEELQKALHKEQDEEAKQEIEKGLELLSVSDKTKTTLS

SEQ ID NO: 74801 - protein, 379 aa, Bacillus nanhaiisediminis
  misc_feature (1)..(379): tr|A0A562QJB4|A0A562QJB4_9BACI Epoxyqueuosine reductase OS=Bacillus nanhaiisediminis OX=688079 GN=queG PE=3 SV =1
MTNAQLKEELIAYSKSIGVDKIGFTSADPFLQLKDRLQTQQKLGYQSGFEESDIEKRTQPKRLLEGARTIISIALGYPSKMNNPPKSTKEERRGVFCRASWGKDYHDVLRGRLQKIETFLQNRVPEARTISMVDTGELSDRAVAERAGIGWSGKNCAIITPEFGSYVYLGELVTTVSLEPDIPLTEQCGTCTRCIDACPTGALVQGGQLDSQKCIAYLTQTKNFLPEQYRKKLGNRLYGCDTCQQVCPENKGKDFHLHDEMEPDPEIAKPKLLPLLTMGNREFKEKFGHVSGSWRGKKPIQRNAIIALAHFKDHQALPVLHELMQKDPRPVIRGTAAWAIAQIGSIEEKNRLEQAKNKEIDEEVLLEIEKGISILENKS

SEQ ID NO: 74802 - protein, 379 aa, Bacillus nealsonii
  misc_feature (1)..(379): tr|A0A2N0Z780|A0A2N0Z780_9BACI tRNA epoxyqueuosine(34) reductase QueG OS=Bacillus nealsonii OX=115979 GN=queG PE=4 SV=1
MNYAQLKQDIIEYSKTIGIDKIGFTSASTFEEMKIRLVEQQALDYQSGFEEKDIDKRVDPSLLMDKPKSIISIALAYPSKMKERVVSKKGARRGIFCRASWGTDYHVVLKNRLQKLEEFILERVPEALCKSMVDTGELVDRAVAQRAGIGWSGKNCAIITPEFGSYVYLGEMITNLPFLPDASMEDQCGSCNKCIEVCPTGALIQGGQLNAQRCIAFQTQTKGFLAEEFREKLGNRIYGCDTCQTVCPKNKGIDFHNHPEMEPDPEIAKPLLQPLLHISNKEFKEKYGHISGSWRGKKPIQRNALIALAHYKEESAVEDIILVMNKDPRPVLRGTAAWALGKIGGQSAKEALTNGLIIEKDQEVLAEIEAAFARISSEG

SEQ ID NO: 74803 - protein, 377 aa, Bacillus nealsonii
  misc_feature (1)..(377): tr|R9C012|R9C012_9BACI Iron-sulfur cluster-binding prot ein OS=Bacillus nealsonii AAU1 OX=1202533 GN=A499_18574 PE=4 SV=1
MDFRELKKDIIEYSKTIGIDKIGFTSASTFEEMKVRLIRQQELNYQSGFEEKDIEKRVNPSLLLEQPKSIISIALAYPSKMKERVVSKKGARRGIFCRASWGTDYHVVLNDRLKKLEDYIKERIPDALCKSMVDTGELVDRAVAQRAGIGWSGKNCAIITPEFGSYVYLGEMITNLPLDPDTPMEDQCGTCNKCVEVCPTGALIQGGQLNAQRCIAFQTQTKGFLAEEFREKLGNRIYGCDTCQTVCPKNKGIDFHNHPEMEPDPEIAKPLLQPLLFISNKEFKEKYGYISGSWRGKKPIQRNAIIALAHFKEEGAVGDLITVMKKDPRPVIRGTAAWALGKIGGDESKTALQTATQQEEDQEVLQEIQDALQRLAH

SEQ ID NO: 74804 - protein, 376 aa, Bacillus notoginsengisoli
  misc_feature (1)..(376): tr|A0A417YER5|A0A417YER5_9BACI Epoxyqueuosine reductase OS=Bacillus notoginsengisoli OX=1578198 GN=queG PE=3 S V=1
MDYRQLREEVIAYSKTIGIDKIGFTAAEPFGELKNRLIRQQELGYQSGFEEPDIEKRTNPELLMEKPRSIIAIALAYPSKMNERVVSKKGERRGIFCRASWGLDYHHILRAKLAKLEEFILEKVPGARLKSMVDTGELADRAVAERAGIGWSGKNCSIITPEFGSYVYLGEMITSIPFEPDTPLEDQCGSCRKCLDACPTGALVQGGQLNAQRCISFLTQTKDFIPEEFREKIGNRIYGCDSCQTACPMNKGRDFHFHEEMEPDPEVAKPLLKPILSLSNREFKERFGKVAGSWRGKKPIQRNAIIALAHFKDDTAVSELENLIRKDPRPVMRGTAAWALGKIGGSESAFILQKALAEENDEEVLTEIKKGIEMIK

SEQ ID NO: 74805 - protein, 379 aa, Bacillus obstructivus
  misc_feature (1)..(379): tr|A0A1L8ZJ46|A0A1L8ZJ46_9BACI Epoxyqueuosine reductase OS=Bacillus obstructivus OX=1914540 GN=queG PE=3 SV=1
MNISQLKQEIISYSKVIGIDKIGFTTADTFTEMKNRLIRQQELGYQSGFEEKDIEKRVNPSLIFDQPKSIIAIALAYPSKMSESPQGKKGDRRGIFCRASWGVDYHTILREKLKQLEEFILEKVPEARFKSMVDTGELVDRAVAQRAGIGWSGKNCSIITPEFGSYVYLGEMITNLPFEPDEPMEDQCGSCNKCIDVCPTGALVQGGQLNAQRCIAFLTQTKGFLEEEFRDKLGNRIYGCDTCQTICPKNKGMDFHFHEEMEPDPELAKPRLTPLLTISNREFKDNFGEMSGSWRGKKPIQRNAIIALAHFKEQSSVPELIQVLNEDPRPVIRGTAAWALGKIGGEDASMALEHSNEKETDPDVLNEIEKAIRKTKGEV

SEQ ID NO: 74806 - protein, 378 aa, Bacillus oceanisediminis
  misc_feature (1)..(378): tr|A0A4R8G986|A0A4R8G986_9BACI Epoxyqueuosine reductase OS=Bacillus oceanisediminis OX=665099 GN=DFO72_10730 P E=4 SV=1
MNFAQFKQEVIEYSKTIGIDKIGFTAAGTFDEMKNRLIRQQELQYQSGFEEPDIEKRVNPGLLLDKPKSIISIAVAYPSKMKVRVVSKRGERRGIFCRASWGKDYHHILRERLQKLEGFIQSRIPEAICKSMVDTGELVDRAVAQRAGIGWSGKNCSIITPEFGSYVYLGEMITNLPFEPDKPMEDRCGSCNKCVDVCPTGALIQGGQLDAQKCIAFLTQTKGFLPEPYREKLGNRLYGCDTCQTVCPENKGKDFHLHEEMEPDPEVAKPLLRPLLFISNREFKEKYGPVSGSWRGKKPIQRNAIIALAHYKDETAVEDLIKVMTEDPRPVIRGTAAWALGKIGGEKSLAALEQALQQEKDGEVIAEIEKGLSFIEKR

SEQ ID NO: 74807 - protein, 377 aa, Bacillus oceanisediminis
  misc_feature (1)..(377): tr|A0A160M850|A0A160M850_9BACI Epoxyqueuosine reductase OS=Bacillus oceanisediminis 2691 OX=1196031 GN=A361_06 380 PE=4 SV=1
MDFAQFKQEVIEYSKTIGIDKIGFTAASTFDEMKNRLIRQQELQYQSGFEEPDIEKRVNPSLLLDKPKSIISIAVAYPSKMKVRVVSKRGERRGIFCRASWGKDYHHILRERLQKLEGFIQSRIPEALCKSMVDTGELVDRAVAQRAGIGWSGKNCSIITPEFGSYVYLGEMITNLPFEPDKPMEDRCGSCNKCVDVCPTGALIQGGQLDAQKCIAFLTQTKGFLAEPYREKLGNRLYGCDTCQTVCPENKGKDFHLHEEMEPDPEVAKPLLRPLLFISNREFKEKYGPVSGSWRGKKPIQRNAIIALAHYKDETAVEDLIKVMTEDPRPVIRGTAAWALGKIGGEKSLAALEKALQQEKDGEAIAEIEKGLSFIEK

SEQ ID NO: 74808 - protein, 379 aa, Bacillus okhensis
  misc_feature (1)..(379): tr|A0A0B0IAQ5|A0A0B0IAQ5_9BACI Epoxyqueuosine reductase OS=Bacillus okhensis OX=333138 GN=queG PE=3 SV=1
MSLAQLKDELIAYSKTIGVDKIGFASADPFLQLKDRLLIQQELGYQSGFEEPDIEKRVQPGKLVEGARTIISIALAYPSKMKDPPKSTREDRRGIFCRASWGKDYHDVLRERLKKIEEFLEERLPESRTISMVDTGELSDRAVAERAGIGWSGKNCAIITPEFGSYVYLGEVVTTIPFEPDTPITEQCGTCNKCVDACPTGALIQGGQLDSNKCIAFLTQTKNFLPDQYRKKLGNRLYGCDTCQQVCPENKGKDFHIHPEMEPDSEIAKPKLIPLLTMSNREFKEKFGHVSGSWRGKKPIQRNAIIALAHFKDKKALPVLIDLLKKDPRPVIRGTAAWAIGEIGSLEEHNILNNAKNAEKDDDVVREIEKGLNLIENKH

SEQ ID NO: 74809 - protein, 391 aa, Bacillus okuhidensis
  misc_feature (1)..(391): tr|A0A0M0KM81|A0A0M0KM81_9BACI Epoxyqueuosine reductase OS=Bacillus okuhidensis OX=136160 GN=queG PE=3 SV=1
MTPAQLKDELIAYSKTIGIDKIGFASADPFLTLKERLQTQQALGYQSGFEEPDIDKRVYPEKILPKARSIISIALVYPSKMKNPPKSKKGERRGVFCRASWGKDYHDILRDRLKKLEDFLLERVPDMKVLSMVDTGALSDRAVAERAGIGWSGKNCAVITPEFGSYVYLGDLVTTIPFPPDIPLTDQCGTCNKCVDACPTGALIQGGQLDSQKCIAFLTQTKGFLPEKYRKKLGNRLYGCDTCQQVCPANKRKDFHFHEEMEPDPEIAKPKLIPLLTMSNREFKEKFGHVSGSWRGKKPIQRNAILALAHFKEEAALPILADLLRQDPRPVIRGTAGWALGKIGGPEVETWLKDALKREKDEDVRAEISRGLEILAYGDSGNGKETEDSIR

SEQ ID NO: 74810 - protein, 380 aa, Bacillus oleivorans
  misc_feature (1)..(380): tr|A0A285CQH9|A0A285CQH9_9BACI Epoxyqueuosine reductase OS=Bacillus oleivorans OX=1448271 GN=queG PE=3 SV=1
MNFDLLKKDIIAYSKEIGIDKIGFTSASAFDEMKNRLIRQQELGFQSGFEEKDIDKRVYPDLIFNKPKSIIAIALAYPSKMKDASQSKKGARRGLFARASWGRDYHDVLREKLSQLEAYIKERVPEAVCKSMVDTGELVDRAVAERAGIGWSGKNCAIITPEFGSYVYLGEMITNLPFEPDEPIEEGCGDCNLCVDACPTGALVQGGQLNAQKCIAFLTQTKGFLPDEYRSKLGNRLYGCDTCQLVCPKNKKMDFHLHEEFEPDPEIAKPLLQPLLHLTNREFKDTYGHVSGSWRGKKTIQRNAIIALAHYKEESAVPDLIYLMKEDPRPVIRGTAAWALGKIGAPEGKAAIETQLVHEKDLDVRAEMEKGLAFFEQINI

SEQ ID NO: 74811 - protein, 380 aa, Bacillus pacificus; identical to SEQ ID NO: 74694
  misc_feature (1)..(380): tr|A0A1J9YF74|A0A1J9YF74_9BACI Epoxyqueuosine reductase OS=Bacillus pacificus OX=2026187 GN=queG PE=3 SV=1

SEQ ID NO: 74812 - protein, 380 aa, Bacillus pacificus
  misc_feature (1)..(380): tr|A0A5C4ZJ42|A0A5C4ZJ42_9BACI Epoxyqueuosine reductase OS=Bacillus pacificus OX=2026187 GN=queG PE=3 SV=1
MDFEQLKQDVIAYSKTIGIDKIGFASASPFEELKQRLIQQQQLNYQSGFEEPDIEKRTNPQLLLPGAKSIIAIALAYPSKLKNAPLSKRGERRGIFCRASWGQDYHLVLRDRLQKLEAYLIEKLPDIEVKSMVDTGELSDRAVSERAGIGWSGKNCSIITPEFGSYVYLGEMITNVPFPPDQPIEDQCGNCTKCIDICPTGALIQGGQLDSKKCIAFLTQTKGFLPEEYRDKIGNRIYGCDTCQTVCPKNKGMDFHNHPEMEPNPELVKPLLTPLLTISNRDFKEKYGIMSGSWRGKKPLQRNAILALAHFKEASAIPDLIDVMKDDPRPVLRGTAAWALGKIGGDGVGEAIEKAMQREKDEEVLHEMNRGLELLAQKKE

SEQ ID NO: 74813 - protein, 382 aa, Bacillus paralicheniformis; identical to SEQ ID NO: 74778
  misc_feature (1)..(382): tr|A0A1Q8GKI0|A0A1Q8GKI0_9BACI Epoxyqueuosine reductase OS=Bacillus paralicheniformis OX=1648923 GN=queG PE=3 SV=1

SEQ ID NO: 74814 - protein, 382 aa, Bacillus paralicheniformis
  misc_feature (1)..(382): tr|A0A5A9T7I8|A0A5A9T7I8_9BACI Epoxyqueuosine reductase OS=Bacillus paralicheniformis OX=1648923 GN=queG PE=3 SV=1
MDVKKLKQDVIEFAQEIGIDKIRFASADTFETLKERLIENRTLGYESGFEEPDLEKRTNPDLLLPKAKSIIAIALAYPSKMKDAPRSKKGERRGIFCRASWGKDYHHVLREKLDQLEEFLKAQRSDVRTKSMVDTGELSDRAVAERAGIGWSGKNCMIITPEFGSYVYLAEMITNIPFEPDERIEDQCGSCNKCIEACPTGALVNPGQLNSQRCIAFQTQTKGFLPDEFRTKIGNRIYGCDTCQMVCPKNKGVDFHLHPEMEPDPEIAKPLLKPLLTMSNREFKEKFGHVAGSWRGKKPIQRNAIIALAHFKETDALPELIELMHKDPRPVIRGTAAWAVGKIGGADVMGELERALAHEQDEEAKVEIQKGIGLLKETSATN

SEQ ID NO: 74815 - protein, 380 aa, Bacillus paramycoides
  misc_feature (1)..(380): tr|A0A1J9W3K4|A0A1J9W3K4_9BACI Epoxyqueuosine reductase OS=Bacillus paramycoides OX=2026194 GN=queG PE=3 SV=1
MDFEQLKQEVIAYSKTIGIDKIGFASASPFEELKQRLIQQQQLNYQSGFEEPDIEKRTNPQLLLPGAKSIIAIALAYPSKLKNAPLSKRGERRGIFCRASWGQDYHLVLRDRLQKLEAYLIEKLPDIEVKSMVDTGELSDRAVSERAGIGWSGKNCAIITPEFGSYVYLGEMITNVPFPPDQPIEDQCGSCTKCIDICPTGALIQGGQLDSKKCIAFLTQTKGFLPEEYRDKIGNRIYGCDTCQTVCPKNKGMDFHNHPEMEPDPELVKPLLTPLLTISNRDFKEKYGIMSGSWRGKKPLQRNAILALAHFKETAAIPDLIGVMKDDPRPVLRGTAAWALGKIGGDGVGEAIEKAMGREKDEEVLHEMNRGLELLAQKKE

SEQ ID NO: 74816 - protein, 380 aa, Bacillus paranthracis; identical to SEQ ID NO: 74694
  misc_feature (1)..(380): tr|A0A4U1D4Q9|A0A4U1D4Q9_9BACI Epoxyqueuosine reductase OS=Bacillus paranthracis OX=2026186 GN=queG PE=3 SV=1

SEQ ID NO: 74817 - protein, 380 aa, Bacillus paranthracis
  misc_feature (1)..(380): tr|A0A1J9Y8F3|A0A1J9Y8F3_9BACI Epoxyqueuosine reductase OS=Bacillus paranthracis OX=2026186 GN=queG PE=3 SV=1
MDFEQLKQDVIAYSKTIGIDKIGFASASPFEELKQRLIQQQQLNYQSGFEEPDIEKRTNPQLLLPGAKSIIAIALAYPSKLKNAPLSKRGERRGIFCRASWGQDYHLVLRDRLQKLEAYLIEKLPDIEVKSMVDTGELSDRAVSERAGIGWSGKNCSIITPEFGSYVYLGEMITNVPFPPDQPIEDQCESCTKCIDICPTGALIQGGQLDSKKCIAFLTQTKGFLPEEYRDKIGNRIYGCDTCQTVCPKNKGMDFHNHPEMEPDPELVKPLLTPLLTISNRDFKEKYGIMSGSWRGKKPLQRNAILALAHFKEASAIPDLIGVMKDDPRPVLRGTAAWALGKIGGDGVGEAIEKAMQREKDEEVLHEMNRGLELLAQKKE

SEQ ID NO: 74818 - protein, 376 aa, Bacillus persicus
  misc_feature (1)..(376): tr|A0A1H8DR60|A0A1H8DR60_9BACI Epoxyqueuosine reductase OS=Bacillus persicus OX=930146 GN=SAMN05192533_10920 P E=4 SV=1
MDILQLQQDIIDYSKEIGIDKIGFASPSPFSEMKSRLIHQQELQYQSGFEEQDIEKRVRPDLIFDHPQSIIAIAVAYPSKMKVRVVSKKGERRGIFCRASWGEDYHHILRRKLKLLEEYIAAKVPEAKFKSMVDTGELVDRAVAERAGIGWSGKNCSIITPEFGSYVYLGEMITNLPFKPDSPMEDQCGSCTKCLDACPTGALVQGGQLNSQRCIAFLTQTKGFLPEEFREKIGNRLYGCDSCQTACPVNKGKDFHFHAETEPDAELAKPLLKPILHISNREFKEKFGPVSGSWRGKKPIQRNAVIALGHFKDETAVPDLIKVLTEDPRPVLRGTAAWSLAKIGGAEAITALEKSAEVEKDDEVLSEIRTGLSLFR

SEQ ID NO: 74819 - protein, 376 aa, Bacillus praedii
  misc_feature (1)..(376): tr|A0A4R1B4Q7|A0A4R1B4Q7_9BACI Epoxyqueuosine reductase OS=Bacillus praedii OX=1742358 GN=queG PE=3 SV=1
MDFSQLKKEIIEYSKTIGIDKIGFTTASTFDELRNRLIRQQELQYQSGFEEKDIEKRVNPALLMDSPRSIIAIALAYPSKMNERVTSKKGERRGIFSRASWGEDYHLILRDRLKKLEAYIIERVPEAKCKSMVDTGELVDRAVAERAGIGWSGKNCSIITPEFGSYVYLGEMITTIPFEPDQPIEDQCGTCNKCLEACPTGALVQGGQINAQKCIAFLTQTKGFIEEQYREKIGNRVYGCDSCQTACPENKGKNFHFHEEMEPDPEIVKPLLKPMLQISNREFKEKFGPLAGSWRGKKPIQRNAIIALAHFKDETAVDELIEVMNKDSRAVIRGTAAWALGKIGGETAKAVLENARETESDEEVLVEIERGLAFFK

SEQ ID NO: 74820 - protein, 379 aa, Bacillus pseudofirmus
  misc_feature (1)..(379): tr|A0A1Q8TWZ6|A0A1Q8TWZ6_BACPF tRNA epoxyqueuosine(34) reductase QueG OS=Bacillus pseudofirmus OX=79885 GN=BTR 23_18370 PE=4 SV=1
  misc_feature (120)..(120): Xaa can be any naturally occurring amino acid
MAYAQLKDEIIAYSKSIEIDKIGFTSANPFLTLKDRLTTHRELGYESGFEEPDLLKRVDPKYITPEARSIIAIALAYPSKMQNPPKSIKGERRGTFCRASWGEDYHHILKEKLQLLENFXLEKVPNVHMKSMVDTGELSDRAVAERAGIGWSGKNCAIITPEFGSYVYLGEMITSIPFPPDQPLEDQCGSCQRCIDACPTSALVQGGQLNSQKCIAYLTQTKGFLPEQFRTKLGNRLYGCDTCQQVCPENRGKDFRLHGEMEPDPEIAKPLLLPLLSLSNREFKERFGHVSGAWRGKKPIQRNAIIALAHFKEEKAIEPLTELLKKDPRPVIRGTAAWALAIIGGKSVEKQLKYAKDQEKDMDVVGEINRGLEIIAQGP

SEQ ID NO: 74821 - protein, 385 aa, Bacillus pseudofirmus
  misc_feature (1)..(385): tr|D3FV53|D3FV53_BACPE Epoxyqueuosine reductase OS=Baci llus pseudofirmus (strain OF4) OX=398511 GN=queG PE=3 S V=1
MILAQLKEELIAYSKTIGVDKIGFTTADPFLDLKDRLVTQQNLGYQSGFEEPDINKRVHPNQNLEEARSIISIALAYPSKMKDAPKNTKDARRGIFCRASWGQDYHDVLRDRLSKIEKFLEEKVPQAKKVSMVDTGALSDREVARRAGIGWSGKNCAIITPEFGSYVYLGEIITTIPFEPDTPMTDQCGTCNKCVDACPTDALVQGGQLNSQACIAYLTQTKGFLPEPYREKLGNRLYGCDTCQQVCPENKGKDVHHHPEMEPDPEIAKPLLKPLLTISNREFKETFGHVSGSWRGKKPIQRNAIIALAHFKDESALPILAELMKSDPRPVIRGTAAWAIGKISRMNENRRNEEKIKLISAKEREKDDEVLREIDRALEMLENAQ

SEQ ID NO: 74822 - protein, 380 aa, Bacillus pseudomycoides
  misc_feature (1)..(380): tr|A0A2B7E6K3|A0A2B7E6K3_9BACI Epoxyqueuosine reductase OS=Bacillus pseudomycoides OX=64104 GN=queG PE=3 SV=1
MNFEQLKQDVIAYSKTIGIDKIGFASASPFEELKQRLIQQQQLNYQSGFEEPDIEKRTNPQLLLPGAKSIIAIALAYPSKLKNAPLSKRGERRGIFCRASWGQDYHLVLRDRLQKLEAYLIEKLPDIEVKSMVDTGELSDRAVSERAGIGWSGKNCSIITPEFGSYVYLGEMITNVPFPPDQPIEDQCGSCTKCVDICPTGALVQGGQLDSKKCIAFLTQTKGFLPEEYRDKIGNRIYGCDTCQTVCPKNRGKDFHNHPEMEPDPELVKPLLTPLLTISNRDFKEKYGIMSGSWRGKKPLQRNAILALAHFKETTATPDLISVMKDDPRPVIRGTAAWALGKIGGEGVGEAIEKAMEREKDEEVLHEMNRGLEMLAEKKQ

SEQ ID NO: 74823 - protein, 380 aa, Bacillus pseudomycoides
  misc_feature (1)..(380): tr|C3BFM0|C3BFM0_9BACI Epoxyqueuosine reductase OS=Baci llus pseudomycoides DSM 12442 OX=527000 GN=queG PE=3 SV =1
MNFEQLKQDVIAYSKTIGIDKIGFASASPFEELKQRLIQQQQLNYQSGFEEPDIEKRTNPQLLLPGAKSIIAIALAYPSKLKNAPLSKRGERRGIFCRASWGQDYHLVLRDRLQKLEAYLIEKLPDIEVRSMVDTGELSDRAVSERAGIGWSGKNCSIITPEFGSYVYLGEMITNVPFPPDQPIEDQCGSCTKCIDICPTGALVQGGQLDSKKCIAFLTQTKGFLPEEYRDKIGNRIYGCDTCQTVCPKNRGKDFHNHLEMEPDPELVKPLLTPLLTISNRDFKEKYGIMSGSWRGKKPLQRNAILALAHFKETTAIPDLIGVMKEDPRPVIRGTAAWALGKIGGEGVGESIEKAMEREKDEEVLHEMNRGLEMLAEKKQ

SEQ ID NO: 74824 - protein, 382 aa, Bacillus pumilus
  misc_feature (1)..(382): tr|A0A2T0CGH7|A0A2T0CGH7_BACPU tRNA epoxyqueuosine(34) reductase QueG OS=Bacillus pumilus OX=1408 GN=queG PE=4 SV=1
MHVGELKEELIQYAKEIGVDKIRFASADTFDSLKDRLILHESLGYLSGFEEPDIEKRTNPSLLLPKAKSIVAIALAYPSKMKDAPRSTKDARRGIFCRASWGTDYHVVLKKKLDMLEEFLRSKHVDIRTKSMVDTGELSDRAVAERAGIGFSAKNCMIITPEFGSYVYLAEMITNVPFEPDEKIEDQCGTCNKCVDSCPTGALVNPGQLNSQRCISFLTQTKGFLPDEFRSKIGNRLYGCDTCQIVCPINKGKDFHLHPEMEPDPEIAKPLLKPLLTISNREFKEKYGHVSGSWRGKKPIQRNAILALAHFKDTSALPVLIDLMHKDPRPVIRGTAAWAIGKIGDEELLPELEKALERESDEEAKQEIVKGIEFLQTPLNTK

SEQ ID NO: 74825 - protein, 382 aa, Bacillus pumilus
  misc_feature (1)..(382): tr|A8FBB2|A8FBB2_BACP2 Epoxyqueuosine reductase OS=Baci llus pumilus (strain SAFR-032) OX=315750 GN=BPUM_0845 P E=4 SV=2
MHVGELKEELIQYAKEIGVDKIRFASADTFDSLKDRLILHESLGYLSGFEEPDIEKRTNPSLLLPKAKSIVAIALAYPSKMKDAPRSTKDARRGIFCRASWGTDYHVVLKKKLDMLEEFLRSKHVDIRTKSMVDTGELSDRAVAERAGIGFSAKNCMIITPEFGSYVYLAEMITNVPFEPDEKIEDQCGTCNKCVDSCPTGALVNPGQLNSQRCISFLTQTKGFLPDEFRSKIGNRLYGCDTCQIVCPINKGKDFHLHPEMEPDPEIAKPLLKPLLTISNREFKEKYGHVSGSWRGKKPIQRNAILALAHFKDTSALPVLIELMHKDPRPVIRGTAAWAIGKIGDDQQLPELEKALERESDEEAKEEIVKGIELLQTPLNTK

SEQ ID NO: 74826 - protein, 383 aa, Bacillus safensis
  misc_feature (1)..(383): tr|A0A5C0WCQ6|A0A5C0WCQ6_9BACI Epoxyqueuosine reductase OS=Bacillus safensis OX=561879 GN=queG PE=4 SV=1
MIHVGELKEELIQYAKEIGVDKIRFASADTFDSLKDRLILHESLGYLSGFEEPDIEKRTNPSLLLPKAKSIVAIALAYPSKMKDAPRSTKDARRGIFCRASWGTDYHVVLKKKLDMLEEFLRSKHVDIRTKSMVDTGELSDRAVAERAGIGFSAKNCMIITPEFGSYVYLAEMITNVPFEPDEKIEDQCGTCNKCVDSCPTGALVNPGQLNSQRCISFLTQTKGFLPDEFRSKIGNRLYGCDTCQTVCPINKGKDFHLHPEMEPDPEIAKPLLKPLLTISNREFKEKYGHVSGSWRGKKPIQRNAILALAHFKDTSALPVLIELMHKDPRPVIRGTAAWAIGKIGDDQQLPELEKALERESDEEAKEEIVKGIELLQTPLNTK

SEQ ID NO: 74827 - protein, 383 aa, Bacillus safensis
  misc_feature (1)..(383): tr|A0A561RUT9|A0A561RUT9_9BACI Epoxyqueuosine reductase OS=Bacillus safensis OX=561879 GN=FHW57_2996 PE=4 SV=1
MIHVGELKEELIQYAKEIGVDKIRFASADTFDSLKDRLILHESLGYLSGFEEPDIEKRTNPSLLLPKAKSIVAIALAYPSKMKDAPRSTKDARRGIFCRASWGTDYHVVLKKKLDMLEEFLRSKHVDIRTKSMVDTGELSDRAVAERAGIGFSAKNCMIITPEFGSYVYLAEMITNVPFEPDEKIEDQCGTCNKCVDSCPTGALVNPGQLNSQRCISFLTQTKGFLPDEFRSKIGNRLYGCDTCQIVCPINKGKDFHLHPEMEPDPEIAKPLLKPLLTISNREFKEKYGHVSGSWRGKKPIQRNAILALAHFKDTSALPVLIELMHKDPRPVIRGTAAWAIGKIGDDQQLPELENALERESDEEAKEEIVKGIELLQTPLNTK

SEQ ID NO: 74828 - protein, 382 aa, Bacillus salacetis
  misc_feature (1)..(382): tr|A0A3A1QQZ6|A0A3A1QQZ6_9BACI Epoxyqueuosine reductase OS=Bacillus salacetis OX=2315464 GN=queG PE=3 SV=1
MDFDKLKQDIIEYSKEIGIDKIGFTTAGTFSEMKNRLLRQEMLGYQSGFEEKDIEKRVDPSLIFDGPKSIIAIALAYPSRMKNAPQSKRGERRGIFCRASWGTDYHHVLRDRLSKLEDYIKSRVPQAQFKSMVDTGELVDRAVAKRAGIGWSGKNCAVITPEFGSYVYLGEMITNLPFAPDEPMEDQCGTCNKCVDVCPTGALVEGGQLNAQRCIAFLTQTKGFLPDEFRNKLGNRLYGCDTCQTVCPENKGKDFHNHWEMEPDPEIAKPLLKPLLTISNKEFKEKYGHVSGSWRGKKPIQRNAIIALAHYKDETAIPDLIAVMQNDVRPVIRGTAAWALGKIGGEEAGKALQKILAQEKDEEVITEIHKGLEILSGDLKQL

SEQ ID NO: 74829 - protein, 378 aa, Bacillus salarius
  misc_feature (1)..(378): tr|A0A428MWI2|A0A428MWI2_9BACI Epoxyqueuosine reductase OS=Bacillus salarius OX=284579 GN=queG PE=3 SV=1
MTGEELKEKIIAYSKEIGIDKIGFTSTDPFLTLKDRLIEQQRLNYQSGFEEPDIDKRVTPKRLLPEAKTIIAIALAYPSKLENAPKSTKGDRRGLFCRASWGEDYHRVLQDRLDKLEAYIAELVPEARCQSMVDTGELSDRAVAERAGIGWSGKNCAIITPEFGSYVYLGEMITTLSLEPDNEITDQCGTCNKCVDACPTDALVQGGQLDANKCIAFLTQTKDFLPERYRKKIGNRLYGCDTCQTVCPENKGMDHHNHEEFEPDPEVVKPQLLPLLTISNREFKEKYGPIAGSWRGKKPIQRNAVIALGTYKAEEGVETLVYLLNNDPRPVIRGSAAWSLGQIATDEAVQALEHAHRQETSEKVIEEIDYMLEEFSVK

SEQ ID NO: 74830 - protein, 378 aa, Bacillus salarius
  misc_feature (1)..(378): tr|A0A3R9P7B8|A0A3R9P7B8_9BACI Epoxyqueuosine reductase OS=Bacillus salarius OX=284579 GN=queG PE=3 SV=1
MTGAELKEKIIAYSKEIGIDKIGFASTDPFLTLKDRLIEQQRLNYQSGFEEPDIDKRVTPTRLLPEAKTIIAIALAYPSKLENAPKSVKGDRRGLFCRASWGEDYHRVLRDRLDKLEAYIAEIAPEARCQSMVDTGELSDRAVAERAGIGWSGKNCAIITPEFGSYVYLGEMITTLSLEPDNEITDQCGTCNKCVDACPTGALVQGGQLDSNKCIAFLTQTKDFLPERYRKKIGNRLYGCDTCQTVCPENKGMDHHNHEEFEPDPEVVKPQLLPLLTLSNREFKEKFGPIAGSWRGKKPIQRNAVLALGTYKAKEGVKTLIHLLKNDPRPVIRGSSAWSLGQIGTEEAVHALEEANTHETSEKVLEEISKVLDPISVK

SEQ ID NO: 74831 - protein, 380 aa, Bacillus salsus
  misc_feature (1)..(380): tr|A0A1H0VRX5|A0A1H0VRX5_9BACI Epoxyqueuosine reductase OS=Bacillus salsus OX=930152 GN=SAMN05216565_107163 PE =4 SV=1
MNYQQLKEEIIAYSKTIGIDKIGFTSATVFGGLKARLITQQQLGYQSGFEESDVEKRTNPDLLLSGAQSIIAIALAYPSKLKNAPRSTKEERRGIFCRASWGQDYHHILRDRLTKLEAFIQEKVPEAKMKSMVDTGELSDRAVAERAGIGWSGKNCAIITPEFGSYVYLGEMVINIPFEPDTPMEDRCGSCNKCVEVCPTNALVQGGQLDSTKCIAFLTQTKGFLADEYRTKIGNRLYGCDTCQTVCPENKGKDFHLHEEMEPDPEIVKPVLKGLLQISNKEFKEKYGVISGSWRGKKPIQRNAIIALAHFKDETAIPDLQTVLENDPRPVIRGTAAWALGKIGNKEAIPILEKAASREKDEEVQEEINKGMAMLLGIKK

SEQ ID NO: 74832 - protein, 385 aa, Bacillus selenatarsenatis
  misc_feature (1)..(385): tr|A0A0A8XEJ6|A0A0A8XEJ6_9BACI Iron-sulfur cluster-bind ing protein OS=Bacillus selenatarsenatis SF-1 OX=132160 6 GN=SAMD00020551_4779 PE=4 SV=1
MDTASLKQDIIEYSKTIGIDKIGFAAPSTFEEMKVRLYRQQELQYQSGFEEKDIEKRTEPSLIFDRPKSIISIALAYPSKMKTKVVSKKGERRGIFCRASWGTDYHKVLRDRLKKLEEYIASKVPEARFKSMVDTGELVDRAVAERAGIGWSGKNCSIITPEFGSYVYLGEMITSIPFEPDTPMEDRCGSCNKCVEVCPTGALVQGGQLDAQKCIAFVTQTKGFLADEFREKLGNRLYGCDTCQTVCPENKGKDFHFHEEMEPDPEIAKPLLKPLLTISNRDFKETFGHVSGSWRGKKPIQRNAIIALAHYKDDTAIPELIKVMQDDPRPVLRGTAAWALGKIGSSEALDALKHASAVEKDEEVLKEISKGLEFFKDNSESNITV

SEQ ID NO: 74833 - protein, 397 aa, Bacillus selenitireducens
  misc_feature (1)..(397): tr|D6XXM2|D6XXM2_BACIE Iron-sulfur cluster binding prot ein OS=Bacillus selenitireducens (strain ATCC 700615 / DSM 15326 / MLS10) OX=439292 GN=Bsel_2564 PE=4 SV=1
MNRQMLKQRMIEYSKEIGIDKIGFASADPFVTLKERLRRSSDAGYASGFEEGTLEERTEPERLLPAAKTIVSIAMAYPSKMKNPPRSVKGERRGIFCRASWGEDYHHVLRRKLQELERFVQACDPDIRTALMVDTGALSDRAVAERAGIGWSAKNCAVITPEFGSYVYLGEMIMTVDLEPDQPLEDQCGSCTACIDACPTGALVQGGQLNAQRCIAYLTQTKGVLPKEFRKKIGNRLYGCDTCQTVCPENKGKHTDHHKEMQPDPEKVKPKLIPLLQMSNRQFKETYGSMAGSWRGKKPIQRNALIGLANFKDESALPEIEKVLHGDPRPEIRATAAWALAEIAGASARERLINQLSHDESEIVQEEIHDIMKHLPTANRLVKQEHEKGGLASDAEK

SEQ ID NO: 74834 - protein, 376 aa, Bacillus shackletonii
  misc_feature (1)..(376): tr|A0A0Q3X212|A0A0Q3X212_9BACI Epoxyqueuosine reductase OS=Bacillus shackletonii OX=157838 GN=AN964_18005 PE=4 SV=1
MDFTKFKKELIQYSKSIGIDKIGFTTADPFTEMKNRLIKQQELQYQSGFEEKDIEKRTNPSLIFDKPQSIISIALAYPSKMKDAPKGKAGERRGIFAKASWGEDYHHILRRKLTELEAFIMDYYPEARCKSMVDTGELVDRAVAQRAGIGWSGKNCSIITPEFGSYVYLGEMITNIPFEPDAPMEDQCGTCTKCLDACPTGALVQGGQLNAQRCIAFLTQTKGFLAEEFRVKLGNRLYGCDTCQSVCPKNKGIDFHFHEEMEPDPNLAKPELTPLLSISNREFNESFGKMSGSWRGKKPIQRNALVALAHFKETSAVPEIITVLKNDPRPVLRGTAAWALGKIGGEEAKNALLTAKEKESDEEVLKEVEDGLSKLG

SEQ ID NO: 74835 - protein, 386 aa, Bacillus siamensis
  misc_feature (1)..(386): tr|A0A268DWG6|A0A268DWG6_9BACI Epoxyqueuosine reductase OS=Bacillus siamensis OX=659243 GN=queG PE=3 SV=1
MNIHKLKEELIEYAKSIGVDKIGFTTADTFDSLRDRLILQESLGYLSGFEEPDIEKRVTPSLLLPKAKSIVAIALAYPSKMKDAPRSTRDGRRGIFCRASWGKDYHDVLREKLDLLENFLQSKHEDIRTKSMVDTGELSDRAVAERAGIGFSAKNCMITTPEYGSYVYLAEMITNLPFEPDVPIEDMCGSCTKCLDACPTGALVNPGQLNAQRCISFLTQTKGFLPDEFRTKIGNRLYGCDTCQTVCPINKGKDFHLHPQMEPDPEIAKPLLKPLLTISNREFKEKFGHVSGSWRGKKPIQRNAILALAHFKDASSLPELTALMHQDPRPVIRGTAAWAIGKIGDPEYAKELEKALHKEQDEEAIQEIEKGLELLSVSDKTKTGRS

SEQ ID NO: 74836 - protein, 386 aa, Bacillus siamensis
  misc_feature (1)..(386): tr|A0A2K9KE46|A0A2K9KE46_9BACI Epoxyqueuosine reductase OS=Bacillus siamensis OX=659243 GN=queG PE=3 SV=1
MNIHKLKEELIEYAKSIGVDKIGFTTADTFDSLRDRLILQESLGYLSGFEEPDIEKRVTPSLLLPKAKSIVAIALAYPSKMKDAPRSTRDGRRGIFCRASWGKDYHDVLREKLDLLENFLQSKHEDIRTKSMVDTGELSDRAVAERAGIGFSAKNCMITTPEYGSYVYLAEMITNLPFEPDVPIEDMCGSCTKCLDACPTGALVNPGQLNAQRCISFLTQTKGFLPDEFRTKIGNRLYGCDTCQTVCPINKGKDFHLHPQMEPDPEIAKPLLKPLLTISNREFKEKFGHVSGSWRGKKPIQRNAILALAHFKDASSLPELTALMHQDPRPVIRGTAAWAIGKIGDPAYAKELEKALHKEQDEEAIQEIEKGLELLSVSDKTKTGPS

SEQ ID NO: 74837 - protein, 379 aa, Bacillus simplex
  misc_feature (1)..(379): tr|A0A270AQR5|A0A270AQR5_9BACI tRNA epoxyqueuosine(34) reductase QueG OS=Bacillus simplex OX=1478 GN=B8W99_048 95 PE=4 SV=1
MDMNSFKQEVILYSKEIGIDKIGFTSATAFTELKGRLIRQQELDYQSGFEEADIEKRVRPELIFDKPQSIISIALAYPSKLKDAPQSTKSERRGIFCRASWGTDYHTVLRNKLQLLENFIKDKVPGAMMKSMVDTGELSDRAVAERAGIGWSAKNSMIITPEFGSYVYLGDMITNLPFEPDQPMEDQCGTCNKCVDVCPTGALVQGGQLNSKRCIAFLTQTKGFLPDEFRTKIGNRLYGCDTCQTVCPKNKGMDFHFHEEMEPDPELAKPLLKPLLTISNRDFKETYGHVSGSWRGKKPIQRNAILALAHFKDKTALPQLIQVMKDDPRPVIRGTAAWAVGKIGRQQAVSILEEARMKEKDEEVLAEIEKGLQFTLETK

SEQ ID NO: 74838 - protein, 379 aa, Bacillus simplex
  misc_feature (1)..(379): tr|A0A223EF69|A0A223EF69_9BACI tRNA epoxyqueuosine(34) reductase QueG OS=Bacillus simplex NBRC 15720 = DSM 132 1 OX=1349754 GN=BS1321_07900 PE=4 SV=1
MDMNTFKQEVILYSKEIGIDKIGFTSATAFTELKGRLIRQQELDYQSGFEEADIEKRVMPELIFDKPQSIISIALAYPSKLKDAPQSTKSERRGIFCRASWGTDYHTVLRNKLQLLEDFIKDKVPGAVTKSMVDTGELSDRAVAERAGIGWSAKNSMIITPEFGSYVYLGDMITNLPFEPDQPMEDQCGTCNKCVDVCPTGALVQGGQLNSKRCIAFLTQTKGFLPDEFRTKIGNRLYGCDTCQTVCPKNKGMDFHFHEEMEPDPELAKPLLKPLLTISNRDFKETYGHVSGSWRGKKPIQRNAILALAHFKDETALPQLIQVMKDDPRPVIRGTAAWAVGKIGRKQAVSILEEARMKETDEEVLAEIEKGLQFTLETK

SEQ ID NO: 74839 - protein, 377 aa, Bacillus smithii
  misc_feature (1)..(377): tr|A0A0H4NWP5|A0A0H4NWP5_9BACI Epoxyqueuosine reductase OS=Bacillus smithii OX=1479 GN=queG PE=3 SV=1
MDYNQLKQDIIAYSKQIGIDKIGFASAEPFTELKNRLIRQQELQFQSGFEEPDIDKRTNPALIFDQPRSIIAIALAYPSKMKETPKGKKGLRRGTFCKASWGLDYHVILRNRLKQLEEFIRSKVPEARMKSMVDTGELSDRAVAERAGIGWSGKNCSIITPEFGSYVYLGEMITNLPFEPDQPLESRCGTCTKCLDACPTGALVQGGQLNAKKCIAFLTQTKDFLPDEYRDKIGNRLYGCDTCQTVCPENKGIDFHLHEEMEPDPETAKPLLEPLLDISNKEFKEKFGMVSGSWRGKKPIQRNAIIALAHFKEETAIPSLVEVLQKDVRPVIRGTAAWAIGKIGGDQAKSALLEAKQTETDPDVLKEIEKGLQYFSS

SEQ ID NO: 74840 - protein, 377 aa, Bacillus smithii
  misc_feature (1)..(377): tr|G9QJ17|G9QJ17_9BACI Putative iron-sulfur cluster-bin ding protein OS=Bacillus smithii 7_3_47FAA OX=665952 GN =HMPREF1015_02178 PE=4 SV=1
MDYNQLKQDIIAYSKQIGIDKIGFASAEPFTELKNRLIRQQELQFQSGFEEPDIDKRTNPALIFDQPRSIIAIALAYPSKMKETPKGKKGLRRGTFCKASWGLDYHVILRNRLKQLEEFIRSKVPEARMKSMVDTGELSDRAVAERAGIGWSGKNCSIITPEFGSYVYLGEMITNLPFEPDLPLESRCGTCTKCLDACPTGALVQGGQLNAKKCIAFLTQTKDFLPDEFRDKIGNRLYGCDTCQTVCPENKGIDFHLHEEMEPDPETAKPLLEPLLDISNKEFKEKFGMVSGSWRGKKPIQRNAIIALAHFKEETAIPSLVEVLQKDVRPVIRGTAAWAIGKIGGDQAKSALLEAKQTETDPDVLKEIEKGLQYFSS

SEQ ID NO: 74841 - protein, 381 aa, Bacillus solani
  misc_feature (1)..(381): tr|A0A0Q3QKM2|A0A0Q3QKM2_9BACI Epoxyqueuosine reductase OS=Bacillus solani OX=1637975 GN=AN957_07810 PE=4 SV=1
MDFSQFKKEIIEYSKTIGIDKIGFTTASTFDELRNRLIRQQELQYQSGFEEKDIEKRVNPALLMDSPRSIIAIALAYPSKMNERVTSKKGERRGIFSRASWGEDYHLILRDRLKKLEAYIIERVPEAKCKSMVDTGELVDRAVAERAGIGWSGKNCSIITPEFGSYVYLGEMITTIPFEPDQPIEDQCGTCNKCLEACPTGALVQGGQINAQKCIAFLTQTKGFIEEQYREKIGNRVYGCDSCQTACPENKGKNFHFHEEMEPDPEIVKPLLKPILQISNREFKEKFGPLAGSWRGKKPIQRNAIIALAHFKDETSVEELIEVMMKDSRAVIRGTAAWALGKIGGEIAKLALEKAREAESDEEVLVEIERGLAFFKNDSRI

SEQ ID NO: 74842 - protein, 383 aa, Bacillus solimangrovi
  misc_feature (1)..(383): tr|A0A1E5LCF8|A0A1E5LCF8_9BACI tRNA epoxyqueuosine(34) reductase QueG OS=Bacillus solimangrovi OX=1305675 GN=B FG57_18100 PE=4 SV=1
MTNAQLKIDLIAYSKSIGIDKIGFASTDSFLELKERLKLQQSLQYDSGFEEPNIEKRTEPNMIMPQARSIVSIALAYPSKMKNAPRSTRKDPRGIFCRASWGTDYHHILREKLAKLEQFLQERVADVVCKSMVDTGELSDRAVAERAGIGWSAKNTAIITPEFGSYVYLGEMITTIPFEPDTPIEEQCGTCTKCIDACPTGAIVQGGQLNAQRCIAFLTQTKGFLAEEFRVKLGNRLYGCDTCQTVCPKNKGKDFHFHPEMEPDPEIVKPRLQPLLTISNREFKEKFGAISGSWRGKKPIQRNAIIAIAHYKDQSALPLLEKLLVEDPRPVIRGTAAWAIGKIGGHEVKEALNQALEKEQDQEVCDEIQKAITRIPYYHTNES

SEQ ID NO: 74843 - protein, 382 aa, Bacillus sonorensis
  misc_feature (1)..(382): tr|M5P751|M5P751_9BACI Epoxyqueuosine reductase OS=Baci llus sonorensis L12 OX=1274524 GN=queG PE=3 SV=1
MDMKQLKQDVIEFAQQIGIDKIRFASADTFETLKDRLIENRALGYESGFEEPDIEKRTNPQLLLPKAKSIIAIALAYPSKMKNAPRSVKGERRGIFCRASWGKDYHHVLREKLDQLEEFLKSQHEDVRTKSMVDTGELSDRAVAERAGIGWSGKNCMIITPEFGSYVYLAEMITNIPFEPDERIEDQCGSCNKCIEACPTGALVNPGQLNSQRCIAFQTQTKGFLPDEFRTKIGNRIYGCDTCQMVCPKNKGVDFHLHPEMEPDPEIAKPLLKPLLTMSNREFKEKFGHVAGSWRGKKPIQRNAIIALAHFKETSALPELVSLMHQDPRPVIRGTAAWAIGKIGETDMLEELETAYSREEDEEAKAEIQKGIRLLKETAMTK

SEQ ID NO: 74844 - protein, 379 aa, [Bacillus] sp.
  misc_feature (1)..(379): tr|A0A150YIF8|A0A150YIF8_9BACI Epoxyqueuosine reductase OS=[Bacillus] sp. KCTC 13219 OX=1811976 GN=A0U40_07195 PE=4 SV=1
MNVTDLQTELILYAKSIGVDKIGFTTASPFLELKNRLRRQQQLGYQSGFEEQDIDKRTEPLRLLDQAESIIAIALAYPSKMKDAPLGKKGERRGIFCRASWGIDYHVAVRERLQLIEEWLRKHVPDVKIKSMVDTGELVDRAVAERAGIGWSGKNCSIITPEFGSYVYLGELITNIPFAPDQPMEDECGECRLCIDVCPTGAIVEGGQLNAQRCIAFLTQTKGFLPDEFRGKIGNRLYGCDTCQTVCPKNKGKANWIHEEFMPDPELAKPLLEPLLTISNKEFKARFGHVSGSWRGKKPIQRNSILALAHFKEQQAVPELLQVMKKDERPVIRGTAAWALGKIGGQGIQEELLAAKEREQDAEVLAEIDKGLALLTEID

SEQ ID NO: 74845 - protein, 263 aa, Bacillus sp.
  misc_feature (1)..(263): tr|A0A3D5TYR4|A0A3D5TYR4_BACSP tRNA epoxyqueuosine(34) reductase QueG (Fragment) OS=Bacillus sp. OX=1409 GN=qu eG PE=4 SV=1
MDFEQLKQDVIAYSKTIGIDKIGFASASPFEELKQRLIQQQQLNYQSGFEEPDIEKRTNPQLLLPGAKSIIAIALAYPSKLKNAPLSKRGERRGIFCRASWGQDYHLVLRDRLQKLEAYLIEKLPDIEVKSMVDTGELSDRAVSERAGIGWSGKNCSIITPEFGSYVYLGEMITNVPFPPDKPIEDQCGGCTKCIDICPTGALIQGGQLDSKKCIAFLTQTKGFLPEEYRDKIGNRIYGCDTCQTVCPKNKGMDFHNHPEMEP

SEQ ID NO: 74846 - protein, 406 aa, Bacillus sp.
  misc_feature (1)..(406): tr|A0A2W0HZH6|A0A2W0HZH6_9BACI Epoxyqueuosine reductase OS=Bacillus sp. YSP-3 OX=2045244 GN=queG PE=3 SV=1
MLEKQRVHRVLITILYPNERKGVVFVTGAQLKEEIAAYSKSIGVDKVGFASVDPFLTLKDRLVRHRELGYESGFEEQDLEKRTRPELLLPEAKTIIAIAIAYPSKMKDAPVSKKGERRGIFCRASWGEDYHHVLRRKLRQIEAFIEERVPGSRSVSMVDTGELSDRAVAERAGIGWSGKNCAIISHEFGSYMYLGEMITTVALEPDQPIEDQCGTCNKCVDACPTGALVQGGQLDSGKCIAYLTQTKDFLPDRFRKKLGNRLYGCDTCQVVCPENKGKDFHHHEELEPDPEVVKPKLEPLLTITNREFKDTYGRIAGSWRGKKPIQRNAIIALAHFKEESALPVLYDLMLEDPRPVIRGTAAWAAGVIGGGEESESVLKQAKLRETDPQVLAEIDKGLEILLNKEI

SEQ ID NO: 74847 - protein, 380 aa, Bacillus sporothermodurans
  misc_feature (1)..(380): tr|A0A150KSX7|A0A150KSX7_9BACI Epoxyqueuosine reductase OS=Bacillus sporothermodurans OX=46224 GN=queG PE=3 SV =1
MNVKQLKDEIITYSKEIGIDKIGFTTADPFTEMKNRLIRQQELGYQSGFEEKDIEKRVDPSLIFEEPKSIIAIALAYPSRMNDAPKGKKGERRGIFCRASWGVDYHTILRDKLRQLEQFIAEKVPEARFKSMVDTGELVDRAVAERAGIGWSGKNCSIITPEFGSYVYLGEMITNLPFEPDEPIEDQCGSCTKCLDACPTGALVQGGQLNAQRCIAFLTQTKGFLEDEFRVELGNRLYGCDTCQTSCPKNKGMNFHFHEEMEPNPEIAKPKLTPLLTISNREFKEDFGPVSGSWRGKKPIQRNAIIALAHFKEESAVPDLIKVLTDDPRPVLRGTAAWALGKIGGTDAKESLHKAEKTERDPEVLKEIEKGISLCSMKAK

SEQ ID NO: 74848 - protein, 380 aa, Bacillus sporothermodurans
  misc_feature (1)..(380): tr|A0A2T6EGJ9|A0A2T6EGJ9_9BACI Epoxyqueuosine reductase OS=Bacillus sporothermodurans OX=46224 GN=queG PE=3 SV =1
MNVKQLKDEIISYSKEIGIDKIGFTTADPFTEMKNRLIRQQELGYQSGFEEKDIEKRVDPSLIFEQPKSIIAIALAYPSRMNDAPKGKKGERRGIFCRASWGVDYHTILRDKLRQLEQFIAEKVPEARFKSMVDTGELVDRAVAERAGIGWSGKNCSIITPEFGSYVYLGEMITNLPFEPDEPIEDQCGSCTKCLDACPTGALVQGGQLNAQRCIAFLTQTKGFLEDEFRVELGNRLYGCDTCQTSCPKNKGMNFHFHEEMEPNPEIAKPKLTPLLTISNREFKEDFGPVSGSWRGKKPIQRNAIIALAHFKEESAVPDLIKVLTDDPRPVLRGTAAWALGKIGGTDAKESLHKAEKTERDPEVLKEIEKGISLCSMKAK

SEQ ID NO: 74849 - protein, 382 aa, Bacillus stratosphericus
  misc_feature (1)..(382): tr|A0A4Y9JWB0|A0A4Y9JWB0_9BACI tRNA epoxyqueuosine(34) reductase QueG OS=Bacillus stratosphericus OX=293386 GN =queG PE=4 SV=1
MHVGELKEELIQYAKEIGVDKIRFASADTFDSLKDRLILHESLGYLSGFEEPDIEKRTNPSLLLPKAKSIVAIALAYPSKMKDAPRSTKGARRGIFCRASWGTDYHVVLKKKLDMLEEFLRSKHVDIRTKSMVDTGELSDRAVAERAGIGFSAKNCMIITPEFGSYVYLAEMITNVPFEPDEKIEDQCGTCNKCVDSCPTGALVNPGQLNSQRCISFLTQTKGFLPDEFRSKIGNRLYGCDTCQTVCPINKGKDFHLHPEMEPDPEIAKPLLKPLLTISNREFKEKYGHVSGSWRGKKPIQRNAILALAHFKDTSALPVLIELMHKDPRPVIRGTAAWAIGKIGDDQQLPELEKALERESDEEAKEEIVKGIELLQTPLNTK

SEQ ID NO: 74850 - protein, 393 aa, Bacillus stratosphericus
  misc_feature (1)..(393): tr|M5RKT5|M5RKT5_9BACI Iron-sulfur containing oxidoredu ctase subunit OS=Bacillus stratosphericus LAMA 585 OX=1 236481 GN=C883_505 PE=4 SV=1
MKKQRKEVCKVIHVGQLKEELIQYANEIGVDKIRFASADTFDSLKDRLILHESLGYLSGFEEPDIEKRTNPALLLPKAKSIVAIALAYPSKMKDAPRSTKDARRGIFCRASWGTDYHVVLKKKLDMLEEFLRSKHEDIRTKSMVDTGELSDRAVAERAGIGFSAKNCMIITPEFGSYVYLAEMITNVPFEPDEKIEDQCGTCNKCVDSCPTGALVNPGQLNSQRCISFLTQTKGFLPDEFRSKIGNRLYGCDTCQTVCPINKGKDFHLHPEMEPDPEIAKPLLKPLLTISNREFKEKYGHVSGSWRGKKPIQRNAILALAHFKDTSALPDLVDLMHKDPRPVIRGTAAWAIGKIGDGQQLSELEKALERESDEEAKQEIIKGIELLQTPLNTK

SEQ ID NO: 74851 - protein, 381 aa, Bacillus subterraneus
  misc_feature (1)..(381): tr|A0A0D6ZD83|A0A0D6ZD83_9BACI Iron-sulfur cluster-bind ing protein OS=Bacillus subterraneus OX=285983 GN=UB32_ 05090 PE=4 SV=1
MDTASLKKEIIAYSKTIGIDKIGFASPSTFEEMKVRLYRQQELRYQSGFEEKDIEKRTEPSLIFDKPKSIISIALAYPSKMGPKVISKKGERRGIFSRASWGTDYHTVLRDRLKKLEEYIALKMPEARFKSMVDTGELVDRAVAERAGIGWSGKNCSIITPEFGSYVYLGEMITNIPFEPDHPMEDRCGSCNKCVDVCPTGALVQGGQLNAQKCIAFVTQTKGFLAEEFREKLGNRLYGCDTCQTVCPENKGKDFHFHTEMEPNPEIAKPLLKPLLSISNREFKEKFGHVSGSWRGKKPIQRNAIIALAHYRDETAIPELITVMKDDPRPVLRGTAAWALGKIGGQDALEALQHAFSVEKDEEVLQEIRKGLYFFAEKKQG

SEQ ID NO: 74852 - protein, 385 aa, Bacillus subterraneus
  misc_feature (1)..(385): tr|A0A3R9ED84|A0A3R9ED84_9BACI tRNA epoxyqueuosine(34) reductase QueG OS=Bacillus subterraneus OX=285983 GN=qu eG PE=4 SV=1
MDMAALKQDIIAYSKTIGIDKIGFAAPDAFEEMKVRLYRQQELNYQSGFEEKDIEKRTEPSLIFDRPKSIISIALAYPSKMKTSVVSKKGERRGIFCRASWGTDYHAVLRDRLRKLEEYIAGKVSGAIFKSMVDTGELVDRAVAERAGIGWSGKNCSIITPEFGSYVYLGEMITNIPFEPDTPMEDRCGSCNKCVDVCPTGALVQGGQLDAQKCIAFVTQTKGFLADEFRDKLGNRLYGCDTCQTICPENKGKDFHLHAEMEPDPEIAKPLLKPLLTISNRDFKERFGHVSGSWRGKKPIQRNAIIALAHYKDDTAIPELITILKEDPRPVLRGTTAWALGKIGGRDALEALNRASKVEKDAEVLEEISKGLEFFKNDSETNIHV

SEQ ID NO: 74853 - protein, 386 aa, Bacillus subtilis
  misc_feature (1)..(386): tr|A0A0A0TN50|A0A0A0TN50_BACIU Epoxyqueuosine reductase OS=Bacillus subtilis OX=1423 GN=queG PE=3 SV=1
MNIHKLKEELIEYAKSIGVDKIGFTTADTFDSLRDRLILQESLGYLSGFEEPDIEKRVTPSLLLPKAKSIVAIALAYPSKMKDAPRSTRDGRRGIFCRASWGKDYHDVLREKLDLLENFLQSKHEDIRTKSMVDTGELSDRAVAERAGIGFSAKNCMITTPEYGSYVYLAEMITNLPFEPDVPIEDMCGSCTKCLDACPTGALVNPGQLNAQRCISFLTQTKGFLPDEFRTKIGNRLYGCDTCQTVCPINKGKDFHLHPQMEPDPEIAKPLLKPLLTISNREFKEKFGHVSGSWRGKKPIQRNAILALAHFKDASSLPELTALMHQDPRPVIRGTAAWAIGKIGDQEYAAELEKALYKEQDEEAIQEIKKGLELLSVSDKTKTGQS

SEQ ID NO: 74854 - protein, 407 aa, Bacillus subtilis
  misc_feature (1)..(407): tr|M4KT49|M4KT49_BACIU 4Fe-4S ferredoxin-type domain-co ntaining protein OS=Bacillus subtilis XF-1 OX=1233100 G N=C663_0916 PE=4 SV=1
MISTYYKRCIVLSQRKEAVQNMNVYQLKEELIEYAKSIGVDKIGFTTADTFDSLKDRLILQESLGYLSGFEEPDIEKRVTPKLLLPKAKSIVAIALAYPSRMKDAPRSTRTERRGIFCRASWGKDYHDVLREKLDLLEDFLKSKHEDIRTKSMVDTGELSDRAVAERAGIGFSAKNCMITTPEYGSYVYLAEMITNIPFEPDVPIEDMCGSCTKCLDACPTGALVNPGQLNAQRCISFLTQTKGFLPDEFRTKIGNRLYGCDTCQTVCPLNKGKDFQLHPEMEPDPEIAKPLLKPLLTISNREFKEKFGHVSGSWRGKKPIQRNAILALAHFKDASALPELAELMHKDPRPVIRGTAAWAIGKIGDPAYAEELEKALEKEKDEEAKLEIEKGIELLKASGMTKQGLS

SEQ ID NO: 74855 - protein, 382 aa, Bacillus swezeyi
  misc_feature (1)..(382): tr|A0A5D4QLG9|A0A5D4QLG9_9BACI Epoxyqueuosine reductase OS=Bacillus swezeyi OX=1925020 GN=queG PE=3 SV=1
MDVKKLKRDVVEYAQQIGIDKIRFASADTFETLKERLIENRALGYESGFEEPDIEKRTNPDLLLPKAKSIIAIALAYPSKMKDAPRSTKGERRGIFCRASWGKDYHHVLREKLDQLEEFLTSQRSDVRTKSMVDTGELSDRAVAERAGIGWSGKNCMIITPEFGSYVYLAEMITNIPFEPDERVEDQCGSCNKCIDACPTGALVNPGQLNSQRCIAFQTQTKGFLPDEFRTKIGNRIYGCDTCQMVCPINKGKDFHLHPEMEPDPEIAKPLLKPLLTMKNREFKEKFGHVAGSWRGKKPIQRNAIIALAHFKETSALPELVSLLHKDPRPVIRGTAAWAIGKIGEADVKNELEKALIREQDEEAKAEIEKGIQLLKETSATN

SEQ ID NO: 74856 - protein, 382 aa, Bacillus swezeyi
  misc_feature (1)..(382): tr|A0A1R1QNK9|A0A1R1QNK9_9BACI Epoxyqueuosine reductase OS=Bacillus swezeyi OX=1925020 GN=queG PE=3 SV=1
MDVKKLKQDVIEYAQQIGIDKIRFASADTFETLKERLIENRTLGYESGFEEPDIEKRTNPDLLLPKAKSIIAIALAYPSKMKDAPRSTKGERRGIFCRASWGKDYHHVLREKLDQLEEFLTSQRSDVRTKSMVDTGELSDRAVAERAGIGWSGKNCMIITPEFGSYVYLAEMITNIPFEPDERVEDQCGSCNKCIDACPTGALVNPGQLNSQRCIAFQTQTKGFLPDEFRTKIGNRIYGCDTCQMVCPINKGKDFHLHPEMEPDPEIAKPLLKPLLTMKNREFKEKFGHVAGSWRGKKPIQRNAIIALAHFKETSALPELVSLLHKDPRPVIRGTAAWAIGKIGEADVKDELEKALIREQDEEAKAEIEKGIQLLKETSATN

SEQ ID NO: 74857 - protein, 381 aa, Bacillus taeanensis
  misc_feature (1)..(381): tr|A0A366XZN0|A0A366XZN0_9BACI tRNA epoxyqueuosine(34) reductase QueG OS=Bacillus taeanensis OX=273032 GN=queG PE=4 SV=1
MNVDKLKEEIIAYSKTIGIDKIGFATAEPFIELKERLKRQQQLNYQSGFEHSNIEERTHPELLMPGAKSFIAIAVAYPSKIKNPPKNEKENRRGIFARASWGRDYHDVLRDRLNKLASFIIERVPRADIQSMVDTGALSDRAVAERAGIGFSGKNCAIITPEFGSYVYLGEMVTNIPFSPDQPIEDSCGSCNLCIEACPTGALVQGGQLDSNKCLSFLTQTKDFLSLEYRDKIGNRLYGMDTCQIVCPRNKGIDFHLHHELEPDPEIAMPKLKPLLKMSNREFKEKFGHISGSWRGKKPIQRNAILALAHFKDKTAVGDLIQLMKEDPRPVIRGTAAWALGKIGDERALKSLKEAKEKEKDEKVLIEIDTGLKMLNNQPIS

SEQ ID NO: 74858 - protein, 386 aa, Bacillus tequilensis
  misc_feature (1)..(386): tr|A0A2X0YFQ3|A0A2X0YFQ3_9BACI Epoxyqueuosine reductase OS=Bacillus tequilensis OX=227866 GN=yhbA PE=3 SV=1
MNVYQLKEELIEYAKSIGVDKIGFTTADTFDSLKDRLILQESLGYLSGFEEPDIEKRVTPKLLLPKAKSIVAIALAYPSRMKDAPRSTRTERRGIFCRASWGKDYHDVLREKLDLLEEFLKSKHEDIRTKSMVDTGELSDRAVAERAGIGFSAKNCMITTPEYGSYVYLAEMITNIPFEPDVPIEDMCGSCTKCLDACPTGALVNPGQLNAQRCISFLTQTKGFLPDEFRTKIGNRLYGCDTCQTVCPLNKGKDFHLHPEMEPDPEIAKPLLKPLLTISNREFKEKFGHVSGSWRGKKPIQRNAILALAHFKDASALPELTDLMHKDPRPVIRGTAAWAIGKIGDPAYAEELEKALEKETDEEAKLEIEKGIELLKATGMTKQGLS

SEQ ID NO: 74859 - protein, 376 aa, Bacillus terrae
  misc_feature (1)..(376): tr|A0A429X6X2|A0A429X6X2_9BACI Epoxyqueuosine reductase OS=Bacillus terrae OX=1914933 GN=queG PE=3 SV=1
MNYEALKDEVIAYSKKIGIDKIGFTSGDPFIEMKNRLIRQEELGYQSGFEHKNIEERTHPELIFDEPRSIIAIALAYPSKMKDAPRGERGARRGIFCKASWGVDYHVLVREKLEQLASFIDSKADHARFKLMVDTGELVDRAVAERAGIGWSGKNCSIITPEFGSYVYLGEMITNLPFAPDEPMQDQCGECTKCLDACPTGALVQPGQLDAQRCIAFLTQTKGVLPDEFRDKIGNRLYGCDTCQTICPKNKGVDFHLNPDMEPDSQIAKPLLQPLLDISNREFKEKYGEVSGSWRGKKPIQRNAILALGHFKERSAVSDLIKVLNEDVRPEIRGTAAWSLGKIGGEQAKEALIRAQARESDSLVLEEIDKGLQLLE

SEQ ID NO: 74860 - protein, 374 aa, Bacillus thermoamylovorans
  misc_feature (1)..(374): tr|A0A2U8EFB6|A0A2U8EFB6_9BACI Epoxyqueuosine reductase OS=Bacillus thermoamylovorans OX=35841 GN=queG PE=3 SV =1
METQALKKEIIDYAKSIGIDKIGFATADPFTTLKARLIRQQELNYQSGFEESDIDKRTNPALLFDNPQSIISIALAYPTKMNEHVRGTKGERRGLFARASWGEDYHLVLRDRLSKLEQFIYSKMPDARCKSMVDTGELSDRAVAERAGIGWSGKNCAIITPEYGSFVYLGEMITNIPFEPDTPIENMCGTCNKCIEACPTGALVQPGQINAKICISYLTQTKDFLPDEYRSVIGNRLYGCDTCQIVCPYNKGKDFHFHEEFEPEPEVAKPLLKPLLKISNKEFKEKYGRVSGAWRGKKPIQRNAIIALGHFKDETAIDELSDVIRNDPRPVIRGTAAWALGKIGTEKAKQILTKAKIEEKDEDVLREIEVALAE

SEQ ID NO: 74861 - protein, 374 aa, Bacillus thermoamylovorans
  misc_feature (1)..(374): tr|A0A0D0EQQ2|A0A0D0EQQ2_9BACI Epoxyqueuosine reductase OS=Bacillus thermoamylovorans OX=35841 GN=queG PE=3 SV =1
METQALKKEIIDYAKSIGIDKIGFATAAPFTTLKARLIRQQELNYQSGFEESDIDKRTNPALLFDNPQSIISIALAYPTKMNKHVRGTKGERRGLFARASWGEDYHLVLRDRLSKLEQFIYSKMPDARCKSMVDTGELSDRAVAERAGIGWSGKNCAIITPEYGSFVYLGEMITNIPFEPDTPIENMCGTCNKCIEACPTGALVQPGQINAKICISYLTQTKDFLPDEYRSVIGNRLYGCDTCQIVCPYNKGKDFHFHEEFEPEPEVAKPLLKPLLKISNKEFKEKYGRVSGAWRGKKPIQRNAIIALGHFKDETAIDELSDVIRNDPRPVIRGTAAWALGKIGTEKAKQILTKAKIEEKDEDVLQEIEVALAE

SEQ ID NO: 74862 - protein, 378 aa, Bacillus thermocopriae
  misc_feature (1)..(378): tr|A0A410XGZ0|A0A410XGZ0_9BACI Epoxyqueuosine reductase OS=Bacillus thermocopriae OX=1215031 GN=queG PE=3 SV=1
MDVEALKEEIIQYSRTIGIDKIGFAHADPFFELKERLRQQQQLGYESGFEEPDIEKRTNPSLLLPEARSIIAIALAYPSKLKNAPRSTKKERRGIFCRASWGQDYHIILRERLQKLEQFILTRVPDAKVKSMVDTGELSDRAVAERAGIGWSGKNCSIITPEFGSYVYLGEMITNIPFPPDAPIEDQCGTCTRCIDACPTGALVQGGQLNAKRCIAFLTQTKTFIPDEFRDKIGNRLYGCDTCQLVCPKNKGKDFHFHPEMEPDPEVVKPLLKPILHMTNRQFKETFGHLSGAWRGKKPIQRNAIIALAHYKDESAIDDLLILLQKDSRPVIRGTAAWALGKIGNYEVVPMLKKAKEREQDEDVIREIEKALAMLENV

SEQ ID NO: 74863 - protein, 448 aa, Bacillus thermozeamaize
  misc_feature (1)..(448): tr|A0A1Y3PFI4|A0A1Y3PFI4_9BACI Epoxyqueuosine reductase OS=Bacillus thermozeamaize OX=230954 GN=queG PE=3 SV=1
MEKKDGHTTPACSPESGRAAGRWAALKEELKAYAKTIGIDKIGFASAEPFTELKERLVRHRELGYESGFEEPDLERRTNPQLLMPGARSIIAIALAYPTRMDHPPASRKGAYRGFFARAAWGEDYHRVLRRKLEELAAYLRHRVEGVQTEIMVDTGALSDRAVAERAGIGWSGKNTAIITPEFGSWVYLGEMLTNLPFPPDIPITQSCGECTRCIDACHTGALVAPGQLDAKRCVSYLTQTKDFLAEEYREIIGNRLYGCDTCQLVCPYNKGLNFTHQEAFAPDPEVVKPLLQPILKMSNRMFRERFGMSAASWRGKKPLERNAILALAHYRDASAIPLLLEKLEDPRPVIRGTAAWAVGKIAAGQEEAVRRRVQQALEQAYRQETVPEVSQEIEKGLRFLKEKDPASMADAGTGSEKPDGAIGQCDGVAGETGVGQDPAALSANLPL

SEQ ID NO: 74864 - protein, 380 aa, Bacillus thuringiensis
  misc_feature (1)..(380): tr|A0A437SQD0|A0A437SQD0_BACTU Epoxyqueuosine reductase OS=Bacillus thuringiensis OX=1428 GN=queG PE=3 SV=1
MDFEQLKQDVIAYSKTIGIDKIGFASASPFEELKQRLIQQQQLNYQSGFEEPDIEKRTNPQLLLPGAKSIIAIALAYPSKLKNAPLSKRGERRGIFCRASWGQDYHLVLRDRLQKLEAYLIEKLPNIEVKSMVDTGELSDRAVSERAGIGWSGKNCSIITPEFGSYVYLGEMITNVPFPPDQPIEDQCGSCTKCIDICPTGALIQGGQLDSKKCIAFLTQTKGFLPEEYRDKIGNRIYGCDTCQTVCPKNKGMDFHNHPEMEPDPELVKPLLTPLLTISNRDFKEKYGIMSGSWRGKKPLQRNAILALAHFKEASAIPDLIGVMKDDPRPVLRGTAAWALGKIGGEGVGEAIEKAMQREKDEEVLHEMNRGLELLAQKKE

SEQ ID NO: 74865 - protein, 380 aa, Bacillus thuringiensis
  misc_feature (1)..(380): tr|V5M3R2|V5M3R2_BACTU Epoxyqueuosine reductase OS=Baci llus thuringiensis YBT-1518 OX=529122 GN=queG PE=3 SV=1
MDFEKLKQDVIAYSKTIGIDKIGFASASPFEELKQRLIQQQQLNYQSGFEEPDIEKRTNPQLLLPGAKSIIAIALAYPSKLKNAPLSKRGERRGIFCRASWGQDYHLVLRDRLQQLEAYLIEKLPDIEVKSMVDTGELSDRAVSEHAGIGWSGKNCAIITPEFGSYVYLGEMITNVPFPPDKPIEDQCGGCTKCIDICPTGALIQGGQLDSKKCIAFLTQTKGFLPEEYRDKIGNRIYGCDTCQTVCPKNKGMDFHNHPEMEPDPELVKPLLTPLLTISNRDFKEKYGIMSGSWRGKKPLQRNAILALAHFKEASAIPDLIGVMKDDPRPVLRGTAAWALGKIGGDGVGEAIEKAIEREKDEEVLHEMKRGLELLAQKKE

SEQ ID NO: 74866 - protein, 377 aa, Bacillus timonensis
  misc_feature (1)..(377): tr|A0A4S3PNH3|A0A4S3PNH3_9BACI Epoxyqueuosine reductase OS=Bacillus timonensis OX=1033734 GN=queG PE=3 SV=1
MDIVKFQQELIDYSKTIGIDKIGFASASPFDELKSRLLRQQELGYQSGFEPKDIEKRTNPELLLPGAKSIIAIALAYPAKLKDAPRSTRSERRGMFARASWGEDYHHILRDRLQKLESFILEKLPDAKLQSMVDTGELSDRAVAERAGIGWSGKNCAIITPEFGSYVYLGEMITNIPFAPDTPIEDQCGSCRACLDACPTGALVQGGQLNAQRCVSFLTQTKDFLPDEFRTKIGNRLYGCDSCQTACPKNKGIDFHFHEEMEPHPEVVKPLLKPILSISNRDFKETYGALSGSWRGKKPIQRNAIIALAHFKDRSAIPELKQVLKEDPRPVLRGTAAWALGKIGDESAIDILKEASLKEKDEQVLDEIEKGLNMLGK

SEQ ID NO: 74867 - protein, 380 aa, Bacillus toyonensis
  misc_feature (1)..(380): tr|A0A2A8HDL6|A0A2A8HDL6_9BACI Epoxyqueuosine reductase OS=Bacillus toyonensis OX=155322 GN=queG PE=3 SV=1
MDFEQLKQDVIAYSKTIGIDKIGFASASPFEELKQRLIQQQQLNYQSGFEESDIEKRTNPQLLLPGAKSIIAIALAYPSKLKNAPLSKRGERRGIFCRASWGQDYHLVLRDRLQKLEAYLIEKLPDIEVKSMADTGELSDRAVSERAGIGWSGKNCAIITPEFGSYVYLGEIITNVPFPPDQPIEDQCGSCTKCIDVCPTGALIQGGQLDSKKCIAFLTQTKGFLPEEYRDKIGNRIYGCDTCQTVCPKNKGMDFHNHPEMEPDSELVKPLLTPLLTISNRDFKEKYGIMSGSWRGKKPLQRNAILALAHFKEASAIPDLIGVMKDDPRPVLRGTAAWALGKIGGDGVGEAIEKAMEREKDEEVLHEMNRGLALLAQKKE

SEQ ID NO: 74868 - protein, 380 aa, Bacillus toyonensis
  misc_feature (1)..(380): tr|A0A2B5DKI0|A0A2B5DKI0_9BACI Epoxyqueuosine reductase OS=Bacillus toyonensis OX=155322 GN=queG PE=3 SV=1
MDFEQLKQDVIAYSKTIGIDKIGFASASPFEELKQRLIQQQQLNYQSGFEESDIEKRTNPQLLLPGAKSIIAIALAYPSKLKNASLSKRGERRGIFCRASWGQDYHLVLRDRLQKLEAYLIEKLPDIEVKSMVDTGELSDRAVSERAGIGWSGKNCAIITPEFGSYVYLGEIITNVPFPPDQPIEDQCGSCTKCIDVCPTGALIQGGQLDSKKCIAFLTQTKGFLPEEYRDKIGNRIYGCDTCQTVCPKNKGMDFHNHPEMEPDPELVKPLLTPLLTISNRDFKEKYGIMSGSWRGKKPLQRNAILALAHFKEASAIPDLIGVMKDDPRPVLRGTAAWALGKIGGDGVGEAIEKAMEREKDEEVLHEMNRGLALLAQKKE

SEQ ID NO: 74869 - protein, 380 aa, Bacillus tropicus
  misc_feature (1)..(380): tr|A0A4Y6F534|A0A4Y6F534_9BACI Epoxyqueuosine reductase OS=Bacillus tropicus OX=2026188 GN=queG PE=3 SV=1
MDFEQLKQDVIAYSKTIGIDKIGFASASPFEELKQRLIQQQQLNYQSGFEEPDIEKRTNPQLLLPGAKSIIAIALAYPSKLKNAPLSKRGERRGIFCRASWGQDYHLVLRDRLQKLEAYLIEKLPDIEVKSMVDTGELSDRAVSERAGIGWSGKNCSIITPEFGSYVYLGEMITNVPFPPDQPIEDQCGSCTKCIDICPTGALIQGGQLDSKKCIAFLTQTKGFLPEEYRDKIGNRIYGCDTCQTVCPKNKGMDFHNHPEMEPDPELVKPLLTPLLTISNRDFKEKYGIMSGSWRGKKPLQRNAILALAHFKEASAIPDLIGVMKDDPRPVLRGTAAWALGKIGGDGVGEAIEKAMQREKDEEVLHEMNRGLELLVQKKE

SEQ ID NO: 74870 - protein, 380 aa, Bacillus tropicus; identical to SEQ ID NO: 74694
  misc_feature (1)..(380): tr|A0A5C5A0F8|A0A5C5A0F8_9BACI Epoxyqueuosine reductase OS=Bacillus tropicus OX=2026188 GN=queG PE=3 SV=1

SEQ ID NO: 74871 - protein, 380 aa, Bacillus trypoxylicola
  misc_feature (1)..(380): tr|A0A161QKC1|A0A161QKC1_9BACI Epoxyqueuosine reductase OS=Bacillus trypoxylicola OX=519424 GN=AZF04_19960 PE= 4 SV=1
MTNAQFKEELIAYSKTIGIDKIGFTSADPFLSLKERLLTQKKLGYESGFEEPDIEKRTDPTLTLSSARSIISIAVAYPAKMKNPPKSKKGERRGVFCRASWGMDYHQVLRDRLSKLEEFIKKQIPHAEMVSMVDTGALSDRAVALRAGIGWSAKNCAIITPEFGSYVYLGNLITSVPIEPDTPLTEQCGSCTKCIDACPTGALVQGGQLNAQKCISFLTQTKGLIEDQYRKKIGNRLYGCDTCQQVCPKNKGIDIHHHQELEPDPEIAKPLLIPLLKISNREFKEKFGHISGSWRGKKPIQRNAILALAHFKEEAALDDLKSLMESDPRPVIRGSAAWAIGKIGREDTKEWLMDALKKEQEEEVLGEIKKGLDLLSKISH

SEQ ID NO: 74872 - protein, 382 aa, Bacillus urumqiensis
  misc_feature (1)..(382): tr|A0A2P6MEM5|A0A2P6MEM5_9BACI tRNA epoxyqueuosine(34) reductase QueG OS=Bacillus urumqiensis OX=1548213 GN=qu eG PE=4 SV=1
MTPTDVKQKALKQRLKEEAAAIGIDKIGFASADPFVTMKERLTVQQQKGYASGFEKGSIAERTEPDLLLPEAKTILSIAVAYPSKLKDAPPSRKGSRRGVFCRASWGEDYHHVLRRKLEKLQAFIEAEIPGVRVRSMVDTGELSDRAAAIRSGIGWSGKNCAVITPEFGSYVYLGEMILDYAIEPDQPLESQCGTCNKCVDACPTGALIQGGQLDSSKCIAFLTQTKDMLPEQYRKKLGNRLYGCDTCQTVCPENKGMDHHHHEELEPEPEKVKPLLQSMLFLSNKEFKQTYGKMAGSWRGKKPIQRNAVLALGTLKEEAAVPDLQKVLLEDVRPVLRAAAAWSLGQIQTADAQHALHTASEKETDPMVEKEILEARMIGEE

SEQ ID NO: 74873 - protein, 386 aa, Bacillus vallismortis
  misc_feature (1)..(386): tr|A0A1W6HG94|A0A1W6HG94_BACVA Epoxyqueuosine reductase OS=Bacillus vallismortis OX=72361 GN=queG PE=3 SV=1
MNIHKLKEELIEYAKSIGVDKIGFTTADTFDSLRDRLILQESLGYLSGFEEPDIEKRVTPSLLLPKAKSIVAIALAYPSKMKDAPRSTRDGRRGIFCRASWGKDYHDVLREKLDLLENFLQSKHEDIRTKSMVDTGELSDRAVAERAGIGFSAKNCMITTPEYGSYVYLAEMITNLPFEPDVPIEDMCGTCTKCLDACPTGALVNPGQLNAQRCISFLTQTKGFLPDEFRTKIGNRLYGCDTCQTVCPINKGKDFHLHPQMEPDPEIAKPLLKPLLTISNREFKEKFGHVSGSWRGKKPIQRNAILALAHFKDASSLPELTALMHQDPRPVIRGTAAWAIGKIGDPDYAGELEKALQKEQDEEAIREIEKGLELLSVSDKTKTGRS

SEQ ID NO: 74874 - protein, 386 aa, Bacillus vallismortis
  misc_feature (1)..(386): tr|A0A410WJM1|A0A410WJM1_BACVA Epoxyqueuosine reductase OS=Bacillus vallismortis OX=72361 GN=queG PE=3 SV=1
MNVYQLKEELIEYAKSIGVDKIGFTTADTFDSLKDRLILQESLGYLSGFEEPDIEKRVTPTLLLPKAKSIVAIALAYPSRMKDAPRSTRTERRGIFCRASWGKDYHDVLREKLDQLEEFLRSKHEDIRTKSMVDTGELSDRAVAERAGIGFSAKNCMITTPEYGSYVYLAEMITNIPFEPDVPIEDMCGSCTKCLDACPTGALVNPGQLNAQRCISFLTQTKGFLPDEFRTKIGNRLYGCDTCQTVCPLNKGKDFHLHPEMEPDPEIAKPLLKPLLTISNREFKEKFGHVSGSWRGKKPIQRNAILALAHFKDESALPELTDLMHKDPRPVIRGTAAWAIGKIGDRAYAEELEKALEKEKDEEAKLEIEKGIGLLNASGMTKQGLS

SEQ ID NO: 74875 - protein, 386 aa, Bacillus velezensis; identical to SEQ ID NO: 74873
  misc_feature (1)..(386): tr|A0A5C2MAR8|A0A5C2MAR8_9BACI tRNA epoxyqueuosine(34) reductase QueG OS=Bacillus velezensis OX=492670 GN=queG PE=4 SV=1

SEQ ID NO: 74876 - protein, 386 aa, Bacillus velezensis
  misc_feature (1)..(386): tr|S6FIB7|S6FIB7_9BACI Epoxyqueuosine reductase OS=Baci llus velezensis UCMB5033 OX=1338518 GN=queG PE=4 SV=1
MNIHKLKEELIEYAKSIGVDKIGFTTADTFDSLRDRLILQESLGYLSGFEEPDIEKRVTPSLLLPKAKSIVAIALAYPSKMKDAPRSTRDGRRGIFCRASWGKDYHDVLREKLDLLENFLQCKHEDIRTKSMVDTGELSDRAVAERAGIGFSAKNCMITTPEYGSYVYLAEMITNLPFEPDVPIEDMCGTCTKCLDACPTGALVNPGQLNAQRCISFLTQTKGFLPDEFRTKIGNRLYGCDTCQTVCPINKGKDFHLHPQMEPDPEIAKPLLKPLLTISNREFKEKFGHVSGSWRGKKPIQRNAILALAHFKDASSLPELTALMHQDPRPVIRGTAAWAIGKIGDPDYAGELEKALQKEQDEEAIREIEKGLELLSVSDKTKTGRS

SEQ ID NO: 74877 - protein, 379 aa, Bacillus vietnamensis
  misc_feature (1)..(379): tr|A0A0N8GG86|A0A0N8GG86_9BACI Epoxyqueuosine reductase OS=Bacillus vietnamensis OX=218284 GN=queG PE=3 SV=1
MDMDQLKQDIIAYSKEIGIDKIGFTTADTFSEMKNRLLRQEMLGYQSGFEEKDIEKRVDPSLIFGQPKSIIAIALAYPSKMKNAPQSKRGERRGIFCRASWGTDYHHVLRDRFSKLEEYIVSRVPQARFKSMVDTGELVDRAVAERAGIGWSGKNCSIITPEFGSYVYLGEMVTNLPFAPDTPMEDQCGTCNKCVDVCPTGALIEGGQLDSRKCIAFLTQTKGFLADEYRVKLGNRLYGCDTCQTVCPENKGMDFHFHEEMEPDPEIAKPLLKPLLTIGNREFKEKYGHVSGSWRGKKPIQRNAIIALAHFKDETAVDDLIHVLEKDVRPVMRGTAAWALGTIGGESTEQALLIQQTVETDEEVLEEIQKGLNLIRQKG

SEQ ID NO: 74878 - protein, 378 aa, Bacillus vietnamensis
  misc_feature (1)..(378): tr|A0A5D4K7D5|A0A5D4K7D5_9BACI Epoxyqueuosine reductase OS=Bacillus vietnamensis OX=218284 GN=queG PE=3 SV=1
MDFDGLKQDIIEYSKEIGIDKIGFTTADTFSEMKNRLLRQEMLGYQSGFEEKDIEKRVDPSLIFDGPKSIIAIALAYPSRMKDAPQSKRGERRGIFCRASWGTDYHAVLRDRLAKLEDYIRSKVPQAQFKSMVDTGELVDRAVAERAGIGWSGKNCAIITPEFGSYVYLGEMITNLPFAPDEPIEENCGTCNKCVDVCPTGALIEGGQLNAQRCIAFLTQTKGFLPDEFRTKLGNRLYGCDTCQTVCPENKGKDFHNHWEMEPDPEIAKPLLKPLLTISNRDFKEKYGHVSGSWRGKKPIQRNAIIALAHYKDEAAISELISVMENDVRPVIRGTAAWAAGKIGGKEAEEALQRLLEKEKDEEVISEIYKGLEMLSAT

SEQ ID NO: 74879 - protein, 376 aa, Bacillus vireti
  misc_feature (1)..(376): tr|W1SGP1|W1SGP1_9BACI Epoxyqueuosine reductase OS=Baci llus vireti LMG 21834 OX=1131730 GN=queG PE=3 SV=1
MDVKMLKQELIAYSKEIGIDKIGFTSADPFTELKNRLIRQQELGFQSGFEEPDIDKRVTPGLLLEEPRSIISIALAYPSKMTVRVEGKKGERRGIFSRASWGLDYHHILKDRLKKLEEFIITKQPDARLKSMVDTGELSDRAVAERAGIGWSGKNCAIITPEFGSYVYIGEMITSLPFESDTPIEDQCGSCTKCLEACPTGALVQGGQINAQRCISFLTQTKGFIPDEFRDKIGNRVYGCDSCQTACPHNKGKNFHFHDEMEPDPEVAKPLLKPILKLSNREFKNQFGDVSGSWRGKKPIQRNAIMALAHFKDETAVPNLIEVLENEASPVSRGTAAWALGKIGGETALIALKSALSSESDKNVLTEIEKGLKFYS

SEQ ID NO: 74880 - protein, 379 aa, Bacillus wakoensis
  misc_feature (1)..(379): tr|W4Q1A6|W4Q1A6_9BACI Epoxyqueuosine reductase OS=Baci llus wakoensis JCM 9140 OX=1236970 GN=queG PE=3 SV=1
MTHAQLKDELIAYSKTIGVDKIGFASADPFLQLKDRLLIQQERGYQSGFEEPDIEKRTEPKKLVEGARTIISIALAYPSKMKNPPKSTRDERRGIFCRASWGKDYHDVLRDRLKKIELFLQEKVPDGKTISMVDTGELSDRAVAERAGIGWSGKNCAIITPEFGSYVYLGELVTTIGFEPDQPITDQCGTCNKCVEACPTGALIQGGQLDSQKCIAFLTQTKTFLPDQYRKKLGNRLYGCDTCQQVCPENKGKDFHLHPEMEPDPELAKPKLIPLLTISNREFKETFGHVSGSWRGKKPIQRNAIIALAHFKDKKALPVLTELLYKDPRPVIRGTAAWAIGEIGSTSEETILNKAKKTEKEAEVIREIEKGLNLLNNKH

SEQ ID NO: 74881 - protein, 388 aa, Bacillus weihaiensis
  misc_feature (1)..(388): tr|A0A1L3MV22|A0A1L3MV22_9BACI Epoxyqueuosine reductase OS=Bacillus weihaiensis OX=1547283 GN=queG PE=3 SV=1
MNSEQLKQEVIAYSKEIGIDKIGFTSASMFEELKQRLINQQELGYQSGFEEPDIEKRVTPIKLLPKASSIISIALAYPSKLKDAPKSTKEDRRGIFCRASWGQDYHMVLRDRLAKLEAFLKEKLPDVEVKSMVDTGELSDRAVAERAGIGWSGKNCAIITPEFGSYVYLGEMITNVPFPPDQPMEDQCGTCRKCLDVCPTGALVQPGQLDSSKCIAFLTQTKGFLADEYRTKIGNRIYGCDTCQTVCPVNKGKDFHFHEEMEPDPELAKPKLKPLLTMSNREFKETFGHMSGSWRGKKPLQRNAILALAHFKDTTALKDLLKLAKEDPRPVIRGTAAWAIGKIGDQTMKDELKALLLNEKDEQVIEEMNKGLRLLGEEVEPEVGKSTS

SEQ ID NO: 74882 - protein, 380 aa, Bacillus wiedmannii
  misc_feature (1)..(380): tr|A0A2B5NBI0|A0A2B5NBI0_9BACI Epoxyqueuosine reductase OS=Bacillus wiedmannii OX=1890302 GN=queG PE=3 SV=1
MDFEQLKQDVIAYSKTIGIDKIGFASASPFEELKQRLIQQQQLNYQSGFEESDIEKRTNPQLLLPGAKSIIAIALAYPSKLKNAPLSKRGERRGIFCRASWGQDYHLVLRDRLQKLEAYLIEKLPDIEVKSMVDTGELSDRAVSERAGIGWSGKNCAIITPEFGSYVYLGEIITNVPFPPDQPIEDQCGSCTKCIDVCPTGALIQGGQLDSKKCIAFLTQTKGFLPEEYREKIGNRIYGCDTCQTVCPKNKGMDFHNHPEMEPDPELVKPLLTPLLTISNRDFKEKYGIMSGSWRGKKPLQRNAILALAHFKEAAAIPDLIGVMKDDPRPVLRGTAAWALGKIGGDGVDEAIEKAMQREKDEEVLHEMNRGLELLAQKKE

SEQ ID NO: 74883 - protein, 380 aa, Bacillus wiedmannii
  misc_feature (1)..(380): tr|J8XNM8|J8XNM8_9BACI Epoxyqueuosine reductase OS=Baci llus wiedmannii OX=1890302 GN=queG PE=3 SV=1
MDFEQLKQDVITYSKTIGIDKIGFASASPFEELKQRLIQQQQLNYQSGFEESDIEKRTNPQLLLPGAKSIIAIALAYPSKLKNAPLSKRGERRGIFCRASWGQDYHLVLRDRLQKLEAYLIEKLPDIEVKSMVDTGELSDRAVSERAGIGWSGKNCAIITPEFGSYVYLGEIITNVPFPPDQPIEDQCGSCTKCIDVCPTGALIQGGQLDSKKCIAFLTQTKGFLPEEYREKIGNRIYGCDTCQTVCPKNKGMDFHNHPEMEPDPELVKPLLTPLLTISNRDFKEKYGIMSGSWRGKKPLQRNAILALAHFKEASAIPDLIGVMKDDPRPVLRGTAAWALGKIGGDGVGEAIEKAMQREKDEEVLHEMNRGLELLAQKKE

SEQ ID NO: 74884 - protein, 376 aa, Bacillus wudalianchiensis
  misc_feature (1)..(376): tr|A0A1B9AU68|A0A1B9AU68_9BACI Epoxyqueuosine reductase OS=Bacillus wudalianchiensis OX=1743143 GN=queG PE=3 S V=1
MNYRLLKQEIIEYSREIGIDKIGFASAAPFTELKDRLLRQQELGYQSGFEEKDINKRVDPSLIFDEPRSIIAIALAYPSKMKETVKGRKGERRGIFCRASWGEDYHTILRDRLGKLEAFIAAKVPDARFRSMVDTGELSDRAVAERAGIGWSGKNSSIITPEFGSYVYLGEMITNLPFEPDHPIENRCGTCTKCLDACPTGALVQGGQLNSKRCIAFLTQTKDFMPVEFREKLGNRLYGCDTCQTVCPENKGMNFHLHEEMEPEPETVKPLLEPLLQMGNKEFKQRFGYMSGSWRGKKPIQRNAIIALAHFKEEEALPSLIDVLHNDVRPVLRGTAAWAIAKIGGEKARQALVLAISEEKDMEVKEEIERGISSMK

SEQ ID NO: 74885 - protein, 383 aa, Bacillus xiamenensis
  misc_feature (1)..(383): tr|K2MJ07|K2MJ07_9BACI 4Fe-4S ferredoxin-type domain-co ntaining protein OS=Bacillus xiamenensis OX=1178537 GN= BA1_10901 PE=4 SV=1
MIHVGQLKEELIQYANEIGVDKIRFASADTFDSLKDRLILHESLGYLSGFEEPDIEKRTNPALLLPKAKSIVAIALAYPSKMKDAPRSTKDARRGIFCRASWGTDYHVVLKKKLDMLEEFLRSKHEDIRTKSMVDTGELSDRAVAERAGIGFSAKNCMIITPEFGSYVYLAEMITNVPFEPDEKIEEQCGTCNKCVDSCPTGALVNPGQLNSQRCISFLTQTKGFLPDEFRSKIGNRLYGCDTCQIVCPINKGKDFHLHPEMEPDPEIAKPLLKPLLTISNREFKEKYGHVSGSWRGKKPIQRNAILALAHFKDTSALPDLVELMHKDPRPVIRGTAAWAIGKIGDEQQLSELEKALERESDEEAKQEIIKGIELLQTPLNTK

SEQ ID NO: 74886 - protein, 377 aa, Bacillus zeae
  misc_feature (1)..(377): tr|A0A398AWP9|A0A398AWP9_9BACI tRNA epoxyqueuosine(34) reductase QueG OS=Bacillus zeae OX=1917180 GN=queG PE=4 SV=1
MDIRKLKNEIIDYSKSIGIDKIGFASSSPFTEMKNKLLIQQELGYQSGFEEKDIEKRVNPALIMEAPQSIIAIALAYPSKMGEKVESKKGQRRGIFCRASWGLDYHVLVKEKLKQLEAFISEKLPEARFQSMVDTGELVDRAVAERAGIGWSGKNCSIITPEFGSYVYLGEMVTNIPFEADQPLEDRCGTCNKCVEACPTGALVQGGQLNSQSCIAFLTQTKGFLADEYRERLGNRLYGCDSCQTACPDNKGKDFHFHTEMEPDPETVKPLLKPLLHMSNRDFKERFGPLSGSWRGKKPIQRNAIIALAHFKDETAVPDLITVMREDPRPVLRGTAAWALGKIGGEEAKAALLKVAASEKDEEVLEEIDKGLQFFPI

SEQ ID NO: 74887 - protein, 382 aa, Bacillus zhangzhouensis
  misc_feature (1)..(382): tr|A0A081LB08|A0A081LB08_9BACI Epoxyqueuosine reductase OS=Bacillus zhangzhouensis OX=1178540 GN=BA70_02585 PE =4 SV=1
MHVGELKEELIQYAKEIGVDKIRFASADTFDSLKDRLILHESLGYLSGFEEPDIEKRTNPSLLLPKAKSIVAIALAYPSKMKDAPRSTKDARRGIFCRASWGTDYHVVLNKKLDMLEEFLRSKHVDIRTKSMVDTGELSDRAVAERAGIGFSAKNCMIITPEFGSYVYLAEMITNVPFEPDEKIEDQCGTCNKCVDSCPTGALVNPGQLNSQRCISFLTQTKGFLPDEFRSKIGNRLYGCDTCQIVCPINKGKDFHLHPEMEPDPEIAKPLLKPLLTISNREFKEKYGHVSGSWRGKKPIQRNAILALAHFKDTSALPVLIELMHKDPRPVIRGTAAWAIGKIGDKQQLSELEKALERESDEEAKQEIIKGIELLQTPLNTK

SEQ ID NO: 74888 - protein, 379 aa, Unknown
  misc_feature (1)..(379): tr|A0A0J8YFP6|A0A0J8YFP6_9GAMM Epoxyqueuosine reductase OS=bacteria symbiont BFo1 of Frankliniella occidentali s OX=1628855 GN=queG PE=3 SV=1
MSHPLDFNQLALDIKQWGLALGFQQVGICDTDLTLEEPRLQAWLDKQYHGEMDWMARHGMMRARPHELLPGTLRVISVRMNYLPAKAAFASTLKNPRLGYVSRYALGRDYHKVLRNRLKKLGDMIREHCEQAEFRPFVDSAPLLERPLAAKAGLGWTGKHSLILNREAGSWFFLGELLINLPLPVDQPVEENCGRCVACITTCPTGAIVEPYTVDARRCISYLTIELEGAIPEEFRPLIGNRIYGCDDCQLICPWNRYGQLTDEDDFSPRAVLHAPPLTDLFAWDEAKFLRVTEGSAIRRIGHLRWLRNIAVALGNAPWDQAHLSALQARLGENSMLDEHIHWAIACQLARRDENTIEVQSSQQKRLVRVVEKGLPRDA

SEQ ID NO: 74889 - protein, 321 aa, Bacteriodetes bacterium
  misc_feature (1)..(321): tr|A0A522FVJ2|A0A522FVJ2_9BACT tRNA epoxyqueuosine(34) reductase QueG OS=Bacteriodetes bacterium OX=2507565 GN =queG PE=4 SV=1
MIIFNIIFGPFVKNLPKSLITSFSRDIGFDKIGFASVEPFVKEKEVFRKWIAEGRHATMKYLERNIDERFDPLLILEGCKTAVVTAINYYNPDNELFRELKTGKISRYAWGKDYHKIIKLKLIQLADKIKELFPESTNLSFVDSGSLPEKLLAQRAGVGWQGKNSLILTREFGSWIFLGVILTTVEFEPDEPHKDLCGDCTKCLDRCPTSAIIKPGLVDASLCISYWTIETKPNVEIPLDIVNNSQSRIYGCDICQEVCPWNRFAKPTKDDGFQVKDNHTELSKEFIENLTNEEFKTIFKDRPVRRIKLKGLKRNVCMIRE

SEQ ID NO: 74890 - protein, 174 aa, Bacteriodetes bacterium
  misc_feature (1)..(174): tr|A0A521W374|A0A521W374_9BACT tRNA epoxyqueuosine(34) reductase QueG (Fragment) OS=Bacteriodetes bacterium OX =2507565 GN=queG PE=4 SV=1
VWAQHAGIGWEGKHTNVITQEFGSWVFLGEIILSLELEFDFPATDHCGDCTLCIEACPTDAIVEEYVVDSTKCISYVTIEHRGEVAGELGEKFDNWIYGCDICQDVCPWNHKFSQPTDMNEFEPREFNKAPLLSEIVEMTQEEFSKKFKASPIKRTKVSGLRRNAEVILKNPKL

SEQ ID NO: 74891 - protein, 363 aa, Bacterioplanes sanyensis
  misc_feature (1)..(363): tr|A0A222FPE5|A0A222FPE5_9GAMM Epoxyqueuosine reductase OS=Bacterioplanes sanyensis OX=1249553 GN=queG PE=3 SV =1
MPDYIRLDSPADDSDQALASLRQQLDMWGKELGFQQIGVTDTNLAQHETYLQQWLEQGYHGEMGFMADHGSMRSHPEQLQPGTIRVISARMDYLAPDIRITEQLQDRSLAYVSRYALGRDYHKLIRKRLTQLGKQLQSAAGEMGFRAFVDSAPVLERALANKAGLGWVGKNTMLINRRAGSYFFLGEILTDLPLPIDPAYDKEHCGRCQACLDICPTQAFVGPYVLDARRCISYLTIELDGPIPEELRPGMGNRIFGCDDCQIGCPWNRFSNTSPERDFTPRHQLDKATLLELFRWDEDTFLSNTEGMPIRRTGYRNWLRNIAVALGNGPYSLEVEQALVTRRASVDALVQEHIDWALTQLKS

SEQ ID NO: 74892 - protein, 330 aa, Bacteriovorax sp.
  misc_feature (1)..(330): tr|T0CCD4|T0CCD4_9PROT Epoxyqueuosine reductase OS=Bact eriovorax sp. BAL6_X OX=1201290 GN=queG PE=4 SV=1
MIKKDDIQNILSTQGLEVWGVVAESKPKSLERFKTWIKDGLHGALSYLADDRAIKREDLKNYYPDIKSTLVIAFDYSHIARSAKKFYDSGESNGLKIANYVVGFQGRDYHYEVRDKLQVIGEELQKLDPELEFKFSLDTQPILERDFAYQSGLGWYGKNSMLINRHIGSYFIIGSLLLNKEVEAPNDKFETDHCGKCTRCADACPTDAIDLEKRTIIADKCISTFTIEHFKEIEAPVGFDKAHGEIFGCDICQDVCPWNMRLERKLETDSEAFKESGKQFIDFFLTRPVSVIIEELEAMSNREYRRQFKGTPLERTGRVGMLKNLKYYLD

SEQ ID NO: 74893 - protein, 334 aa, Bacteriovorax sp.
  misc_feature (1)..(334): tr|T0RC22|T0RC22_9PROT Epoxyqueuosine reductase OS=Bact eriovorax sp. Seq25_V OX=1201288 GN=queG PE=4 SV=1
MKELVSILENSNARKWGLVTDPEALSFKNFHEWVERGDHGVLSYLEGERKDLRENISNYFPEFKSALVFAFDYSVSAKMTKDFYQTGESNGYKIANYVLGFEGEDYHYYLRRSLEAIANKIKEIFPEVNIMHSLDTQPVLERDLAQKAGLGWFGKNSMMIDREIGSYFIIGSLFLDVDLSTHGLQVPLIDTDHCGNCRKCIEACPTDAINAETRTITANKCISTFTIEIFKEAQAPEGMEKGNGEIFGCDICQDVCPWNKKALGKLNYTSDDFQSFKSKNSYAFENFLTPSLSSMIQGLESVSNREYRRQLKGTPLERTGRVGMLKNLKFYKKN

SEQ ID NO: 74894 - protein, 350 aa, Bacteriovorax stolpii
  misc_feature (1)..(350): tr|A0A2K9NQT5|A0A2K9NQT5_9PROT tRNA epoxyqueuosine(34) reductase QueG OS=Bacteriovorax stolpii OX=960 GN=queG PE=4 SV=1
MHDGSRLCGRLSYRCYRDHPSILRMDWLNSYGVVDFGYTEDPVPTTLEYYNQWVAANLHAPLHYLEGERQEKRQDLKNHWQDFQSAVVFLFSYHPTHSELQNLYQKNPNWNGLKLASYTLGFEGWDYHNLLREKLESIGECLKKDHGVEFRLTLDTHPVLERDLAKRAGLGWFGKNSMLINRHQGSFFIIGSLLLDKKLDLKTKAYETDHCGQCTRCIDACPTEAIDPVSRTIIAKDCISTFTIEQFKLDTIPSEKMTLKEGTLFGCDICQDVCPWNKRVDRQNSVSLSGWSDQQKKILDFFLLRPVEKVHQNLEEMSGKEFERVMEKTSFARSGRRGLLKNIRFYLKKD

SEQ ID NO: 74895 - protein, 358 aa, Unknown
  misc_feature (1)..(358): tr|A0A539D1F0|A0A539D1F0_9BACT 4Fe-4S ferredoxin-type d omain-containing protein OS=bacterium OX=1869227 GN=FD1 25_2515 PE=4 SV=1
MPADPRDSIRDAAAALGFDICRFASASEPWNAGERLAHFVEAGRHGDMGWMETTLERRAHPTAMWDGARTAVVLGLNYGPEHDPLPEMEDRSAGYISVYARGDDYHEVIKGRLKTLAGQIAARTGQDVKVFVDTAPLMEKPLAQRAGLGWQGKHTNLLSRNHGNWLFLGVILSAAEFEPDASEGEHCGTCTACLDVCPTNAFPAPFQLDARRCLSYLTIEFAGPWPEEFRTATGSRIYGCDDCLAVCPWNKFAAASQEARVQAREALVSPRLADLAGLDDAAFRALFSKSPVKRIGRKRFIRNVLYAIGNSGDASLIPAAERLLDDPDAVVRDAAEWAVGRLREEQGAVLPPPPGEGG

SEQ ID NO: 74896 - protein, 387 aa, Unknown
  misc_feature (1)..(387): tr|A0A522QBN2|A0A522QBN2_9BACT tRNA epoxyqueuosine(34) reductase QueG OS=bacterium OX=1869227 GN=queG PE=4 SV= 1
MLRWAKGAGVDNAGLAELRRRLDDEAACCGIDRLRIAAARPDAVARERLAAAFERGDLATWHFDGERARMAADPEAVLPGARAVVCVAVGYDTEPPAARSPLTGRISRYAWSEDYHRTLRRALERLEALLRPFGRARAVCDTVPFAERAFAERSGLGWVGRHTGVIVPGLGALAFLGEIVTDIPLPPDEPIRKSCGSCRRCVDVCPTGALRGDFTIDATRCIGDLNQRLDAIPRAMRPLMGDWVWGCDLCTVACPPSHVAPKIGRPAFSPAPGISPYPALAAILRLRSGEFKRTYRASAMGWRGGAILRRNAAVCLGNTLDRSVVPDLEGAFAEDPHALVRGHAAWALGRIGSPRALRALAARLPLERDAGVRDEIDAALAGNHLRS

SEQ ID NO: 74897 - protein, 348 aa, Blackallbacteria sp.
  misc_feature (1)..(348): tr|A0A2M7G261|A0A2M7G261_9BACT tRNA epoxyqueuosine(34) reductase QueG OS=bacterium (Candidatus Blackallbacteri a) CG17_big_fil_post_rev_8_21_14_2_50_48_46 OX=2014261 GN=queG PE=4 SV=1
MQQRRIEPFLKDPIQVEAKAIGFDLVGVCSPEPVPHLDFYAEWLASGYAGEMHYLERHAPLKADLKSLLPEVRSVVVVACNYYSEAEPNSDFQVARYARGDDYHGLMKAMLERFAEALRTHYPALEARAFVDSGPLLERELAVRAGLGWFGKNTCLIAPGQGSWFLLGALLTNLPLPFSAPFETLHCGSCTRCLDICPTEALLAPHTLDARRCIAYLTIETREEIPLELREGIGGHVFGCDLCQEVCPWNQRFAQPTPHQAFSARPWTSEKSLAELLLLSPREFELEIAPRSPIKRPKYRGFIRNLAVVAGNSGQTALIPVLKTGLERHGQDPMLVSHFNWALERLQN

SEQ ID NO: 74898 - protein, 310 aa, Stahlbacteria sp.
  misc_feature (1)..(310): tr|A0A523Z8P1|A0A523Z8P1_9BACT tRNA epoxyqueuosine(34) reductase QueG OS=bacterium (Candidatus Stahlbacteria) OX=2528828 GN=queG PE=4 SV=1
MNIKSMIKEKAKDIGFDLVGVTDLSPSKYKKEYENWLLKGMHADMDYLVKTKMVRLSPLLRYRWAKSILMVGMNYYPGQPLNSKKDKILISRYAMGRDYHVVLNEKLFELSNFIISTTGVRQTKYYTDTGPLLEKELAQRAGLGWIGKNTILITEEFGSWIFLGEILLDIEVEPDEPGKDRCEDCDLCSKYCPSQALIPSYILNNNLCTAFHTVMNKGKLPDWFPSSGNPYIFGCDICQEVCPFNRDVKRTKISDFLPREKLVNPDIQWLSGLKEEEFKHNFKNTPVEWSGFDIFMRNVNAFLKKKHEYI

SEQ ID NO: 74899 - protein, 384 aa, Unknown
  misc_feature (1)..(384): tr|A0A3A9G0I2|A0A3A9G0I2_9BACT Epoxyqueuosine reductase OS=bacterium 1XD42-44 OX=2320106 GN=queG PE=3 SV=1
MHTDSLKQEIIAYSKQIGIDKIGFASADVFTELKERLRKQQELDYQSGFEKGSIEERTEPTRLLPEAKSIISIALAYPTRMKGAPRSTKEERRGLFARASWGVDYHVVMRERLEKLAAFIQERVPDGKNKVMVDTGELSDRAVAERAGIGFSGKNTSIITPEFGSFVYLGELITNVPFTPDEPVDDGCGSCTKCIDACPTGAIVQGGQLNAKRCIAFLTQTKDFLPEEFRSKIGNRVYGCDTCQMVCPKNLKVDFHIHPEFEPEHEVAKPKLIPMLKLSNREFKQTFGHISGSWRGKKPIQRNSLIALGHYKDTTAVADMIEVMRRDPRPVIRGTAAWSLGKIGTEEAFQAIKEAMLEEEDEQVLVEMEKGLAFAQLKDTAKKR

SEQ ID NO: 74900 - protein, 272 aa, Unknown
  misc_feature (1)..(272): tr|A0A3A9G3F7|A0A3A9G3F7_9BACT Epoxyqueuosine reductase OS=bacterium 1XD42-8 OX=2320102 GN=D7X25_00020 PE=4 SV =1
MEGIGQRIEKITDTWGICPFEGIPLLPVRSRKRLPEGAKSIIVLLFGYYTEEYPQRNIARYAVADDYHTILLPKLQGLADELAEAFPGEAFVPFIDASPIAEVEAACRAGLGQPGKNGLLINPCYGSYCFIGEVVTTALLDRGTLKGPALCTGCDACIRACPTGALSEKGFCLEKCRSYITQKKGELADWESQEIRLGGKVWGCDCCVDACPRNRQARQSRVPEFYENREPVLTLEVVEKLYPVKAYGWRGQKVLYRNLSLLGNNKKNENDK

SEQ ID NO: 74901 - protein, 314 aa, Unknown
  misc_feature (1)..(314): tr|A0A0M9DUQ2|A0A0M9DUQ2_9BACT Epoxyqueuosine reductase OS=bacterium 336/3 OX=1664068 GN=queG PE=3 SV=1
MNHEKLRYTLLIKQKAKELGFDFCGISKADFLEDQAPRLEQWLKQNMHGEMAYMNNHFDKRLDPRLLVDDAKSVISVLLNYFPKQDLAQENDFKISKYAYGTDYHFVLKDKLKSLLEFMHTEIGEIGGRAFVDSAPVMDKVWAEKSGLGWVGKHSNLLNRNMGSFFFIGELIVDLDLEYDAPTKDYCGTCTRCIDACPTDAIVNPYVVDGSKCISYFTIELKDQIPQEMKGKFENWIFGCDICQDVCPWNRFASPHQTQAFEPHEDLEKMSKKEWIDITEETFNKVFKNSAVKRTKLKGLQRNINFLQASDDNE

SEQ ID NO: 74902 - protein, 375 aa, Unknown
  misc_feature (1)..(375): tr|A0A1H9HLJ6|A0A1H9HLJ6_9BACT Epoxyqueuosine reductase OS=bacterium A52C2 OX=1855383 GN=SAMN05216548_10679 PE =4 SV=1
MRRLIADLAAEEGFDALGIARPDAIPLAPDRLRAALADGHHGSMGWMDETADRRGSPSVLWPEVRSVIMLGMNYGPEHDPRENLLRPDVGNISVYARNRDYHDLIKGALKRIATRFAARAGADVKVFVDTAPVMEKPLAEAAGLGWQGKHTNLVSRELGSWLFLGSIFTTADLPPDDAGDTRCGSCSACLSACPTDAFPAPYRLDARRCISYLTIEHAGPIDPALRPLIGNRIYGCDDCLAACPWNKFAEASRQIKLMAREDLLAPSLRELSRLDDATFRTFFSGSPVKRIGRDRFVRNVLIAIGNSGETGLADEAVRLLEDAAPAVRAMAVWALRRLDPARAAFLRERHLTDEAEPEVRAEWLRGDDEAEQEAA

SEQ ID NO: 74903 - protein, 249 aa, Unknown
  misc_feature (1)..(249): tr|A0A1V5UJP8|A0A1V5UJP8_9BACT Epoxyqueuosine reductase OS=bacterium ADurb.Bin243 OX=1866936 GN=queG PE=4 SV=1
MRQKFIKGLKNHTMISNLQLSADGANNFKLLDRYCKDAGISIFKACPVKAVAGSFHPSLNENPYTARMTAAISMAFHLSDAVLEGIFDRPTPHYAMHYNRINSFLDDTALRVTAIIQNSGYNAMPVPASQIIDKSSQRGYLNHKIVAAAAGAGFIGRNNLLVTPQFGSRVRLVSVLTDAPLEFTEPLEDGCGDCFACLASCPAQAIKESPENFELAKCIEQISRFQRLMFVAKGICGVCVKACAGRKNK

SEQ ID NO: 74904 - protein, 265 aa, Unknown
  misc_feature (1)..(265): tr|A0A1V5T5V4|A0A1V5T5V4_9BACT Epoxyqueuosine reductase OS=bacterium ADurb.Bin270 OX=1866926 GN=queG PE=4 SV=1
MREIIKNRALELGFCAVGVTSADPVEEISGLEGAISSGRIAGMSWLARNPAMRCDPKSLLKSAKSVICLAYPYGENGVVAADDEQGGVPSGLREDESGNPFQKVARFARGVEYHAFIRKKLEEITAEIEKRNPGADFKICVDTSPILEKALAARAGIGWIGKNTLLINERFGSWILLGEIMTDIEIPTDHPVADLCGECDLCIRSCPTFALLEPRRLDARNCLSYLSIEREVRVGGWFSELLKGRYGCDLCQELCPYNSRKSTGC

SEQ ID NO: 74905 - protein, 340 aa, Unknown
  misc_feature (1)..(340): tr|A0A1V5PIA4|A0A1V5PIA4_9BACT Epoxyqueuosine reductase OS=bacterium ADurb.Bin363 OX=1866927 GN=queG PE=4 SV=1
MILADIIKKEAYNSGIHLTGITTADDLSEETLRIQYCLKEDLIPVRTGLNEKKIKKFCSPSIFMPGAKSIIMTALCYYEEEKEILYDEPVGEIAPYTWRNNYKFLRKKLQKLVKFIKTYSSGNFKVFVNGPLAEKPLAVRAGIGFYGKNGIIYTHNYGSKVVLGGIITDIELPPDKSEKTDKCNTCNLCMRHCPTGAIIKPYIINRKKCIQYLSQTIHEVIPENYRKLWENRLYGCSTCQDICPQNKKVIPLRDLSPYGITGSTIPVIPLLKLTEKEFREKYRDNQISASWVDFNAIRRNALLALANSGDNRALPVLRKALNDTCLQVREIVEWGLRHKR

SEQ ID NO: 74906 - protein, 447 aa, Unknown
  misc_feature (1)..(447): tr|A0A1V5MF08|A0A1V5MF08_9BACT Epoxyqueuosine reductase OS=bacterium ADurb.Bin425 OX=1866929 GN=queG_1 PE=4 SV =1
MKEVGGSLRSDTEMQPTELKEIVSEDGTLDYDALKQFALNLGADDVGFVEIDRPSIADEKYELEKIFPAAKSFISIVVRMNQEPIRSSARSIANLEFHHQGEEVNSITRKLVTKLERLGIRALNPSMGFPMEMQRFPGRVWLISHKPIAEAAGLGKKGIHRNVIHPRFGNFILLGTVAIDARISRYDKPIDYNPCFECKLCVSACPVGAIAPTGEFDFSACYTHNYREFMGGLTDWVGTIADSRDRKEYQAKVAPNETASMWQSLSFGPNYKAAYCMSVCPAGDDVIGQFLSGRKEFLDTVLKPLQKKEEPIYVVPDTDAEEYVKKRFPHKTIRFVNNSLIPNTIESFISGLRSVFQRKRASDVDINLHFTFTGKEPAIAGVQISKGKLKVSRTHEGKADLKVTADSSFWIDFLNHRCSIPLGLITGKLRLAGNPVHLLKFQKCFPV

SEQ ID NO: 74907 - protein, 426 aa, Unknown
  misc_feature (1)..(426): tr|A0A1V5M216|A0A1V5M216_9BACT Epoxyqueuosine reductase OS=bacterium ADurb.Bin425 OX=1866929 GN=queG_2 PE=4 SV =1
MNIDPVSLKERIIETGLSLGFNRLVFASIEPLSAAKQATYKAFLANGYAASMDYLAREPERRFLPQRTFEQARTVLTVSVGYYNSPPPPPANDKTVYGRVAGYAVGRDYHVVMRAKLKELHAFIEKECGRKVAFRTVADDAAYFEQAFAERHGLGFVGKNTLVILPQLGGSYNLIGELFLDLELPADEPYVGTCGACFRCGVTCPTGAIKELSLAGSALPELEREGDTAYGVNMTVDAKTYLVDARACLSFLTIENKGGIELSLRDKLGDWVFGCDICQEVCPYNSRLQKEKKQAIWPEFRPEAGVGHYLDLFALFAIKDQDEFHQRFLSSPVRRPKLRGMRRNALVVIGNQLALGAASLAFVINTLRQYLLAETDEMLIEHGLWMLSRASKDSARASCGLDLESVKNSLYRRLSPEGKRLAERYL

SEQ ID NO: 74908 - protein, 335 aa, Unknown
  misc_feature (1)..(335): tr|A0A1V5LWC0|A0A1V5LWC0_9BACT Epoxyqueuosine reductase OS=bacterium ADurb.Bin429 OX=1866930 GN=queG PE=4 SV=1
MLTAEVIKQHAKAMGADLVGIASIDRFEGAPIQQDPRQIMPEAKSVIAVAFRVNRGSLRGIEEGTFFSNYSAMGYGGITYLFMPLVVMNMARMIEDEGYEAIPYGHQSDWRAIDQEGNLQGISRPVVPGRAAPDVAVHLRIAAYLAGLGEIGYSKVFLTPQFGPRQRVGIIITEAELEPDPIYDGPQLCNRCMACVRECPGQAISATETVKVTLAGHEVEWGALDCTACDIAFRGGKVLTDPDHEPVYVDGGMYGQQIAASEITPFHKKPRNLYNTGQAVCGGRGCMRACMISLEARDVLENRFHEKFRRRKPWRVDWTTEPETEQPDGYISDTD

SEQ ID NO: 74909 - protein, 314 aa, Unknown
  misc_feature (1)..(314): tr|A0A1V5KNK9|A0A1V5KNK9_9BACT Epoxyqueuosine reductase OS=bacterium ADurb.Bin478 OX=1866932 GN=queG PE=3 SV=1
MPLSDELKAFIVQRAHTLGFAQVGVARAEPLPAQGLLAWLHAGLHGGITYMDRDPDLRLDPRMLLPGAASVIVLSSNYYFPVEDKKDSARGIIARYARGDDYHTVLSAKLRQLVQEIRKHAPAAQTRIAVDSAPVLEKEWAHRSGIGWRGKHSCIISPQYGSWIFLSEIILDLELPADQPMEERCGSCRLCLDACPTGALIRPYVVDSRKCISAITQLKPDQPIPIEHQAAMGNHLFGCDLCQAICPWNQGQLPPTTEAGFSPRPYFTNPLLTDLAGWDEAQFLQRTSRSPIKKVKYAGFMRNVQVALRNGKQL

SEQ ID NO: 74910 - protein, 318 aa, Unknown
  misc_feature (1)..(318): tr|A0A2H6EGV3|A0A2H6EGV3_9BACT Epoxyqueuosine reductase OS=bacterium BMS3Abin03 OX=2005711 GN=queG PE=3 SV=1
MKLTNDIVVEKAKKIGFDLIGFVRADELKEESHHLKEWLAKGFQAGMEYMERNIDKRKDVSLILPEAKSIISLAVNYYTGKKHSNQKGKGKLSRYAWGKDYHLIIWEMLKALESELKDADPSFKSKSYVDTGPVMDKAWAVKSGIGWMGKHSNIINRNYGSWFFIASIITNYEFDYSNTIPGFCGSCTACIDACPTKAIVQPYVVDSNKCISYLTIENKGGISSEYSDRFDNWLFGCDVCQDVCPWNQKFSQSSRITEFQPVNEQTELDLSEILAMENPDFKNRFAESPVLRTKLKGLKRNAKYLLKGRYDMRNIIKM

SEQ ID NO: 74911 - protein, 315 aa, Unknown
  misc_feature (1)..(315): tr|A0A2H6EKY0|A0A2H6EKY0_9BACT Epoxyqueuosine reductase OS=bacterium BMS3Abin04 OX=2005712 GN=queG PE=3 SV=1
MLINNYTVIELAKELGFDLIGFSKAAELDYEIETLEDWLSKGYNAGMKYMERNIDKRKDVSKILPGAQSVISLAINYFNNEEFFCSPQHGKVSRYAWGTDYHYIIWDKLKILESKLKKIDPNFVSKFYVDTGPVMDKVWAVKSGLGWMGKHSNLISRVMGSWLFIADIITNYGFEYNEPASDLCGTCTACIEACPTDAIIDNYLIDSNRCISYLTIENKGDIPDEFKGKFENWIFGCDICQDVCPWNKKFSRQTKEKEFLEIKNKELPLKEILEMNREEFKTKFKDSPITRAKLNGLQRNAKFLIDSSSGEISGE

SEQ ID NO: 74912 - protein, 355 aa, Unknown
  misc_feature (1)..(355): tr|A0A2H6ETA3|A0A2H6ETA3_9BACT Epoxyqueuosine reductase OS=bacterium BMS3Abin05 OX=2005713 GN=queG_1 PE=3 SV=1
MNASSQKNWPVITENIKSKLRTLGCDLVGIAPVADFPELERFEKWLQLGFEGEMDYLHRHLDKSLHPEAILPSVQSVLVCGMNYDTTRPRSIDQRDDAHGWISRYAWGDDYHGILEAVLVRAVEWLQVQFPDMEYRLYADTGPTRDRIWAKYAGLGWFGKNSNLVNLKSGSFFFIGEIFLSLPLKPDKPAAERCGSCTRCIESCPTGAIVEPGVIDSRKCISYLTIELRGFIPEKFRGPIGRQLFGCDICQDVCPWNRKNSKTQKRAFEPRAPFFNPGLTEFYRTVRDEFTNRFRKSAIKRTKQKGLLRNISVAMGNTGNPAFLPELEEMAVHQDPAVKAHAEWAIQKIETEEIR

SEQ ID NO: 74913 - protein, 230 aa, Unknown
  misc_feature (1)..(230): tr|A0A2H6EY54|A0A2H6EY54_9BACT Epoxyqueuosine reductase OS=bacterium BMS3Abin05 OX=2005713 GN=queG_2 PE=4 SV=1
MSETAQNNFEEIKHLAEQGGAVKVGIAGIEPKLKRYFDLTPGEFQSWPYAISVAVRLSRAVLESLDDRPTHLYKWHYKQANAVLDGIAFAITNKIQEMGYRALPIAASQILDWKKQNAHVSHRHTAVAAGLGWFGRNNLLVTKEFGAQVRLVTVLTNLPLPAAREQAAFGCGECRRCVDECPVDVLGESSGDFDFDRCFSLLDYFSRKKGIGVMICGLCQKVCPGSTKLW

SEQ ID NO: 74914 - protein, 218 aa, Unknown
  misc_feature (1)..(218): tr|A0A2H6F6A0|A0A2H6F6A0_9BACT Epoxyqueuosine reductase OS=bacterium BMS3Abin06 OX=2005714 GN=queG PE=4 SV=1
MYDELKTIALSAGATAFGVGHVEDLRTHYDALPLDQTEGMAHGISIGIRVSSSVLKSCIIGPTRLYLHHYRMINWVLDQTTLRISLAIQDKGYNALPIPASQIVDWEKQTAHLSHKMIALRAGIGWIGRNNMLVHSDCGSKIRIATVLTDMPLKTDSPIERDCGECKKCIEICPVSAIKESYKDWNKVACLEKLKYFAKAHNVGQYICGLCVKVCNPS

SEQ ID NO: 74915 - protein, 220 aa, Unknown
  misc_feature (1)..(220): tr|A0A2H6FBI6|A0A2H6FBI6_9BACT Epoxyqueuosine reductase OS=bacterium BMS3Abin07 OX=2005715 GN=queG PE=4 SV=1
MREGIREMLRKAGATVIGFASVADGLSEDIRHLSFAISIGVNGNLRESNLDHLKKLQKKTALFLRGKGYRFFCIPPDSDRINDSFASKLYPLFTHKIAATCAGIGWIGRNGLLISPTYGPRLSLATVLTDARFKTDLPIENCLCGDCMLCVDHCPSKAITGETWSRNAPYPDMIKADKCRSHKEKSRPVNGKPNCGLCINICPYGRGYIEIKSEVMEETQ

SEQ ID NO: 74916 - protein, 227 aa, Unknown
  misc_feature (1)..(227): tr|A0A2H6FG89|A0A2H6FG89_9BACT Epoxyqueuosine reductase OS=bacterium BMS3Abin08 OX=2005716 GN=queG PE=4 SV=1
MNPDSLKDLLLSSGATLTGIGDVTEALSGDIRHLTRGIAIAVRKDLNRDTVEFLLGLQGLIEAWLRKRNYRFLSIPPDSDRRNGKFISRLYEFFSHKTAATCAGLGWIGKNGLIINSRYGPKLSWATVLTDTPFMTDRPITRSLCGNCNLCVRHCPSSALTGTSWSIGEPFSEIVIYSRCSSLKKKRTVFNNKPNCGLCINICPYARKVYKNNKRERIYLKESRSCQ

SEQ ID NO: 74917 - protein, 217 aa, Unknown
  misc_feature (1)..(217): tr|A0A2H6FSD4|A0A2H6FSD4_9BACT Epoxyqueuosine reductase OS=bacterium BMS3Abin10 OX=2005718 GN=queG PE=4 SV=1
MNNELRDIAISSGMSAFGVGSIDDLRPHFEALPTEQTEGLSYGISIGVRVSDAVLKGIIVGPTRHYLHHYKMLNLLLDQTSLEIALAIQAKGYNALPIPASQIVDWKKQTAHLSHKMIALRAGMGWIGRNNLLVHPQFGSRIRIATVLTDMPLKTDTVLQRDCAGCSECLKACPVSAIGKSHEQWDKTACLEKLKYFAKVHNVGQYICGLCVKVCKP

SEQ ID NO: 74918 - protein, 363 aa, Unknown
  misc_feature (1)..(363): tr|A0A2H6G300|A0A2H6G300_9BACT Epoxyqueuosine reductase OS=bacterium BMS3Abin11 OX=2005719 GN=queG PE=3 SV=1
MKPKTHPADELLPVELADLAQQIRLWGQELGFQQVGITDISLQKAENYLQNWLSMNHHGEMEYMARHGLKRSRPGELIHGTTRVISVRMDYLPHVVRTAVGQLKKIDRAYISRYALGRDYHKLIRSRLQKLVRRIQAGLEGFNYRVFTDSAPVLEKALAEKAGIGWIGKHSNLINRKAGSWFFLGEIYTDLPLPIDTVVEEHCGSCQTCIDICPTQAIIAPYQVDARLCISYLTIEYRGVIKEKLRPLLGNRIYGCDDCQLCCPWNRFGKLSKEADFQPRHGLDDTALLDLFSWNESEFMKNLEGSPIRRIGYRPWQRNIAIALGNAAFDPVIVKVLEEKLPSASGIVAEHIGWAIAQQKDRE

SEQ ID NO: 74919 - protein, 244 aa, Unknown
  misc_feature (1)..(244): tr|A0A2H6GKN3|A0A2H6GKN3_9BACT Epoxyqueuosine reductase OS=bacterium BMS3Abin14 OX=2005722 GN=queG PE=4 SV=1
MNRDTVLLRDRLIHQAKVLGADDAGVCLASDLLNGPSHRKLPRPEGLLDHHYLLVLALRHPLHEPALDYFVRKDGARYGNSEGNRRLMRISDRIGRWLGEEGLSSQDLHYYVEKGGVFLKGAAVLAGLGTIGANNLLIHPSFGTRVRFRARLVDFPLTPSTPIDCNPCSDCVHSCLTVCPERALDSDGFTRDKCQLQLDRDISNAVILSGDADGSAKREVHYCRICEFSCTYTGGVPSHVKSKR

SEQ ID NO: 74920 - protein, 372 aa, Unknown
  misc_feature (1)..(372): tr|A0A2H6HAG7|A0A2H6HAG7_9BACT Epoxyqueuosine reductase OS=bacterium BMS3Bbin01 OX=2005724 GN=queG PE=4 SV=1
MTDRVAHDLRAIAVAEGLSGFGICTAEPFEDVRVSIEERKAGGLAGRLTFTFANPERSTDVRSSFPWARRLVVGAAPYVADSGSPSLRTAREGRIARFATRDAYAPLRQALGSIAEHLRARGHEAEVLVDDNRLVDRGAGVRAGVGWWGKNTMVLAPGVGPWLLLGSVVTDSPLETTGPMLRTCGTCSACLPACPTGALIGPGILDARRCLAAIVQAPGVIPREYREAIADRIYGCDDCLEACPPGRRHLLNAGGSRAGIVDLPTILRSSDRTILDRYGHFYIPRRQARYLRRNALVAIGNTGDSSFVSLLAGYVAHPDWLLRLHSAWALGRIGGPFAIAILKAAQRQEVHDEVREEIALALRELRGHEQVR

SEQ ID NO: 74921 - protein, 370 aa, Unknown
  misc_feature (1)..(370): tr|A0A2H6HGP3|A0A2H6HGP3_9BACT Epoxyqueuosine reductase OS=bacterium BMS3Bbin02 OX=2005725 GN=queG PE=4 SV=1
MEQDGTPVHAVAMAAGAVGCGVASVEPFADALTTMQERRSSGMSGSLGFTFRDPATATDILKTFPWARRLVVVATTYLPEAGSPSGPAPGTGRVARFATHHHYERLAEVLGAIALNLRTSGHRAEAIHDDNRLVDRAAAVRAGVGWWGKNTMVLTPGHGPWILLGSVVTDADLPLDTAMSRSCGTCSACLPACPTGALVEPGVLDVRLCLAYLLQTPGAIPRELREAVGDRIYGCDDCLDVCPPGNRSLSLATADRGRVDLLAVLAASDRELESATEHWYVPKRRMDYVRRNALVALGNSGDDRHVYVVAGWLGNGSSTLRSHAAWALGQIGGDQARRALDAAATVESDSGVLAEIQHAVVRCAGRPAVR

SEQ ID NO: 74922 - protein, 399 aa, Unknown
  misc_feature (1)..(399): tr|A0A2H6HUU6|A0A2H6HUU6_9BACT Epoxyqueuosine reductase OS=bacterium BMS3Bbin04 OX=2005727 GN=queG PE=4 SV=1
MSQHSNNATPSPSSTVNSSELPELIKLAASNLGFDFAVIAPYQPPPNADRFPEWIAHGYHGSMSWMTKHPERRMDPRLQWPGGKSILSVGMNYHRPLPPDAPNPDDPSRGRFARYAWGLDYHDLILPRLKALGRTIDYLAGQQIASRAYVDTGPLLERPIAAGAGAGFIGKHTLLIHWRHGSYFLLGELLLDKELAPDIPKKGIIGCGGCHKCIDACPTGALDDPYVNQSNRCISYLTIEHWGAIPHELRSRIGNWVFGCDLCQETCPYNARNLMPTVEPFFEPRIPDWGVPKLLDLMALDDQQFRTWFKGSPVKRSKRRGLLRNVAVALGNWGSDEAIPALAEVMENEPEPLIRSHAAWALGQLDQYSSARLTLEKSRVSEGDEDVSEEIERALAGGS

SEQ ID NO: 74923 - protein, 218 aa, Unknown
  misc_feature (1)..(218): tr|A0A2H6IS74|A0A2H6IS74_9BACT Epoxyqueuosine reductase OS=bacterium BMS3Bbin09 OX=2005732 GN=queG PE=4 SV=1
MYDKLKEIANDQSILAFGVADTENLREHYDGLPMDQTEGLNNGISIGMAVSGAVLKGCIMGPTRHYLHNYRMTNWNLDMTAARIAAVIQDEGFRAMPIPASQIVDWEAQTAHLSHKMIALRAGLGWIGRNNLLVHPKWGSKIRISTILTDMPLKTDTPIERDCGFCKKCIDVCPVKAIKDSHKDWNKAACLVKLKYYAQNYGVGQYICGLCLKVCDSV

SEQ ID NO: 74924 - protein, 372 aa, Unknown
  misc_feature (1)..(372): tr|A0A2H6J1Y7|A0A2H6J1Y7_9BACT Epoxyqueuosine reductase OS=bacterium BMS3Bbin10 OX=2005733 GN=queG PE=4 SV=1
MPELKDQIRAQASEAGFDVIRFTTPGAIPDAGAHLMAFLGQGRHGDMHWMEETAQRRASPLSLWGDARSVIVLGLNYGPESDPLEALKQTSNGIISVYARGKDYHGLIKKKLKRVAGWLHRERGCEVKVFVDTAPVMEKPLAQSSGAGWQGKHTNLVSRGFGSWLFLGSIFTTETIAPDEGESDHCGACRACLDICPTDAFPAPYELDARRCISYLTIEHQGAIALEFRAAIGNRIFGCDDCLAVCPWNKFARASAEARLGARAETDNPPLGDMLMLDDAAFRSRFAGTPVKRTGRDRFIRNVLIAAGNSGNKKLLPRVEPLLGDASALVRAMAVWAGARLMDKERFAAARESLEGRERDAHVKAEWRSAGP

SEQ ID NO: 74925 - protein, 381 aa, Unknown
  misc_feature (1)..(381): tr|A0A2H6JAV6|A0A2H6JAV6_9BACT Epoxyqueuosine reductase OS=bacterium BMS3Bbin12 OX=2005735 GN=queG PE=3 SV=1
MNRPAKSITPEAPARCPDPAALAADIRRWGMELGFQALGITDTDLSAAETRLLDWLARDRHGEMDWMARHGVRRSRPARLVPGTIRVISVRMDYWPGAAADARTVLDDPARAYLSRYALGRDYHKVLRRRLQRLAERIAAITGPFGYRVFTDSAPVLEKPLAQKAGLGWIGKHTNLLGARAGSWFFLGELYTDLPLPVDAPARERCGTCTACLDACPTGAILAPYQLDARRCIAYLTIELPGAIPVELRPLLGNRIYGCDDCQLACPWNRFAQPTPEADFLPRHGLDAATLAELFAWDEAAFLRNTEGGPIRRIGHERWLRNLAVALGNAPPTPEAATALRARTAHPSALVREHVAWALARHASASDPGGTDPAHSLAGDA

SEQ ID NO: 74926 - protein, 305 aa, Unknown
  misc_feature (1)..(305): tr|A0A101VUK6|A0A101VUK6_9BACT Epoxyqueuosine reductase OS=bacterium BRH_c32 OX=1734400 GN=APF79_12825 PE=4 SV =1
MINNKLISELALKYGFGLVGFSSVTLLSKETARLKEWIECGNHAGMDYMERNLEKKENIKEILRSAESVISLGMFYDSGEKHEYKPGFGKVSRYAWGTDYHFIMWEHLEEMIDELKEIDSSFEGIFYVDTGPVMDKVWAVKSGLGWQGKNTNIINKESGSFFFIANIITNKKFEYSVPSADYCGTCRACIDACPTNALNPYHIDARKCISYLTIENKGEISKEFTGKFENWIFGCDICQDVCPWNEKFSVFTSEPKFHSAGNKELELKQVLNMENDKFKKKFEVSPIKRSKLKGLIRNAEFLTIE

SEQ ID NO: 74927 - protein, 357 aa, Unknown
  misc_feature (1)..(357): tr|A0A2M7YTF9|A0A2M7YTF9_9BACT 4Fe-4S ferredoxin-type d omain-containing protein OS=bacterium CG_4_9_14_3_um_fi lter_65_15 OX=1975567 GN=CO151_08060 PE=4 SV=1
MAADTQISMEWNQLRGLLAELCPVHGLDLAGAVALPCRLPHAERFRDWLQQDRHGGLDYMLRDPGARLDPTRRDPAAGTLLVFGQGYTRGWPADDPDPVAGGAGRTGQPWTAGVARYARGRDYHDVLRSAIKGVVAGMKELRPELQARVSCDSGPYLEREYAWLAGLGFFGRNTCLIHERLGSGLFLGVAVTNLVLDGAPDTAEPQAEPLYAAVPRRLRVHKAYLTACGSCTRCLDACPTGALDPELGLDASACISTWTIEKRGQVPEHSRSATRGILFGCDICQTVCPWNQRAAGRDLPPVDAAYGTMPEHAERGLADLAVMEDEEFRRRFRRTPLWRCHPEGLRRNAQRLLEEKS

SEQ ID NO: 74928 - protein, 153 aa, Unknown
  misc_feature (1)..(153): tr|A0A3A9B2Z7|A0A3A9B2Z7_9BACT Uncharacterized protein OS=bacterium D16-63 OX=2320119 GN=D7X10_00585 PE=4 SV=1
MSDRGHGGPRELDLARCILFNNQRFAPGAQEGIWASMGERIHGCDACQEVCPRNRDVLAAARAKDPFLEALAEEFDLERVLTLDEAHYEAVVRPIIYNYIKDLDIFRRNAAVALGNTGDAAHLPALRQARDACDNPDVLKAIDWAIGLLEGAA

SEQ ID NO: 74929 - protein, 365 aa, Unknown
  misc_feature (1)..(365): tr|A0A2G6NVS8|A0A2G6NVS8_9BACT 4Fe-4S ferredoxin-type d omain-containing protein OS=bacterium DOLJORAL78_65_58 OX=2044882 GN=CSA17_04325 PE=4 SV=1
MMAAPVPVTAEDLARLLARECPPAGIELAGAVALPCPLPHKDRWLRWVAEGRDGNLEYLRRDPEQRADPTRRNLDARSLLIMAHRYTAGWPKDRSEPAAGGWAPEEASWLGRVSRYARGRDYHVVLLKAMRRVLQGLKQEWPDLAAHASTDTGPYLEREYAWLAGLGFLGHNRCLIHETLGSGLFLGVALTNLEIAGLPPGGAPAPEPLFALAARQRRPITTAPWDRCGNCSRCLDACPTGALDLVHGLDAHLCLSSWTIEWRGRAPQGREHEQGGILFGCDICQAVCPWNRKADRKAEGLPDPVADYAPLEEHRELTLADLVDLSDDEFRRRFRRTPIWRCHPEGIRRNAARVRSNLRKGADPT

SEQ ID NO: 74930 - protein, 365 aa, Unknown; identical to SEQ ID NO: 74929
  misc_feature (1)..(365): tr|A0A2G6G316|A0A2G6G316_9BACT 4Fe-4S ferredoxin-type d omain-containing protein OS=bacterium DOLZORAL124_64_63 OX=2044883 GN=CSB20_04720 PE=4 SV=1

SEQ ID NO: 74931 - protein, 358 aa, Escarpia laminata
  misc_feature (1)..(358): tr|A0A497TJJ4|A0A497TJJ4_9BACT Epoxyqueuosine reductase OS=bacterium endosymbiont of Escarpia laminata OX=1221 601 GN=queG PE=3 SV=1
MDQAPIPNHGQLAANIKIWGAELGFQQVGITDTELSLAEARFNDWLQKGFHGEMSYMARHGSKRSRPAELEPGTRRIISVRLDYLPEPTRKSREILESPTQAFISRYALGRDYHKLMRKRLQQLAQKISGKIGDFGYRVYVDSAPVLEKPLAEKAGLGWIGKHSNLINRQAGSWFFLGEIYTDLPLPIDQPASNHCGSCRACLDICPTQAIVEPYVVDARRCISYLTIEQQGPIPESLRSSIGNRIYGCDDCQQVCPWNRFAKLGREQDFAPRNGLDSATLAELFEWDETNFLKRTEGSAIRRIGHQAWLRNIAVALGNAPPSETIKSALKVREHDPAELVREHVRWALARQRNKSPG

SEQ ID NO: 74932 - protein, 358 aa, Escarpia laminata
  misc_feature (1)..(358): tr|A0A497TQZ1|A0A497TQZ1_9BACT Epoxyqueuosine reductase OS=bacterium endosymbiont of Escarpia laminata OX=1221 601 GN=queG PE=3 SV=1
MDQTPIPNHEQLAANIKIWGAELGFQQVGITDTELSLAEARFNDWLQKGFHGEMSYMARHGSKRSRPAELEPGTRRIISVRLDYLPEPTRKSREILESPTQAFISRYALGRDYHKLMRKRLQQLAQKISGKIGDFGYRVYVDSAPVLEKPLAEKAGLGWIGKHSNLINRQAGSWFFLGEIYTDLPLPIDQPASNHCGNCRACLDICPTQAIVEPYVVDARRCISYLTIEQQGPIPESLRSSIGNRIYGCDDCQQVCPWNRFAKIGREQDFAPRNGLDSATLAELFEWDETNFLKRTEGSAIRRIGHQSWLRNIAVALGNAPPSETIKSALKVREHDPAELVREHVRWALARQRSKSPG

SEQ ID NO: 74933 - protein, 323 aa, Unknown
  misc_feature (1)..(323): tr|U5S4Z9|U5S4Z9_9BACT Putative reductive dehalogenase subunit A (Fragment) OS=bacterium enrichment culture cl one WBC-2_2350_ORF_3 OX=1412196 GN=rdhA PE=4 SV=1
REHGFAQIVRRSSTGDWSGEPGDWGPVLLAAVKEKNKHLAEISDIERLDYTWSSTLQVAMDRWHINLAPGKFEPAPISATKVEMSPAEATAKIKKMARWLGAEQVGICEVTEDMKPFFYSIGRKHGNYSGPVANYEEDEGREIPWPYPYKYCIVLADKCDTDTLSALEGPLVEASARVSCSICDFLPHYLESIIRALGYDAKANPFSDTDIIEAPFAVKAGLGELGRSGLLVSPWGAQLRLLEVFTNMPLVPDMPIDFGLQEFCKVCKKCAENCPSQAISMDDEPSEVITTVKSIRWLQDEKKCLARRLAYGCAKCQSVCPWS

SEQ ID NO: 74934 - protein, 245 aa, Unknown
  misc_feature (1)..(245): tr|U5S4V6|U5S4V6_9BACT Putative reductive dehalogenase subunit A (Fragment) OS=bacterium enrichment culture cl one WLculture_2314_ORF_3 OX=1412312 GN=rdhA PE=4 SV=1
LEAADYTWSNAFQIAMDRWHITLEPGRYQQAPIAATKVELSPEEMTARIKKICRWFGCEQVGICEVTEDMKPFFYSVGRTRGTYTTGHANYVDNGREIPWPYPYKYCIVMADKCDTDTLNALTGPLVEASAKIACSQSDFAPHYLESIIRSLGHDAKANIFSDTDIMDTPFAVKAGLGELGRSGLVISPWGAQMRIMEVFTNLPLVPDKPIDFGLQEFCKVCKKCADNCPASAISMDDEPSEVDT

SEQ ID NO: 74935 - protein, 297 aa, Unknown
  misc_feature (1)..(297): tr|A0A132HYG1|A0A132HYG1_9BACT (Fe-S)-binding protein O S=bacterium F083 OX=1768114 GN=F083_776 PE=4 SV=1
MLPAATVKQLALDVGFHACGIAAATPLTADELGLHRWIAEGNHADMRYMERHVAMRHDPALLVPGAQTVISLLLGYKPSCYMCGDNRIAMYAYGDDYHTGIKQMLFRLIAAIRQVQPGFEAKPCVDTVPVADKHWAVRAGLGWLGRNTLLINPTYGSLCFLAELVTVTLVDSYDLPVANRCGDCHRCLDACPNRALQSGPNGGSRLDARRCTSYHTVESRASRLPESLQRRGYAFGCDCCQLVCPYNMQAPVSVQIGDAQLSELQSLEHADEATFRRLTRHRALNRINYAQWQRNIR

SEQ ID NO: 74936 - protein, 384 aa, Unknown
  misc_feature (1)..(384): tr|A0A202DMW3|A0A202DMW3_9BACT tRNA epoxyqueuosine(34) reductase QueG (Fragment) OS=bacterium F11 OX=1932698 G N=BVX98_03025 PE=4 SV=1
QLRAHSLGFDHLSATTPTIPEKDRDEYKAWVAAGLAGGMAYMERDPDRRVDLTTTYPGIKTVLTLGVSYYQGTLPPKPGQEYGRVARYAWGLDYHDVISERLQRFLASLHDMLGEDTGSVITIDSKPILERALAQSSGLGFIGKNTVLIIPRRTHSYHVGSWVFLTEILLTIPMDEEISPFPIVNGCGQCSLCLTHCPTQAFERPYRLQSDRCISYLTIENKGFIPREMRSKLDDWIFGCDVCQDVCPYNTKAFETRWPEFQANRGTGPWISLREIFEVGDQATFKKKWGLTPLNRAKRKGLLRNACVVAGNSEEDNLVPYLINLLDDPEPMVRGHALWGLSKLTSPKVGKKMAEGMLRREEDALVREECEGVLGGPAHIKCNS

SEQ ID NO: 74937 - protein, 315 aa, Unknown
  misc_feature (1)..(315): tr|A0A2H5VV36|A0A2H5VV36_9BACT Epoxyqueuosine reductase OS=bacterium HR09 OX=2035404 GN=queG PE=4 SV=1
MERAHHEAKEALRAYALQTLGFDLFGVAPAEPMEGQRHLAAWLALGFHGEMAYMARTANLRGDPRALLPGAQSVICVACTYHDPPDPPQQPGYARVARYARRRDYHKVMRKKLLQLGRYGRQMFPETQFRVVVDSGPLLEKEVAQRAGLGWIGKNTCLINRRLGSELLLGELITTVALPPDSPETDHCGSCTACLAACPTEALRGPYQLDARRCISYLTIEHKSAFDADHPPQLSGYLFGCDLCQTCCPWNRHAPPQVNPHLPTRSHLATLSVSELAGFDADAWAKLAEGTPLRRLTYERLRRNLGALDSTAKQE

SEQ ID NO: 74938 - protein, 396 aa, Unknown
  misc_feature (1)..(396): tr|A0A2H5W2L6|A0A2H5W2L6_9BACT Epoxyqueuosine reductase OS=bacterium HR10 OX=2035405 GN=queG PE=4 SV=1
MTLERLTREIKERARALGFHGVGITDVRPLEEAEARYHHWLREGLAADLQYMQTSAGQRAHPARVWPEARAVLVLVVNYYSGEFDALPRGHGRIARYAWGRDYHDVIPARLRQLVAEIEQLLRRPVRARCFTDAVPLLERALARRAGLGRIGWNACLITEAFGSWVFLSEILLDVELAPDPPETRACVSTFDCHRSCPTGALRPDGLVDARLCISYHTIENRGVIPRALRSKLGDWLFGCDVCQEVCPHNARVPITDWPEFHLEAGVGKTLALADVLAIASDEAFRQRFRGTALRRAKRRGLLRNAAIVAANTGYEEAIPQLRRLAREDPDEIIRGHALWALGVLDPAGSRAILERARRDVHPFVREEAEWALEASAGGEPSEGSANMKPSGAIAV

SEQ ID NO: 74939 - protein, 359 aa, Unknown
  misc_feature (1)..(359): tr|A0A2H5W5N5|A0A2H5W5N5_9BACT Epoxyqueuosine reductase OS=bacterium HR11 OX=2035406 GN=queG PE=4 SV=1
MEALPPWDDTSWIVAQAYLVGFDVVGVAAVDETASATESMFYWLAQGLQADMDWLQRTRAVRLDPRRRWPDLRAVVVVASGYPAWPTLQAPPEGYGRVSCYAWGRDYHRVLGRRLERLVAWARRRWPDDWFRWYVDTGPVAEKVWAVRAGVGWIGKHGNVIHPRLGSWTFLGVVLTSRPLRPAPHQAVADRCGTCTRCMDVCPTRAILAPGVVSAHRCISYWTIEHPGPIPEAVRPWIGSYLFGCDDCQTVCPWNRWAQTAGSFVPVVQRRRISLREALWMDEAAFHRTFAGTPVHRLGWWRLRRNALVVIGNHGDASLMEDLRRFLAVETDPVLREHAEWALDRLTRRHVSVASPVHR

SEQ ID NO: 74940 - protein, 370 aa, Unknown
  misc_feature (1)..(370): tr|A0A2H5WKI0|A0A2H5WKI0_9BACT Epoxyqueuosine reductase OS=bacterium HR14 OX=2035409 GN=queG PE=4 SV=1
MATGETSHAPHSLTEWVKAYARALGFDLVGIAPAVRPPHAEAFLLWLQQGYAGEMDYMERTAEQRLNPAELLPNAKSAVVVGLNYTPPELPPTDYRIARYALGEDYHTVIRSKLENLLSAFQALCPEAQGRVCVDSAPVLERELAWLAGLGWYGKNTCLINTHRGSYFFIGVLLLNVELDYDHPAFGGCGNCRRCLDACPTGALVEPYRLDARRCISYLTIELRDGIPEPLREPMGEWLFGCDICQEVCPFNHPRPHQPLRATPTQEPRFAPRPMPSLAEILEMDEEAFRERFRGSPIKRARWRGLVRNALIVAGNRTDPALLPLVERYCQHPDPMLREHAEWAKRRILQACSAPTPRHSIQDTPSVAEE

SEQ ID NO: 74941 - protein, 359 aa, Unknown
  misc_feature (1)..(359): tr|A0A2H5WSK2|A0A2H5WSK2_9BACT Epoxyqueuosine reductase OS=bacterium HR15 OX=2035410 GN=queG PE=4 SV=1
MEREQLSAWIKAYAQALGFELVGIAPAVRPPHADKLLWWLQQGYAGEMEYMERTAEQRIEPQLLLPGAKSAVVVGLNYTPSQLPETDYRIARYALGEDYHTVIRSKLETLLSAIRALLTECEGRVCVDSAPVLERDLAWLAGLGWYGKNTCLINTHRGSYFFIGVLLLTVELEYDHPAFGGCGRCRKCIDACPTGAIREPYVLDASRCISYLTIEQKGAIPGELREPMGEWLFGCDLCQEVCPFNQPRPHQPLRATPTNEPRLQPRSLPRLEEILMMNEEEFRRRFQGSPIRRAKWRGLVRNALIVAGNRGDPRYLPLIERFLNHPDPLLREHADWAHKQLQNSAINSAQAPRQAVSYG

SEQ ID NO: 74942 - protein, 303 aa, Unknown
  misc_feature (1)..(303): tr|A0A2H5X0S4|A0A2H5X0S4_9BACT Epoxyqueuosine reductase OS=bacterium HR16 OX=2035411 GN=queG PE=4 SV=1
MAYLARTADARCDPQQVLPGAKSAVVVGLNYAPAVSPVTDDPTRGIFARYALGDDYHEVMERKLRQLLEFIRQHRPDCRAKVYVDAGPVLERDLAWRAGLGWFGKNTMLINTRRGSYFLLGEILLDIELEYDHPAFGGCGKCNRCIEACPTGAIVAPYVLDARRCISYLTIELRGSIPEELRPKMGNRIFGCDICQEVCPFNQPRPHAPLRSAPTGEPGFTPREVTLTPKLTDLLRMNEEEFRSAFRNSPVKRAKWRGFRRNVAVAVGNSSDPDALPVLQQELQRETDPMVREHLQWAMERCR

SEQ ID NO: 74943 - protein, 394 aa, Unknown
  misc_feature (1)..(394): tr|A0A2H5X9H0|A0A2H5X9H0_9BACT Epoxyqueuosine reductase OS=bacterium HR17 OX=2035412 GN=queG PE=3 SV=1
MGVASLTPQQLALMVKQRGRELGFDLIGIAPVQSPPTYPHYEQWLAQGFHGAMAYMERGKEKRKDLRLILPDAKSVIVGAINYFAPDEQLPVRGEPHGLVSRYAWGADYHDVVLCKLEALLDYLRALLGDSVRGKAYVDTGPILERDAAVQAGLGWIGKNTCLINPHKGSWLFLGELIVNVELAPDAPFVRNHCGKCTRCLTACPTGAFVGPYRLDARRCISYLTIELRGSIPRELRPLMGTWIFGCDICQEVCPWNRKATPTHEDAFKPRPWAAPELLDLLTLTEEEFRERFKGSPLKRAKRSGLVRNASVAVGNLREVRAVPLLIRLLERDPDPVVREHAAWALGRIGTSAALAALQDALTVEANERVRTEIVLSLQEAGAAVVAPSSSVPL

SEQ ID NO: 74944 - protein, 326 aa, Unknown
  misc_feature (1)..(326): tr|A0A2H5XGM2|A0A2H5XGM2_9BACT Epoxyqueuosine reductase OS=bacterium HR18 OX=2035413 GN=queG PE=3 SV=1
MPGFDVHAQQRLAQALKQEARRLGFDACGISKAEPLDEEARRLEAWLKAGFHGSMHWMENHFDKRIDPTKLVEGAQSIISVLHNYYQPVAHDPSPETGKISRYAWGDDYHEVLKEKLYQLFAWLQAQVGEVHGRAFVDSAPVMDKAWARRSGLGWMGKNTNLINRRMGSFFFIGELIVDVPLPPDGPIPDYCGSCTRCIDACPTGALVQPYVLDARRCISYLTIEHRSDDIPAELQEKMGNWIFGCDICQDVCPWNKFKYATSEPRFMPRPGLPDTPLHRWEELDLEAFRKKFRKSAVQRAKFEGFKRNVRIALQNAHPVLRPGSF

SEQ ID NO: 74945 - protein, 331 aa, Unknown
  misc_feature (1)..(331): tr|A0A2H5XVF5|A0A2H5XVF5_9BACT Epoxyqueuosine reductase OS=bacterium HR20 OX=2035415 GN=queG PE=3 SV=1
MDAELSTAALTKELKDYCHRLGFDAVGIARAEALDDQREHLNTWLTRGYHATMHYMERTSQKRLDPRQILPSARSIVVVAMSYDTPYRHTDQPNRGKISRYGWGDDYHDVLLPKLRAAAAWLANRVPNAESKVYVDTGPVMEKQWARRAGIGWQGKNTNVISRTMGSFFFLGVLLTSVELEADAPIPDYCGTCTACLDACPTGALVEPYVLDASRCISYWTIETKPDVEFPESIRRNLDGWLFGCDVCQDVCPWNRFRKETRETAFFPRNDETSLALEQILAMTPEEFRQRFRGSPLKRPKLAGLQRNARMLQAAAECSQQSDVHAHDHSR

SEQ ID NO: 74946 - protein, 337 aa, Unknown
  misc_feature (1)..(337): tr|A0A2H5Y2G9|A0A2H5Y2G9_9BACT Epoxyqueuosine reductase OS=bacterium HR21 OX=2035416 GN=queG PE=3 SV=1
MGVSAEERRRRTEAVKDAARHLGFCEVGIARAEPLHEEFGRYLAWLERGYHGAMAYLERNLDRRADVRAILPGAQSVVVVAYNYYVPAGYEAFEREPHRYGKISRYAWGEDYHEVLRPKLEALALVISRIVPGAESRIAVDTSPVLEKAWAVRAGIGWQGKHTNIISRRYGSWLFLGVVITTAELEPDTPMKDYCGSCTACLRACPTGALVEPYVLDARRCLSYWTIETKPEMPIPTEIAERMEGWIFGCDICQEVCPWNRFQKPSQDSAFAPRQGETCLELDTLLAMTPEEFRQRFRRSPLKRPKYAGLRRNAHAWKRVVSQAVAHDDDEPERSAP

SEQ ID NO: 74947 - protein, 345 aa, Unknown
  misc_feature (1)..(345): tr|A0A2H5Y9H6|A0A2H5Y9H6_9BACT Epoxyqueuosine reductase OS=bacterium HR22 OX=2035417 GN=queG PE=3 SV=1
MDLKTRLKAHAQALGFDLVGVARAGPTPSADRYEEWVRAGRAATMAYLTRPDAIEKRRDLRNLWPEARSVIVVAMNYYAGEHPPPDDQPRGRVARYAWGDDYHEVIAERLRSLLEFLNREAGGSVRGKIYVDAGPVLERAWAVQAGLGWIGKNSMLIHPRLGSYLFLGVLLVDLDLEPDPPFPFDHCGTCTRCIDACPTGCIRPDRTLEAGRCLSYLTIERREGIPEDLRPAIGDWLFGCDICQEVCPWNQRFARPTREPAFQPREGIARMLLEEVLRMDEAAFRARFRRSAIHRAKWRGLVRNALVVAGNLRARALVPWIPMWREHEDPMLREHAEWAMQAMSR

SEQ ID NO: 74948 - protein, 135 aa, Unknown
  misc_feature (1)..(135): tr|A0A2H5YBP5|A0A2H5YBP5_9BACT Epoxyqueuosine reductase OS=bacterium HR23 OX=2035418 GN=queG_2 PE=4 SV=1
MNRKARPASLPEFQPNPAHQRLDLLDILSLSEEAFQERFRGTSIRRATRVGLQRNACVVLGNLSDPSAVPDLARVLREGETLVRGHSAWALGRIGGTRAVHVLEEALRHEQDPWVAEEIRLALQEAGARAPATAS

SEQ ID NO: 74949 - protein, 217 aa, Unknown
  misc_feature (1)..(217): tr|A0A2H5YBR0|A0A2H5YBR0_9BACT Epoxyqueuosine reductase OS=bacterium HR23 OX=2035418 GN=queG_1 PE=4 SV=1
MPRIERARIDALAQQVGLALVGCASADAFLEARDVALERLRQGLMGTLPWYHEERILRGTDPQVILPGARCIIAVAVSYWTPAEPAPRPLTGRVARYAWGQDYHKALKERLRALMRLLEREVGPFRWKVYVDDGPLLEREVARRAGMGWFGKNTNILTPIGSWVFLGEVITDLVIPPSPPLKKTCGRCSACLPACPTGALIAPYVLDSRRCIAYLTI

SEQ ID NO: 74950 - protein, 406 aa, Unknown
  misc_feature (1)..(406): tr|A0A2H5YRX7|A0A2H5YRX7_9BACT Epoxyqueuosine reductase OS=bacterium HR26 OX=2035421 GN=queG PE=4 SV=1
MKTLTRDRLKALAHEAGLAITAVTTADAFPEIAEVLVERIREGHMTGLDWFTEDRARFSADPRNLHPTARSIISVGVPYWQPDIQPPQDDVPRGRISRYAWGRDYHKTLRARMERLHALLEAELNRRIEARFLVDTARIVDRAAAARAGLGWYGKNTMVLVPGYGSWVMLGELVVDVEIEPDAPLRPRCGRCTACIDVCPTGALVGPYTLHTPRCISFLTIELRGPIPRELRPLMDNWVFGCDLCQEICPYTSAARPVADPDFQPERIEHCFPALDWLLRMTEEEFREVYRGRAVLRAKRSGLARNAAVALGNVGRPADLAVLEEVLTRHDLPLVRGHAAWAMARINADAARPALQAALEREADPYVREEIRQTLDAPPPPRNQRPPVAAARPVRLLVRRTPAAAR

SEQ ID NO: 74951 - protein, 392 aa, Unknown
  misc_feature (1)..(392): tr|A0A2H5Z0L3|A0A2H5Z0L3_9BACT Epoxyqueuosine reductase OS=bacterium HR27 OX=2035422 GN=queG PE=4 SV=1
MQLTRDELRQLAAQAGLSLVAVTTAEPFPHLADLLKARIRAGYLRGMDWFDERRADIAADPRNLHPTARSIVSVALPYWIPDIQPPNDGVARGRIARYAWGIDYHRVLRERMRRLHALLEARVGRTLEARFLVDTARIVDREVAARSGLGWQGKNTMILVPRHGSWVLLGELVLDIEIDPDQPLRPRCGRCQRCLDACPTGALVAPYELYAPRCISYLTIEHRGPIPWELRPLMGNWVFGCDVCQEVCPYTSAALPADDPIVRPERIEHCFPSLEWLLRMSEEEFRVVYQRRPVLRAKRAGLARNAAVALGNIGDSRHLAVLEETVLAHDQPLVRSHAAWAMARIDYSASLPVLRTALQHETDPLARTELQQLLDAPPEPVSQSSAVLPRSR

SEQ ID NO: 74952 - protein, 392 aa, Unknown
  misc_feature (1)..(392): tr|A0A2H5Z4W8|A0A2H5Z4W8_9BACT Epoxyqueuosine reductase OS=bacterium HR28 OX=2035423 GN=queG PE=4 SV=1
MRLTRDELRALAREAGLTLVAVTTAEPFPGLAELLRARIRAGFLQGMEWFNEQRAEVAADPRNLHPTARSIISVGLPYWLPDIQPPDDGIVRGRIARYAWGLDYHRVLRHRLQRLHQLLEARLGRRIEARYLVDTARIVDREVAVRAGLGWQGKNTLVIVPHHGSWVLLAELVVDIDLEPDEPLRPRCGRCRRCLDACPTGALVGPYALYAPRCISYLTIEHRGPIPWELRPLMGNWVFGCDICQEVCPYTAAAQPTDDDVVRPERLEHCYPSLEWLLRMTEEEFRSIYRGRPVLRAKRAGLARNATVALGNVGDARHLETLEEALLGHDQPLVRSHAAWAMARIDFALSEPVLRRARDRETDPLAREELERLLISPPEPLNRSSAVLPQSR

SEQ ID NO: 74953 - protein, 401 aa, Unknown
  misc_feature (1)..(401): tr|A0A2H5ZFG6|A0A2H5ZFG6_9BACT Epoxyqueuosine reductase OS=bacterium HR29 OX=2035424 GN=queG PE=4 SV=1
MEAKARVLELARAEGFATVRVARAEPLRKAFTAARAAWEEGRLADMAWMTPEWLARATDPETFLAGAKSVIVAGLPCHSPEPDPPADSPPGARGRVARYAWGRDYHRTFEKRLRRLARAIREEFGADARATVDYGPLLERPFALAAGMGWLGKSTMLLVPGFGPWMLLGAVATTLELEPDPRIGKTCGACVRCIVACPTGAISPDGRIDSRLCISYHTIENRGPIPRGLRAKFGSWVFGCDECLEGCPVGTHRFESHPDFLPPTYDHAYPRLAELIGLDDEEFRRRFQGRPLMRAKRDGLVRNACVALGNVGLPEDVPALIRALEDRSPLVRGHAAWALGRCIERFADSVAPAADEARAALEARAPLETDPWVREEIALALTVSAPAPAASAGPGGGPHVG

SEQ ID NO: 74954 - protein, 378 aa, Unknown
  misc_feature (1)..(378): tr|A0A2H5ZLS2|A0A2H5ZLS2_9BACT Epoxyqueuosine reductase OS=bacterium HR30 OX=2035425 GN=queG PE=4 SV=1
MESMVEGTVDPELIRAMAKEAGFALCRFAEAGVAPHAEAFESWLARGAHGTMTYLERTRQARVQPRAMLPDTRTVIVLGSPFASRGCSLPNWREELRGRIAAYALGADYHDVIRWRLRNFCQRIKSVYPNAVCYAEVDTGPVLERDWAWASGVGWFGKNTNILNPHFGSLFFLAVVMTNLEVPPDAQVPDRCGRCVRCIPACPTGALDGDYGLDARRCISYWTIEHRGSIPQRVRATLGEWVFGCDICQDVCPWNEKKARRLWLEPSTELHPFLPELLSLTDEEFRQRYRRTALWRAKREGIARNAAVVLGNSGNPDAVPFLARALASDPSAVVRAHAAWALGQIGTTAALDALLHHLRRETDPTVIAETQGALRAAA

SEQ ID NO: 74955 - protein, 321 aa, Unknown
  misc_feature (1)..(321): tr|A0A2H6A272|A0A2H6A272_9BACT Epoxyqueuosine reductase OS=bacterium HR33 OX=2035428 GN=queG PE=4 SV=1
MTPELKAGLVKRKALELGFDAVGVTDLSPPPHGEALRRWIHEGMAGTMRYMERQLEARLRPETILPGATRAVVVTKHYLTSDPPARKGKGRVAKYARGRDYHKALRPALENLAGYIRSLGGPGTLAKPYCDAGPVPERELAQRAGLGWIGKNTMLIDPKRGSYSFIAAILTDLDLATDPPFEADRCGSCNRCLEACPTEAFAAERVLDSRKCISYLTIEYKGDTVEPHLADRFGDWIFGCDICQDVCPWNIKFAEPPGDDLLEPDPNMALLDLEEIMSLSDSEFRKRFGRTAIMRAGREAMQRNAAIVRRLQSGGAYAGRP

SEQ ID NO: 74956 - protein, 391 aa, Unknown
  misc_feature (1)..(391): tr|A0A2H6ADK2|A0A2H6ADK2_9BACT Epoxyqueuosine reductase OS=bacterium HR36 OX=2035431 GN=queG PE=3 SV=1
MVTLPLALRRNLKDQLKAQARQLGFDLLGIALADQPATWPHFQDWLRRGFAGRMAYMHRQAQARSHPRHVFPEVRSVIMAGLNYKPRQLASTLALSGSTGRVSCYAWARDYHRVLRRKLQQLLRWLQNQVPDCQGRAVVDSAPLLERDFARRAGLGWFGKNTMLINTRLGSFLFLGALLVNLEFEPDPPLDTFHCGTCTACLEACPTQAILAPHLLDARRCISYLTIELRGPIPLELRRAIGDWVFGCDICQDVCPWNRKSPPGRCPDLVPRSDLVALDLLELFSLTEAQFRAKFAGTALMRARRDGLLRNAAIVLGNRKDASAVPALCLALNDPAAVVRGAAAWALGQIATADALEALRKRLDKEADESVRAEIANALRELTFLPSASVQ

SEQ ID NO: 74957 - protein, 377 aa, Unknown
  misc_feature (1)..(377): tr|A0A2H6AJY5|A0A2H6AJY5_9BACT Epoxyqueuosine reductase OS=bacterium HR37 OX=2035432 GN=queG_2 PE=3 SV=1
MDTVALTRSIKEKALEIGFDLVGISPVGPFPESQFFKEWLSKGFNGEMKYMERNSERREDLRRVFPEARSVISCGLNYNTEYPYSINRVDKQRGWISRYAWGDDYHEVIKDRLSKLLGFIREVSPVEVKALIYVDTGPVLERVYGRYGGIGWIGKNTCLINQKIGSWIFIGEIITNLELNYDSPVPDRCGTCRRCIDACPTGALVKPYVLDSRLCISYLTIELRGKIPVELREKVGNNVFGCDICQDVCPWNRRAKFSRETSFLPREGLLNPELSSLLELAEEDFKKVFRKSPVKRAKRGGFIRNVLVAMGNSGNKRFIPHVKRLLKDADPLVRAHAVWALWKLEGKDALETIKGLLAKEHDPMVREEILNVMNQGL

SEQ ID NO: 74958 - protein, 248 aa, Unknown
  misc_feature (1)..(248): tr|A0A2H6AJ78|A0A2H6AJ78_9BACT Epoxyqueuosine reductase OS=bacterium HR37 OX=2035432 GN=queG_1 PE=4 SV=1
MIDISSTYEKLKTLLKEEGFNLICRINVEEYDKETPSTRRISNILPEAKSAIIVAFAGKGFWEKLKRFLEENPRFARSTENWIDEYTVLKITEVTAILKPRVSKCKVVFPFSQPGLNLDFMKLGELGGIGTKSLLGILIHPTYGSWISIRGAILTDAEFNSYDGPLANFTPCKECQKPCINACPAKAISLNGWNYKACLHFRLSTDICSSNCISRRACPYGMEHQYSEEQLAHHQRAVLKDVKKYWCD

SEQ ID NO: 74959 - protein, 385 aa, Unknown
  misc_feature (1)..(385): tr|A0A2H6B0Y7|A0A2H6B0Y7_9BACT Epoxyqueuosine reductase OS=bacterium HR40 OX=2035435 GN=queG PE=3 SV=1
MELVAEVKARARALGFDVVRVTQARLPEDVRREYRAFLAAGRAGDMDWLVATADRREDPTRLWPEARSAVVCGMNYAPAGEPLANLSRPEVGNISVYARGRDYHEVLKGRLKQLAGWLAARAGARVKVFVDTAPLLEKPLAQQAGLGWQGKHTNLVSRQFGSWLFLGEILTDLELPADPPERDRCGSCRRCLDICPTGAILGPRRLDPTLCVSYLTIEHKGPIPRSLRPLLGNRIYGCDDCLAVCPWNKFARTASRGLFAHRSELDAPPLADLVRLDQAGFRALFRGTAIRRIGLARLLRNVLLAIGNSGRPELSSAASSRLTDPSPLVRGAAVWAVGRLAAPEELAALACRHLPGERDPTVREEWESALAEVTAQARSARLSGS

SEQ ID NO: 74960 - protein, 311 aa, Unknown
  misc_feature (1)..(311): tr|A0A3L8A2X3|A0A3L8A2X3_9BACT tRNA epoxyqueuosine(34) reductase QueG OS=bacterium J10(2018) OX=2320122 GN=que G PE=4 SV=1
MNSKPSICSDAVTSEALRLGATAIGLARAEPVDTTAAARYDAWIAAGCHGDMGYMARNTGLRNDPRGLLPSARTVIVAAFNYFPRHQQPAENPQFAYYAYGRDYHEVVRERLGMLAHFIKENYGGETRVCVDTAPMHERYWAQKAGIGFEGINSQLIIPGQGSYFFLGEVLTSVNFTPSEPCDTDCGRCGACMRACPSGAIKGDGTIDASRCLSYLTIEYRGDLPADTPAGNRIYGCDTCQQVCPHNRHAQPTEIADFAPSDQFLALDKQRLAALTPESFNILFRHSAVKRTKLCGLLRNLTLISDKKKSI

SEQ ID NO: 74961 - protein, 356 aa, Unknown
  misc_feature (1)..(356): tr|A0A4S1HMS7|A0A4S1HMS7_9BACT Epoxyqueuosine reductase OS=bacterium M00.F.Ca.ET.141.01.1.1 OX=2563898 GN=queG PE=3 SV=1
MSPAPAPVDPAQAVQRIRALARAHGFQRCGIAGIELGEDEAHLADWLGQGLYGTMDWMARHGTLRARPAELLPGTVRVISVGMDYSHKDDTEAWATLADPGRAYVARYALGRDYHKLMRNRLQKLATQINDEVAPLGYRVFVDSAPVLERALARNAGLGWIGKHTCLIDRHGGSWFFIGEIYIDIPLPIDTPATAHCGTCTRCIDVCPTQAITGPQRLDARRCISYLTIEHDGAIPEDMRPLIGNRIYGCDDCQLVCPWNKFAKRTDEADFRARNNLDSARLDQLFAWDEGEFLRRTEGSPIRRSGHERWLRNIAVALGNAPSSAEALAALHTRVDDPSPLVREHVQWALDQHTVR

SEQ ID NO: 74962 - protein, 384 aa, Unknown
  misc_feature (1)..(384): tr|A0A4S1HQR8|A0A4S1HQR8_9BACT Epoxyqueuosine reductase OS=bacterium M00.F.Ca.ET.141.01.1.1 OX=2563898 GN=queG PE=3 SV=1
MRTSTSDAAKLRALIDAEARRAGFDAVAVTTPDAIPLAPARLAEFVADGFHGSMDWIAETIARRSEPSTLWPDVRSIVVLAMNYGPDRDPRDLLSKHDRGAISVYAQNRDYHEVMKGRLKEIAGKIVARAGGDVKVFVDTAPVMEKPLAEAAGLGWQGKHTNLVSREHGSWLFLGTIFTTAELAPDEAGIDHCGSCRACLDACPTDAFPAPYRLDARRCISYLTIENKGPIPHEFREAIGNRIYGCDDCLAACPWNKFASAASEAKLAARDDLREPALADLLTLDDAAFRAFFSGSPIKRIGRDRFVRNVLIAVGNSGEGALAGIVRDLLGDASPLVRGAAIWALARLVPETEYAERAANGLETEDDAMVREEWRLARPTRTHA

SEQ ID NO: 74963 - protein, 383 aa, Unknown
  misc_feature (1)..(383): tr|A0A4S1AQC3|A0A4S1AQC3_9BACT Epoxyqueuosine reductase OS=bacterium M00.F.Ca.ET.146.01.1.1 OX=2563899 GN=queG PE=3 SV=1
MRTSTSEKLRALIDAEARRAGFEAVAVTRPNAIPLAPARLAEFVSDGFHGSMEWIAETLQRRAEPSTLWPEVRSIVVLAMNYGPDHDPRDILEKRNRGAISVYAQNRDYHDVMKGRLKEIAGKLVARAGGDVKVFVDTAPVMEKPLAEAAGLGWQGKHTNLVSRAHGSWLFLGTIFTTAELESDKAEIDHCGSCRACLDACPTNAFPAPYRLDARRCISYLTIENKGPIPREFREKIGNRIYGCDDCLAACPWNKFASAASEAKLAARNDLREPKLSELLALDDAAFRAFFSGSPIKRIGRDRFVRNVLIAAGNSGDASLAPVVRGLLGDASPLVRGAAIWALSRLLPDREFGELAATASKTEIDTAVQEEWQAALATSAAAD

SEQ ID NO: 74964 - protein, 384 aa, Unknown
  misc_feature (1)..(384): tr|A0A4S1BLQ4|A0A4S1BLQ4_9BACT Epoxyqueuosine reductase OS=bacterium M00.F.Ca.ET.152.01.1.1 OX=2563900 GN=queG PE=3 SV=1
MRTSTSDAAKLRALIDAEARRAGFDAIAVTSPDAIPLAPARLAEFVGDGFHGSMDWIAETLLRRSEPSTLWPEVRSIVVLAMNYGPDHDPRELQARRDRGAISVYAQNRDYHEVMKGRLKEIAGKIVARAGGDVKVFVDTAPVMEKPLAEAAGLGWQGKHTNLVSRQHGSWLFLGTIFTTAELAADRAEIDHCGSCRACLAACPTDAFPAPYRLDARRCISYLTIENKGPIPHEFREKIGNRIYGCDDCLAACPWNKFASAASEAKLAARDDLREPGLADLLRLDDAAFRAFFSGSPVKRIGRDRFIRNVLIATGNSGEAGLAGIVRDLLGDPSPLVRGAAIWALARLVPETEYAERAASGLKTESDAAVRDEWARPVPARAHA

SEQ ID NO: 74965 - protein, 415 aa, Unknown
  misc_feature (1)..(415): tr|A0A4S0YQY0|A0A4S0YQY0_9BACT Epoxyqueuosine reductase OS=bacterium M00.F.Ca.ET.155.01.1.1 OX=2563901 GN=queG PE=3 SV=1
MNRSPESPMCPVSDAPASGGEAHAERQFDEAALRSLAQDIKTWGRELGFGAIGISDTDLRAAEAPLAAWLEAGCHGEMDYMAKHGMKRARPAELVAGTLRVITARIAYLPAEALNGKPPASELQEAPPGRDWRAAEHARLTDPSAAVVSIYARGRDYHKVMRNRLQQLSEKIQAQIGAFGYRVFTDSAPVLEVELAQKAGTGWRGKHTLLLQRDAGSLFFLGEIYVDVPLPTDAETSPETAPQEPGSHCGSCTRCIGACPTGAIVGPYKVDARLCISYLTIELKGSIPVEMRPLIGNRVYGCDDCQLVCPWNKFAQAAPVADFDVRHGLDRASLVELFGWSADEFDARMQGSAIRRIGYERWLRNLAVGMGNALRASRDTLSAEAREAIVDALERRADDASALVREHVQWALEAA

SEQ ID NO: 74966 - protein, 384 aa, Unknown
  misc_feature (1)..(384): tr|A0A4S0ZVF6|A0A4S0ZVF6_9BACT Epoxyqueuosine reductase OS=bacterium M00.F.Ca.ET.156.01.1.1 OX=2563902 GN=queG PE=3 SV=1
MRTSTSDAAKLRALIDAEARRAGFDAVAVTSPDAIPLAPARLAEFVADGFHGSMDWIAETIARRSEPSTLWPNVRSIVVLAMNYGPDHDPRDLLSKRDRGAISVYAQNRDYHEVMKGRLKEIAGKIVARAGGDVKVFVDTAPVMEKPLAEAAGLGWQGKHTNLVSREHGSWLFLGTIFTTAELAPDEAEIDHCGSCRACLDACPTDAFPAPYRLDARRCISYLTIENKGPIPHEFREAIGNRIYGCDDCLAACPWNKFASAASEAKLAARDDLREPALADLLALDDAAFRAFFSGSPIKRIGRDRFVRNVLIAAGNSGEGALADIVRDLLGDASPLVRGAAIWALARLVPETEYAERAANGLETEDDAMVRDEWRLARPTRTHA

SEQ ID NO: 74967 - protein, 383 aa, Unknown; identical to SEQ ID NO: 74963
  misc_feature (1)..(383): tr|A0A4S0ZEV8|A0A4S0ZEV8_9BACT Epoxyqueuosine reductase OS=bacterium M00.F.Ca.ET.156.01.1.1 OX=2563902 GN=queG PE=3 SV=1

SEQ ID NO: 74968 - protein, 383 aa, Unknown
  misc_feature (1)..(383): tr|A0A4S0WK68|A0A4S0WK68_9BACT Epoxyqueuosine reductase OS=bacterium M00.F.Ca.ET.157.01.1.1 OX=2563903 GN=queG PE=3 SV=1
MRTSTSEKLRALINAEARRAGFEAVAVTRPDTIPLAPARLAEFVSDGFHGSMEWIAETLQRRAEPSTLWPEVRSIVVLAMNYGPDHDPRDILEKRNRGAISVYAQNRDYHDVMKGRLKEIAGKLVARAGGDVKVFVDTAPVMEKPLAEAAGLGWQGKHTNLVSRAHGSWLFLGTIFTTAELESDKAEIDHCGSCRACLDACPTNAFPAPYRLDARRCISYLTIENKGPIPREFREKIGNRIYGCDDCLAACPWNKFASAASEAKLAARNDLREPKLSELLALDDAAFRAFFSGSPIKRIGRDRFVRNVLIAAGNSGDASLAPVVRGLLGDASPLVRGAAIWALSRLLPDREFGELAATASKTEIDTAVQEEWQAALATSAAAD

SEQ ID NO: 74969 - protein, 383 aa, Unknown; identical to SEQ ID NO: 74968
  misc_feature (1)..(383): tr|A0A4V3NAM5|A0A4V3NAM5_9BACT Epoxyqueuosine reductase OS=bacterium M00.F.Ca.ET.159.01.1.1 OX=2563904 GN=queG PE=3 SV=1

SEQ ID NO: 74970 - protein, 384 aa, Unknown; identical to SEQ ID NO: 74964
  misc_feature (1)..(384): tr|A0A4S2K9W3|A0A4S2K9W3_9BACT Epoxyqueuosine reductase OS=bacterium M00.F.Ca.ET.162.01.1.1 OX=2563905 GN=queG PE=3 SV=1

SEQ ID NO: 74971 - protein, 356 aa, Unknown; identical to SEQ ID NO: 74961
  misc_feature (1)..(356): tr|A0A4S0YM94|A0A4S0YM94_9BACT Epoxyqueuosine reductase OS=bacterium M00.F.Ca.ET.163.01.1.1 OX=2563906 GN=queG PE=3 SV=1

SEQ ID NO: 74972 - protein, 383 aa, Unknown; identical to SEQ ID NO: 74963
  misc_feature (1)..(383): tr|A0A4S0Y6G3|A0A4S0Y6G3_9BACT Epoxyqueuosine reductase OS=bacterium M00.F.Ca.ET.163.01.1.1 OX=2563906 GN=queG PE=3 SV=1

SEQ ID NO: 74973 - protein, 383 aa, Unknown
  misc_feature (1)..(383): tr|A0A4S1HBP6|A0A4S1HBP6_9BACT Epoxyqueuosine reductase OS=bacterium M00.F.Ca.ET.168.01.1.1 OX=2563907 GN=queG PE=3 SV=1
MDVADEKQRIRARKLTDFIRQEALSLGFDLCRVTAPDSIPLAPERLREFLGKGYHGTMAWMEETEARRAEPKTLWSDVRSIVMFGLNYGPDEDPRNLLSKPDKAAISVYARNRDYHDVIKGRLKEIATRFAARAGEDVKVFVDTAPVMEKPLAASAGLGWQGKHTNLVSRSHGSWLFLGSMFTTADLCLDEAEKDHCGSCRACLDACPTAAFPAPYQLDARRCISYLTIEHKGPIPHEFRPMMGNRIYGCDDCLAACPWNKFAASASEMKLQAREDLKEPSIDFLLTLDDAAFRSFFSGSPVKRIGRSRFIRNVLIAAGNSGNRQFVERCKALAEMDPSPEVRGMAAWALSRLMDRQEFRTYSATRAPETDPEAEMEWQLAEA

SEQ ID NO: 74974 - protein, 153 aa, Unknown
  misc_feature (1)..(153): tr|A0A4S1GNZ9|A0A4S1GNZ9_9BACT tRNA epoxyqueuosine(34) reductase QueG (Fragment) OS=bacterium M00.F.Ca.ET.168. 01.1.1 OX=2563907 GN=queG PE=4 SV=1
YGPDHDPRKLQARRDRGAISGYAQNRDYHDIMKGRLKEVAGKIVAKAGGDVKVFVDTAPVMEKPLAEAAGLGWQGKHTNLVSRVHGSWLFLGTIFTTAELEPDKAEIDHCGSCRACLDVCPTDAFPAPYRLDARRCISYLTIENKGPIPVEFR

SEQ ID NO: 74975 - protein, 356 aa, Unknown; identical to SEQ ID NO: 74961
  misc_feature (1)..(356): tr|A0A4S0R5M2|A0A4S0R5M2_9BACT Epoxyqueuosine reductase OS=bacterium M00.F.Ca.ET.177.01.1.1 OX=2563908 GN=queG PE=3 SV=1

SEQ ID NO: 74976 - protein, 385 aa, Unknown
  misc_feature (1)..(385): tr|A0A4S0QB34|A0A4S0QB34_9BACT Epoxyqueuosine reductase OS=bacterium M00.F.Ca.ET.177.01.1.1 OX=2563908 GN=queG PE=3 SV=1
MRTSTSDKTRLRALIDAEARRAGFDAVAVTRPDAIPLAPARLAEFVASGFHGSMDWIAETIERRAEPSSLWPQVRSIIVLAMNYGPDRDPRDVLKKRDRGAISVYAQNRDYHDVMKGRLKEIAGKIVARAGGDVKVFVDTAPVMEKPLAEAAGLGWQGKHTNLVSRAHGSWLFLGTIFTTAELEPDRPEEDHCGSCRACLDVCPTDAFPAPYRLDARRCISYLTIENKGPIPREFREKIGNRIYGCDDCLAACPWNKFASAASEAKLAARAELREPPLSELLLLDDAAFRSFFSGSPIKRIGRDRFVRNVLIAAGNSGDASLTSIVHGLLEDGSPLVRGAAVWALSRLMPARDFATHAASALQTEGDAAVRDEWFLAQRHSAEVS

SEQ ID NO: 74977 - protein, 383 aa, Unknown; identical to SEQ ID NO: 74973
  misc_feature (1)..(383): tr|A0A4S0MWX6|A0A4S0MWX6_9BACT Epoxyqueuosine reductase OS=bacterium M00.F.Ca.ET.179.01.1.1 OX=2563909 GN=queG PE=3 SV=1

SEQ ID NO: 74978 - protein, 375 aa, Unknown
  misc_feature (1)..(375): tr|A0A4S0LL37|A0A4S0LL37_9BACT tRNA epoxyqueuosine(34) reductase QueG OS=bacterium M00.F.Ca.ET.180.01.1.1 OX=2 563910 GN=queG PE=4 SV=1
MNVDQLKQDVIDYAHSIGIDSIGFTTADPFDELKQKLVDYHEKGYASGFEESDIGLRTEPKLTLPTARSIIAIAVGYPNKLKGAPRSVRGDRRGMFARASWGQDYHSIMRKRLDKLAEYLETRVPDVEIKSMVDTGVLSDRAVAERAGLGYVGRNGFVINPDLGTWTYLGEMLVSVPFPPDDPIIDSCGDCTICVDRCPTGALVGDGQLNSQKCISFLTQTKGYMQDEYRYKIGNRLYGCDTCQQVCPRNRGINTQHDDIVLEPEILKPRLVPLLQMSNKEFKNTYGHLAGAWRGKKPIQRNAILALAHFKEETAIPELQEVALNDPRPMIRATAYWAIGQIQGEQARPFIEAHYDSELEEVQHEMLKGLDMRRE

SEQ ID NO: 74979 - protein, 415 aa, Unknown; identical to SEQ ID NO: 74965
  misc_feature (1)..(415): tr|A0A4S0J1T7|A0A4S0J1T7_9BACT Epoxyqueuosine reductase OS=bacterium M00.F.Ca.ET.191.01.1.1 OX=2563911 GN=queG PE=3 SV=1

SEQ ID NO: 74980 - protein, 383 aa, Unknown; identical to SEQ ID NO: 74973
  misc_feature (1)..(383): tr|A0A4S0GPB7|A0A4S0GPB7_9BACT Epoxyqueuosine reductase OS=bacterium M00.F.Ca.ET.194.01.1.1 OX=2563912 GN=queG PE=3 SV=1

SEQ ID NO: 74981 - protein, 384 aa, Unknown; identical to SEQ ID NO: 74966
  misc_feature (1)..(384): tr|A0A4V3LPZ9|A0A4V3LPZ9_9BACT Epoxyqueuosine reductase OS=bacterium M00.F.Ca.ET.199.01.1.1 OX=2563913 GN=queG PE=3 SV=1

SEQ ID NO: 74982 - protein, 356 aa, Unknown; identical to SEQ ID NO: 74961
  misc_feature (1)..(356): tr|A0A4S0EV19|A0A4S0EV19_9BACT Epoxyqueuosine reductase OS=bacterium M00.F.Ca.ET.199.01.1.1 OX=2563913 GN=queG PE=3 SV=1

SEQ ID NO: 74983 - protein, 384 aa, Unknown; identical to SEQ ID NO: 74964
  misc_feature (1)..(384): tr|A0A4R9ZN29|A0A4R9ZN29_9BACT Epoxyqueuosine reductase OS=bacterium M00.F.Ca.ET.205.01.1.1 OX=2563914 GN=queG PE=3 SV=1

SEQ ID NO: 74984 - protein, 383 aa, Unknown; identical to SEQ ID NO: 74963
  misc_feature (1)..(383): tr|A0A4R9TYD6|A0A4R9TYD6_9BACT Epoxyqueuosine reductase OS=bacterium M00.F.Ca.ET.221.01.1.1 OX=2563915 GN=queG PE=3 SV=1

SEQ ID NO: 74985 - protein, 383 aa, Unknown; identical to SEQ ID NO: 74963
  misc_feature (1)..(383): tr|A0A4R9U5A5|A0A4R9U5A5_9BACT Epoxyqueuosine reductase OS=bacterium M00.F.Ca.ET.222.01.1.1 OX=2563916 GN=queG PE=3 SV=1

SEQ ID NO: 74986 - protein, 383 aa, Unknown; identical to SEQ ID NO: 74963
  misc_feature (1)..(383): tr|A0A4R9T5H0|A0A4R9T5H0_9BACT Epoxyqueuosine reductase OS=bacterium M00.F.Ca.ET.227.01.1.1 OX=2563917 GN=queG PE=3 SV=1

SEQ ID NO: 74987 - protein, 415 aa, Unknown; identical to SEQ ID NO: 74965
  misc_feature (1)..(415): tr|A0A4V3KDS8|A0A4V3KDS8_9BACT Epoxyqueuosine reductase OS=bacterium M00.F.Ca.ET.228.01.1.1 OX=2563918 GN=queG PE=3 SV=1

SEQ ID NO: 74988 - protein, 375 aa, Unknown; identical to SEQ ID NO: 74978
  misc_feature (1)..(375): tr|A0A4R9SD77|A0A4R9SD77_9BACT tRNA epoxyqueuosine(34) reductase QueG OS=bacterium M00.F.Ca.ET.229.01.1.1 OX=2 563919 GN=queG PE=4 SV=1

SEQ ID NO: 74989 - protein, 383 aa, Unknown
  misc_feature (1)..(383): tr|A0A4R9RJJ1|A0A4R9RJJ1_9BACT Epoxyqueuosine reductase OS=bacterium M00.F.Ca.ET.230.01.1.1 OX=2563920 GN=queG PE=3 SV=1
MRTSTSEKLRALINAEARRAGFEAVAVTRPDTIPLAPARLAEFVSDGFHGSMEWIAETLQRRAEPSTLWPEVRSIVVLAMNYGPDHDPRDILEKRNRGAISVYAQNRDYHDVMKGRLKEIAGKLVARVGGDVKVFVDTAPVMEKPLAEAAGLGWQGKHTNLVSRAHGSWLFLGTIFTTAELESDKAEIDHCGSCRACLDACPTNAFPAPYRLDARRCISYLTIENKGPIPREFREKIGNRIYGCDDCLAACPWNKFASAASEAKLAARNDLREPKLSELLALDDAAFRAFFSGSPIKRIGRDRFVRNVLIAAGNSGDASLAPVVRGLLGDASPLVRGAAIWALSRLLPDREFGELAATASKTEIDTAVQEEWQAALATSAAAD

SEQ ID NO: 74990 - protein, 375 aa, Unknown
  misc_feature (1)..(375): tr|A0A4V3KF65|A0A4V3KF65_9BACT tRNA epoxyqueuosine(34) reductase QueG OS=bacterium M00.F.Ca.ET.230.01.1.1 OX=2 563920 GN=queG PE=4 SV=1
MLDTTNELNALKGWIKAQAKALGFADCGFVHPANPIFVKQLDALQTWLAQGKHGDMLFFEDNHDKRANPALLVDKTQSIISVRLDYLVTPPPKRSVPDNERPNSAIIARYARGRDYHKTMRGLLKTLARLIQDKLTTDYPQYANDFVFRPFSDSAPIFERALAEQAGLGWTGKHTLLIHPQAGSFFVLGELFTSLPLAEDKKQIETISSHCGSCRACIHVCPTHAIRKTPTGHYDVDARLCISYLTIELNGKIPVELRPKIGNRIFGCDDCQLICPWNKFARLATIEDFNPRHRLDDMSLLELWAWDAQDFLTKTEGSPIRRTGYDNFMRNVAVALGNAPFSQAIIDKLQEKRPMLSENTQEHIDWATQQQLSKS

SEQ ID NO: 74991 - protein, 374 aa, Unknown
  misc_feature (1)..(374): tr|A0A5J4E0Y2|A0A5J4E0Y2_9BACT Epoxyqueuosine reductase OS=bacterium MnTg02 OX=2080452 GN=queG PE=4 SV=1
MPDDLKARVKSMALEVGFDEVRVTTTRSIPHAGERLMHFLGEGRHGDMEWMESTAARRASPHLLWPEAKSIIVLGMNYGPDKDPLDILKDKQAGAVSVYAQGKDYHDIIKKKLKRVAGWLHRSSGMAVKVFVDTAPLMEKPLGEAAGLGWQGKHTNLVSRKFGSWLFLGSIMTTAELQPDQPEKDHCGSCRLCLDICPTDAFPAPYELDARRCISYLTIEHKGHIPEALRAPMGNRIFGCDDCLAVCPWNKYAQTAREVRLKAREGAGDISLAALLKLDDTNFRARFAGSPVKRTGRDRFIRNTLIAAGNSGDASLLPDIERLLNDASPLVRAMAVWALKQLTSADEFSALSSRFAGDESDTDVRAEWTRAARL

SEQ ID NO: 74992 - protein, 283 aa, Unknown
  misc_feature (1)..(283): tr|A0A5J4ECC1|A0A5J4ECC1_9BACT Epoxyqueuosine reductase OS=bacterium MnTg04 OX=2080454 GN=queG PE=4 SV=1
MDYLPDAADAWQTLAQGNHAYVSRYALGRDYHKLLRPRLAKLAERIRQSIGELGYRVFVDSAPVLEKALARNSGLGWIGKHTNLINREAGSWFFLGEIFVDLPLPPDQPVANHCGSCRACLDVCPTQAIIAPYQVDARRCISYLTIENRGAIPIEFRQAMGNRIYGCDDCQLVCPWNKFAKLSCERDFQPRHELDRKKLVELFSWSEEEFLRKTQGSAIRRAGYAGWLRNLAVALGNADPSNEVIATLNSRKDHPDEMVREHIEWALEKQISGKTLHKSSGNM

SEQ ID NO: 74993 - protein, 306 aa, Unknown
  misc_feature (1)..(306): tr|A0A132H7E8|A0A132H7E8_9BACT Iron-sulfur cluster bind ing protein OS=bacterium P201 OX=1768112 GN=AUK64_125 P E=4 SV=1
MDSGWIVAEAERMGFDACGIAQATALEEESAHVEQWLESDCEGEMGYLTRNKEKRYDPRLLVEGTKSIVTVLYNYYPKKRIGDSDKFKIAKYAYGADYHDVLKRKMHQLLEGIEAQTGKLEGTRLFVDSAPVLDRAWAVRCGLGFIGKNTTLIHPKKGSFFFIGHLFLPIELEGTGKPLTNCCGRCTKCLDACPSGALEAPFHIDARKCISYLTIEYKGSLAGIDPKTFNGWMYGCDICQDVCPYNRFALPNREPDFQPSERLIAMHDEDWKSLSKEDFDALFKHSAVQRAGYEGLKRNIDFLSYL

SEQ ID NO: 74994 - protein, 416 aa, Unknown
  misc_feature (1)..(416): tr|A0A4Q2RFF3|A0A4Q2RFF3_9BACT Epoxyqueuosine reductase OS=bacterium RmlP001 OX=2316527 GN=queG PE=3 SV=1
MGGGRDGEDLVRAGEVAPLLPHPAGRPRAGHHPEPGLRGPGFLTDAEGAKRRIAARAAALGFDACRVASPDAVPEAAARLRAWLAAGHHGTMDWMAETAERRASPRALWGDVRSVVMLGLNYGPETDPRAALARRDAGAVSVYARHRDYHDVVKGKLKELAGFMTRLEAGTDVKVFVDTAPVMEKPLAEAAGLGWAGKHTNLVSRDFGSWLFLGSVFTTLALPPDAPGGDACGSCRACLDACPTGAFPAPRQLDARRCISYLTIEHKGPVAPELRPLMGNRIYGCDDCLAACPWNKFAQAGRDAKLKARDDLAAPSLDALSRLDDAGFRALFSGSPIKRIGVDRFLRNVLIAIGNSGDAGLVPRALALLRHPSPLVRGMAVWAGRRLLGIEALLAASAGACAGETDPHVLAEWECP

SEQ ID NO: 74995 - protein, 387 aa, Unknown
  misc_feature (1)..(387): tr|A0A4Q2UAP2|A0A4Q2UAP2_9BACT Epoxyqueuosine reductase OS=bacterium RmlP026 OX=2316528 GN=queG PE=3 SV=1
MAAARGPPDVDADIKARIAARAAALGFDGCRVASPDAVPEAAARLRAWLAAGRHGTMDWMSDTAERRGSPAALWPEVRSVIMLGLNYGPEDDPRAVLDRRHAGAVSVYARHRDYHDVVKGKLKDLAGFVARQGGVDARGAATEVKVFVDTAPVMEKPLAEAAGLGWAGKHTNLVSRDFGSWLFLGSIFTTLPLAPDPPGGDACGSCRACLDACPTGAFPAPRQLDARRCISYLTIEHKGAIDPELRPLMGNRIYGCDDCLAACPWNKFAQAGRDAKLRARDDLAAPSLDALSRLDDAGFRALFSGSPIKRIGVDRFLRNVAIAIGNSGDAALAPRAVALLAHPSPLVRAMAVWAGRRLLGTEGLALASPSCRAAEADADVLAEWERP

SEQ ID NO: 74996 - protein, 393 aa, Unknown
  misc_feature (1)..(393): tr|A0A177PVV0|A0A177PVV0_9BACT Uncharacterized protein OS=bacterium SCGC AG-212-C10 OX=1799370 GN=AYO38_07680 PE=4 SV=1
METVTAKDRVLQMAHEEGFALVRIAGADVLEQSRAAALEREERGLLDGLAWMTDEWLTRATDPVLFLDGARSIVLCALPYARGDGDPGSDGVTRGRVAAYAGGRDYHRVFEKKLRRIAARIRDEFTAGARATVDYGPLLERPLAQVAGIGWQGKSTMLLAPGFGPWVLLGAVATTVELEPDAPLRKSCGSCVRCVVSCPTGALGSDGSVLDARLCISYHTIENRGVIPVELRPKFGAWIFGCDACLESCPVGAGSTASHPDFVPRSPGDLRPDLNELLLLDESAFLERFRGRPLMRAKRDGLVRNACIAMGNTGAVHDLPALLAALHDRSPLVRGHAAWAAAHLCRRLGDASSAAGAADVLRARLDVESEAWVREELAAAIISCDAPLPGGTS

SEQ ID NO: 74997 - protein, 310 aa, Unknown
  misc_feature (1)..(310): tr|A0A0S8HWM3|A0A0S8HWM3_9BACT Uncharacterized protein OS=bacterium SM23_31 OX=1703762 GN=AMJ80_10490 PE=4 SV= 1
MQDLIKITQNIKSKALALGFDKVGTARAVTLDGTFLSKWLSRNYHGTMSWMSRTAGIRLNPKKYLPGARSVIAVAVNYYTEDPPRPPGSAQVSRYALGRDYHLVLGKMLESLLEYIHELLPDVKGKIAVDDAPVMDKIWAYKAGIGWIGKHSNLITRELGSYVFLGEILLTAGLQYDEPIQDYCGSCTRCIDACPTGAILDDKVLDSNKCISYRTIEYRGDFTEEWEGKNQDWIFGCDVCQEVCPWNIVAAPTNIPDFLLADGKRFPLLSNILQLTPEEFQMNYKDSPIKRSKWEGLLRNAEYVRKGYLG

SEQ ID NO: 74998 - protein, 314 aa, Unknown
  misc_feature (1)..(314): tr|A0A424SHC8|A0A424SHC8_9BACT tRNA epoxyqueuosine(34) reductase QueG OS=bacterium TMED144 OX=1986778 GN=queG PE=4 SV=1
  misc_feature (65)..(65): Xaa can be any naturally occurring amino acid
  misc_feature (162)..(162): Xaa can be any naturally occurring amino acid
MKSELSKFIKEEAFKIGFNKIGIAKPEVIKEDAKNLDLWLDNGNHAEMEWIKNRRDERIDIKKYXPEAKSIISLGINYFAGKNQDQIKSGFKFSNYAWGDDYHLVIKKKLRLLLHQIKNYNTIIDGIACVDTSPVMEKYWAQRSGIGWQGKHTNLITRDYGXWIFLGELILNIELEYDASFDDDLCGTCTACIDSCPTSALTDYQLDSRKCISYWSIEHRGDFKEKHNIDLHDWIYGCDICQEVCPWNITFAQITDKKSFHPRSEIFDWTEKEWKQMDQKKFSSLFKNSSVKRAKFSGLSRNINKNLINKGEAK

SEQ ID NO: 74999 - protein, 392 aa, Unknown
  misc_feature (1)..(392): tr|A0A1Z8ML46|A0A1Z8ML46_9BACT Epoxyqueuosine reductase OS=bacterium TMED15 OX=1986651 GN=queG PE=3 SV=1
MTKINQLELKKTQLNQWIRKQAEKMGFDLVGIVPADPPKLIDRYREWLNLGYAGEMEYLHRHFPLKQDPKNLLPEVKSVISLGLNYYTVEPDAVRKLDPTRGQISRYAWGEDYHDVIRKRLKRLVKKIEKRLKRETKSRVFVDSGPILERDYAQTAGLGWIGKNTNLINWQKGSWYFLAEILISLDLGVDVLPARGSCGSCTLCIEACPTDAIVAPNQVDARSCISYLTVELKEAIPMDLRPGLGNLIFGCDICQEVCPWNTKSQPTSVKEFQPRKGNLLPKLADLIGITQNEFSQKFKGSPIKRTKRRGLLRNVVVAMGNSKDPSMVEPLQSAIWDVEPLVRQHAAWALGQIATPLAETILKKKLQNEENIEVIIEIESALQIIESENIKD

SEQ ID NO: 75000 - protein, 326 aa, Unknown
  misc_feature (1)..(326): tr|A0A1Z9ISA6|A0A1Z9ISA6_9BACT tRNA epoxyqueuosine(34) reductase QueG OS=bacterium TMED161 OX=1986652 GN=CBD21 _01490 PE=4 SV=1
MRLKNYILSYKLDISYFTKLIKDECLSVGFSKVGIAEVKYYSEDKSHLENWLNKNRNASMHWMKNNQEKRTNISNYYSESKSVISVALNYFNGSPRDNHPPPYISNYASGVDYHIIIKSKLKKVLEKINNLDSSIHGFYCADTSPIMEKAWAQRAGLGWIGKHTNLITKEFGSWVFLGELIINKTLEYDKEFSQDLCGNCNLCIQTCPTDALVDSFQLDANKCISYVTIEKRGDFEEENKIDLNEWIFGCDICQDVCPWNIKFSSNTTEEDFKDRFDLKDKDYNYWEKLDEEEFRKIFKNSPVKRTKFSGLKRNVLLAKEQAQNDL

SEQ ID NO: 75001 - protein, 322 aa, Unknown
  misc_feature (1)..(322): tr|A0A1Z9KRA5|A0A1Z9KRA5_9BACT tRNA epoxyqueuosine(34) reductase QueG OS=bacterium TMED181 OX=1986654 GN=CBD41 _03950 PE=4 SV=1
MEAPMIPTPNNRDNSELEDLLQEARNLGFYSLGVSRAGVSPHADRFMNWIDNGMHAGMEWMKKNTERRLDPTLTLEGAQSIVMVCLPYSDQPELNDSAPRIARYARGRDYHKVMAPLLKKLSHYISDSGKWKTWYCVDSSPILERDWAEISGLGWIGKNGLLIDREIGSWFFLGGIVTDRTYPTTTPVTDHCGSCTRCIDACPTSAIVKPRSIDARKCISYWTIEHRGELPKEASLHGWLFGCDICQEVCPWNSRPARISPEIHEDLKPRSAPESAEKILDLSHEQYLEFFAGTPVTRTGLQGLQRNAQQLIREKGDQEKTT

SEQ ID NO: 75002 - protein, 303 aa, Unknown
  misc_feature (1)..(303): tr|A0A1Z9L4R8|A0A1Z9L4R8_9BACT Epoxyqueuosine reductase OS=bacterium TMED190 OX=1986655 GN=queG PE=3 SV=1
MLKLTKNIKNKAYELGFQKIGIAKPDFYSQDSERLNKWLTLGYHGKMDWMKKRVNERENIYTYFPEAKSIISLGLNYFHGKSTNEFKISNYAWGKDYHDIIKKKLIKLSDFIKLNKKNVKALMCVDTSPIMEKSWAQKAGIGWIGKHTNLITRDYGSWIFLAEIILDIDLIFDPIFEDDLCGSCTACIDYCPTNAIVDEYVLDSRKCISYLTIEHRGDFPVEHQGNLDSWIYGCDICQEVCPWNEKFSQKSIEDDFKPNPEILKKKKKDWKNLTLDEYKKIFKGSPVKRTKYSGLKRNISKNL

SEQ ID NO: 75003 - protein, 312 aa, Unknown
  misc_feature (1)..(312): tr|A0A1Z9NIH5|A0A1Z9NIH5_9BACT tRNA epoxyqueuosine(34) reductase QueG OS=bacterium TMED217 OX=1986780 GN=CBD77 _02865 PE=4 SV=1
MSISAEYIKEKAYELGFHKVGIAKASQTKKEKKNLDDWLSQKKHGEMMWMEKRKSERGNIFNYFPEARTVVSLGYNYYLGKDQSHLESSYKFSNYAWGEDYHDVIKTKLFSLLKTINKKSPEAKGLVCVDTAPIMEKVWAQRAGLGWQGKHTNLISTDYGSWLFLGEIILDIDLEIDEPFSKDLCGTCTACIDACPTQALDEYVLDSSKCISYLTIEHRGDFLEDKNDLNDWIYGCDICQEVCPWNISFSQISDDAYFEPREKIENNTDQEWENLSHLEFNAIFKKSSVKRTKFSGLKRNIDNVKARRSSKR

SEQ ID NO: 75004 - protein, 361 aa, Unknown
  misc_feature (1)..(361): tr|A0A3R7VAH9|A0A3R7VAH9_9BACT 4Fe-4S ferredoxin-type d omain-containing protein OS=bacterium TMED221 OX=198665 6 GN=CBD81_003075 PE=4 SV=1
  misc_feature (324)..(324): Xaa can be any naturally occurring amino acid
  misc_feature (348)..(348): Xaa can be any naturally occurring amino acid
  misc_feature (354)..(354): Xaa can be any naturally occurring amino acid
MKEKNLFNYLESHNIDVPENINLAVISLPSLIDKSVLIQEAKSNNRHANMKFTFSNPKYSGLGDKFGWAKSCIIISYNYFPRSSNNHSFRAGDGAIALFALEDHYKPLNKFINELSNLFNNEGIQSQQFIDSPQHYDRMFFNSSGLGWQGKSTMMLSPGIGPWQLIGNLYTEEQFLGTEKKSFSCGSCNMCQISCPTGALDEEYRLDSNKCLSYWLQSPDIIPEDMRINIGNRFYGCDECLISCPPGQTKEFDISETNTVDLKKILTMSNEDLVDKYSWFYIPKRNGDFLKRNALIALANNPDEDALKIIYTLLKSDSEIIRFXAIWAIWKISQFKDIENYYDVDLEXSDLVKXEYLRLIK

SEQ ID NO: 75005 - protein, 305 aa, Unknown
  misc_feature (1)..(305): tr|A0A1Z9RW84|A0A1Z9RW84_9BACT tRNA epoxyqueuosine(34) reductase QueG OS=bacterium TMED250 OX=1986657 GN=CBE10 _01995 PE=4 SV=1
MNDFTAEIKQKANELGFEKIGIAEVGPINKEKSNLEDWILRGNHASMDWIDKRKSERGNIYNYFPEAVSIISVGMNYFTGYSQKDLSSKLKFSNYAWGEDYHSVLKTRLRILLEWIEFASVEIKGIVCVDTSPVMEKVWAEKAGIGWQGKHTNLISRDYGSWLFLGEIILNISLKYDKPFTEDLCGSCTACIDECPPGALTDYEIDSNKCISYQTIEYRGEFDESSVDLDSWIYGCDICQEVCPWNKKFSKITQDKSFYPRSKIIENTITDWEKLNEEDFRKLFKGSSVKRTKHTGLKRNINKNL

SEQ ID NO: 75006 - protein, 304 aa, Unknown
  misc_feature (1)..(304): tr|A0A424SRH5|A0A424SRH5_9BACT tRNA epoxyqueuosine(34) reductase QueG OS=bacterium TMED46 OX=1986782 GN=queG P E=4 SV=1
  misc_feature (116)..(116): Xaa can be any naturally occurring amino acid
  misc_feature (119)..(119): Xaa can be any naturally occurring amino acid
  misc_feature (182)..(182): Xaa can be any naturally occurring amino acid
  misc_feature (201)..(201): Xaa can be any naturally occurring amino acid
  misc_feature (279)..(279): Xaa can be any naturally occurring amino acid
MKISSKSIKKKAEELGFQKVGIARAEKTPKEKSDLDSWLMQGNHATMDWIAKRKDERGNIHTYFPEARSVIAVGMNYYTGNEQDDLKSDYKFSNYAWGDDYHIVMKKRLFQLLNWXTEXNSKVKGLVCVDTSPVMDKVWAQRAGIGWLGKHTNLISRDHGSWLFLGELILDLKLEYDRPFEXDLCGTCMACIESCPTQALXEYKIDARKCISYLTIEHRGDLPEGKSDLHGWIYGCDVCQEVCPWNEKFSIKTGLDEFKPREEIANFKRDDWDNLSEEXFKKIFKGSAVKRTKYVGLKRNIGQN

SEQ ID NO: 75007 - protein, 306 aa, Unknown
  misc_feature (1)..(306): tr|A0A1Z8KKW3|A0A1Z8KKW3_9BACT tRNA epoxyqueuosine(34) reductase QueG OS=bacterium TMED6 OX=1986783 GN=CBB66_0 6835 PE=4 SV=1
  misc_feature (26)..(26): Xaa can be any naturally occurring amino acid
  misc_feature (28)..(28): Xaa can be any naturally occurring amino acid
  misc_feature (42)..(42): Xaa can be any naturally occurring amino acid
  misc_feature (50)..(51): Xaa can be any naturally occurring amino acid
  misc_feature (58)..(58): Xaa can be any naturally occurring amino acid
  misc_feature (62)..(62): Xaa can be any naturally occurring amino acid
  misc_feature (74)..(74): Xaa can be any naturally occurring amino acid
  misc_feature (87)..(87): Xaa can be any naturally occurring amino acid
  misc_feature (99)..(99): Xaa can be any naturally occurring amino acid
  misc_feature (117)..(117): Xaa can be any naturally occurring amino acid
  misc_feature (223)..(223): Xaa can be any naturally occurring amino acid
MNLSHNIKQKAFELGFSKIGIAKAQXYXSDKINLNNWIDSGXHGSMDWIXXRKEERSXIFKXYPKAKSVISVAXNYFTGNSKDYFSXHKISNYAWGDDXHTLLKSKLYILLDYIKKXDNNLNGICCVDTSPISEKVWAQRAGLGWIGKHTNLITKDFGTWVFLGEIVTDFELDYDKVFSTNLCGSCTACIEACPTDAIIGDYKLDANKCISYQTIENKLDIPXDFKGKMDDWIYGCDICQEVCPWNHRFSVLTNEFSFKPRDFLKSNDANILYNLNQEEFSKFFKDSAMKRTKLAGLKRNIDFLKN

SEQ ID NO: 75008 - protein, 309 aa, Unknown
  misc_feature (1)..(309): tr|A0A1Z8Z1B6|A0A1Z8Z1B6_9BACT tRNA epoxyqueuosine(34) reductase QueG OS=bacterium TMED80 OX=1986784 GN=CBC40_ 07220 PE=4 SV=1
  misc_feature (163)..(163): Xaa can be any naturally occurring amino acid
  misc_feature (167)..(167): Xaa can be any naturally occurring amino acid
  misc_feature (170)..(170): Xaa can be any naturally occurring amino acid
  misc_feature (172)..(173): Xaa can be any naturally occurring amino acid
  misc_feature (178)..(179): Xaa can be any naturally occurring amino acid
  misc_feature (201)..(201): Xaa can be any naturally occurring amino acid
  misc_feature (210)..(210): Xaa can be any naturally occurring amino acid
  misc_feature (218)..(218): Xaa can be any naturally occurring amino acid
  misc_feature (227)..(227): Xaa can be any naturally occurring amino acid
MIINSEDIKKKAIDLGFHKVGIAKASQTKKEEEQLNQWLNNNKHATMEWIEKRKSERGNIFNYFSEAKSVISLGMNYYVGKDQSDLDSNFKFSNYAWGDDYHSIIKSKLFELLKFIKEPNPGVKGLVCVDTAPVMEKVWAQRAGLGWQGKHTNLISTDYGSWXFLGXIIXDXXLEYDXXFEQDLCGSCTACIDACPTKALXEYELDANKXISYLTIEXRGDFLDGYXDLDGWIYGCDICQEVCPWNISFAEISKEEYFRPRAEILNKTDQNWIDIDQLDFSKTFKKSSAKRTKLSGLKRNIDYVNKAKK

SEQ ID NO: 75009 - protein, 402 aa, Unknown
  misc_feature (1)..(402): tr|A0A1Z9BV94|A0A1Z9BV94_9BACT tRNA epoxyqueuosine(34) reductase QueG OS=bacterium TMED88 OX=1986661 GN=CBC48_ 01940 PE=4 SV=1
MAGSRHIRRGVFHSARNRPCSASMVARFGAPSGFMSDQAQSHSSPTLTDRIESLALALGFDRVGRAAASSGPDTARFADWLHRGYAGEMEYLERRSAERLDPSVLMPGVRTILVVGLFYEPREGSPEPDNANSRPRGRVAAYAGGEDYHTVLIDRLRTLAEGLSALAGRRVAARCYVDTGPVQERVFAARAGIGWVGKNTLVIDPDLGSKMLLGVILTDLDLEPSVPLNDHCGTCRACLDACPSEAFPEPYVLDATRCIAYTTIEKRGEIPLEQRSDQGDWVFGCDVCQDVCPWNRKRRVGDLPDPLVLRERLGPRPEWAAPALAELLALDEETWSERVRGTAVKRARYQGLIRNALVAAGNSRDPSLRSAVVRHARGSDSLLAEHARWALGQIEGAQGSSN

SEQ ID NO: 75010 - protein, 318 aa, Unknown
  misc_feature (1)..(318): tr|A0A0A1PR26|A0A0A1PR26_9BACT Epoxyqueuosine reductase OS=bacterium YEK0313 OX=1522316 GN=queG PE=4 SV=1
MAWMAETAERRADPAVLWPDARSVIMLGLNYGPDENPLDGLGERTAGLLSVYARGDDYHDLVKSRLKAIGRWLAEATGCELKVFVDTAPVMEKPLAAAAGLGWQGKHTNLVSRGFGSWLFLGSIMTTLAIPPDRPERDHCGSCRACLDACPTAAFPAPYQLDARRCISYLTIEHKGPIPRAFRKAMGNRIYGCDDCLAVCPWNKFAETGREMKLAAREALRRPRLAELARLDDAAFRALFTRSPVKRIGRDRFVRNVLIAIGNSAEPALADTAQALVADASPLVRGAAIWALRQLAPARLAGIDASLEPDPTVREEWT

SEQ ID NO: 75011 - protein, 314 aa, Bacteroidales bacterium
  misc_feature (1)..(314): tr|A0A356YUT8|A0A356YUT8_9BACT tRNA epoxyqueuosine(34) reductase QueG OS=Bacteroidales bacterium OX=2030927 GN =queG PE=4 SV=1
MTASADIRLSALIRDKATELGFDLCGIARVRKLSECKEVLTKWCAEGLNDKMTYLIRDPDKRADPGILFPGAKSMIVTGLNYYTDKRQKHLYVPLISIYALGKDYHDLITARLEKLLTYVKSFVPDAEGRAFCDDAPVLEKPWAVEAGLGWRGKHSIVINDTIGSFFFIGVLILNIELDYDKHVEGDKCGNCRACIDSCPTGAINIDRTIDARRCIANLTIGNRGPVPEEIIPYMGRMVYSCDICQDVCPWNKNAKPHNVAEFMIVDELADMTKEEWLSLDNAKFDTLFKGTPVERVKFDRFKRNIEAISKNLK

SEQ ID NO: 75012 - protein, 330 aa, Bacteroidales bacterium
  misc_feature (1)..(330): tr|A0A1G7Q177|A0A1G7Q177_9BACT Epoxyqueuosine reductase OS=Bacteroidales bacterium KHT7 OX=1855373 GN=SAMN0521 6518_11579 PE=4 SV=1
MDCKQKISAFIKAEAKRLGFCACGLAKAQPVSIEAQRMLRESLDKDYCADMDYLRNYFEIRTNPQLLVDGAQTVVSVALNYYPEKKLDDSQLQFAYYAYGKDYHDVMKEKLRHLLESVAKYLDEQTDDIRAELLGDASEFSGRAFCDTAPILEKYWAQQSGIGWIGKHTQVVIPFFGSYVFLGELVINLECSADEPLKERCGKCQRCLNACPTKALKENRMLDARKCLSYLTIENREDIPEEASEAMQSCVYGCDRCIKACPWNRFASPTREEGLMPNEAFMNMTPADWENLDVETYRKIFKGSAVKRAKFEGLQRNIKCVLDNLKRKKQ

SEQ ID NO: 75013 - protein, 307 aa, Bacteroides caccae
  misc_feature (1)..(307): tr|A0A174MJ11|A0A174MJ11_9BACE (Fe-S)-binding protein O S=Bacteroides caccae OX=47678 GN=queG PE=4 SV=1
MEALLPTEIIKAEALRLGFSACGAAPAEAVSEKVADTFRQWLADGCQGEMAYMQNYEDKRLDPRLLVEGARTVISVALNYYPETKLPENEYQIAWYAYGKDYHDVMKAKLKTLLEFIQNNYSAGGRAFCDTAPVLERYWAWLAGLGWIGKNTQLIIPQAGSCFFLGELIIDLPADRYDSPQENRCGSCTRCLNACPTKALEAPFRLNSAKCLSYLTIEYRGELPLDTGQKMGKMIYGCDECQRACPWNRFATPSRTIEFSPSASLLTMRKEDWHRLSEEQYRTLFKGSAVKRAKYQGLMRNIRSAKK

SEQ ID NO: 75014 - protein, 307 aa, Bacteroides caccae
  misc_feature (1)..(307): tr|I8UUE3|I8UUE3_9BACE 4Fe-4S ferredoxin-type domain-co ntaining protein OS=Bacteroides caccae CL03T12C61 OX=99 7873 GN=HMPREF1061_03883 PE=4 SV=1
MEALLPTEIIKAEALRLGFSACGAAPAEAVSEKVADTFRQWLADGCQGEMAYMQNYEDKRLDPRLLVEGARTVISVALNYYPETKLPENEYQIAWYAYGKDYHDVMKAKLKTLLEFIQNNYSAGGRAFCDTAPVLERYWAWRAGLGWIGKNTQLIIPQAGSCFFLGELIIDFPADRYDSPQENRCGSCTRCLNACPTKALEAPFRLNSAKCLSYLTIEYRGELPPDTGQKMGKMIYGCDECQRACPWNRFATPSRTIEFSPSASLLTMRKEDWHRLSEEQYRTLFKGSAVKRAKYQGLMRNIRSAKK

SEQ ID NO: 75015 - protein, 317 aa, [Bacteroides] coagulans
  misc_feature (1)..(317): tr|A0A2U1E3N3|A0A2U1E3N3_9FIRM Epoxyqueuosine reductase OS=[Bacteroides] coagulans OX=46507 GN=C7381_10470 PE= 4 SV=1
MDNKFLKLKENLNLLGFEEFGIIPTACYIQPHFIPSMVDYYNENQIKNNFDMSAFNSIIVLLMNYRPENLKSGRMSIGSNEKDYHIVFKEKISELGNMMDLGNFLGYSDTGPLFDRTLALKAGLGFIGKNGCLINPRIGSFFFIGYVLTDLKFEKFIPYKDSEFKNTLCEHCTRCIEACPTSAIGEGEFRPMRCLSHLTQTKKPDPDLEGKIKTFYGCDICQKVCPYNSDKASGMIEFLSGDDMSYEDLFTLSNKEFKKIYGEKAFFWRGRSIIKRNAIIRAHNLKDESIVKYLEEELKKDNITKEYILKYFLDFIK

SEQ ID NO: 75016 - protein, 318 aa, Bacteroides coprosuis
  misc_feature (1)..(318): tr|F3ZQH2|F3ZQH2_9BACE Uncharacterized protein OS=Bacte roides coprosuis DSM 18011 OX=679937 GN=Bcop_0331 PE=4 SV=1
MSLNYSKKELTHKIKSIAIELGFSACGVAKAEKVDSKITTYFQNWIEKGYHADMDYLANYYDKRMDPQILVPGTKSIISLALNYYPEKFIPEKEYQIAWYAYGKDYHFLIKDKLTQLFKAIHDITPIEGRVFCDTAPVLERYWAWKAGLGWIGKNTQLIIPHAGSSFFLGELFINLDLEYDTPQPDRCGNCNKCLVACPTNALQAPRIMNANKCISYQTIENRGEIDSHIIPLLENKIYGCDDCIKVCPWTRFSQPTTIKEFAISNELLNMTKEKWSTLSVQEYQELFRKSAVKRAKFSGIQRNINAVHQRDPFLSDK

SEQ ID NO: 75017 - protein, 247 aa, Bacteroides faecichinchillae
  misc_feature (1)..(247): tr|A0A4S4HE75|A0A4S4HE75_9BACE tRNA epoxyqueuosine(34) reductase QueG (Fragment) OS=Bacteroides faecichinchill ae OX=871325 GN=queG PE=4 SV=1
MNKLLSSEQIKAEATRLGFSACGLAPAESVNESAATFFRQWLANGCQAEMAYMQNYEDKRLDPRLLVEGARTVISVALNYYPETKLPIEEYQIAWYAYGKDYHDVMKKKLNALLEFIILSSTSSETIVPATSPLTVSGRIFCDTAPILERYWAWRAGLGWIGKNTQLIIPHAGSCFFLGEVIINIVADNYDIPQKSRCGSCTRCMDACPTKALEAPFRLNSERCLSYLTIEYHGDLSPNIGQKMDKK

SEQ ID NO: 75018 - protein, 96 aa, Bacteroides faecichinchillae
  misc_feature (1)..(96): tr|A0A4S4HDY2|A0A4S4HDY2_9BACE tRNA epoxyqueuosine(34) reductase QueG (Fragment) OS=Bacteroides faecichinchill ae OX=871325 GN=E5981_17955 PE=4 SV=1
IEYHGDLSPNIGQKMDKKIYGCDECQHICPWNRYSTPCKTEEFHPSPSLLQMKKSDWQSLTEEQYKTLFKGSAVKRAKYSGLMRNIRIVKESPESK

SEQ ID NO: 75019 - protein, 326 aa, Bacteroides faecis
  misc_feature (1)..(326): tr|A0A3E5GCA3|A0A3E5GCA3_9BACE Epoxyqueuosine reductase OS=Bacteroides faecis OX=674529 GN=queG PE=3 SV=1
MKKLLSSDRIKAEALRLGFSACGLAPAEAVDETVATAFRQWLADGCQAEMAYMQNYEDKRLDPRLLVEGARTVISVALNYYPATKIPEGEYQIAWYAYGKDYHDVMKVKLKELFEFIQKEVSSSEAEITTPPVQGRIFCDTAPILERYWAWRSGLGWIGKNTQLIIPRSGSFFFLGEIIIDLEADSYDSPQRNQCGSCTRCLDACPTKALEGPFRLNSERCLSYLTIEYRGDLKPETGKKMGNKIYGCDECLKACPWNRFARPCRTAEFQPSPSLLSMRKDDWHSLSEEQYKNVFKGSAVKRAKYNGLMRNIQAIHSKSTRNNSTN

SEQ ID NO: 75020 - protein, 321 aa, Bacteroides faecis
  misc_feature (1)..(321): tr|A0A1H2YM50|A0A1H2YM50_9BACE Epoxyqueuosine reductase OS=Bacteroides faecis MAJ27 OX=1077285 GN=queG PE=3 SV =1
MKKLLSSDRIKAEALRLGFSACGLAPAEAVDETVATAFRQWLADGCQAEMAYMQNYEDKRLDPRLLVEGARTVISVALNYYPATKIPEGEYQIAWYAYGKDYHDVMKVKLKELFEFIQKEVSSSEAEITTPPVQGRIFCDTAPILERYWAWRSGLGWIGKNTQLIIPRSGSFFFLGEIIIDLEADSYDSPQRNQCGSCTRCLDACPTKALEGPFRLNSERCLSYLTIEYRGDLKPETGKKMGNKIYGCDECLKACPWNRFARPCRTVEFQPSPSLLSMRKDDWHSLSEEQYKNVFKGSAVKRAKYNGLIRNIQAIHSSFSY

SEQ ID NO: 75021 - protein, 309 aa, Bacteroides fragilis
  misc_feature (1)..(309): tr|A0A380YSV7|A0A380YSV7_BACFG Putative iron-sulfur clu ster-binding protein OS=Bacteroides fragilis OX=817 GN= queG PE=4 SV=1
METKINSKALKAEALRLGFSACGIAPAEPIDQAHQNALKMWLDADRQAGMTYMANHFDKRCDPALLVEGTRCVVSVALNYYPATRIPDEEYQFAWYAYGKDYHDLMREKLATLFRFIQESDVPELNGRMFCDTAPVPERYWAWRAGLGWIGKNTQLIIPHAGSTFFLGELFLNTEADTYDRPQPNRCGRCNRCLQACPTKALETPYSLNAHRCLSYLTIENKSEIPDSIAPFMGNRVYGCDECQKACPWNRFATPCRTPELQPSPEFMNMKKEDWKQLSEEKYRALFKGSAVKRAKYSGLIRNIRQMED

SEQ ID NO: 75022 - protein, 309 aa, Bacteroides fragilis
  misc_feature (1)..(309): tr|A0A015XGA6|A0A015XGA6_BACFG Epoxyqueuosine reductase OS=Bacteroides fragilis str. S36L11 OX=1339327 GN=queG PE=4 SV=1
METKINSKALKAEALRLGFSACGIAPAEPIDQAHQNALKMWLDADRQAGMTYMANHFDKRCDPALLVEGTRCVVSVALNYYPATRIPDEEYQFAWYAYGKDYHDLMREKLAALFRFIQESDVPELNGRMFCDTAPVPERYWAWRAGLGWIGKNTQLIIPHAGSTFFLGELFLNAEADTYDRPQPNRCGRCNRCLQACPTKALETPYNLNAHRCLSYLTIENKSEIPDSIAPFMGNRVYGCDECQKACPWNRFATPCRTPELQPSPEFMNMKKEDWKQLSEEKYRALFKGSAVKRAKYSGLIRNIRQMED

SEQ ID NO: 75023 - protein, 330 aa, Bacteroides graminisolvens
  misc_feature (1)..(330): tr|A0A3D2SG37|A0A3D2SG37_9BACE Epoxyqueuosine reductase OS=Bacteroides graminisolvens OX=477666 GN=queG PE=3 S V=1
MTHDNFNQKQSFSVEAKISYSNMIKAEALRLGFSACGIAPAEEINAENKMFLKEWLVNGYQGSMDYMANNLEKRSDPNLLVEGTKSIVSVALNYYPQQLLDDSQYQFAWYAYGKDYHDIMRKKMNELMEYINREIAIVNGRVFCDTAPVLDRYWAWRAGLGWIGKNTQLIIPKAGSSFFLGELFIDIELAYDTPLKDRCGNCNRCQQACPTQAFEAPHKLDARKCLSYVTIESREDIPIELRKKMGNRIYGCDECQRVCPWTRFAIPCQTTELQPAPEFMQMTREEWHNLSEETYRKLFKGSAVKRAKYSGLVRNIEAAGYPNNSGANPD

SEQ ID NO: 75024 - protein, 330 aa, Bacteroides graminisolvens
  misc_feature (1)..(330): tr|A0A069D6V2|A0A069D6V2_9BACE Epoxyqueuosine reductase OS=Bacteroides graminisolvens DSM 19988 = JCM 15093 OX =1121097 GN=queG PE=3 SV=1
MTHNNFNQKQSFSVEAKISYSNMIKAEALRLGFSACGIAPAEEINAENKMFLKEWLVNGYQGSMDYMANNLEKRSDPNLLVEGTKSIVSVALNYYPQQLLDDSQYQFAWYAYGKDYHDIMRKKMNELMEYINREIAIVNGRVFCDTAPVLDRYWAWRAGLGWIGKNTQLIIPKAGSSFFLGELFIDIELAYDTPLKDRCGNCNRCQQACPTQAFEAPHKLDARKCLSYVTIESREDIPIELRKKMGNRIYGCDECQRVCPWTRFAIPCQTTELQPAPEFMQMTREEWHNLSEETYRKLFKGSAVKRAKYSGLVRNIEAAGYPNNSGANPD

SEQ ID NO: 75025 - protein, 308 aa, Bacteroides luti
  misc_feature (1)..(308): tr|A0A1M4Z048|A0A1M4Z048_9BACE Epoxyqueuosine reductase OS=Bacteroides luti OX=1297750 GN=queG PE=3 SV=1
MDKEVLSQQIKAEALRLGFSACGIARADAVGESMAYLEQWLADGNQAGMVYMNNHFDKRCDPRLLVEGTKSIVSVALNYYPSRKLREEQLQFAYYAYGKDYHEVMKAKLTELFTFINEYLTPVNGRVFCDTAPVLDRYWAQKAGLGWIGKNTQLIIPSAGSYFFLGEIFLDIELDYDSPIQSKCGNCTRCLDACPVKALEKPFLLNSNRCISYLTIEHKGEIEPGIAPKMGNHLYGCDDCQKCCPWNRFASPHQIADFEPSDALLSMEEEDWKALTVEQYRVLFKGSAVKRAKYDGLMRNLKAILPDE

SEQ ID NO: 75026 - protein, 322 aa, Bacteroides nordii
  misc_feature (1)..(322): tr|A0A413VS16|A0A413VS16_9BACE tRNA epoxyqueuosine(34) reductase QueG OS=Bacteroides nordii OX=291645 GN=queG PE=4 SV=1
MGEVILSAKQIKAEALRLGFSACGVAPAEAVNKTVSNAFCHWHSHGMQAGMNYMGNHLEKRLDPRLLVEGTRSIVSVALNYYPSRFLREDQYQFAWYAYGKDYHDIMKARLTALQEYISAHSPLPLQSRIFCDTAPVLERYWAWRAGLGWIGKNTQLIIPHAGSCFFLGEIFLSAEADEYDQPLTSRCGNCTRCLDACPTKALEAPFLLNSGRCLSYLTIEHREAIPPAEGKKMGNKIYGCDECQKACPWNRFSTPCQTPELQPTDTFMQMEKKNWHALTEEQYRMIFKGSAVKRAKYTGLMRNIHQVESNDKDEVQTLPDV

SEQ ID NO: 75027 - protein, 318 aa, Bacteroides nordii
  misc_feature (1)..(318): tr|I9SFF2|I9SFF2_9BACE 4Fe-4S ferredoxin-type domain-co ntaining protein OS=Bacteroides nordii CL02T12C05 OX=99 7884 GN=HMPREF1068_00374 PE=4 SV=1
MGEVILSAKQIKAGALRLGFSACGVAPAEAVNETVSNAFCHWHSHGMQAGMNYMGNHLEKRLDPRLLVEGTRSIVSVALNYYPARFLREDQYQFAWYAYGKDYHDIMKARLTALQEYISARSPLPLQSRIFCDTAPVLERYWAWRAGLGWIGKNTQLIIPHAGSCFFLGEIFLSAEADEYDQPLKSRCGNCTRCLDACPTKALEAPFLLNSGRCLSYLTIEHRETIPPTEGKKTGNKIYGCDECQKACPWNRFSTPCQTPELQPTDAFMQMEKENWHALTEEQYRTLFKGSAVKRAKYTGLMRNIHQVESNNKNEVQK

SEQ ID NO: 75028 - protein, 312 aa, Bacteroides salyersiae
  misc_feature (1)..(312): tr|A0A4Q5FPW5|A0A4Q5FPW5_9BACE tRNA epoxyqueuosine(34) reductase QueG OS=Bacteroides salyersiae OX=291644 GN=q ueG PE=4 SV=1
MEVKTLSASQIKAEALRLGFSACGMAPAEPVNTAIADAFSRWQAQGMQANMNYMGNYLDKRLDPRLLMEGVRTILSVALNYYPARQLREDQYQFAWYAYGKDYHDLMKTRLTALQAYISAHSPLPLQSRVFCDTAPVLERYWAYRAGLGWIGKNTQLIIPHAGSCFFLGELFLDMEVDEYDQPQKNRCGNCTRCIQACPTKALEAPFLLNSRRCLSYLTIENRDAIPLLEGKKMGNKIYGCDECQKACPWNKFATPCQAPDLQPTELFMQMEKEDWHTLTEEQYRTLFKGSAVKRAKYAGLMRNIHQVESNE

SEQ ID NO: 75029 - protein, 312 aa, Bacteroides salyersiae
  misc_feature (1)..(312): tr|I9TAW1|I9TAW1_9BACE 4Fe-4S ferredoxin-type domain-co ntaining protein OS=Bacteroides salyersiae CL02T12C01 O X=997887 GN=HMPREF1071_01584 PE=4 SV=1
MEVKTLSASQIKAEALRLGFSACGMAPAEPVNTAIADAFSRWQAQGMQANMNYMGNYLDKRLDPRLLMEGVRTILSVALNYYPARQLREDQYQFAWYAYGKDYHDLMKTRLTSLQAYISAHSPLPLQSRVFCDTAPVLERYWAYRAGLGWIGKNTQLIIPHAGSCFFLGELFLDMEVDKYDQPQKNRCGNCTRCIQACPTKALEAPFLLNSRRCLSYLTIENRDAIPLLEGKKMGNKIYGCDECQKACPWNKFATPCQAPDLQPTELFMQMEKEDWHTLTEEQYRTLFKGSAVKRAKYAGLMRNIHQVESNE

SEQ ID NO: 75030 - protein, 317 aa, Bacteroides sp.
  misc_feature (1)..(317): tr|A0A351YGW5|A0A351YGW5_9BACE tRNA epoxyqueuosine(34) reductase QueG OS=Bacteroides sp. OX=29523 GN=queG PE=4 SV=1
MNEELTAIHTRQIKAEALRLGFSACGVSPATAVDSLHGDAFRQWLEEGHQAGMDYMARHMEKRLDPRLLVDGAQSIVSVALNYYPALPPDDGGYRLAWYAYGEDYHTVMKDKLHALLHYVATLLPGVSGRAFCDTAPLLERYWAWRGGLGWTGRNTQLIIPGAGSAFFLGELVIDRPLAYDTPQRDRCGNCTRCLRACPTGALHAPHRLDARRCLSYLTIEHRGPIPPEAAAHLSPCIYGCDRCQEACPWNRFARPAGEPRLHPRPALLAMRRPDWEKLSPEDYRTLFKGSAVKRAKYEGLTRNIRCCSTDTGKESS

SEQ ID NO: 75031 - protein, 176 aa, Bacteroides sp.
  misc_feature (1)..(176): tr|A0A0S8JMA4|A0A0S8JMA4_9BACE Epoxyqueuosine reductase (Fragment) OS=Bacteroides sp. SM23_62 OX=1703352 GN=AM S26_22250 PE=4 SV=1
MENPQENSRKIKQKALELGFLQAGIARADHLADDAPRLRRWLDMGYHGSMGYMEKHFEKRVDPRELVEGARSVVVVLQNYFTREKQHDESAPRISKYAYGKDYHHIVRKKLHSLYAYMGEHIGAHTGRIFVDSAPVLERAWGRLAGLGWIGKHSLLLNRKYGSWFFIGVIITDLEL

SEQ ID NO: 75032 - protein, 220 aa, Bacteroides thetaiotaomicron
  misc_feature (1)..(220): tr|A0A174NTE8|A0A174NTE8_BACT4 (Fe-S)-binding protein O S=Bacteroides thetaiotaomicron OX=818 GN=queG_2 PE=4 SV =1
MTNKEIKKLCRSFGADLVGVASVERFVNAPKGYHPTDVMPTAKSVISLGMVLPKDILEQDIRTYTDIRNEAVKKMDKVAADVAAELKGLKYKAVSIVSLSGKFVDGHFRSRVSLKHAAELAGLGVIARNYLLTNNKYGNLLWFTAVVTSLELEPDPLATYQVCNNCNLCVDLCPSGALTDENNFSQKGCRKVCYITVKGVLELRCWQCRNVCPYKHGIND

SEQ ID NO: 75033 - protein, 321 aa, Bacteroides thetaiotaomicron
  misc_feature (1)..(321): tr|R9H3T1|R9H3T1_BACT4 4Fe-4S ferredoxin-type domain-co ntaining protein OS=Bacteroides thetaiotaomicron dnLKV9 OX=1235785 GN=C799_03617 PE=4 SV=1
MEKLLSSDRIKAEALRLGFSACGLAPAEAVDETVATAFRQWLADGCQAEMAYMQNYEDKRLDPRLLVEGARTVISVALNYYPATKIPENEYQIAWYAYGKDYHDVMKEKLKELFEFIEKEVSFSEAEITSPSVQGRIFCDTAPILERYWAWRSGLGWIGKNTQLVIPHAGSCFFLGEVVIDLEADSYNSPQRNQCGSCTRCLDACPTKALEEPFRLNSERCLSYLTIEYRGDLKPETGKKMGNKIYGCDECLKACPWNRFARPCRTVEFQPSPSLLSMRKDDWHSLSEEQYKNVFKGSAVKRAKYNGLIRNIQAIHSSFSY

SEQ ID NO: 75034 - protein, 306 aa, Bacteroides uniformis
  misc_feature (1)..(306): tr|A0A1Q6I0J9|A0A1Q6I0J9_BACUN tRNA epoxyqueuosine(34) reductase QueG OS=Bacteroides uniformis OX=820 GN=BHV79 _11095 PE=4 SV=1
MPTECLRQWVAEAGGAACGVADAVAVADDEFARFDKWLARGMHGGMRYMENYRELRRDPQLLLPGAKSVVVAAFSYYHSDQTEGNLASIAAYAHGDDYHEVVRERLGRVAARIMAAYGGETRVCVDTAPMLERYWAVRAGVGFVGRNRLLIVPGAGSYVFIGSVLATVRFMPDAPNEGTCDGCGRCIAACPGKALSEEGVDARRCLSYLTIEHRGEFPDGTNLHGRLYGCDICQRVCPHNRSLPDTPIAEFHPREALRTLTPETIIRMGQSEFSAIMRRSAIKRTKLAGLQRNALHLLRDDDNIKQ

SEQ ID NO: 75035 - protein, 225 aa, Bacteroides xylanolyticus
  misc_feature (1)..(225): tr|A0A2S6HBD1|A0A2S6HBD1_9BACE Epoxyqueuosine reductase QueG OS=Bacteroides xylanolyticus OX=384636 GN=BXY41_1 2318 PE=4 SV=1
MKEELREKVLGLGANLCGFAGIERFAGAPKGFHPCDIFPDCKSVVAFGIALPKGIYIGDSRLIYSYFNNFACPQVDSIAYHTAVVLENTYHGVGVPLPSDGPYDYWDEDKMEGRGLLSMKHVAYLSGMGTFGKSTLLLNREYGNRLVIGCVLTNLEIESDEFASGICLEHCDLCIRNCPVGAINENGVRQKTCRTNSYGKTKRGFDTVECNRCRTTCPMCFGLHT

SEQ ID NO: 75036 - protein, 352 aa, Bacteroides xylanolyticus
  misc_feature (1)..(352): tr|A0A2S6HQ05|A0A2S6HQ05_9BACE Epoxyqueuosine reductase QueG OS=Bacteroides xylanolyticus OX=384636 GN=BXY41_1 09143 PE=4 SV=1
MMSKKSDSDNSIAKLIQQKALDLGYEKCGIIPVEMMAGYEEKFHERTQKVPESQPFYQNQQRLIRFQEDFDWAKSIVVLVKRYSKYHIPESLRGHIAKHYLTDSRINENTKEFQSSTALEQYMKELGLRTETNRKFGIVGVRWAALQAGLGMIRRNNFFYTESGSYISLEAFLTDCEMELIEKPNLPPCPPNCNRCMKACSTASLSDAYTMNPLRCISFLTTFGGRDLPNEPLASDFGDWIYGCDMCQDACPMNHNKWTGQNEFPGLSELEPYLTMENILEMDEDFYRQNIQPKFFYLSPDELWKWQVNVLNFMDNRYEDHFAPAIIKAQKSNYEQVRKMAGLISTKHGLHT

SEQ ID NO: 75037 - protein, 314 aa, Bacteroidetes bacterium
  misc_feature (1)..(314): tr|A0A497D5Q8|A0A497D5Q8_9BACT Epoxyqueuosine reductase OS=Bacteroidetes bacterium OX=1898104 GN=queG PE=3 SV= 1
MNKSLLTGFIKAEALRNNFSACGISRTQHLSDEKLKMEAWLAKGMHGNMHYLEKNKEKRYDPSKLVDNARSVITVLYNYYPNEKLPENDNYKLSKYAYGKDYHYIIKEKLRALLAAVEEKTGRRTARIFVDSAPVLDRAWARQSGLGFIGKNTMLINNKMGSFFFIGHIIIDLELDYDNPETGNYCGTCTLCIDACPTQALQPFQLDARKCISYITIENRDKIPEDFRGKMNNWIFGCDICQDICPWNRFSIPHTEPLFEPSEALASMKKVNWESLDKSQFKTLFKNSAVERAGFNGLKRNIDFVAENTNFRPE

SEQ ID NO: 75038 - protein, 310 aa, Bacteroidetes bacterium
  misc_feature (1)..(310): tr|A0A142L1J4|A0A142L1J4_9BACT Epoxyqueuosine reductase OS=Bacteroidetes bacterium UKL13-3 OX=1690483 GN=queG PE=3 SV=1
MISAAQHTFLIKQKAAALGFSFCGISKATFLEQEAPRLEKWLKEGKNGQMQYMENYFDKRLDPRLLVDGAKSVISFLYNYYSEIKQDDTEAPKISKYAYGEDYHFVLKDKLQELLQYIRETIGEVNGRAFVDSAPVLERAWAVQSGLGWVGKNSNIINKGSGSFFFLSELILDLELEYDKPATDHCGTCTACIDACPTDAIVQPHTVDGSKCISYFTIELKDAIPTQMKGTFDNWMFGCDVCQDVCPWNRFSKPHHEPRFVSNESLLSMKKQDWLDITEDVFSQVFKNSPVKRTKYNGLKRNIDFLFNND

SEQ ID NO: 75039 - protein, 316 aa, Bacteroidetes oral
  misc_feature (1)..(316): tr|D7JH48|D7JH48_9BACT Iron-sulfur cluster-binding prot ein OS=Bacteroidetes oral taxon 274 str. F0058 OX=57559 0 GN=HMPREF0156_01642 PE=4 SV=1
MPVGLVDSTIFLLPLPKLIGRMDTKLITDKIVAAALDVGFSACGVTDTQPLNEQGKHLQNWLRLGYNGTMKYMENNLDKRLNPSLLAEASKSAIVVLLNYKPERTIATDKPQVSKYAYGTDYHFVVKNKLNRLLRRIQTEIADCRGVAYVDSAPVLEKALAVKAGLGWIGKNSLLINKQFGSMTFIGTLFVDIPLCYNTHIVPDGCGNCRRCMDACPTQAIVAPRVIDASRCVSYLNKTHRGTVPEDLQTLVGNRIWGCDCCIDVCPYNKQTPVHNTQELMPRDELFELDLAAISKRQLKKLIMRLPPRNQSGTGS

SEQ ID NO: 75040 - protein, 313 aa, Bacteroidetes sp.
  misc_feature (1)..(313): tr|A0A3N0ZL03|A0A3N0ZL03_9BACT tRNA epoxyqueuosine(34) reductase QueG OS=Bacteroidetes/Chlorobi group bacteriu m MS-B_bin-24 OX=2382228 GN=queG PE=4 SV=1
MEQLKNIIKNRAFELGFCEIGFARYEKLEKEIQNYIQWLKNGYSATMTYLEKNIDKREDVKLIIDDVRTIIVTAYPYYNKFKHSSNLFKISRYAWGEDYHKILADKLTKLVDFISDKINDFKYKIYVDTGPLLEKSWAVRAGIGWQGKNSMIISRTYGSYIFLGIILTNIEFEPDKPIKDYCGTCTKCIESCPTNAIVQPKVVDSRKCISFWTIEAKPEYEIPSSIDLNGWIFGCDICQEVCPWNNKVKITDDVAFFPRYNQTNLDKNFLENLTPEIFKERFKGSPIKRAKFEGLKRNFLHIIKNIEYEQINQ

SEQ ID NO: 75041 - protein, 326 aa, Bacteroidetes sp.
  misc_feature (1)..(326): tr|A0A3N0ZG92|A0A3N0ZG92_9BACT tRNA epoxyqueuosine(34) reductase QueG OS=Bacteroidetes/Chlorobi group bacteriu m Naka2016 OX=2382229 GN=queG PE=4 SV=1
MAFLKRNGDLILNKEININFLKNNIKEFSYSLGFDKVGFARFRFLSKEIEKYKNWLANGYQASMDYLEKNIDKRENIGLILSDVKSLIVFAHSYFTNVNHSKSNFKISRYAWGDDYHDILEKKIRKVANFISEQVDTFKFKIYVDTGPILEKIWAVEAGIGWQGKNSLVLSQELGSYFFIGIMLTNLDFLPDTTVVDRCGKCRKCIDACPTNAIVSPKVVDSRRCISFWTIEKKIHEEIPHQLDFKGWIFGCDICQEVCPWNNKAKITNELAFYPRNGKTNLEEEDLMKLTIENFKEVFRKSPIKRAKFEGLMKNYLHLRGLNEFE

SEQ ID NO: 75042 - protein, 315 aa, Bacteroidia bacterium
  misc_feature (1)..(315): tr|A0A524PBW8|A0A524PBW8_9BACT tRNA epoxyqueuosine(34) reductase QueG OS=Bacteroidia bacterium OX=2044936 GN=q ueG PE=4 SV=1
MRQNWNLDSSDNLNTRIKTRASELGFDRCGIVPAVFLEKEYTRFGSWIKQGFQAGMDYLERNSEKRADPGKLVENAKSVIVVLMRYASIPVFENKSPKFSRYALGRDYHLVLKEKLHELLDFIEEEVPGTRGRVFVDSAPVMERSLAVRAGLGWIGRNSMLINRNLGSYTFIGEIITDLETEYDEPFGTSHCGSCSRCIDSCPTGAILPDRSIDSNKCISYVTIEHRGPITELFRNKMNGWAFGCDICQEVCPWNSKPGSPVNPQFEPKPEFINYTPAMWRELDKGAFDEIFKDSPLLRTGYKGFTRNLEFIDPA

SEQ ID NO: 75043 - protein, 306 aa, Bacteroidia bacterium
  misc_feature (1)..(306): tr|A0A1M3FR75|A0A1M3FR75_9BACT tRNA epoxyqueuosine(34) reductase QueG OS=Bacteroidia bacterium 44-10 OX=189572 1 GN=BGO34_18305 PE=4 SV=1
MTFSEEIKQYALSLGFDACGICRATDSGEEERYMRWLAENGNAGMTYMARNIDKRLDPRLLVEGARSVISVALNYYPHEKLPDEVPQFAYYAYGKDYHDIVREKLSRLFEFVKSRYAGVSGRYFSDSAPVLERFWAAQAGLGFIGKNTLLIIPGKGSYFFLGELIIDMELEYDSPITRNCGKCRRCLDACPTGAIERPHYLNANKCISYQTIENRDEISPGIVPLLSNNVYGCDICQKVCPWNRYARPHTTPGLMPSDEFLSLDLKKLIDMDEEDYRRIFHKSAVKRAKFSGLKRNVIAISKTPDK

SEQ ID NO: 75044 - protein, 393 aa, Baia soyae
  misc_feature (1)..(393): tr|A0A4R2S4Q7|A0A4R2S4Q7_9BACL Epoxyqueuosine reductase OS=Baia soyae OX=1544746 GN=EDD57_11939 PE=4 SV=1
MNAMELKQKLIEKANEIGIDKIGFTTADPFVELKQKLVQHRESGYESGFEEPDLNLRTIPTLTLPEAKSIIAIAIAYPSKMSNPPRSEPGAYRGIFARASWGQDYHDVLREKLAQLEAYLLELVPTARTQSMVDTGALSDRAVAERAGIGWSAKNTSILTEEFGSWIYLGEMITDLYLPPDDSVLDGCGDCTLCLDVCPTGALVEPGQLDSTKCIAFLTQTKGSIDEFYREKIGNRLYGCDTCQTVCPKNRKRNFTHHTEFEPDPELVKPLLQPLLTMSNREFKEKYGYMSGSWRGKKPIQRNAIIALAHFQDRSAIPLLKDLLGQDPRPVIRGMSAWALSKIGGAEIEEILNQAFDKEQDEEVLREIRLGLERIQKSATSPKTKEDYHDYSL

SEQ ID NO: 75045 - protein, 314 aa, Balneola sp.
  misc_feature (1)..(314): tr|A0A2E6N4S4|A0A2E6N4S4_9BACT tRNA epoxyqueuosine(34) reductase QueG OS=Balneola sp. OX=2024824 GN=queG PE=4 SV=1
MISQEQKRWTQFIRNRALELGFDAIGFAQATYLEDDDRRLSTWLEEGRNGTMSWMENYHEKRVDPRILVPGTQSVISLLVSYNTKDVPSHLNQGVSFAKYAQGRDYHRVIKKKLKLLYQQVQQEIPIAEGRYFVDSAPVLERSWAQRSGLGWIGKNGNLLNKKLGSYFFIADILLNIPLVYDHATSDHCGTCRRCIDACPTNAIYEPQKVDGSKCLSHWNIEHAGEIPTFFQEKMGRWIFGCDICQEVCPWNTKALLGHWPEFRPNKHWIRLSPQEWTQLKRKDYEDYFNGTAVRRVNYEDFLRNASIILNNNQ

SEQ ID NO: 75046 - protein, 311 aa, Balneola sp.
  misc_feature (1)..(311): tr|A0A1B6Y7H5|A0A1B6Y7H5_9BACT Epoxyqueuosine reductase OS=Balneola sp. EhC07 OX=1849360 GN=queG PE=3 SV=1
MDSKNLTEAVKNYALQLGFDACGFSKAEFLETEARRLEEWLVQQRHGTMSWMENNFDKRVDPTKLVPGAKSVVSVIGSYYSPEHDHQSSGNPKIAKYALGRDYHKVFKKKLKDLFNYTESLVGNIEGRFFVDSAPVLDKAWAVRSGLGWMGKNSNILNKDIGSFFFIGEMILDVEFNYSSGTTDHCGTCTRCIDACPTDAIYEPYRIDSNKCISYLTIELKEQIPQELQSSLGEWMYGCDICQDVCPWNKDPSLTQMADLKPRTKLLNKNIDFWNEIDNPQYDALFEGSAIRRAKFEKFKMNAGIVYNNLK

SEQ ID NO: 75047 - protein, 99 aa, Balneolaceae bacterium
  misc_feature (1)..(99): tr|A0A359E6M8|A0A359E6M8_9BACT tRNA epoxyqueuosine(34) reductase QueG (Fragment) OS=Balneolaceae bacterium OX= 2053516 GN=DEG32_12075 PE=4 SV=1
RLDEWLTQNKNGSMSWMENHFEKRVDPTLLVPGSKTVVSVLASYYHPSHDKQIGVKNEPLIAKYAHGRDYHKVLKKKLKKLFNFTEELLGGLEGRIFVD

SEQ ID NO: 75048 - protein, 178 aa, Balneolaceae bacterium
  misc_feature (1)..(178): tr|A0A356WYR8|A0A356WYR8_9BACT tRNA epoxyqueuosine(34) reductase QueG (Fragment) OS=Balneolaceae bacterium OX= 2053516 GN=DD671_00410 PE=4 SV=1
MLKQQKITEQIRAHALHLGFDACVFAKAQYLPTEARRLDEWLSQNKNGTMGWIENYFDKRVDPTKLVPGSKTVVSVLASYHHPKHNEQIGVKDEPLISKYAQGRDYHKVLKKKLKHLFQFTEELLGGLEGRIFTDSAPVLDKVWAKRAGLGWIGKNSNLLNKDIGSFFFIGEMIIDAE

SEQ ID NO: 75049 - protein, 317 aa, Barnesiella intestinihominis
  misc_feature (1)..(317): tr|K0WRG3|K0WRG3_9BACT 4Fe-4S ferredoxin-type domain-co ntaining protein OS=Barnesiella intestinihominis YIT 11 860 OX=742726 GN=HMPREF9448_02593 PE=4 SV=1
MASCSKPSEWREIIRNEALRIGFDACGFARVEEVDVDMRDSYRQWLASGKQAQMGYLDNYVELRDNPALLYPGARTMICVALNYYPVRFQSGESPRFAYYAYGWDYHDVMRDKLRQLAVFVSSYSGDTGRVCCDTAPVRERYWAVRAGLGFIGKNAQLIIPGKGSFFFLGELITSLDLPPDSPVVARCGDCSRCMDSCPTGALYAPGSVDARLCISCQTIENKGDIAPFVADRMGDRVYGCDTCQQCCPWNKSARPSVHHEFAPSEEFLALDASRFETMTPDDFNRIFRHSAVKRAKYAGLKRNFEIWKKNRKSPIE

SEQ ID NO: 75050 - protein, 314 aa, Barnesiella sp.
  misc_feature (1)..(314): tr|A0A1Y4GUR1|A0A1Y4GUR1_9BACT tRNA epoxyqueuosine(34) reductase QueG OS=Barnesiella sp. An22 OX=1965590 GN=B5 F38_03415 PE=4 SV=1
MDSSSAPFEWREQIRSEALRLGFDACGFARVDEVEPRAREAYRRWLDEGRQAQMDYLGNYLDLRDHPALLYPGARTIVCVALNYYPARFQPQEHPQFAYYAYGRDYHEVMRDKLRQLAAFVAPLSGDAGRVCCDTAPVRERYWAVQAGLGFIGRNAQLIIPGKGSYFFLGELLTTLALPPDKPLSNRCGDCLLCREHCPVGALDEPGQVDARRCISCQTIENRGEIPPAVADRMGNRVYGCDTCQQCCPWNRAATPSTHPEFAPSDELLALDAARFEALTPDDFNRIFRHSAVRRAKYAGLMRNFAVWKKNRKS

SEQ ID NO: 75051 - protein, 319 aa, Barnesiella sp.
  misc_feature (1)..(319): tr|A0A4Y9IXA7|A0A4Y9IXA7_9BACT tRNA epoxyqueuosine(34) reductase QueG OS=Barnesiella sp. WM24 OX=2558278 GN=qu eG PE=4 SV=1
MLSRVLSNGLNRRDMSLLPSTCSEELREAASRLGVSRLGIASVHDVDEEQLKRYEEWIAEGCHGEMSYLDRYHDVRRNPGGLLPGAASVIVCAFNYFPALFQRGDVPQFAYYSYGKDYHEVVRDRLRKLACHIEELYGGETRVCVDTAPIPERYWAVEAGLGFRGVNSQLIIPGMGSYFFLGEILTTAGFAPDARFKGDCGSCGACVRSCPGSAIKDGKIDARRCLSYLTIEYRGESLPEGTSLGNHLYGCDVCQQVCPHNRACVPTDIEEFAPSEGFLSLDRDSIAGLTPEKFSALFRHSAVKRTKLKGLMRNLDYLD

SEQ ID NO: 75052 - protein, 314 aa, Barnesiella viscericola
  misc_feature (1)..(314): tr|W0EU21|W0EU21_9BACT (Fe-S)-binding protein OS=Barnes iella viscericola DSM 18177 OX=880074 GN=BARVI_07725 PE =4 SV=1
MDSSSAPFEWKEQIRSEALRLGFDACGFACADEVDSQSRDAYRRWLDEGKQAQMDYLGNYLDLRDNPALLYPGARTVICVALNYYPARVQPRENPQFAYYAYGLDYHEVMREKLRRLAAFVTTLSGDPGRVCCDTAPLRERYWAVQAGLGFIGKNAQLIIPGKGSYFFLGELLTTLALPPDTPLTNRCGDCSLCREHCPTGALSQPGQVDARLCISCQTIENRGEIPPEVAAQMGNRVYGCDTCQQSCPWNRAATPSTHPEFAPSDEFLALDAVRFEAMTPADFNRIFRHSAVRRAKYAGLMRNFIVWKKNREQ

SEQ ID NO: 75053 - protein, 382 aa, Bartonella apis
  misc_feature (1)..(382): tr|A0A1U9MCK6|A0A1U9MCK6_9RHIZ Epoxyqueuosine reductase OS=Bartonella apis OX=1686310 GN=BBC0178_018090 PE=4 S V=1
MPISTSKDKAKLKDFLVLREFLVKEAAAQGFDAIAITGCNNQKAAHHLVEALHQGYHGTMEWMVETAKRRMEPVNLWPDVKSVIMLAMNYGPDAHEFHQRPDKSSGNISYYARHRDYHELIKGRLKQIASRFVSRFGGDVKVFVDTAPVMEKPLAQLAGLGWQGKHTNLVSREFGSWLFLGSIFTDVELTFNEPEVDHCGSCHACLSACPTHAFPAPYQLDARRCISYLTIELKEQIPLSFRKAIGNRIYGCDDCLSACPWNKFARNTREIKLKAREDLIAPKLDFLLKLDDAAFRSFFTASPVKRIGRNRFIRNCLIAAGNSADRKLVSVVKPHLKDPDPLVAGMAVWALKQLLTKAEFDELAKRSITFSSNPDVLKEWED

SEQ ID NO: 75054 - protein, 382 aa, Bartonella apis
  misc_feature (1)..(382): tr|A0A1R0FA98|A0A1R0FA98_9RHIZ Epoxyqueuosine reductase OS=Bartonella apis OX=1686310 GN=PEB0149_013370 PE=4 S V=1
MPISTSSDKAKLKDFLVLRDFLTKEAAALGFDAIAITGSNNQKAAHHLVEALQHGYHGTMEWMLETAERRMEPANLWPDVKSVIMLAMNYGPDAHEFHQRPDKSSGNISYYARHRDYHELIKGRLKQIASRFVSRFGGDVKVFVDTAPVMEKPLAQLAGLGWQGKHTNLVSREFGSWLFLGSIFTDVELPVNEPEVDHCGSCHACLSACPTHAFPAPYQLDARRCISYLTIELKEQIPLSFRKAIGNRIYGCDDCLSACPWNKFARTTREIKLKAREDLIAPKLDFLLKLDDAAFRSFFTASPVKRIGRNRFIRNCLIAAGNSADRSLVSVVKPHLQDPDPLVAGMAVWALKQLLPKAEFDELAKRSITFSSNPDVLKEWED

SEQ ID NO: 75055 - protein, 379 aa, Bartonella tamiae
  misc_feature (1)..(379): tr|J1K041|J1K041_9RHIZ Epoxyqueuosine reductase OS=Bart onella tamiae Th239 OX=1094558 GN=queG PE=3 SV=1
MLIMPTSTFERQIKLKKFLQKEAENQGFNLLGITNQISDQAGIRLNHALDEGYHGTMEWMRETQQRRISPQNLWPEAQSIIMLAMNYGPDYNPLKKNENKNCGNISVYARHRDYHDIMKGRLKQIASRFAARSGAHVKIFVDTAPVMEKPLAQAAGLGWQGKHTNLVNKDYGSWLFLGSIFTDIPLPLDKFEKDHCGSCSACLTICPTDAFPAPYQLDARRCISYLTIELKEQIPLNFRKAIGNRIYGCDDCLSVCPWNKFARKTHEIKLQARDDLINPPLAMLLELDDPKFRRFFSASPVKRIGRHRFIRNCLIAAGNSGDSTLIMPVEKLLEDESPLVAGMAVWAMKQLVSHEYFVIMRQEYTKRQHDPSVLMEWES

SEQ ID NO: 75056 - protein, 349 aa, Bathymodiolus platifrons
  misc_feature (1)..(349): tr|A0A1Z5HE94|A0A1Z5HE94_9GAMM Epoxyqueuosine reductase OS=Bathymodiolus platifrons methanotrophic gill symbio nt OX=113268 GN=queG PE=3 SV=1
MDMTMNELSRQIKQWGNELGFQQVGISDTDLQKAEQRLHEWLAKGYHADMDYMHKHGLKRSRPALLQPETVSIISVRMDYLPEPHEAMETTLNNPIAGFISRYALGRDYHKVLRKRLQKLAKRIEQEVGVFGYRAFVDSAPVLEKAIAEKAGLGWIGKHSNIINKKAGSWFFLGEIYTSLPLVPDSPSSNHCGLCTSCLDICPTQAIVTPYQVDARRCISYLTIELKGSIPEDLRPLMGNRIYGCDDCQLICPWNRFARISKETDFSPRHNLNAQHLIELFNWTEEEFLHKTEGSAIRRIGHQQWLRNIAVALGNAPASTTIRQALHLKVNHKDELVREHVAWALAQSS

SEQ ID NO: 75057 - protein, 323 aa, Bauldia litoralis
  misc_feature (1)..(323): tr|A0A1G6EHT7|A0A1G6EHT7_9RHIZ Epoxyqueuosine reductase OS=Bauldia litoralis OX=665467 GN=SAMN02982931_04554 P E=4 SV=1
MAETAGRRGAPRSLWPEARSVVMLGLNYGPDSDPMASLARHDRATISVYARNRDYHDLVKGKLKQVAGRFAAREGVGVKVFVDTAPLMEKPLAAAAGIGWQGKHTNLVSRDFGSWLFLGAILTDIDLPPGEPEVDHCGSCRACLDICPTAAFPAPYRLDARRCISYLTIEHKGPIPHEFRAAMGNRIYGCDDCLAVCPWNKFAQVTQQAKLAARDDLDAPPLADLAVLDDAGFRALFSGSPIKRIGRDRFVRNVLVAIGNSGEAELRTAAMRLLDDAAPLVRGAAVWALARLDPAAAVAERASRMADESDPDVLEEWHAIDRD

SEQ ID NO: 75058 - protein, 350 aa, Bdellovibrio bacteriovorus
  misc_feature (1)..(350): tr|A0A150WTS6|A0A150WTS6_BDEBC Epoxyqueuosine reductase OS=Bdellovibrio bacteriovorus OX=959 GN=AZI85_16395 PE =4 SV=1
MTPQEMTSLIDETLQELGFSHFGFTSLSKPLSFDYYKEWLKEGLHGDMKYLEEHAPIKEEPQIKWPRARSALVFAIPYYPHPEKKADFPLKQARVSLYAQGMDYHFWFKARMAELCKKLQEILPEEEFLPFTDSSPVLERDLAKRAGLGWVGKNTCLIHPKKGSLFFIGEIYTSLDLNTTFEPLPDFCGTCRRCIDVCPTNALLEPKKMDARKCISYLTIESRQVPAPELREKIGDWFFGCDLCQTVCPWNQKVFKGQLNIEKNLSLNTQQADDLSEDLRYILTASGKKLTKDFLGTPLARAGSFGLKRNALIVVANRKIVSLKNEVSELLSHEKLGELAAWTLAILNTD

SEQ ID NO: 75059 - protein, 349 aa, Bdellovibrio bacteriovorus
  misc_feature (1)..(349): tr|W5WY74|W5WY74_BDEBC Iron-sulfur cluster-binding prot ein OS=Bdellovibrio bacteriovorus W OX=765869 GN=BDW_06 735 PE=4 SV=1
MNAQEITQFIESRLSDTGFSHFGIAKLARPLTFDFYQSWLNENLYGSMNYLKEHASIKENPQSKWPEARSCLVFAMPYFPHPEPQENPPLEAARMSMYSKGMDYHFWFRGRMQELCNELKGLFPSEEFLAFTDSSPLLERDLAQRAGLGWYGKNTCIIHPKKGSLFFIGEIITSLSFEANIAPLPDFCGKCTRCIDICPTEALIAPQKMDASRCISYLTIESRNVPAPDLREKIGDWFFGCDLCQTTCPWNQKVFKNQLSTHLIEEISEDHEEKLIKEMRYILESSGKKLSKDFLGTPLARAGSFGLKRNALIVIANRKLTGLEDAIIPLLDHEKLGELAQWTLDQLNG

SEQ ID NO: 75060 - protein, 370 aa, Bdellovibrio exovorus
  misc_feature (1)..(370): tr|M4V7U2|M4V7U2_9PROT Iron-sulfur cluster-binding prot ein OS=Bdellovibrio exovorus JSS OX=1184267 GN=A11Q_107 7 PE=4 SV=1
MTDFQDSLNDSLSSRLKSAALSLGFSQAAISPLKSPLSIAFYEKWLSQGHHADMAYLQNHLPFKQDPTLLGKELKSVISVTHSYYPAVQPSPLTVPARTALYSQNEDYHFWVKEKLQKLSSELSQLYPDSVFLPYVDSGPILERDLAYQNGLGWFGKNTCLIHPQHGSLFFIAEILTTLAIKNESLDGSPAEGSPIEPLPDFCGKCQKCLDICPTGALSSPRVLEADKCISYLTIESKSVPALELRNKIGDWFFGCDLCQTTCPWNQKVFRKSNIDHGNRTSTDLHSNLTAERRTELIEYFQFLLQASHKQIQKHHYGSPLLRAGAKGLKRNALIVIANQQLHELTEVVKALQTPELVELKEWTLEQLTS

SEQ ID NO: 75061 - protein, 368 aa, Bdellovibrio sp.
  misc_feature (1)..(368): tr|A0A317JP10|A0A317JP10_9PROT tRNA epoxyqueuosine(34) reductase QueG OS=Bdellovibrio sp. OX=28201 GN=queG PE= 4 SV=1
MGMSIDEILSNLKKELALDDIQWIPLAAPLRLQEYDDWLARGLHGEMKYLERHRDLKADPTRLLSDSRSVIMVSKSYVPNERPHDRLKGLRIAAYAQATDYHLWFKDLLEACKLKLEKLFPSHSFRCGTDSLPFLERDFAVQAALGWWGKNTCVIHPRRGSFFFLGEILSSVERAAVCGGAEATCGVGTDLVQGLAPLPDFCGHCDRCLQICPTGALEKPRQLNPLKCIAYWTIEAREVAPVGLREKFGDWFFGCDLCQTVCPWNQKPLRGSAATGVKTDLATEEILPSVDEAELRQDLVFLLTASDQEIRALVRGTPLERSKPQGLRRNAMIVLAHRQLRDLKGLLTRWREDAGLAELAEWAEAKLD

SEQ ID NO: 75062 - protein, 349 aa, Bdellovibrio sp.
  misc_feature (1)..(349): tr|A0A514XIX2|A0A514XIX2_9PROT tRNA epoxyqueuosine(34) reductase QueG OS=Bdellovibrio sp. ZAP7 OX=2231053 GN=q ueG PE=4 SV=1
MTPQEIKPLLDPFLAELGVSHFGWAPLQNPLSFDFYRSWIEEGLHGEMKYLAEHAPIKENPKSKWGRAESALVFAMPYFPHPEKLENFPLKSARVSLYAQGMDYHFWFKQRMQKLCEELTKLFPQEEFLAFTDSSPLLERDLAKKAALGWVGKNTCVIHPKKGSLFFIGEIVTSLKVTTEIAPLPDFCGTCTRCLDICPTGALIEPKKMDARKCISYLTIESRQIPEEALREKIGDWFFGCDLCQTVCPWNQKIFKGQLSIEKSLTLDTESAESLKKELSYILTASGKKLTKDFFGTPLARAGSFGLKRNAMIVAANRKIKGLQPEIEALKEHEKLGELAQWALLKLQS

SEQ ID NO: 75063 - protein, 383 aa, Bdellovibrionaceae bacterium
  misc_feature (1)..(383): tr|A0A2D6JK23|A0A2D6JK23_9PROT tRNA epoxyqueuosine(34) reductase QueG OS=Bdellovibrionaceae bacterium OX=20267 15 GN=queG PE=4 SV=1
MSLSVIRSLTRNYVLGLESFLLNSEEIKDLGLKFFDQVGFSSLHTNISIDQYRKWLEEEKYGNMNFLKEHLSFKEKPQNISANLNSAILVTKSYFPHPKKMDLGFKSSKLKIASYAQGEDYHHWLKKDLERMLEELKKQFPEEEFLCFTDSGPVLERDLAYRAGLGWIGKNTCLIHSTKGSLFFIGEILTSLKLDQNKQQAHPDRCGKCTRCIDACPTDALTERSLDATKCISYLSIEHKTEISSEYNKLMGPWFYGCDICQAVCPWNEKLLGQNFLGTKAELGVAAETVLDLEKEDREVLIKDIKDLLNLSNKKIQKRFFGSPMNRANANMHKRNAIRLALYFELSELIDVFKELANNTQSQMLQSYAEFAVNELVKNQSGN

SEQ ID NO: 75064 - protein, 345 aa, Bdellovibrionaceae bacterium
  misc_feature (1)..(345): tr|A0A2D5ZWX5|A0A2D5ZWX5_9PROT tRNA epoxyqueuosine(34) reductase QueG OS=Bdellovibrionaceae bacterium OX=20267 15 GN=queG PE=4 SV=1
  misc_feature (4)..(4): Xaa can be any naturally occurring amino acid
MILXTLQPLATELGFSQIGMATLQRPFSMDVYLNWLKEGHHGSMQYLQTHAPLKENPDQVLGEARSAIVVTLEYLPHPEPDDRLSKIEHLKIAQYAKGKDYHHYLKQRLENLVEKLRQTYPHHQFLTFTDSGPVLERDLAYRAGLGWVGKNSCLIHKNKGSYFFIGEILTTLTEDTEAAPHPDHCGKCRRCIDACPTDAILENRTLDARRCISYLTIESRETPAMDLRKGIGDWLFGCDICQQVCPWNEKNLGDLVKPQKQDRQKVFDELRFLLTSSNKSLQKHFKNTPLSRAGGFGLKRNAILVAVNLRATELIQEIETFKEHPKLGELANWALTELGQTQLSQ

SEQ ID NO: 75065 - protein, 345 aa, Bdellovibrionales bacterium
  misc_feature (1)..(345): tr|A0A3B9XEV1|A0A3B9XEV1_9PROT tRNA epoxyqueuosine(34) reductase QueG OS=Bdellovibrionales bacterium OX=205351 7 GN=queG PE=4 SV=1
MTNSFTEILKPLLQEAGFEHYGFSPLENPFSIGAYEDWIHKGYHGEMEYLKTHLPFKKEPTRHFKGLQSAIVVAKPYFPNSTTPTPLRIAEYAKSRDYHLTFKEELDAVAEKLKAQFLGEEFLCFTDSAPLLERDLAYRAGLGWIGKNTCLIDRKQGSLFFLGEILTSLSLEAPKERTLDFCGKCSKCIEICPTNALEENRILNAKKCISYLTIESKKIPDQDLRKQMGDWFFGCDLCQTVCPWNEKKYGKDLMQSLTEPVRFSKTSEEIESLRKILTKSNKELLSEFKESPLSRARGFGLKRNALIVIANQNVTELKDEVEHASRQWPRLKELCDWVLESFHED

SEQ ID NO: 75066 - protein, 368 aa, Bdellovibrionales bacterium
  misc_feature (1)..(368): tr|A0A1F3YBX3|A0A1F3YBX3_9PROT tRNA epoxyqueuosine(34) reductase QueG OS=Bdellovibrionales bacterium RIFOXYD1_ FULL_55_31 OX=1797404 GN=A2603_07865 PE=4 SV=1
MNQILNEEARSADFATFGAVDIRLANEEFQKHVDSFSRWLEAGMAGSMSYLARGKERRADPRRVFSGAKSVFCVGVPYDPRPLGAEDPARGPRFARYLRGRDYHSEVADRLERLMTAVNMRWVESAQSPVRAPLGWKVCVDTSAVLERAWACLAGLGWIGKNTLLIHPKLGSYLFLGLVLLDHETGQAPQIVPDSCGHCQCCLQACPGKALKRGTTLDSRLCVSYWTLEYRGELVTEQMHSFGTWIAGCDVCQEACPFNIRISRAAVARDSRDLCPTLTWEALLEESPDEYRERVRDCALDRVKPEQFSRNLAIALGNALALDSSGLGGRLFEKIRTRLAGESAGPARAWWEKCLKLAHSDYSPNRKP

SEQ ID NO: 75067 - protein, 353 aa, Beggiatoa alba
  misc_feature (1)..(353): tr|I3CBK5|I3CBK5_9GAMM Epoxyqueuosine reductase OS=Begg iatoa alba B18LD OX=395493 GN=queG PE=3 SV=1
MANIKRWGQALGFQQVGICDIDLSLAEQQLSQWLANAYQGDMYFMEKHGLKRSRPDWLVPNTLRVITVRMDYLPETQGQMLAQLHQLDKAYIARYALGRDYHKVLRQRLKVLADRIRAVVQGEEYRVFVDSAPVLEKPLAEKAGLGWIGKHTNLIHRQAGSYFFLGEIYVDIPLPVDAPTAGHCGRCQTCLTVCPTRAIVAPYQLDARRCIAYLTIEYRGSIPVELRALMGNRVYGCDDCQLFCPWNRFAQLTQEQDFLPRQGLEQALLVDLFQWTEAEFLRKTEGSPIRRIGYECWLRNLAVALGNVPMTSEIVRVLQARLQVDSPLVREHVVWALAQHDKKLSESGFLGLT

SEQ ID NO: 75068 - protein, 349 aa, Beggiatoa leptomitoformis
  misc_feature (1)..(349): tr|A0A2N9YEX4|A0A2N9YEX4_9GAMM Epoxyqueuosine reductase OS=Beggiatoa leptomitoformis OX=288004 GN=queG PE=3 SV =1
MLDYNVFASNIKQWGIELGFQQVGISDIDLTTAEQTLIQWLNDGYHGDMAFMAKHGTKRSRPAELVPDTLRVISVRMDYLPESQMQMLAVLNQSGSAYISRYALGRDYHKVLRQRLKQLAIRITKEIDGQIYRVFVDSAPVLEKPLAEKAGLGWIGKHTNLINRQVGSYFFLGEIYVDLPLPVDVPVNAHCGRCQACLTICPTQAIIAPYQLDARRCIAYLTIEFKGSIPIELRPLIGNRIYGCDDCQLVCPWNRFAQLTTESDFLPRQALINPPLITLFNWTEAEFLQQTEGSAIRRIGYESWLRNIAVALGNATPTTDIIACLQQRLSVPSTIVREHVEWALQRLQR

SEQ ID NO: 75069 - protein, 392 aa, Beijerinckia indica
  misc_feature (1)..(392): tr|B2IDU1|B2IDU1_BEII9 Epoxyqueuosine reductase OS=Beij erinckia indica subsp. indica (strain ATCC 9039 / DSM 1 715 / NCIB 8712) OX=395963 GN=queG PE=3 SV=1
MDQTQEKAFKIALLNEARAQGFTLCRVTHPGALPDAPVRLRAWLDKGAAGDMDWMRETEARRADPRILWPEVQSIIMLGMNYGPAEPPLAHLFEPERGNISVYARGRDYHDVIKGRLKLLAGWLLAHARKTRLVAEEPALKVFIDTAPVMEKPLAAAAGLGWQGRHSNLVSREAGSWLFLGSIFTTLPLSPDRPESDHCGSCHACLDICPTSAFPQPYVLDARRCISYLTIEHKGPIPPEFRKKIGNRIYGCDDCLAVCPWNKFAKAASETKLLARAEWTAPPLHLLLGLNDAAFRRFFAGSPIKRIGRVRFLRNVLIAAGNSGDRSLIVSVRTLLDDEAPLVRGAAIWALAELLPRTEFLTLAGRLAPREKDMSVLLEWVQAGVTEKGVFA

SEQ ID NO: 75070 - protein, 380 aa, Beijerinckia sp.
  misc_feature (1)..(380): tr|A0A1H4WRI1|A0A1H4WRI1_9RHIZ Epoxyqueuosine reductase OS=Beijerinckia sp. 28-YEA-48 OX=1882748 GN=queG PE=3 SV=1
MSPSFIDALRQRAAELGFDQCRIAAPDAIPQAPARLQQWLGEGAHGEMDWMAETAERRSDPRALWSEVRSVIVLAVNYGPDTDPLASLDQKSQATISVYARNRDYHEHIKGRLKMLAQFLISRADAEADVKVFVDTAPVMEKPLAAAAGIGWQGKHTNLVSRDHGSWLFLGTIFTTLPLPIDPPESDHCGSCRACLDICPTKAFPAPYRLDARRCISYLTIEHKGSIDPQLRTAMGNRIYGCDDCLAACPWNKFAEVAREAKFQARDDLVAPPLTELAALDDAAFRTKFSGSPIKRIGRDRFVRNVMIAIGNSADAALVPVARARLDDASPLVRAMAVWALQQLLPSHQFAALHQQVAARELDPVVLAEWAANATSRTMS

SEQ ID NO: 75071 - protein, 421 aa, Beijerinckiaceae bacterium
  misc_feature (1)..(421): tr|A0A539CVQ1|A0A539CVQ1_9RHIZ Epoxyqueuosine reductase OS=Beijerinckiaceae bacterium OX=1978229 GN=queG PE=3 SV=1
MGRERDGKELVRKDKIAAGLPLPARGPAAGRDPEPGLRGSRFLGAAFKARLREQARSLGFDVCRITHPGAIPQAPQQLEAWLASGAAGSMEWLASTQARRSDPRKLWPETASIIMLGMNYGPADDPLAALAQKSAANISVYTRNRDYHGLIKGRLKLLGSWLAKEAKGTEIKVFVDTAPVMEKPLAQAAGLGWSGKHSNLVSRDFGSWLFLGAIFTNLPFSPDSPEVDHCGTCAACLDICPTKAFPRPYVLDARRCISYLTIEHKGHIGREFRPLMGNRIFGCDDCLAVCPWNKFAVFAREAKLQAREALAAPQIADLLRLDDAAFRVLFSGSAVKRIGFDRFTRNVLIAAGNSGNPALAGPVMEKLESPSALVRAMAVWALGRLVASDRLAELERRFRGAETDATVAAEWAAATGAGAGA

SEQ ID NO: 75072 - protein, 348 aa, Beijerinckiaceae bacterium
  misc_feature (1)..(348): tr|A0A5E4H2Q5|A0A5E4H2Q5_9RHIZ Epoxyqueuosine reductase OS=Beijerinckiaceae bacterium RH CH11 OX=2572038 GN=qu eG PE=3 SV=1
MKTKLAARARDLGFDLCRVAAPDAIPLAPERLRAFIEAGRAGDMAWLAETEPRRADPRVLWPDVRAIVMLGLNYGPERDPLETLADRSAANVSVYARGRDYHEVIKGKLKQLAGWLVAEARRAGEADADVKVFVDTAPVMEKPLAEAAGLGWQGKHTNLVSRELGSWLFLGSIFTTLPLAPDAPEGDHCGSCRACLDACPTDAFPAPYQLDATRCISYLTIEHQGAIPHEFRKAIGNRIFGCDDCLAVCPWNKWAQAGRDMKLAAKPELEAPRIADWLALDDAGFRATFANTPVRRLGYARFKRNLLIAAGNSGDAALAALVRAHVGAPSPLVDEAARWAMGELAASV

SEQ ID NO: 75073 - protein, 311 aa, Belliella baltica
  misc_feature (1)..(311): tr|I3Z3L7|I3Z3L7_BELBD Epoxyqueuosine reductase OS=Bell iella baltica (strain DSM 15883 / CIP 108006 / LMG 2196 4 / BA134) OX=866536 GN=queG PE=3 SV=1
MINSKEKYAQMIKTQAKNLGFDFCGIAKAEFLEDEAPKLEAWLNQNYHGQMAYLANHFDKRLDPTKLVDGAKTVVSLIYNYFPESTLPESPSDLKIAKYAYGKDYHFVIKDKLNTLLQNLQEEIGEIGGRAFVDSAPVMERQWAQKAGLGWTGKNSLLLNKKMGSFFFLAELIIDLEVAPDLPMTIDYCGTCTKCVDACPTDAIVGSGVVDGSRCISYFTIELKEQIPYEVKGKFENWIFGCDICQDVCPWNRFSKPHQEAEFLPHPDLQQMKRKDWEEITAETFNRVFQKSAVKRTKLEGLIRNIDFVKK

SEQ ID NO: 75074 - protein, 313 aa, Belliella buryatensis
  misc_feature (1)..(313): tr|A0A239BRL4|A0A239BRL4_9BACT Epoxyqueuosine reductase OS=Belliella buryatensis OX=1500549 GN=queG PE=3 SV=1
MSLLYSKDKYAQIIKTQAKNLGFDFCGISKAGFLEEEAPRLENWLNQNYHGQMGYLANNFDKRLDPTKLVEGAKTVVSLIYNYYPAKKLSEDPQDYKIAKYAYGKDYHFVIKDKLRDFLQKLNEEIGEIGGRAFVDSAPVMERQWAQKSGLGWTGKNSLLLNRQMGSFFFLAELIIDLEVSPDTPMAKDYCGTCTKCIDACPTDAIVKPGVVDGSKCISYFTIELKDQIPTEVKGKFENWVFGCDICQDVCPWNRFSKPHQEPEFNPHPELMSFSKKDWEEITQETFNKVFQKSAVKRPKLEGLRRNISFVKK

SEQ ID NO: 75075 - protein, 313 aa, Belliella pelovolcani
  misc_feature (1)..(313): tr|A0A1N7KR12|A0A1N7KR12_9BACT Epoxyqueuosine reductase OS=Belliella pelovolcani OX=529505 GN=queG PE=3 SV=1
MSLTISKEKYAQIIKSQANRLGFDFCGIAKADFLEEEAPKLENWLNQNYHGEMAYLANHFDKRLDPRRLVDGAKTVVSLIYSYYPESKLPENTEDYKLAKYAYGKDYHFVIKDKLKSLLQSLQEEIGEINGRAFVDSAPVMERQWAQKAGLGWLGKNSLLLNRKMGSFFFLAELIIDLEVAPDHAMTQDYCGTCTKCIDACPTDAIIEPGVVNGAQCISYFTIELKESIPSEVKGKFENWIFGCDICQDVCPWNRFSKPHQEPEFNLHPELMAFSKKDWEEITQETFNKVFQKSALKRTKLEGLRRNISFVKK

SEQ ID NO: 75076 - protein, 383 aa, Bellilinea caldifistulae
  misc_feature (1)..(383): tr|A0A0P6XHC2|A0A0P6XHC2_9CHLR Epoxyqueuosine reductase OS=Bellilinea caldifistulae OX=360411 GN=queG PE=3 SV= 1
MVGNSPDLKEFIKAEAIRLGFDLVGFTDPSPPTSFPSFQKWLNQGMHGEMAYLSRPDAVARRADPSLILPGVRTILVVALRYPRPEDAPPASSKPFGKVAAYAWGEDYHTIIPSRLRELVTALQGKIGRSFEWKILTDSGPVLERDLAQRAGLGWVGKNTCLINPRIGSYFLLGELFLTLDLEPDSPFPADHCGSCQRCIQACPTHCILPDRTLDARRCISYLTIENKTEIPPDLRPALDNWVFGCDICQQVCPWNIRFASPHHDPAFSPKEDTARPVLSREILLSQAEFKQKFSQSPVLRAKRRGYLRNVAVALGNSLRSENLSALITSLKSDEEPLVRSHSAWAIGRIGGEQARTALQEALKTETHPQVVQEICSALQNLP

SEQ ID NO: 75077 - protein, 343 aa, Belnapia rosea
  misc_feature (1)..(343): tr|A0A1G6KIX4|A0A1G6KIX4_9PROT Epoxyqueuosine reductase OS=Belnapia rosea OX=938405 GN=queG PE=3 SV=1
MTKDLIRAEAQRLGFDAVGFAAATLPAEARARLDRFLAEGMHGTMGWMEARAEQRAHPRALWPEAISIVSLGLSYAPAEDPLANLSRRDRGNISIYARNRDYHDVLKSRLKALARWMVATWPEALVKVFVDTAPVMEKPLAQEAGLGWQGKHTNLVSRQHGSWLFLGEVYTTLSLPADPPGADRCGRCSACLDICPTRAFPEPRRLDARRCISYLTIEHRGPIPEEHRAPMGNRIYGCDDCLAVCPWNKFARAHSEPGFAPRASLDAPRLAELAMLDDAGFRALFTASPVKRIGRDRFVRNVLVAIGNSGDPALRATAQALAEDPDPVVAEAARWAAQRLEAA

SEQ ID NO: 75078 - protein, 324 aa, Bergeyella zoohelcum
  misc_feature (1)..(324): tr|A0A376C190|A0A376C190_9FLAO Epoxyqueuosine reductase OS=Bergeyella zoohelcum OX=1015 GN=queG_1 PE=3 SV=1
MKPSQKEAISQKIKTFAEALGFMACGISKAGFLEDAAPRLEEYLKNNRHGEMRYMENYFDKRLDPTLLVPGAKSVISFLYNYYPEEKIDAQNGFQIAKYAYGLDYHDVLKEKLRTLVVMLEEEIGAFEHRVFVDSAPVLERAWAERAGLGWIGKNGNLLAKKSGSFFFLGEIICDLELIYDHPTTDHCGNCRKCIDACPTQAIIAPKVLDGSKCISYLTIELKNEISTEFTGKMGDWIFGCDICQDVCPWNRFSVSNPASWLQPHPKLLELNKKDWQDLTQETFSQIFRKNPVKRTKYTGLMRNIEFVMKQDMKDSEDEKMMKL

SEQ ID NO: 75079 - protein, 324 aa, Bergeyella zoohelcum
  misc_feature (1)..(324): tr|K1LLE8|K1LLE8_9FLAO Epoxyqueuosine reductase OS=Berg eyella zoohelcum ATCC 43767 OX=883096 GN=queG PE=3 SV=1
MKPSQKEAISQKIKTFAEALGFMACGISKAGFLEDAAPRLEEYLKNNRHGEMRYMENYFDKRLDPTLLVPGAKSVISFLYNYYPEEKIDAQNGFQIAKYAYGLDYHDVLKEKLRTLVAMLEEEIGAFEHRVFVDSAPVLERAWAERAGLGWIGKNGNLLAKKSGSFFFLGEIICDLELIYDHPTTDHCGNCRKCIDACPTQAIIAPKVLDGSKCISYLTIELKNEISTEFTGKMGDWIFGCDICQDVCPWNRFSVSNPASWLQPHPKLLELNKKDWQDLTQETFSQIFRKNPVKRTKYTGLMRNIEFVMKQDMKDSEDEKMMKL

SEQ ID NO: 75080 - protein, 380 aa, Bermanella marisrubri
  misc_feature (1)..(380): tr|Q1N267|Q1N267_9GAMM Epoxyqueuosine reductase OS=Berm anella marisrubri OX=207949 GN=queG PE=3 SV=1
MPSLYLLNPCTTNLMTQTPDSISNIDWHQLTAQIKQWAYELGFAQVGITDVNMEQHAKALKDWLAKGYHGEMSYMADHGNKRYTPDALVPGTLRIISVRMNYMPEDVQTLEILDHPSKAYISRYALGRDYHKLIRKRLTQLGKRIESLFSQLSNDVAYRAFVDSAPVLERGIAQKAGLGWIGKNAMLINPKAGSYFFLGELFTNLPLIMDEPYDDMNCGSCTACFAACPTDAIVDNHVVDARKCISYLTIELKSSIPTELRSKIGNRIFGCDDCQLCCPWTKFTDNTQETDFTPRHQLDDVELLELFHWDESTFLQKTEGMPLRRSGFELWQRNIAVALGNAAQSEHIIQALEEKRANSTEMVQEHIDWAIEQQIAKRKQ

SEQ ID NO: 75081 - protein, 359 aa, Bermanella sp.
  misc_feature (1)..(359): tr|A0A2D4S6G9|A0A2D4S6G9_9GAMM Epoxyqueuosine reductase OS=Bermanella sp. OX=2024825 GN=queG PE=3 SV=1
MITPEQSQTLANNIKTWGEELGFAQVAITDVDLKEHGERLVEWLEKGYHGEMAYMADHDDMRYRPEKLHPGTFRIITLRMDYMAPEVETIRVLNNPDQAYISRYALGRDYHKLMRKRITQLGKKIEQAISELDLEPNFRAFVDSAPVLERGLAQKAGMGWIGKNAMLINPKAGSYFFLGELFTNLPLPLDKPYQDMNCGSCTACITECPTGAIVDNHVVDGRKCISYLTIELKTAIPEKLRSKMGNRIFGCDDCQLCCPWNKFTKASQEQDFTPRHNLDTATLLELFAWDETTFLSKTEGTPIRRAGHERWLRNIAVALGNAPYSQEIITALNDKAHFDSALVQEHANWALQQQLNKTD

SEQ ID NO: 75082 - protein, 365 aa, Bermanella sp.
  misc_feature (1)..(365): tr|A0A1Y5DI04|A0A1Y5DI04_9GAMM Epoxyqueuosine reductase OS=Bermanella sp. 47_1433_sub80_T6 OX=1856278 GN=queG PE=3 SV=1
MTTSVSINANELAQQIKAWGQELGFQQVGITNVDLGEHGERLQEWLKKDYHGEMFYMADHGDKRYRPEKLVPDTLRIITVRMDYMPPEIETLKILNSPNQAYISRYALGRDYHKLMRKRITQLGKKIEAAVGHFGYRAFVDSAPVLERGLAQKSGQGWIGKNAMLINPKAGSYFFLGELFTDLPLPIDEPFEEMHCGSCRACLDFCPTGAIVDNHIVDGRKCISYLTIELKGSIPEDLRPKMGNRIFGCDDCQLCCPWNKFSKPTAESDFTPRHHLDSATLIELFSWDEQTFLSKTEGTPIRRAGHERWLRNIAVGLGNAPSNENIINALNSRLDFESELVHEHVVWALDQHKLKNKIQVSNATR

SEQ ID NO: 75083 - protein, 315 aa, Bernardetia litoralis
  misc_feature (1)..(315): tr|I4AHK3|I4AHK3_BERLS Uncharacterized Fe-S protein OS= Bernardetia litoralis (strain ATCC 23117 / DSM 6794 / N BRC 15988 / NCIMB 1366 / Sio-4) OX=880071 GN=Fleli_0990 PE=4 SV=1
MNPISLHQKTEYFKNVAFEAGFLHCGISKATFLEKEARDLEKWLTQGKNGQMQWIENYFDIRLDPRLLVDNAKSVLTFAYNYYPPLPLERENNYKISKYAYGRDYHKVIKKKLKHLLNHLKEEFGDFNGRAFVDSAPIMEKIWAKKSGITWQGKHTNAINPKTGSFFFLATLVIDIELEYDNPTKDRCGNCTLCLDACPTDALSLENPYQIDGSKCISYFTIELKDKIPSEMQGKFEDWIFGCDICQDVCPWNKRKSAQIAHTENDFLPSELLQEMTKKDWHELTNELFDTLFLGTPIKRTKFEGLKRNIEFVKK

SEQ ID NO: 75084 - protein, 347 aa, Unknown
  misc_feature (1)..(347): tr|A0A0N1AM37|A0A0N1AM37_9PROT Epoxyqueuosine reductase OS=beta proteobacterium AAP51 OX=1523421 GN=queG PE=3 SV=1
MRVWARELGFSQIGISGIDLASAEAGLSAWLAAGFHGGMGYMAHHGLKRARPAELVPGTVCVITARMDYLPRNAPPQWAQQEWQALASPQQAVVSVYARGRDYHKVLRQRLQRLAERLAAEVGPLGHRVFTDSAPVLEVELATRAGLGWRGKHTLALQRDAGSMFFLGEIYLDLPLPLDEPASAHCGSCQACITACPTQAIVAPYRLDARRCISYLTIEHAGSIPVEFRPLMGNRIYGCDDCQLACPWNKYAQRSPLPDFDVRDGLHDTTLLQLWAWDEAEFLRRTEGSAIRRIGITRWRRNLAVALGNAWRVQGDAAIARALQAALLQADDLVAEHIRWALAQRAA

SEQ ID NO: 75085 - protein, 358 aa, Unknown
  misc_feature (1)..(358): tr|B6BTT3|B6BTT3_9PROT 4Fe-4S ferredoxin-type domain-co ntaining protein OS=beta proteobacterium KB13 OX=314607 GN=KB13_1171 PE=4 SV=1
MLDKAYWKDISKKIIATGKELGFNDVGISDTVINQNQRLYKEWIDAKNHGAMSYLEDHQDIKFDPENILANTKSIISVRLDYLPLNENLIDLINQKDKAYIARYALGRDYHKTLKKKLNHFGSLIESIILESDFDFKFRAITDSAPSPEIEIATQAGLGWRGKNTLLLNKNNGSWFFLGELYTNAPLVFNQTSSTNHCGSCSACIDICPTQAIEKPYYLNASKCISYWTIEHKGTIPISFRKKIGNRIYGCDDCQIICPWNKFAKKSTEIDFFVRHKLNNISLMGCFLMDNHRFNEYFNGSAIRRIGYEKWISNVAIALGNAGHDQKIIDALIKRSEDPSNLIKEHVLWAISEQEAKK

SEQ ID NO: 75086 - protein, 447 aa, Betaproteobacteria bacterium
  misc_feature (1)..(447): tr|A0A536TQ83|A0A536TQ83_9PROT Epoxyqueuosine reductase OS=Betaproteobacteria bacterium OX=1891241 GN=queG PE= 3 SV=1
MFNQGVAGTLDCTKPAQLTQHAAHQRRLASPELAGKRNDHAAAKSRRERRTGSQSGVRVRQVALQRFYNRGVFHREVRCPVSAMSATPVPRQVDLAALARDIRGWGIELGFAEIGIADTALAAEEVRLSAWLATGRHGEMHYMARHGLRRARPADLVPGTIRVISARLDYQPPRARDAASVLADSRRAYISRYALGRDYHRVLRRKLQRLADRITAAVGSFRYRVFTDSAPVLEVALAAKAGLGWRGKHTLLLTRHAGSYFFLGEIYTDLPLPVAAAASEHCGSCHACIDACPTGAIVAPYELDARRCISYLTIELEGSIPEALRPLIGNRVYGCDDCQLVCPWNKYAQASAEPDFAVRNGLDEADLVALFAWTADEFATRMEGSAIRRIGYERWLRNLAVGLGNADYDDDVVAALAARADDPSPLVREHVAWALARQRSKSPAQAA

SEQ ID NO: 75087 - protein, 370 aa, Betaproteobacteria bacterium
  misc_feature (1)..(370): tr|A0A142LIH0|A0A142LIH0_9PROT Epoxyqueuosine reductase OS=Betaproteobacteria bacterium UKL13-2 OX=1690485 GN= queG PE=3 SV=1
MNEIDFQQLAADIKVWGKSLGFQEVGITDTNLSNEAVLLEGWLASGYHGSMDYMARYLGANGSGQDTVPHRAIPASIVPGTVRIITTRLNYDTLVACDGWEVLSDPSKAFISRYALGRDYHKVVRAKLVALAETIAEKVPSLAYRVFADSAPVMEVALATKAGIGWRGKHTLLLNREAGSLFFLGEIYINLPLPIDAPTTEHCGTCTRCIDVCPTNAIVAPYVVDARRCISYLTIENKDAIPIEFREAIGNRIYGCDDCQLTCPWNKYAAPTGEKDFMIRHQLDNITLGELWDWNETTWLERMRGSAIRRIGFERWQRNLAVAIGNALRADKLPVAEADSLRQRLRFARTSATPLVAEHIDWALACDDRD

SEQ ID NO: 75088 - protein, 384 aa, Bhargavaea beijingensis
  misc_feature (1)..(384): tr|A0A1G7G7A4|A0A1G7G7A4_9BACL Epoxyqueuosine reductase OS=Bhargavaea beijingensis OX=426756 GN=queG PE=3 SV=1
MDTVTLQQELRAFAREAGIDKIGFTTADPFREMKNRLRRQQEAGFQSGFEKGSLEERTDPALLLEEPESIIAIAVAYPSKLDGAPKGSKGARRGMFCRASWGQDYHDVLKEKLALLEAFILERVPGARLRSMVDTGELVDRAVAERAGIGWSGKNCSIITPEFGSYVYLGEMITNIPFEPDEPIEDGCGDCTLCLDICPTGALIEGGRLNAQRCIAFLTQTKGSLPEEFRTEIGNRVYGCDTCQTICPKNKGMHNRIQEAFRPDPELVKPLLEPLLNLSNREFKETFGHMSGSWRGKNPIQRNAIYALGHFREESAMPELSHILREDVRPYMRGASAYALGKIGTEEAETVLRHAESREREEEVLEEIRAALRRIEDQKKEVRE

SEQ ID NO: 75089 - protein, 384 aa, Bhargavaea cecembensis
  misc_feature (1)..(384): tr|A0A163EE05|A0A163EE05_9BACL Epoxyqueuosine reductase OS=Bhargavaea cecembensis OX=394098 GN=queG PE=3 SV=1
MDTVTLQRELRAFAREAGIDKIGFTTADPFREMKNRLRRQQESGFQSGFEKGSLDERTDPALLLEEPESIIAIAVAYPSKLDDAPKGKKGARRGMFCRASWGQDYHDVLREKLALLEAFILERVPDARLRSMVDTGELVDRAVAERAGIGWSGKNCSIITPEFGSYVYLGEMITNIPFEPDEPIEDGCGDCTLCLDICPTGALIEGGRLDAQRCIAFLTQTKGSLPEEFRTEIGNRVYGCDTCQTICPKNKGMHNRIHEAFRPDPELAKPLLEPLLNLSNREFKETFGHMSGSWRGKNPIQRNAIYALGHFREQSALPELSRVLREDVRPYMRGASAYALGKIGTEEAETALHHAESREKEEEVLEEIRGALRHIADQKKEVHE

SEQ ID NO: 75090 - protein, 384 aa, Bhargavaea cecembensis
  misc_feature (1)..(384): tr|M7NCI7|M7NCI7_9BACL Epoxyqueuosine reductase OS=Bhar gavaea cecembensis DSE10 OX=1235279 GN=queG PE=3 SV=1
MDTVTLQRELRAFAREAGIDKIGFTTADPFREMKNRLRRQQESGYQSGFEKGSLDERTDPALLLEQPESIIAIAVAYPSKLDDAPKGKKGARRGMFCRASWGQDYHDVLREKLALLEAFILERVPGARLRSMVDTGELVDRAVAERAGIGWSGKNCSIITPEFGSYVYLGEMITNIPFEPDEPIEDGCGDCTLCLDICPTGALIEGGRLNAQRCIAFLTQTKGSLPEEFRTEIGNRVYGCDTCQTICPKNKGMHNRIHEAFRPDPELAKPLLEPLLNMTNREFKETFGHMSGSWRGKNPIQRNAIYALGHFREQSALPELSRILREDVRPYMRGASAYALGKIGTEQAETALRHAESREKEEEVLIEIRAALRRIADQKKEVHE

SEQ ID NO: 75091 - protein, 384 aa, Bhargavaea ginsengi
  misc_feature (1)..(384): tr|A0A1H7CDZ1|A0A1H7CDZ1_9BACL Epoxyqueuosine reductase OS=Bhargavaea ginsengi OX=426757 GN=queG PE=3 SV=1
MDTVTLQRELRAFAREAGIDKIGFTTADPFREMKNRLRRQQEAGFQSGFEKGSLDERTDPALLMEEPESIIAIAVAYPSKLDDAPKGTKGARRGMFCRASWGQDYHDVLREKLALLEAFILERVPGARLRSMVDTGELVDRAVAERAGIGWSGKNCSIITPEFGSYVYLGEMITNIPFEPDEPIEDGCGDCTLCLDICPTGALIEGGRLNAQRCIAFLTQTKGSLPEEFRTEIGNRVYGCDTCQTICPKNKGMHNRIHEAFRPDPELAKPLLEPLLSLSNREFKEAFGHMSGSWRGKNPIQRNAVYALGHFREQTALPELSRILREDVRPYMRGASAYALGKIGTAEAETVLQHAESREREEEILEEIRAALSLIADQKKEVHE

SEQ ID NO: 75092 - protein, 379 aa, Biostraticola sp.
  misc_feature (1)..(379): tr|A0A4U2UN12|A0A4U2UN12_9ENTR Epoxyqueuosine reductase OS=Biostraticola sp. BGMRC 2031 OX=2575567 GN=queG PE= 3 SV=1
MSYPFDLMELARLIKHWGLALGFQHIGICDTDLAAHEPELQAWLDKQYHGDMAWMARHGMLRARPAELLPGTLRVISAGMNYLPADAAFARTLKNPRLGYVSRYALGRDYHKVLRHRLQQLGDRIREWCAEVNFRPFVDSAPILERPLAAKAGLGWVGKHSLLLNREAGSWFFLGELLIDIPLPTDAPAAEGCGRCVACLTACPTGAIVAPYTVDARRCISYLTIELDGSIPEALRPLMGNRIYGCDDCQLICPWNRFAPLTAEKDFSPRVVLQSSRLLELFAWDEATFLRTTEGSPIRRIGHRRWLRNIAVALGNAPYEDHIVLALQNRLGGDPMVDEHIVWALCQQRQRRGASGVEVQPAGHKRLIRSIEKGLPRDA

SEQ ID NO: 75093 - protein, 359 aa, Biostraticola tofi
  misc_feature (1)..(359): tr|A0A4R3Z3V7|A0A4R3Z3V7_9ENTR Epoxyqueuosine reductase OS=Biostraticola tofi OX=466109 GN=queG PE=3 SV=1
MGFQQIGICDTDLSDQEPLLQAWLDNQYHGEMDWMARHGMMRARPHELLPGTLRVISVRMNYLPARAAFASTLKNPRLGYVSRYALGRDYHKVLRSRLKQLGEKIRAWCGQANYRPFVDSAPILERPLAAKAGLGWVGKHSLILNREAGSWFFLGELLIDLPLPVDGAVKEECGKCVACITTCPTGAIVAPYTVDARRCISYLTIELEGDIPEALRPLIGNRIYGCDDCQLICPWNRFSQLTDEADFSPRAALHAPELIDLFHWDEARFLRVTEGSAIRRIGHLRWLRNIAVALGNAPYEPAVLSALQSRSGENALLDRHIQWAVGEQLARREAQSVKVQTAQQQRLVRSIEKGLSRDA

SEQ ID NO: 75094 - protein, 307 aa, Bizionia algoritergicola
  misc_feature (1)..(307): tr|A0A5D0R389|A0A5D0R389_9FLAO Epoxyqueuosine reductase OS=Bizionia algoritergicola OX=291187 GN=queG PE=3 SV= 1
MTNTSKYSQIIKTEAKRLGFLSCGISQAGFLETEAPRLETWLNKNMNGEMSYMENHFDKRLDPTKLVEGSKSVVSLLLNYYPSETQKEDTYKLSKYAYGTDYHFIIKDKLKTLLQTIQEEIGEVGGRAFVDSAPVLDKAWAAKSGLGWIGKHSNLLTQQVGSFYFIAELIIDLELEYDAVTTDHCGTCTKCIDACPTQAITEPYVVDGSKCISYFTIELKENIPTEFKGQFNDWMFGCDICQDVCPWNRFSKAHSEPLFNPHPELLEMTKKDWEEITEDTFRKVFQKSAVKRTKFSGLTRNIDFLKD

SEQ ID NO: 75095 - protein, 308 aa, Bizionia argentinensis
  misc_feature (1)..(308): tr|G2EFS7|G2EFS7_9FLAO Epoxyqueuosine reductase OS=Bizi onia argentinensis JUB59 OX=1046627 GN=queG PE=3 SV=1
MINNKAKYTALIKAEAKRLGFLSCGISPAGFLEEEAPRLENWLNKNMNGEMSYMENHFDKRLDPTKLVEGSKSVVSLLLNYYPEETQQNETYKLSKYAYGTDYHFVIKDKLKSLLQTIQDEIGEVGGRAFVDSAPVLDKAWASKSGLGWVGKHTLLLSQQSGSFHFIAELIIDLELEYDSITTDHCGTCTKCIDACPTNAIAEPYVVDGSKCISYFTIELKDNIPTEFKGQIEDWMFGCDICQDVCPWNRFSKAHSEPLFNPHPDLLEMTKKDWEEITEDTFKKVFKKSAVKRTKFAGLTRNIDFIKG

SEQ ID NO: 75096 - protein, 307 aa, Bizionia echini
  misc_feature (1)..(307): tr|A0A1I4ZSN6|A0A1I4ZSN6_9FLAO Epoxyqueuosine reductase OS=Bizionia echini OX=649333 GN=queG PE=3 SV=1
MTNKSKYSQIIKDEAKRLGFLSCGISQAGFLEEEAPRLESWLKNKSHGDMQYMENHFDKRLDPTKLVEGSKSVVSLLLNYYPSETQHADTYKISKYAYGTDYHFVIKDKLKELLQTIQEEIGEVGGRAFVDSAPVLDKAWAAKSGLGWIGKHSNLLTQQVGSFYFIAELVIDLELEYDAVTTNHCGTCTKCIDACPTQAITEPYVVDGSKCISYFTIELKENIPTEFKGKFNDWMFGCDICQDVCPWNRFSKAHSEPLFNPHPELLDMTKKDWEEITEDTFRKVFQKSAVKRTKFSGLTRNIDFLLE

SEQ ID NO: 75097 - protein, 308 aa, Bizionia myxarmorum
  misc_feature (1)..(308): tr|A0A5D0RCV3|A0A5D0RCV3_9FLAO Epoxyqueuosine reductase OS=Bizionia myxarmorum OX=291186 GN=queG PE=3 SV=1
MIDNRSKYTAMIKTEAKRLGFLSCGISKAQFLEEEAPRLENWLNKNMNGEMSYMENHFDKRLDPTKLVEGSKSVVSLLLNYYPSEFQNDDTYKISKYAYGTDYHFIIKDKLKSLLHFIQEEIGEVDGRAFVDSAPVLDKAWAAKSGLGWVGKHTLLLTQKSGSFHFIAELIIDLELEYDSITTDHCGSCTKCIDACPTQAITEPYVVDGSKCISYFTIELKENIPTEFKGQFNDWMFGCDICQDVCPWNRFSKAHSEPLFNPHPELLEMSKQDWEEITEETFQKVFKKSALKRTKFTGLTRNIDFLKS

SEQ ID NO: 75098 - protein, 308 aa, Bizionia paragorgiae
  misc_feature (1)..(308): tr|A0A1H4BUL5|A0A1H4BUL5_9FLAO Epoxyqueuosine reductase OS=Bizionia paragorgiae OX=283786 GN=queG PE=3 SV=1
MNSKANYTQWIKTEAKRLGFLSCGISKAEFLETEAPRLEDWLNKNRNGEMSYMENHFDKRLDPTKLVDDSKSVISLLLNYYPSQTQTDPEAPKLSKYAYGHDYHHIIKGKLKELTHFIQEEIGEVSGRAFVDSAPVLDKAWAAKSGLGWIGKHSNLLTQKVGSFYFIAELIIDLDLEYDTPTTDHCGTCTACIDACPTQAIVDPYVVDGSKCISYFTIELKDQLPEAMKGQFDDWMFGCDVCQDVCPWNKFSKPHNEPLFNPHPDLLAMTKKDWEEITEDVFKKVFQKSAVKRTKFSGLKRNIAFLKE

SEQ ID NO: 75099 - protein, 309 aa, Bizionia saleffrena
  misc_feature (1)..(309): tr|A0A5D0QTE4|A0A5D0QTE4_9FLAO Epoxyqueuosine reductase OS=Bizionia saleffrena OX=291189 GN=queG PE=3 SV=1
MATNKTTYTKGIKAEAERLGFLSCGISKAGFLETEAPRLEDWLNKNRNGQMTYMENHFDKRLDPTKLVDDAKSVISLLLNYYPSETQKDPEAPKLSKYAYGHDYHHIIKGKLKELTHFIQDEIGEVSGRAFVDSAPVLDKAWAAKSGLGWIGKHSNLLTQKVGSFYFIAELIIDLDLDYDAPVTDHCGTCTACIDACPTQAIVDPFVVDGSKCISYFTIELKDQLPNAMKGQFDDWMFGCDVCQDVCPWNKFSKPHNEPLFNPHPELLEMTKQDWEEITEDVFKKVFQKSAVKRTKFSGLKRNIEFLKE

SEQ ID NO: 75100 - protein, 331 aa, Blastocatellia bacterium
  misc_feature (1)..(331): tr|A0A3B9MLQ6|A0A3B9MLQ6_9BACT Epoxyqueuosine reductase OS=Blastocatellia bacterium OX=2052146 GN=queG PE=3 SV =1
MQASVTACSQNDTADKTSARELSRRIKDRAFVEGFEKVGVVPARVLDAAHERLTTWLERGYHAGMAWMARDPQTRTNPRKLFPEARSVVVVALNYYTPYKHAEDPATGKVSRYAWGDDYHDVVGAKLRSLLAWIKEEVPQAEGKVCVDIQPMMDKAWAVEAGLGWIGKHTNLITPEYGSWVFIGELLLNIDLEYDKTRVDDHCGSCTLCIDACPTAAINEPYVVDSNKCISYATIELRDAELPRDIAQHLEGWFYGCDICQDVCPWNRFEQVTNEDRFQPRTGNVNATLTEAFELTPQTYAQRFRGSAMKRAKLSGLQRNARALLGANGAK

SEQ ID NO: 75101 - protein, 386 aa, Blastocatellia bacterium
  misc_feature (1)..(386): tr|A0A321L5V1|A0A321L5V1_9BACT tRNA epoxyqueuosine(34) reductase QueG OS=Blastocatellia bacterium AA13 OX=2169 413 GN=queG PE=4 SV=1
MSDLLSRIKAVSREVGFEVIGVTSVEPMLRDLAALSGWCSSGYAADMSYMTRQPELNASPGRLVHWARSIITLGVNYYTAAPEFRHENRYGRVARYAWGLDYHDVVKAKLGELSDRIRSLMDDAGFQARGFVDAVPLLERAAAERAGLGFFGKNTNLLRPSQGSWFFLAELFVNIDLPATGEPRQVSCGTCSRCMPACPTNAFAGPYLLDSRLCISYLTIENKGPIPRELREAIGEWLFGCDVCQEVCPFNRFAEDTNWRHLRAEHGKGQRIDLIELLGISTDARFREWCKGTPLTRPKRRGLLRNAAVAAANIGCEAAVPVLSMLIVDDPEPLIRGHALWALARLELKRASKFADAALRNDNDSFVREEAEAILSGCFARQESKK

SEQ ID NO: 75102 - protein, 353 aa, Blastochloris sp.
  misc_feature (1)..(353): tr|A0A348G4R2|A0A348G4R2_9RHIZ Epoxyqueuosine reductase OS=Blastochloris sp. GI OX=2233851 GN=queG PE=4 SV=1
MRVTGPDAATESGARLAAWLAAGFHGTMDWMAATANRRPAPRLVWPDVASVIMLGVNYGPAEDPRAATARPARGAISVYAQGDDYHDVIKGAQKRLAQWLVASAGGDVKVFVDTAPVMEKPLAQAAGLGWQGKHTNVVARDFGSWLFLGAIFTTLKLPADSPERDHCGSCKACLDACPTQAFPRPYLLDARRCISYLTIENKGLIPHEFRVAIGNRIYGCDACLAACPWNKFAVEGRTLRLAAREALKAPPLAELVRLDDAAFRALFAKSPVKRIGRARFARNVLIAIGNSGELALAAEALRLLDDAEPLVRGAAVWALGRLDPEAAAAEAAVRAAVEPDAGVRAEWQYFART

SEQ ID NO: 75103 - protein, 326 aa, Blastochloris viridis
  misc_feature (1)..(326): tr|A0A0S4Q6C7|A0A0S4Q6C7_BLAVI Epoxyqueuosine reductase OS=Blastochloris viridis OX=1079 GN=queG PE=4 SV=1
MDWMMATANRRPAPRLLWPEVNSVIMLGLNYGPTAHRGAGRAQPDRGAISTYAQGDDYHDVIKGALKRLAQWLVARGGGDVKVFVDTAPVMEKPLAAAAGLGWQGKHTNLVSREFGSWLFLGAIFTTLALPVDQPEHGHCGSCRACLDACPTAAFPAPYQLDARRCVSYLTIENKGPIPPEFRALIGNRIYGCDDCLAACPWNKFAVAGRALRLAAREALIAPPLAELASLDDAAFRALFAKSPIKRIGRDRFVRNVLIAIGNSGDPALAATAEALLGDAAPAVRGMAAWALGRLDTAAAVAMAPERLARESDDDVRAEWCAVLEG

SEQ ID NO: 75104 - protein, 364 aa, Blastochloris viridis
  misc_feature (1)..(364): tr|A0A182D0M4|A0A182D0M4_BLAVI Epoxyqueuosine reductase OS=Blastochloris viridis OX=1079 GN=queG PE=3 SV=1
MARAGGEGFDSIGIADPDAIAGAGERLAAWLAAGRHGGMDWMMATANRRPAPRLLWPEVNSVIMLGLNYGPTAHRGAGRAQPDRGAISTYAQGDDYHDVIKGALKRLAQWLVARGGGDVKVFVDTAPVMEKPLAAAAGLGWQGKHTNLVSREFGSWLFLGAIFTTLALPVDQPEHGHCGSCRACLDACPTAAFPAPYQLDARRCVSYLTIENKGPIPPEFRALIGNRIYGCDDCLAACPWNKFAVAGRALRLAAREALIAPPLAELASLDDAAFRALFAKSPIKRIGRDRFVRNVLIAIGNSGDPALAATAEALLGDAAPAVRGMAAWALGRLDTAAAVAMAPERLARESDDDVRAEWCAVLEG

SEQ ID NO: 75105 - protein, 381 aa, Blastomonas fulva
  misc_feature (1)..(381): tr|A0A222WYN7|A0A222WYN7_9SPHN Epoxyqueuosine reductase OS=Blastomonas fulva OX=1550728 GN=queG PE=3 SV=1
MVSGKKNLETDIAAEAARLGFADCAIAPASLGPQTSARLQDWLAEGCHGDMLWMEARSDQRADPATLWSDVRSVIMLGMSYAPARDPFALAEHPGLGRISVYAQGGDYHKTVKTALKALARWLVEQSDDVQVKVFVDTAPVMEKPLAMAAGLGWQGKHTNLVSREHGSWLFLGAIYTTLELAPSGASADLCGSCTACQDVCPTNAFPAPYRLDARRCISYLTIEHAGPIPAELRAGIGNHVYGCDDCLAVCPWNKFADAAHRNQAFLPRAELAAPSLADLLALDDAQFRAVFSGSPIKRSGRVRMVRNAAVAAGNSGDPALAPAVAALLDDADPVVRGAAVWALAELDPARWEAERAARIAHEQDADVQAEWRLADAPAPV

SEQ ID NO: 75106 - protein, 381 aa, Blastomonas natatoria
  misc_feature (1)..(381): tr|A0A2V3V5K3|A0A2V3V5K3_9SPHN Epoxyqueuosine reductase OS=Blastomonas natatoria OX=34015 GN=queG PE=3 SV=1
MASGKRNLEAEIAAEAARLGFADCGFAPAVLGPQNALRFQQWLDQGFHGDMLWMEARADQRAEPRALWSDVRSVIMLGMSYAPGRDPFALAEHPDRARISVYAQGGDYHKTVKSALKALARWIVELADDVEVKVFVDTAPVMEKPLAMAAGLGWQGKHSNLVSRSHGSWLFLGAIYTTLDLAPSGAGQDRCGSCTACQDICPTDAFPAPYRLDARRCISYLTIEHAGPIPVELRAGIGNHVYGCDDCLAVCPWNKFADAAHRNRAFLPRAELVAPSLADLLGLDDAGFRALFSGSPIKRSGRGRMVRNALIAAGNSGDAALVAPVAALLEDSDPVVRGAAVWALGRLDPERASAERAARAVSESDPQVQAEWRLADAPQPV

SEQ ID NO: 75107 - protein, 381 aa, Blastomonas sp.
  misc_feature (1)..(381): tr|A0A2D6GYQ4|A0A2D6GYQ4_9SPHN Epoxyqueuosine reductase OS=Blastomonas sp. OX=1909299 GN=queG PE=3 SV=1
MASGKRNLEAEIAAEAAKLGFADCGFAPAALGPENAARFQAWLDAGCHGDMLWMEGRSHQRAEPKVLWSDVRSVIMLGMSYAPGRDPFALEAQADRGRISVYAQGGDYHKTVKSALKALARWIVAQAEDVQVKVFVDTAPVMEKPLAMAAGLGWQGKHTNLVSRSHGSWLFLGAIYTTLELAPSGAGRDRCGSCTACQDICPTDAFPAPYRLDARRCISYLTIEHEGPIPAELRAGIGNHVYGCDDCLAGCPWNKFADAAHRNQAFLPRAELVAPSLADLLSLDDAAFRALFSGSPIKRSGRGRMVRNALIAAGNSGDGALIAPVAVLLDDADPVVRGAAVWALSRLDPARAGAERAARAAHETDPQVIAEWQLADAPQPV

SEQ ID NO: 75108 - protein, 381 aa, Blastomonas sp.
  misc_feature (1)..(381): tr|A0A1B3N9W1|A0A1B3N9W1_9SPHN Epoxyqueuosine reductase OS=Blastomonas sp. RAC04 OX=1842535 GN=queG PE=3 SV=1
MVSGKKNLEADIAAEAARLGFADCAIAPASLGPQTAARLQDWLAKGCHGDMLWMEARSDQRADPATLWSDVRSVIMLGMSYAPGRDPFALAEHPGLGRISVYAQGGDYHKTVKTALKALARWLVEQSDDVQVKVFVDTAPVMEKPLAMAAGLGWQGKHTNLVSREHGSWLFLGAIYTTLELAPSGASADLCGSCTACQDVCPTNAFPAPYRLDARRCISYLTIEHAGPIPAELRAGIGNHVYGCDDCLAVCPWNKFADAAHRNQAFLPRAELAAPSLADLLALDDAQFRSVFAGSPIKRSGRVRMLRNALIASGNSNDSTLIAPVAALLDDPEPVVRGAAVWALAGLDSARWAAERAARMAQEQDADVAAEWRLADAPAPV

SEQ ID NO: 75109 - protein, 380 aa, Blastopirellula cremea
  misc_feature (1)..(380): tr|A0A368KXN3|A0A368KXN3_9PLAN tRNA epoxyqueuosine(34) reductase QueG OS=Blastopirellula cremea OX=1031537 GN= queG PE=4 SV=1
MPLPASELTALIRQEALTVGFSAVGVCPAVSPTGVTRLHDWLDAGYAGEMQYLEDRREAYSHPQYVLEGVHSIVMLALTYKSDPIPLLKPGEGRVSRYAFGELDYHDWIHARLKQLKRAIEGFAPGAKVRGVVDTAPLLEREFAQQAGLGWFGKNTMLLNKQLGSLFFLSAILIDQPLVYDEPHTASHCGTCTACLDACPTDAFVKPHVLDATRCISYLTIELRAEIPPELRSGLEDWVFGCDVCQDVCPWNNKAPLTQHEAFFPNPDRAPLELRSLFSMTDDDFRARFRNTPLWRSRRRGILRNAAIVLGNRPHADQVTALSQGLNDEEWLVRGAAAWALGQHDFPAVMSILRERSESETDPRVQVEIDRALARRSMSP

SEQ ID NO: 75110 - protein, 379 aa, Blastopirellula marina
  misc_feature (1)..(379): tr|A0A2S8F155|A0A2S8F155_9PLAN tRNA epoxyqueuosine(34) reductase QueG OS=Blastopirellula marina OX=124 GN=queG PE=4 SV=1
MPTSPTDLTSLIRDEAHQLGFSAIGICPAVTPTGLHRFHDWLDAGYAGQMQYLEDRRDAYAHPKHVLEGVQSIVMLALNYKSQPIPPLAPGQGRVSRYAFGELDYHDWIHARLKLLKKAIAQWEPEASVRGVVDTAPLLEREFAQLAGLGWIGKNTMLLNKQLGSLFFLAAILIDRELDYDEPHSASHCGTCTACLSACPTDAFPKPGVLDATRCISYLTIELRDEIPVELRNDMHDWVFGCDVCQDVCPWNNKSPASSHAAFFPASERAPLDLRTLYTMTDDDFRDHFRKTPLWRTKRRGILRNAAIVLGNQPHTDNLPALSRGLSDAEWLVRGASAWALGKHHFPEALQQLSQRQPVEENEHVQREINQALANQPSN

SEQ ID NO: 75111 - protein, 385 aa, Blastopirellula marina
  misc_feature (1)..(385): tr|A3ZV21|A3ZV21_9PLAN 4Fe-4S ferredoxin-type domain-co ntaining protein OS=Blastopirellula marina DSM 3645 OX= 314230 GN=DSM3645_24650 PE=4 SV=1
MKSFPQPSTLTHSLKNAARRLGFLHVGACPAVSPTGIDAFRDWLAAGYAGEMQYLADRVEAYADPGHVLAGARSIVMLTLPYRTDDARPTAAGQGRVSRYAWGEVDYHDLIHGKLKALKREFQQLSADADIRGVVDTAPLLERDFAQLAGLGWIGKNTLLLNKHAGSLFFLAALLTSIELDYDDPHDASHCGTCTACLDVCPTDAFPAPHVLDATRCISYLTIELRGPIPRDLRPGLGEWVFGCDLCQDVCPWNSKAPQSAEPTFIPQSGSNPLELIPLFDLDDDTFRARFRKSPIWRPRRRGLLRNAAIALGNRPTPTAVPALIKGLNDDEPLIRGASAWALGKYDCDASRQALKNRATLETDPEVIEEIQLGLQERNCRKIAP

SEQ ID NO: 75112 - protein, 380 aa, Blastopirellula sp.
  misc_feature (1)..(380): tr|A0A2G2JQS3|A0A2G2JQS3_9PLAN tRNA epoxyqueuosine(34) reductase QueG OS=Blastopirellula sp. OX=2024826 GN=que G PE=4 SV=1
MPESELTLSDQIKQEALALGFMHCGICPAVTAPNYQHFQEWLAAGYAGQMSYLEDRVAAYQDPGHVLDGAKSILMLSLNYRTIEPVTPQAGQGRLSRYAWGEVDYHDLIHKKLKQLKRKFIEIHPAVTVRGVVDTAPLLEREYAQMAGLGWVGKNTLLLNQQRGSLFFLAALLTDVELDYDTPQQTDHCGTCTACLDSCPTDAFVKPYVLDATKCISYLTIELREPIPVELRRGMGDWMFGCDVCQDVCPWNRKSPESELIEFQPIPAHDPIDLISLFDLDDEQFRTRFRKTPLWRSKRRGILRNAAIVLGNNPAPRAIAALTKGLNDIEPLIRGASAWALGSYSQKEAVPLLSDRLEREEDQQVISEIRQALSTFQDLS

SEQ ID NO: 75113 - protein, 373 aa, Blastopirellula sp.
  misc_feature (1)..(373): tr|A0A2E0AT52|A0A2E0AT52_9PLAN tRNA epoxyqueuosine(34) reductase QueG OS=Blastopirellula sp. OX=2024826 GN=que G PE=4 SV=1
MADFSTDLQATAKQLGFTLTGICPAVSPDGFSHLREWLDAGYAGSMHYLEQRYDAYAHPTHVLDGARSILMLAVDYQTEPPHQTAAGQGRVARYAWGTADYHDLIHDRLKQLKKWYLQQHPQAHVRGVVDTAPLMEREFAQLAGLGWVGKNTLLLNRQAGSWFFLAALLTDEELAYDAPHQTDHCGSCTACLDACPTAAFPQPYVMDASRCLSYLTIELRDPIPHELRSEIGDWVFGCDICQEVCPWNRHAPTSTEAALLPTTDANPMDLIALFELDDTTFRERFRKTPLWRPKRRGILRNAAMVLGNQRAPQAIPALSRGLADEEPLVRAAAAWALGEIGGAIAQQLLEDRQALEREEVVSAEIARALALHD

SEQ ID NO: 75114 - protein, 233 aa, Blautia coccoides
  misc_feature (1)..(233): tr|A0A4R2JGZ1|A0A4R2JGZ1_9FIRM Epoxyqueuosine reductase QueG OS=Blautia coccoides OX=1532 GN=EV205_12329 PE=4 SV=1
MITREKVKEIMFSLGADLCGIASIDRFGDAPKGYHPLDVLPTCESVISFGCRFPIGTLICKSAIPYTRVRNSITPKMDAIALDFCIEMEKNQIVCVPIPTNEDQWDKNTGRYRSIVSQKHAAQAAGLGTIGRHSLLITPEFGSMVWLGTVLCEQGFEPDEMKEPLCNNCNLCVEICPVNALEKWEIKQQSCWEFAFGDNEEEKVWEISCHKCRDICPYNLGYQNSFLKQNNEG

SEQ ID NO: 75115 - protein, 276 aa, Blautia producta
  misc_feature (1)..(276): tr|A0A4P6LXC3|A0A4P6LXC3_9FIRM Epoxyqueuosine reductase OS=Blautia producta OX=33035 GN=queG PE=4 SV=1
MPEERRMDMNSRAMTELIVKKAIAFGAASAGIANIRDLKTAPAFVMMPQRPHIDRVGAVENTTGLPEGVVDWKDEMHSMLVIAYEHPEEKPYLDCWLDGKNPPGNLELIKINKKLKTFIESEMPGVTAMPLNYYVEKGGVWLKDSAAVAGLGILGKNNLLITKEFGPRVRLRAMFLSADLPSTGPIDWDPCAGCDMPCRKSCPQNAFGTIAYDPEQYGGLAKLPGRDGSYSLLTCDRQMAEDEDNEIKTPTEVPDYGTAGSIIKYCRECELNCRIR

SEQ ID NO: 75116 - protein, 383 aa, Unknown
  misc_feature (1)..(383): tr|A0A1U9VF79|A0A1U9VF79_9RALS Epoxyqueuosine reductase OS=blood disease bacterium A2-HR MARDI OX=1944648 GN=q ueG PE=3 SV=1
MSENPTSLPEPGLDARLPADEAGMAALVAQIRSWGTGLGFDAIRIADVDLSHAEDGLRTWLAQGFHGDMDYMANHGMLRARPAELVAGTVRAIVARMPYVPHRGAAPPAGGDWRAIEWDRLRRPEDATISLYARGRDYHKVLRQRLQKLAEQIAGAVGPYGYRVFTDSAPVLEVALATNGGLGWRGKHTLLLDRDAGSMFFLGEILIDLPLPVDPPVTPRCGHCTRCIEVCPTQAIVAPYVVDARRCISYLTIEHKGAIPVELRAAMGNHVYGCDDCQLVCPWNKFAVHASLPDFDVRNGFDAVALVDLFGWTEDEFNQRLEGSPIRRIGHERWLRNIAVALGNALRAPQPEPARARLRAALQARADDPSPLVREHVAWALAQ

SEQ ID NO: 75117 - protein, 376 aa, Unknown
  misc_feature (1)..(376): tr|G2ZKW1|G2ZKW1_9RALS Epoxyqueuosine reductase OS=bloo d disease bacterium R229 OX=741978 GN=queG PE=3 SV=1
MPEPGLDARLPADEAGMAALVAQIRSWGTGLGFDAIRIADVDLSHAEDGLRTWLAQGFHGDMDYMANHGMLRARPAELVAGTVRAIVARMPYVPHRGAAPPAGGDWRAIEWDRLRRPEDATISLYARGRDYHKVLRQRLQKLAEQIAGAVGPYGYRVFTDSAPVLEVALATNGGLGWRGKHTLLLDRDAGSMFFLGEILIDLPLPVDPPVTPRCGHCTRCIEVCPTQAIVAPYVVDARRCISYLTIEHKGAIPVELRAAMGNHVYGCDDCQLVCPWNKFAVHASLPDFDVRNGFDAVALVDLFGWTEDEFNQRLEGSPIRRIGHERWLRNIAVALGNALRAPQPEPARARLRAALQARADDPSPLVREHVAWALAQ

SEQ ID NO: 75118 - protein, 371 aa, Bordetella sp.
  misc_feature (1)..(371): tr|A0A1E3ZAV4|A0A1E3ZAV4_9BORD Epoxyqueuosine reductase OS=Bordetella sp. SCN 67-23 OX=1660091 GN=queG PE=3 SV =1
MSASPPFAPVSTQDGPDLAALAETIRGWGRELGFSAVGFADLDLDEAGQRLAAWVAEGMHGEMDYMERHLPLRQDPAQLVSGARSAIMVRMDYAPLDGPALAARQRQALDAGDRAVVATYALGRDYHKVLRQRLQRLADRIAGHVGPFGYRVFTDSAPVMEVELARKAGLGWRGKHTLLLSRDGSWFFLGEILTDLPLPADRLETPHCGQCRRCIDACPTGAIVAPYVVDARRCISYLTIELKGSIPEALRQAIGTRVYGCDDCQTACPWNKYARACAEGDFAPRHGLDTASLLDLFAWTERDFDERTQGSAIRRIGYERWLRNLAVALGNAPASGEARAALRERADHPSELVREHVRWALACQSRGKREV

SEQ ID NO: 75119 - protein, 379 aa, Bosea lathyri
  misc_feature (1)..(379): tr|A0A1H6D284|A0A1H6D284_9BRAD Epoxyqueuosine reductase OS=Bosea lathyri OX=1036778 GN=SAMN04488115_11472 PE=4 SV=1
MSGERLKRAVVERALAEGFAVIRVAGSDAIPQAADQLEAWLAEGHHGDMDWLEERRDQRADPRKLWSEVRSVVMLGMNYAGEGDPLAMLAEREKAAISLYARRRDYHDVIKGKLKSVAGLLAARGGADVKVFVDTAPVMEKPLAQAAGLGWQGKHTVLVSREHGSWLLLGAIYTTATLPADVPESDHCGSCTRCLDICPTNAFPQPYQLDARRCIAYLTIEHRSHIDVELRPGIGNRVFGCDDCLAVCPWNKFAEAAQETRLALKGELEALPLADLARLDDAAFRALFAGTPVKRTGRDRFIRNVLIAIGNSGRPDLAASAAGLVSDASPLIRAMAAWALIRLDPCAARHVVHSALAAETDPAVRREWLTLPPETDRAA

SEQ ID NO: 75120 - protein, 359 aa, Bosea lupini
  misc_feature (1)..(359): tr|A0A1H7P316|A0A1H7P316_9BRAD Epoxyqueuosine reductase OS=Bosea lupini OX=1036779 GN=SAMN04515666_103331 PE=4 SV=1
MLRVASVDAIPEAPARLAGWLEAGHHGDMTWLTERTAERADPATLWPAARSIVMLGMSYAGEGDPLAVLAQRDRGAISLYARRRDYHDVIKGKLKSIAGVLAARGDAEVKVFVDTAPVMEKPLAQAAGLGWQGKQTVLVSRQHGAWLFLGAIYTSADLPPDEPERDRCGSCTRCLDICPTKAFPAPYQLDSRRCIAYLTIEHQGHIDAEFREGIGNRVFGCDDCLAVCPWNKFAEAAHETRLALKGELDALPLADLAGLDDAAFRALFAGTPVKRTGRDRFIRNVLIAIGNSGDPTLVANAEALLDDPSSLVRAMAAWALWQLVPSRAAELAPARLARETDPEVRAEWAQPFPNQLEPA

SEQ ID NO: 75121 - protein, 412 aa, Bosea sp.
  misc_feature (1)..(412): tr|A0A521LGQ3|A0A521LGQ3_9BRAD Epoxyqueuosine reductase OS=Bosea sp. OX=1871050 GN=queG PE=3 SV=1
MVRPDQIAAELSPAAGRPGAGHGAERPLRQSGLLSGAALKRAVAERALSEGFAVIRVAAADAIPQAPERLKTWLEAGYHGEMGWMDERTAERADPRRLWGEVRSIVMLGMNYAGEDDPLATLAEPGKAAISLYARRRDYHDVIKGKLKTVAGLLAARAGADVKVFVDTAPVMEKPLAQAAGLGWQGKHTVLVSREHGSWLLLGAIYTTADLPPDAPETDHCGSCRRCLDICPTNAFPAPYRLDARRCIAYLTIEHPGHIDADLRPGIGNRVFGCDDCLAVCPWNKFASASLETRLALKSELAELSLAELARLDDPAFRTLFAGTPVKRTGHARFLRNVLIAIGNSGLPHLADSAAPHLAHPSPLVRAMAVWALGRLAPQRAADIAATSLQGESDAQVRAEWSMVADSTEDAA

SEQ ID NO: 75122 - protein, 379 aa, Bosea sp.
  misc_feature (1)..(379): tr|A0A101K4K6|A0A101K4K6_9BRAD Epoxyqueuosine reductase OS=Bosea sp. WAO OX=406341 GN=queG PE=3 SV=1
MSGEKLKAAVFARAKSEGFSAVRVASVDSIPQAPARLAGWLDAGNHGDMAWMTERTAERAAPGVLWPEARSVVMLGMSYAGEGDPLAVLGQRDRGAISLYARRRDYHDVIKGKLKSVAGVLAARGEVDVKVFVDTAPVMEKPLAEAAGLGWQGKHTVLVSRTHGSWLFLGAIYTTAELPPDAPESDHCGSCTRCLDICPTAAFPAPYQLDARRCIAYLTIEHQGHIATEFREGIGNRIFGCDDCLAVCPWNKFAQAAQETRLALRDELDALPLAKLAALDDAAFRKLFAGTPVKRTGRDRFIRNVLIAIGNSGEPALAASAEALIDDPSPLVRAMATWALLRLAPERAAALAPARLACEPDADVRTEWARPDLRKLEPA

SEQ ID NO: 75123 - protein, 359 aa, Bosea thiooxidans
  misc_feature (1)..(359): tr|A0A1T5GZC7|A0A1T5GZC7_9BRAD Epoxyqueuosine reductase OS=Bosea thiooxidans OX=53254 GN=SAMN05660750_04610 PE =4 SV=1
MIRVAGADAIPEAPGRLLAWLDSGYQGEMGWMAERRDQRADPRRLWSEVRSVVMLGMNYAGEGDPLAVLAQPDKAAISLYARRRDYHDVIKGKLKSVAGLLAARAGADVKVFVDTAPVMEKPLAQAAGLGWQGKHTVLVSREHGSWLLLGAIYTTAELPADAPERDHCGSCRRCLDICPTDAFPAPYQLDARRCIAYLTIEHPGHIDAALRPGIGNRVFGCDDCLAVCPWNKFAQTAQETRLALKDELDGLDLAALARLDDAGFRKLFAGTPVKRTGRDRFLRNVLIAIGNSGRAALAESALPHLADPSPLVRAMAAWALGRLDPERAGELAAAKLDSESDPQVRAEWHALTPQTEDAA

SEQ ID NO: 75124 - protein, 358 aa, Bosea thiooxidans
  misc_feature (1)..(358): tr|A0A0Q3I0V9|A0A0Q3I0V9_9BRAD Epoxyqueuosine reductase OS=Bosea thiooxidans OX=53254 GN=ARD30_06500 PE=4 SV=1
MRVAGADAIPEAPGRLLAWLDSGYQGEMGWMAERRDQRADPRRLWSEVRSVVMLGMNYAGEGDPLAVLAQPDKAAISLYARRRDYHDVIKGKLKSVAGLLAARAGADVKVFVDTAPVMEKPLAQAAGLGWQGKHTVLVSREHGSWLLLGAIYTTAELPADAPERDHCGSCRRCLDICPTDAFPAPYQLDARRCIAYLTIEHPGHIDAALRPGIGNRVFGCDDCLAVCPWNKFAQTAQETRLALKDELDGLDLAALARLDDAGFRKLFAGTPVKRTGRDRFLRNVLIAIGNSGRAALAESALPHLADPSPLVRAMAAWALGRLDPERAGELAAAKLDSESDPQVRAEWHALTPQTEDAA

SEQ ID NO: 75125 - protein, 379 aa, Bosea vaviloviae
  misc_feature (1)..(379): tr|A0A0N1F2S8|A0A0N1F2S8_9BRAD Epoxyqueuosine reductase OS=Bosea vaviloviae OX=1526658 GN=queG PE=3 SV=1
MKADRLKQAVLARAVAEGFSVARVAAVDAIPDAPARLAAWLAQGHHGEMGWMEERSDQRADPQRLWSEAKSVVMLGMSYAPDSDPLAILSQNDKAAISLYARRRDYHDVIKGKLKSVAGLLAAQGGVDVKVFVDTAPVMEKPLAQAAGLGWQGKHTVLVSREHGSWLFLGAIYTTAELPADAPETDHCGSCRRCLDICPTDAFPAPYQLDSRRCIAYLTIEHAGHIDEGLRAGIGNRVFGCDDCLAVCPWNKFAEAAQETRLALRDGLDALPLADLAGLDDAAFRTLFSGTPVKRTGRDRFIRNVLIAIGNSGRPELAVSAAALICDPSPLVRAMAAWALIKLDPVQAGTFAAAALASESDIDVRREWLALTPEPESAS

SEQ ID NO: 75126 - protein, 350 aa, Bosea vaviloviae
  misc_feature (1)..(350): tr|A0A1D7UA99|A0A1D7UA99_9BRAD tRNA epoxyqueuosine(34) reductase QueG OS=Bosea vaviloviae OX=1526658 GN=BHK69_ 08695 PE=4 SV=1
MPQVPERLQAWLEAGHHGDMSWMAERVTERAAPRQLWSEARRVVMLGMSYAPDSDPLAILSQPDKAAISLYARRRDYHDVIKGKLKSVAGLLAAKGGADVKVFVDTAPVMEKPLAEAAGLGWQGKHTVLVSREHGSWLFLGAIYTTAELPVDAPESDHCGSCRRCLDICPTDAFPAPYQLDARRCIAYLTIEHQGHIDAALRPGIGNRVFGCDDCLAVCPWNKFAAAAQETRLALKNGLDALPLAELAALDDAAFRTLFAGTPVKRTGRDRFIRNVLIAIGNSNRPELAASAEALVADASPLVRAMAAWALIRLAPVRAGHLAADALAGEADADVRHEWLALPSQPECIA

SEQ ID NO: 75127 - protein, 349 aa, Boseongicola aestuarii
  misc_feature (1)..(349): tr|A0A238J386|A0A238J386_9RHOB Epoxyqueuosine reductase OS=Boseongicola aestuarii OX=1470561 GN=queG PE=3 SV=1
MPLDDLKERLVKEAIQAGFAMARVCAPDAVPEVPERLSAFLKAGRHGQMAWLEDRANWRGDPSALWPEARSIVMLAEPYTPDHDPLDDLKNQDRGVVSVYARNKDYHDVVKKRLKRVARWLVAAADCEVKVFVDTAPVPEKALGQAAGLGWQGKHTNLLSRDLGNWFFLGAIFTTANLDPDTPETDHCGSCRRCLDICPTDAFPAPYQLDARLCISYLTIEHKGPVDEALRPKLGNRIYGCDDCLAACPWNKFASDARDHRYAARHDLSAPPLAKLANLDDASFRAFFSGSPIKRIGRDRFVRNVLYALGNSEDQSLIESARKCAVDADPTVRDAAIWAVRRLQAVSKK

SEQ ID NO: 75128 - protein, 343 aa, Boseongicola sp.
  misc_feature (1)..(343): tr|A0A4P7JFG7|A0A4P7JFG7_9RHOB Epoxyqueuosine reductase OS=Boseongicola sp. CCM32 OX=2552942 GN=queG PE=3 SV=1
MSDLRKALEAEATAAGFAKLGVCRPDAIPQAAGRLADYVARGRHGQMGWLEDRMAWRGDPTALWPDARSVIMLAEMYTPDSDPLADLEHSDRATISVYARNRDYHDLVKKRLKRVGRWLLAERPDEAIKVFVDTAPVMEKPLAQAAGLGWQGKHTNLLGRDLGSWFFLGAIFTTITLPPDEPETEACGSCTACLDICPTKAFPAPFQLDARRCISYLTIEHKGPVPHALRAQMGNRIYGCDDCLAVCPWNKFARDATELRYAARTDLQAPALEDLARLDDAGFRALFSGSPIKRIGRDRFVRNVLYAIGNSGLKRLEPAAQSLLGDPDAAVADAAAWAVERLR

SEQ ID NO: 75129 - protein, 342 aa, Boseongicola sp.
  misc_feature (1)..(342): tr|A0A5D0R8F9|A0A5D0R8F9_9RHOB tRNA epoxyqueuosine(34) reductase QueG OS=Boseongicola sp. HY14 OX=2603819 GN=q ueG PE=4 SV=1
MKQALIDQALAEGFAKVGITRPDAVPEIAGRLDDFVRAGRHGQMGWMAERMHWRGNPAALWPEARSVIMLAEPYTPEHDPRDVPARRDRGAISVYAQNRDYHDIVKNRLKRVGRWLIEAAGPETEIKVFVDTAPVMEKPLAAAAGLGWQGKHTNLLSRDLGNWFFLGAIFTTLDLPEDAPGRENCGSCTACLDACPTDAFPAPFQLDARRCISYLTIEHHGPVDEDLRPFLGNHIYGCDDCLAACPWNKYAVAAHEARYHARDDLTAPRLAELAALDDTAFRAMFSGSPVKRVGRDRFLRNVCYAIGNSGDPSLIPALRPLLTDPDPTLAEAASWALARLSP

SEQ ID NO: 75130 - protein, 378 aa, Bowmanella sp.
  misc_feature (1)..(378): tr|A0A4Q9XPI1|A0A4Q9XPI1_9ALTE Epoxyqueuosine reductase OS=Bowmanella sp. JS7-9 OX=1605368 GN=queG PE=3 SV=1
MSSLSASQLAEFAQQIKCWGQELGFAQVGIADVDLKRHERFLQDWLDNGYHGQMHYMQSHGMLRARPADLLPGTLRAICVRLDYLPPDASFAAGLADASSGYISRYALGRDYHKVLRNKLKKLGDLIQQQVPDCILRPFVDSAPVLEHALAEKAGIGWTGKHSLTLNEEAGSWFFLGELLISLPLPTDDPLQEQCGSCSACLTMCPTGAIVAPYVVDARKCISYLTIESDEAIPPELRPLLGNRIYGCDDCQLVCPWNREAPITAEADFNARKWLKNQPLLTLWSWNEDDFLRLTEGSPIRRIGYQRWRRNLAVALGNAPADLRIVDALQAAVVLADELLAEHIHWALARQQAGQGIAPSRQQQRLVRTVQKGLPRDA

SEQ ID NO: 75131 - protein, 357 aa, Brachymonas denitrificans
  misc_feature (1)..(357): tr|A0A1H8DW50|A0A1H8DW50_9BURK Epoxyqueuosine reductase OS=Brachymonas denitrificans DSM 15123 OX=1121117 GN=q ueG PE=3 SV=1
MTPEALLSTIRSQAEALGFARIGVADVDLASAEAGLLAWLEAGFHGSMDYMANHGLRRARPAELVPGTVRVITARMDYLPAATPDDWRERELQRLTQPGEAVVSVYARGRDYHKVVRARLQKLSDQIAALVGPFGHRVFTDSAPVLEAELASRSGQGWRGKHTLVLSREAGSTFFLGEIYVDFPLPLTEPEPAHCGQCTACIDACPTGAIVAPYRLDARRCISYLTIEHAGSIPEDMRPLLGNRIYGCDDCQLVCPWNKFARRNALPDFEERHGLGHAQLLELWGWTEAQFLQRTEGSPIRRIGHARWLRNIAVALGNALRQASAAERETIRAALVQHADHPDAVVCETVQWALQQV

SEQ ID NO: 75132 - protein, 387 aa, Bradymonadaceae bacterium
  misc_feature (1)..(387): tr|A0A3D8N001|A0A3D8N001_9DELT tRNA epoxyqueuosine(34) reductase QueG OS=Bradymonadaceae bacterium TMQ3 OX=228 3320 GN=queG PE=4 SV=1
MVKGNPDEPGSKERGALRDAIKVEAVRLGFEACAIVPAERLPTARAYQEWLSEGRHGTMHYMENHQPLRVDPRVLEPGTRSVIVLLSNYRQPTDLFEGGMRVASYAHGDDYHDFLWERMRALAAFVHNETGVDVATRPAVDSAPLLERDLARMAGLGWVGKNALLIRQGLGSFTIISEVLVALDLGEPAEPAADRCGRCTRCIDACPTGAIIAPQVIDARRCISYLTIELRGPIPRRLRPLIGNHLFGCDICQTVCPWNRRAPLSEDQNFAPREAYRALSPLELLGFDHPRYVETFRRSPMKRAKLGGLKRNAAVVVGNTGSVDDVPALTRYLEHEDDAVVRGHIAWALGRLGGERAAEALRAALAREEDSLVLDELDVALRMVSGA

SEQ ID NO: 75133 - protein, 387 aa, Bradymonadales bacterium; identical to SEQ ID NO: 75132
  misc_feature (1)..(387): tr|A0A5C6UVB4|A0A5C6UVB4_9DELT tRNA epoxyqueuosine(34) reductase QueG OS=Bradymonadales bacterium TMQ1 OX=2600 174 GN=queG PE=4 SV=1

SEQ ID NO: 75134 - protein, 376 aa, Bradymonadales bacterium
  misc_feature (1)..(376): tr|A0A5B8Y2E1|A0A5B8Y2E1_9DELT tRNA epoxyqueuosine(34) reductase QueG OS=Bradymonadales bacterium YN101 OX=229 2766 GN=queG PE=4 SV=1
MTLSQKIITRARELGFDRAAIVPARRLEHAEQYLEWLKEGRHGDMNYLDRYHDLRVDPAKMEEGTKSCVVLLKNYYREADKLAGGLRIARYAHGDDYHDVLWDRMRELAAFIHAESGAEVATRPATDTAPLLERDLAALAGLGWVGKNAMLINPEIGSFCFIAEVLVDQDLEPTDELVPDRCGTCSRCIDACPTNAIVSPGVIDARRCISYLTIELRGPIPRRLRPLVGDLLFGCDICQAVCPWNSKAVPTEDPKFQTRDKYRDLTPQELVCFELEDYVEYFSKSAMKRAKLRGLKRNAAVVIGNTGGEEDVELLGRRLLDDEDEPLVRGHIAWALGQIGGEEARRILERARQGEDEAYVLEEVREALAKGSSPRS

SEQ ID NO: 75135 - protein, 398 aa, Bradymonas sediminis
  misc_feature (1)..(398): tr|A0A2Z4FGK7|A0A2Z4FGK7_9DELT tRNA epoxyqueuosine(34) reductase QueG OS=Bradymonas sediminis OX=1548548 GN=qu eG PE=4 SV=1
MSSSEVSGAEQSSGEQPDANKPEGEPTLSDKIMARAIELGFDRAAIVPAGRLKHAEQYLEWLKEGRHGAMNYLDRHHELRVDPTKMEEGTRSVVVLLKNYYREADLLAGGLRIARYAHGDDYHDTLWERMRELAAFIHAETGADCGTRPATDTAPILERDLAALAGLGWVGKNAMLINPEIGSFSFIAEVLVDLDLEATHPMVPDRCGTCSKCIDACPTNAIISPAVIDARRCISYLTIELRGPIPRALRPLIGDHIFGCDICQVVCPWNSKAEPSEDASFQTREIYRSLTLQRLLCFDLPDYVEHFSKSAIKRAKLRGLRRNAAVVIGNTFAQSGDESIVELLGERLLKDEPEPLVRGHIAWALGQVGGDAAAQILCEAAGAEQDPYVQEEIRAAQR

SEQ ID NO: 75136 - protein, 376 aa, Bradymonas sp.; identical to SEQ ID NO: 75134
  misc_feature (1)..(376): tr|A0A4Y6PRB1|A0A4Y6PRB1_9DELT tRNA epoxyqueuosine(34) reductase QueG OS=Bradymonas sp. YN101 OX=2589075 GN=qu eG PE=4 SV=1

SEQ ID NO: 75137 - protein, 378 aa, Bradyrhizobiaceae bacterium
  misc_feature (1)..(378): tr|A0A431P9X4|A0A431P9X4_9BRAD Epoxyqueuosine reductase OS=Bradyrhizobiaceae bacterium OX=2072420 GN=queG PE=3 SV=1
MTTAHAVDAVAIKAALTEEARTIGFGTIGITDPDAIAGARERLQTFLDAGSHGDMEWLANEPARRASPKVLWSDVRSVIMLGMNYGPDENPLALLDQKTRGAISVYARGDDYHDLIKKRLKTLARWLIVHAGGDVKVFVDTAAVMEKPLAQAAGLGWQGKHTNLVSREYGSWLFLGAIFTTLDLPRDATDIDHCGSCRACLDICPTNAFPAPYRLDARKCISYLTIEHKGAIPHEYREAIGNRIYGCDDCLSVCPWNKFAQEGHEAKLAARDELRGPALAELAKLDDASFRAMFTKSPVKRIGRDRFLRNVLTAIGNSSDKSLASEARRLLDDESPLVRGAAVWALSRLLPREEFSELAARSHDADEHVRSEWAAALA

SEQ ID NO: 75138 - protein, 355 aa, Bradyrhizobiaceae bacterium
  misc_feature (1)..(355): tr|F7QH38|F7QH38_9BRAD Iron-sulfur cluster-binding prot ein OS=Bradyrhizobiaceae bacterium SG-6C OX=709797 GN=C SIRO_0865 PE=4 SV=1
MQAFLDAGAHGDMDWLANEPSRRASPKVLWSEVRSVIMLGMNYGPDENPLALLEQTTRGNISVYARGDDYHDLIKKRLKSVARWLIAQAGGDVKVFVDTAAVMEKPLAHAAGLGWQGKHTNLVSREYGSWLFLGAIFTTLDLPRDDADVNHCGSCQACLDICPTDAFPAPYRLDARKCISYLTIEHKGAIPREHRAAIGNRIYGCDDCLSVCPWNKFAQEGHEAKLAARDELRAPSLAELSRLDDASFRALFTKSPVKRIGRDRFLRNVLTAIGNSGDISLAPEARRLLDDPNPLVRGAAVWALARLLSDREFSELAAASNDHDADVRNEWEMGLHSSGNVEGDSLSPPAGRGLG

SEQ ID NO: 75139 - protein, 391 aa, Bradyrhizobium arachidis
  misc_feature (1)..(391): tr|A0A1I7F3U1|A0A1I7F3U1_9BRAD Epoxyqueuosine reductase OS=Bradyrhizobium arachidis OX=858423 GN=queG PE=3 SV= 1
MAGRRAGVADLRGPGFLNSDPTELKTALAREARALGFDCIGITEPGTIEKAGAHFLEFIASGGHGDMDWLANQPERRVDPRGLWADVRSVIMLGVNYGPDSDPLAILNERTRAAISVYAQGDDYHDLIKKRLKALARWLVATAPSEVKVFVDTAAVMEKPLAQAAHLGWQGKHTNLVSREFGSWLFLGAIYTTLELPRDVAEIDHCGSCRACLDICPTSAFPAPYQLDARRCISYLTIENKGPIPHEFRKAMGNRIYGCDDCLAACPWNKFAQEGREAKLAARDELRAPGLAELSRLDDAAFRALFTKSPVKRIGRDRFLRNVLIAIGNSGEAALADEARRLLDDASPLVRGAAVWALGQLASREELEALKAAAISNERDESVREEWRAAL

SEQ ID NO: 75140 - protein, 391 aa, Bradyrhizobium betae
  misc_feature (1)..(391): tr|A0A4Q1VEJ6|A0A4Q1VEJ6_9BRAD Epoxyqueuosine reductase OS=Bradyrhizobium betae OX=244734 GN=queG PE=3 SV=1
MAGRRAGIADLRGPGFLNSDPTELKAALEREARALGFDCIGVTEPGTIDNAGKYFLDFIASGGHGDMDWLAAQPERRVDPRGLWQDVRSVIMLGVNYGPDQDPLAILQQRTRAAISVYAQGDDYHDLIKKRLKALARWLVATAPSEVKVFVDTAAVMEKPLAQTAGLGWQGKHTNLVSREFGSWLFLGAIYTTLELPRDDAEIDHCGSCRACLDICPTSAFPAPYKLDARRCISYLTIENKGPIPREFRKAIGNRIYGCDDCLAACPWNKFAQEGREAKLAARDELRAPSLAELARLDDTAFRALFTKSPVKRIGRDRFLRNVLIAIGNSGEAELVEEARRLLDDESALVRGAAVWALGQLMSREEFDAAKSAAMDSEHDESVREEWELAS

SEQ ID NO: 75141 - protein, 394 aa, Bradyrhizobium canariense
  misc_feature (1)..(394): tr|A0A1H1Z768|A0A1H1Z768_9BRAD Epoxyqueuosine reductase OS=Bradyrhizobium canariense OX=255045 GN=queG PE=3 SV =1
MAGGGAGVAHLRGSRFLNANVKLSPADLKAALASEARALGFDCVGVTDPDAIADAARHFHAFLDAGAHGDMDWLAAQPERRTDPRVLWPGVRSVIMLGVNYGPDENPLAILQQRARGAISVYAQGDDYHDVIKKRLKTLARWLVAASGAEVKVFVDTAAVMEKPLAHAAGLGWQGKHTNLVSREFGSWLFLGTIFTAAALPRDDAAVDHCGSCQACLDICPTAAFPAPYRLDARRCISYLTIESKGPIPHEFRKAIGNRIYGCDDCLAACPWNKFAQAGREAKLTARDELRAPSLAELVRLDDAAFRALFAKSPVKRIGRNRFIRNVLIAIGNAHDSALAVEAKRLLDDDNPLVRGAAVWALSQLMEPEAFAALASDAIGVETDESVQEEWRLA

SEQ ID NO: 75142 - protein, 396 aa, Bradyrhizobium canariense
  misc_feature (1)..(396): tr|A0A1X3FYZ7|A0A1X3FYZ7_9BRAD Epoxyqueuosine reductase OS=Bradyrhizobium canariense OX=255045 GN=queG PE=3 SV =1
MAGGRAGVADLRGPGLLNSDPTELKTALANEARALGFDCIGITEPGTIESAGKHFLEFIASGGHGDMDWLAAQPERRVDPRGLWQDVRSVIMLGVNYGPDQDPLAILQQRTRAAISVYAQGDDYHDLIKKRLKALARWLVATATCEVKPCEVKVFVDTAAVMEKPLAQAAHLGWQGKHTNLVSREFGSWLFLGAIYTTLELPRDDAEIDHCGSCRACLDICPTAAFPAPYRLDARRCISYLTIENKGPIPREFRKSIGNRIYGCDDCLAACPWNKFAQEGREAKLAARDALRAPGLAELARLDDAAFRALFTKSPVKRIGRDRFLRNVLIAIGNSGDAALADEARRLLEDESALVRGAAVWALGQLVPRDEFETMRATAIARERDDGVREEWELAS

SEQ ID NO: 75143 - protein, 393 aa, Bradyrhizobium centrolobii
  misc_feature (1)..(393): tr|A0A176YLT4|A0A176YLT4_9BRAD Epoxyqueuosine reductase OS=Bradyrhizobium centrolobii OX=1505087 GN=queG PE=3 SV=1
MAGRRAGVADLRGPRLLNPASDLSELKAALAREAQALGFDCIGVTAPGTIDNAGKYFLEFIASGGHGDMDWLAAQPERRVDPRGLWQDVRSVIMLGVNYGPDQDPLAILQDPTRAAISVYAKGDDYHDLIKKRLKALARWLVATVPSEVKVFVDTAAVMEKPLAQAAHLGWQGKHTNLVSREFGSWLFLGAIYTTLELPRDDAEIDHCGSCHACLDICPTAAFPAPYKLDARRCISYLTIENKGPIPREFRNAIGNRIYGCDDCLAACPWNKFAQEGREAKLAARDELRAPSLAELARLDDAAFRALFTKSPVKRIGRDRFLRNVLIAIGNSGDATLAVEARRLLDDASPLVRGAAVWALGQLLSRDEFDAMKLVAMGIEPDESVRQEWQAAS

SEQ ID NO: 75144 - protein, 385 aa, Bradyrhizobium daqingense
  misc_feature (1)..(385): tr|A0A562LJC7|A0A562LJC7_9BRAD Epoxyqueuosine reductase OS=Bradyrhizobium daqingense OX=993502 GN=queG PE=3 SV =1
MTRVDASVIKPSIDIDELRTALAREARALGFDCIGITAPGTIENAGKYFLEFIASGGHGDMDWLAAQPERRVDPRGLWQDVRSVIMLGVNYGPDQDPLAILEQRTHAAISVYAQGDDYHDLIKKRLKALARWLVATAPSEVKVFVDTAAVMEKPLAQTAGLGWQGKHTNLVSREFGSWLFLGAIYTTLDLPRDEAEIDHCGSCRACLDICPTAAFPVPYKLDARRCISYLTIENKGPIPREFRKAIGNRIYGCDDCLAACPWNKFAQEGREAKLAARDALRAPSLAELARLDDAAFRALFTKSPVKRIGRDRFVRNVLIAIGNSGDAALAGEARRLLEDASPLVRGAAVWALGQLVARDECAELRHAALDKESDESVREEWHAFS

SEQ ID NO: 75145 - protein, 392 aa, Bradyrhizobium diazoefficiens
  misc_feature (1)..(392): tr|A0A2A6N6S2|A0A2A6N6S2_9BRAD Epoxyqueuosine reductase OS=Bradyrhizobium diazoefficiens OX=1355477 GN=queG PE =3 SV=1
MARRRAGVADLCGPGFLSSADLSELKAKLTTEAKALGFDCIGVTEPGTIETAGKHFLEFIASGGHGDMDWLAAQPERRVDPRGLWQDVRSVIMLGVNYGPDADPLAILEQRTRAAISVYAQGDDYHDLVKKRLKALARWLVAAAPSEVKVFVDTAAVMEKPLAQAAHLGWQGKHTNLVSREFGSWLFLGAIYTTLDLPRDAAEIDHCGSCQACLDICPTAAFPAPYKLDARRCISYLTIENKGAIPREFRKAIGNRIYGCDDCLAACPWNKFAQAGREAKLAARDELRAPGLAELARLDDAAFRALFTKSPVKRIGRDRFLRNVLIAIGNSGEAALAEEARRLLGDESALVRGAAVWALAQLVARDAFEAMRSVAMGNEHDEGVREEWDLAT

SEQ ID NO: 75146 - protein, 392 aa, Bradyrhizobium diazoefficiens; identical to SEQ ID NO: 75145
  misc_feature (1)..(392): tr|Q89WH3|Q89WH3_BRADU Epoxyqueuosine reductase OS=Brad yrhizobium diazoefficiens (strain JCM 10833 / IAM 13628 / NBRC 14792 / USDA 110) OX=224911 GN=queG PE=3 SV=1

SEQ ID NO: 75147 - protein, 398 aa, Bradyrhizobium elkanii
  misc_feature (1)..(398): tr|A0A1E3EHJ3|A0A1E3EHJ3_BRAEL Epoxyqueuosine reductase OS=Bradyrhizobium elkanii OX=29448 GN=queG PE=3 SV=1
MAGGGASVAHLCGPRLLNPAVKLSPSDLKAALQREAHALGFDAIGFTAPDATSEAGKYFLEFLGSGGHGDMDWLAVNPERRTDPRLLWGGVRSIIMLGVNYGPDEDPLDILARRSRGAISVYAQGDDYHDVIKKRLKVLARCLAAITGDEVKVFVDTAAVMEKPLAQAAGIGWQGKHTNLVSREFGSWLFLGAIYSATELPRDDAEADHCGSCRACQDICPTAAFPAPYKLDARRCISYLTIENKGPIPHEFRESIGNRIYGCDDCLAVCPWNKFAQTGREQKLAARDALRAPALADLARLDDAVFRALFTKSPVKRIGRDRFIRNVLIAIGNSGDASLAAEARRLLDDASPLVRGAAVWALSQLITRDAFAALASRAGGEPDVTVQQEWRMGSVPSS

SEQ ID NO: 75148 - protein, 398 aa, Bradyrhizobium elkanii
  misc_feature (1)..(398): tr|A0A4Q4KFA3|A0A4Q4KFA3_BRAEL Epoxyqueuosine reductase OS=Bradyrhizobium elkanii OX=29448 GN=queG PE=3 SV=1
MAGGGASVAHLCGPRLLNPAVRLSASDLKAALQREAHALGFDAIGFTAPDATSEAGKYFLEFLGSGGHGDMDWLAVNPERRTDPRVLWGGVRSIIMLGVNYGPDEDPLDILARRSRGAISVYAQGDDYHDVIKKRLKVLARWLATITGDEVKVFVDTAAVMEKPLAQAAGIGWQGKHTNLVSREFGSWLFLGAIYSATELPRDDAEADHCGSCRACQDICPTAAFPAPYKLDARRCISYLTIENKGPIPHEFRKSIGNRIYGCDDCLAVCPWNKFAQAGREQKLAARDALRAPALADLAQLDDAAFRALFTKSPVKRIGRDRFIRNVLIAIGNSGDASLAAEARRLLDDASPLVRGAAVWALSQLIARDEFATLASRAGGEPDVTVQQEWRMGSVPSS

SEQ ID NO: 75149 - protein, 372 aa, Bradyrhizobium erythrophlei
  misc_feature (1)..(372): tr|A0A1M7TWF0|A0A1M7TWF0_9BRAD Epoxyqueuosine reductase OS=Bradyrhizobium erythrophlei OX=1437360 GN=queG PE=3 SV=1
MRDDLKQALIEQARTLGFDCVGVTDPGATAKAGQYFLEFLSTGGHGDMDWLAANPQRRSDPRNLWASVRSVIMLGVNYGPDEDPLSILQQRSRGAISVYAQGDDYHDVIKKRLKALARWLAATAVCEVKVFVDTAAVMEKPLAQAAGLGWQGKHTNLVSREFGSWLFLGAIFTDADLPRDEPDTDHCGSCRSCLDICPTAAFPAPYKLDARRCISYLTIENKGPIPHEFRKAIGNRIYGCDDCLAVCPWNKFARVGHEAKLSARAALRAPELSSLARLDDAAFRSLFSKSPVKRIGRDRFIRNVLIAIGNSNDASLASEAERLLADASPIVRGAAVWALSQLAGRDRFAALACNAAAETDEGVHAEWIAGRS

SEQ ID NO: 75150 - protein, 395 aa, Bradyrhizobium erythrophlei
  misc_feature (1)..(395): tr|A0A1N6GIN0|A0A1N6GIN0_9BRAD Epoxyqueuosine reductase OS=Bradyrhizobium erythrophlei OX=1437360 GN=queG PE=3 SV=1
MAGGRAGVADLRGPRFLNETVKPSAADLKTALARGARSLGFDCIGVTDPEAIAAAGKHFREFLESGGHGSMDWLAASPERRTDPRVLWSGVRSIIMLGVNYGPDENPLEVLEKRSCGAISAYAQGDDYHDLIKKRLKTLARWLVATTGDEVKVFVDTAAVMEKPLAQAAGLGWQGKHTNLVSREFGSWLFLGAIFTASDLPRDESDIDHCGTCTACQDICPTAAFPAPYKLDARRCISYLTIENKGPIPHEFRKAIGNRIYGCDDCLAVCPWNKFAQAGRETKLAAREQLRAPQLSELARLDDTAFRALFAKSPVKRIGRDRFVRNVLIAIGNSNQAALAQEAERLLGDESPLVRGAAVWALSQLLGREKFCALASRAIAAEADDDVREEWQAAS

SEQ ID NO: 75151 - protein, 391 aa, Bradyrhizobium genosp.
  misc_feature (1)..(391): tr|A0A4V2E7B7|A0A4V2E7B7_9BRAD Epoxyqueuosine reductase OS=Bradyrhizobium genosp. SA-3 OX=508868 GN=queG PE=3 SV=1
MAGRRAGVADLRGPGFLSSAPAELKTALAREARALGFDCIGITAPGTIESAGKYFLEFIASGGHGDMDWLAASPERRVDPRGLWQDVRSVIMLGVNYGPDQDPLAILKQRTRAAISVYAQGDDYHDLIKKRLKALARWLVATAPSDVKVFVDTAAVMEKPLAQAAHLGWQGKHTNLVSREFGSWLFLGAIYTTLELPRDDAEIDHCGSCRACLDICPTAAFPAPYKLDARRCISYLTIENKGPIPHEFRKSIGNRIYGCDDCLAACPWNKFAQEGREAKLAARDELRAPGLAELARLDDASFRALFTKSPIKRIGRDRFVRNVLIAIGNSGEVALAAEARRLLQDASPLVRGAAAWALGQLMSEEEFAAMKSAAMDGESDESVRKEWHAAS

SEQ ID NO: 75152 - protein, 391 aa, Bradyrhizobium guangdongense
  misc_feature (1)..(391): tr|A0A410UY73|A0A410UY73_9BRAD Epoxyqueuosine reductase OS=Bradyrhizobium guangdongense OX=1325090 GN=queG PE= 3 SV=1
MAGGRAGVAHLCGPGFLNTDPTELKAALAREARGLGFDCIGITEPGTIEKAGAHFLEFIASGGHGDMDWLASQPERRIDPRGLWEDVRSVIMLGVNYGPDQDPLAILQQRTRAAISVYAQGDDYHDLIKKRLKALARWLLATAPSDVKVFVDTAAVMEKPLAQAAHLGWQGKHTNLVSREFGSWLFLGAIYTTLELPRDRAEIDHCGSCRACLDICPTAAFPAAYKLDARRCISYLTIENKGQIPHEFRQAIGNRIYGCDDCLAACPWNKFAQEGREAKLAARDELRAPGLAELSRLDDAAFRALFTKSPVKRIGRDRFLRNVLIAIGNSGDAALAQEARRLLDDASPLVRGAAVWALAQLVGRDEFAAMKVIALSNEHDDSVREEWHTVS

SEQ ID NO: 75153 - protein, 396 aa, Bradyrhizobium guangzhouense
  misc_feature (1)..(396): tr|A0A4Q0RS61|A0A4Q0RS61_9BRAD Epoxyqueuosine reductase OS=Bradyrhizobium guangzhouense OX=1325095 GN=queG PE= 3 SV=1
MAGRRAGVADLRGPGFLTNDPTELKAQLTREARALGFDCIGITEPGTIEQAGAHFLEFIASGGHGDMDWLAAQPERRVDPRGLWPDVRSVIMLGVNYGPDQDPLAILKQRTRAAISVYAQGDDYHDLIKKRLKALARWLVAAATREVKTCDVKVFVDTAAVMEKPLAQAAHLGWQGKHTNLVSREFGSWLFLGAIYTTLDLPRDSAEIDHCGSCQACLDICPTSAFPAPYKLDARRCISYLTIENKGPIPQEFRKAIGNRIYGCDDCLAACPWNKFAQEGREAKLAARDELRAPGLAELSRLDDAAFRALFTKSPVKRIGRDRFLRNVGIAIGNSGDVALAEEARRLLGDASPLVRGAAVWALSQLLGRDEVVAMKNVAVGLESDESVREEWHSAT

SEQ ID NO: 75154 - protein, 391 aa, Bradyrhizobium huanghuaihaiense
  misc_feature (1)..(391): tr|A0A562S5F5|A0A562S5F5_9BRAD Epoxyqueuosine reductase OS=Bradyrhizobium huanghuaihaiense OX=990078 GN=queG P E=3 SV=1
MAGRRAGVADLRGPGFLSSDLTELKAALEREARALGFDCVGVTAPGTIETAGQRFLEFIASGGHGDMDWLAAQPERRVDPRGLWADVRSVIMLGVNYGPDSDPLAILTQRTRAAISVYAQGDDYHDLIKKRLKALARWLVATVPSDVKVFVDTAAVMEKPLAQTAHLGWQGKHTNLVSREFGSWLFLGAIYTTLALPRDDAEIDHCGSCRACLDICPTAAFPAPYKLDARRCISYLTIENKGPIPHEFRKAIGNRIYGCDDCLAACPWNKFAQEGREAKLAARDELRAPSLAELARLDDAAFRTLFTKSPVKRIGRDRFLRNVLIAIGNSGDVALAKEARRLLDDGSALVRGAAVWAFGQLVSREEFEAMKLTAANNEHDDSVREEWRAAS

SEQ ID NO: 75155 - protein, 405 aa, Bradyrhizobium icense
  misc_feature (1)..(405): tr|A0A1B1U7X2|A0A1B1U7X2_9BRAD Epoxyqueuosine reductase OS=Bradyrhizobium icense OX=1274631 GN=queG PE=3 SV=1
MAGGGTGVADLRGPRLLNQGVKLAAADLKSALVREAKALGFDCIGVTDPDAIGNAGKYFREFLDAGAHGDMDWLAAQPERRMDPRVLWPGVRSIIMLGFNYGPDDDPLALLEKRTRGAISAYAQGDDYHDVIKKRLKTLARWLVAASGEEVKVFIDTAAVMEKPLAQAAGLGWQGKHTNLVSREFGSWLFLGAIFTASDLPRDTVDTDHCGSCNACQEICPTAAFPAPYKLDARRCISYLTIENKGPIPHEFRKSIGNRIYGCDDCLAVCPWNKFAQQGRETKLAARAELRAPSLAELARLDDAAFRALFSKSPVKRIGRDRFVRNVLIAIGNAEQPSLASEAERLLDDASPLVRGAAVWAMSQLVNRERFEALAAKAIGSETDETVLEEWDLISSVMPRHRASP

SEQ ID NO: 75156 - protein, 397 aa, Bradyrhizobium icense
  misc_feature (1)..(397): tr|A0A533J7C1|A0A533J7C1_9BRAD Epoxyqueuosine reductase OS=Bradyrhizobium icense OX=1274631 GN=queG PE=3 SV=1
MAGGRAGLAHLCGPRLLSTIEKLEAAEMKTALAREARALGFDCLGVTDPDAIGEAGHRFREFLESGAHGDMDWLAERPERRMHPRALWPGVRSIIMLGFNYGPDEDPLLALQKRTRGTISAYAQGDDYHDVIKKRLKTLARWLAATTGEEVKVFIDTAAVMEKPLAQAAGLGWQGKHTNLVSREFGSWLFLGAIFSASDLPRDEPDIDHCGSCNACQEICPTAAFPAPYKLDARRCISYLTIENKGPIPSEFRKAMGNRIYGCDDCLAVCPWNKFAQVGREAKLSARAELREPPLAELVRLDDSAFRALFAKSPVKRIGRDRFVRNVLIAIGNSGETALAVEAERLLDDASPLVRGAAVWALSQLLSPDAFVVQASRAAAEPDEIVRDEWRDCAVRP

SEQ ID NO: 75157 - protein, 391 aa, Bradyrhizobium japonicum
  misc_feature (1)..(391): tr|A0A4Y3YPS1|A0A4Y3YPS1_BRAJP Epoxyqueuosine reductase OS=Bradyrhizobium japonicum OX=375 GN=queG PE=3 SV=1
MAGGRAGIADLRGPRLLNSDPTELKAALANEARALGFDCIGITASGTIENAGKHFLEFIASGGHGDMDWLAAHPERRVDPRGLWQDVRSVIMLGVNYGPDQDPLAILQQRTRAAISVYAQGDDYHDLIKKRLKALARWLVATAPSDVKVFVDTAAVMEKPLAQAAHLGWQGKHTNLVSREFGSWLFLGAIYTTLELPRDDAEIDHCGSCQACLDICPTSAFPAPYKLDARRCISYLTIENKGPIPREFRKAIGNRIYGCDDCLAACPWNKFAQEGREAKLAARDELRAPSLAELAGLDDAAFRALFTKSPVKRIGRDRFLRNVLIAIGNSGEAILAEEARRLLGDESALVRGAAVWALEQLVSRGEFEAMRSAAASNEHDDSVREEWQAAS

SEQ ID NO: 75158 - protein, 325 aa, Bradyrhizobium japonicum
  misc_feature (1)..(325): tr|A0A023XU72|A0A023XU72_BRAJP Iron-sulfur cluster bind ing protein OS=Bradyrhizobium japonicum SEMIA 5079 OX=4 76282 GN=BJS_05146 PE=4 SV=1
MDWLAAHPERRVDPRGLWQDVRSVIMLGVNYGPDQDPLAILQQRTRAAISVYAQGDDYHDLIKKRLKALARWLVATAPSDVKVFVDTAAVMEKPLAQAAHLGWQGKHTNLVSREFGSWLFLGAIYTTLELPRDDAEIDHCGSCQACLDICPTSAFPAPYKLDARRCISYLTIENKGPIPREFRKAIGNRIYGCDDCLAACPWNKFAQEGREAKLAARDELRAPSLAELAGLDDAAFRALFTKSPVKRIGRDRFLRNVLIAIGNSGEAILAEEARRLLGDESALVRGAAVWALEQLVSRGEFEAMRSAAASNEHDDSVREEWQAAS

SEQ ID NO: 75159 - protein, 406 aa, Bradyrhizobium jicamae
  misc_feature (1)..(406): tr|A0A0R3M0Z5|A0A0R3M0Z5_9BRAD Epoxyqueuosine reductase OS=Bradyrhizobium jicamae OX=280332 GN=queG PE=3 SV=1
MAGRRAGVADLRGPRLLNSKLSPADLKSALAREAQSLGFDCIGVTDPEGIGKAGKYFREFLAAGGHGDMDWLAAQPERRMNPRVLWPGVRSIVMLGVNYGPTEDPLALLARRTSGAISAYAQGDDYHDVIKKRLKALARWLVAASGEEVKVFIDTAAVMEKPLAQAAGVGWQGKHTNLVSREFGSWLFLGAIYTATDLPRDAADTDHCGSCNACQEICPTAAFPAPYKLDARRCISYLTIENKGPIPREFRKAIGNRIYGCDDCLAVCPWNKFAQEGREAKLAARVELQAPRLSDLAQLDDAAFRALFSKSPVKRIGRDRFIRNVLIAIGNADDASLAVEAERLLDDASPLVRGAAVWALSQLVAREKFDAMAAKAADAETNEDVRAEWRLATAACPSAGPLDFTQ

SEQ ID NO: 75160 - protein, 398 aa, Bradyrhizobium lablabi
  misc_feature (1)..(398): tr|A0A2H9V4T5|A0A2H9V4T5_9BRAD Epoxyqueuosine reductase OS=Bradyrhizobium lablabi OX=722472 GN=queG PE=3 SV=1
MAGGRAGLAQLRGPRLLNASTKISPADLKLALAREAERLGFDCIGVTDPDSIGEAGKHFQKFLEAGAHGDMDWLAVNPERRMDPRVLWPGVRSVIMLGVNYGPDENPLALLAQRTRGTISAYAQGDDYHDVIKKRLKTLARWLVAATGEDVKVFVDTAAVMEKPLAQAAGLGWQGKHTNLVSREFGSWLFLGAIFSASDLPRDEADTDHCGTCTACQDICPTAAFPAPYKLDARRCISYLTIENKGSIPQEFRKAIGNRIYGCDDCLAVCPWNKFAQEGREAKLAAREELRSPSLAELARLDDAAFRALFAKSPVKRIGRDRFVRNVLIAIGNSADAKLADEAERLLNDQSPLVRGAAVWALSQLMGREAFAAMAAKASSREEDETVRGEWMQCAAHA

SEQ ID NO: 75161 - protein, 395 aa, Bradyrhizobium lablabi
  misc_feature (1)..(395): tr|A0A0R3MBP8|A0A0R3MBP8_9BRAD Epoxyqueuosine reductase OS=Bradyrhizobium lablabi OX=722472 GN=queG PE=3 SV=1
MAGGRAGVANLRGPRLLNSKLSPADLKDALAREAQSLGFDCIGVTDPDAISQAGKYFREFLAAGGHGDMDWLAARPERRMDPRVLWPGVRSIIMLGVNYGPTEDPLALLAQRTSGAISAYAQGDDYHDVIKKRLKALARWLVAASGDEVKVFIDTAAVMEKPLAQAAGIGWQGKHTNLVSREFGSWLFLGAIFTASGLPRDSADTDHCGSCNACQEICPTAAFPAPYKLDARRCISYLTIENKGPIPHEFRKAIGNRIYGCDDCLAVCPWNKFAQEGREAKLAARAELRAPQLSDLARLDDTAFRALFSKSPVKRIGRDRFIRNVLIAIGNAEDPSLAAEAELLLDDASPLVRGAAVWALSQLVNRERFNALAAKALGAETNEDVRAEWRLATAA

SEQ ID NO: 75162 - protein, 391 aa, Bradyrhizobium liaoningense
  misc_feature (1)..(391): tr|A0A151FPE9|A0A151FPE9_9BRAD Epoxyqueuosine reductase OS=Bradyrhizobium liaoningense OX=43992 GN=queG PE=3 S V=1
MAGRRAGVADLRGPGFLSSDPTELKTALAREARALGFDCIGITAPGTIESAGKHFLEFIASGGHGDMDWLAAQPERRVDPRGLWQDVRSVIMLGVNYGPDSDPLAILEQRTRAAISVYAQGDDYHDLIKKRLKTLARWLVATAPSDVKVFVDTAAVMEKPLAQAAHLGWQGKHTNLVSREFGSWLFLGAIYTTLELPRDAAEIDHCGSCRACLDICPTAAFPAPYKLDARRCISYLTIENKGPIPREFRKAIGNRIYGCDDCLAACPWNKFAQEGREAKLAARDELRAPSLAELARLDDAAFRALFTKSPVKRIGRDRFLRNVLIAIGNSGEAALADEARRLLDDESPLVRGAAVWALEQLVAREEFQAMRLHALDREPDESIREEWKAAL

SEQ ID NO: 75163 - protein, 403 aa, Bradyrhizobium lupini
  misc_feature (1)..(403): tr|K5CWD9|K5CWD9_RHILU Epoxyqueuosine reductase OS=Brad yrhizobium lupini HPC(L) OX=1229491 GN=queG PE=3 SV=1
MLRPGTAPIYDAQQPAGETTIDVADEKQRIRARKLTDFIRQEALSLGFDLCRFTAPDSIPLAPERLREFLGKGYHGTMAWMEETEARRAEPKTLWSDVRSIVMFGLNYGPDEDPRNLLSRPDKAAISVYARNRDYHDVIKGRLKEIATRFAARAGEDVKVFVDTAPVMEKPLAAAAGLGWQGKHTNLVSRSHGSWLFLGSMFTTADLCLDEAEKDHCGSCRACLDACPTAAFPAPYQLDARRCISYLTIEHKGPIPHEFRPMMGNRIYGCDDCLAACPWNKFAASASEMKLQAREDLKEPSIDFLLTLDDAAFRSFFSGSPVKRIGRSRFIRNVLIAAGNSGNRQFVERCKALAEMDPSPEVRGMAAWALSRLMDRQEFRTYSATRAPETDPEAEMEWQLAEA

SEQ ID NO: 75164 - protein, 396 aa, Bradyrhizobium macuxiense
  misc_feature (1)..(396): tr|A0A560LZT5|A0A560LZT5_9BRAD Epoxyqueuosine reductase OS=Bradyrhizobium macuxiense OX=1755647 GN=queG PE=3 S V=1
MAGGGAGVAHLCGPRLLNPAVRLSPSDLKAALQREARALGFDAIGFTDPDATSEAGKYFLEFLGSGGHGDMDWLAANPERRADPRVLWGGVRSIIMLGVNYGPEDDPLDILGRRSHGAISVYAQGDDYHDVIKKRLKTLARWLATITGDEVKVFVDTAAVMEKPLAQAAGIGWQGKHTNLVSREFGSWLFLGAIYSATELPRDESDTDHCGSCRACQDICPTAAFPAPYKLDARRCISYLTIENKGPIPHEFRKAIGNRIYGCDDCLAVCPWNKFAQEGREQKLAARDALRAPALADLARLDDPAFRALFTKSPVKRIGRDRFIRNVLIAIGNSGDAKLAGEARRLLDDASPLVRGAAVWALSQLMARDEFAALASRAGGEPDLTVQREWHVAAAS

SEQ ID NO: 75165 - protein, 409 aa, Bradyrhizobium macuxiense
  misc_feature (1)..(409): tr|A0A109JB98|A0A109JB98_9BRAD Epoxyqueuosine reductase OS=Bradyrhizobium macuxiense OX=1755647 GN=queG PE=3 S V=1
MAGGGAGVAHLCGPRLLNQAVRLSPDDLKAALTREAHALGFDSIGITGPDAIAQAGRHFLEFLDSGGHGDMDWLASSPERRTDPRGLWNGVRSIIMLGVNYGPDDNPLDVLARRSHGAISVYAQGDDYHDVIKKRLKTLARWLAAMTGDEVKVFVDTAAVMEKPLAQAAGIGWQGKHTNLVSREFGSWLFLGAIYSATDLPRDISDTDHCGSCRACQDICPTAAFPAPYKLDARRCISYLTIENKGPIPHEFRKSIGNRIYGCDDCLAVCPWNKFAQEGREQKLAAREALRAPRLADLAQLDDPAFRALFSKSPVKRIGRDRFIRNVLIAIGNSGDADLAEVATRLLDDASPLVRGAAVWALSQLIGQDEFAALALRADAETESTVQQEWAAALTTSPHPEERTARLEG

SEQ ID NO: 75166 - protein, 391 aa, Bradyrhizobium manausense
  misc_feature (1)..(391): tr|A0A0R3DG04|A0A0R3DG04_9BRAD Epoxyqueuosine reductase OS=Bradyrhizobium manausense OX=989370 GN=queG PE=3 SV =1
MAGGRAGVANLRGPGFLSLDPTELKAQLAREARALGFDCIGITEPGTIEKAGAHFLEFIATGGHGDMDWLASQPERRVDPRGLWSDVRSVIMLGVNYGPDQDPLAILKQRTRAAISVYAQGDDYHDLIKKRLKALARWLVATAPSEVKVFVDTAAVMEKPLAQAAHLGWQGKHTNLVSREFGSWLFLGAIYTTLELPRDSAEIDHCGSCRACLDICPTAAFPAPYKLDARRCISYLTIENKGPIPQEFRKAIGNRIYGCDDCLAACPWNKFAQQGREAKLGARHELRAPELAELARLDDAAFRALFTKSPVKRIGRDRFLRNVLIAIGNSGDVTLADEARRLLDDANPLVRGAAVWALRQLLERDEFEAMQADALNKEPDQSVREEWQAAS

SEQ ID NO: 75167 - protein, 391 aa, Bradyrhizobium nanningense
  misc_feature (1)..(391): tr|A0A4Q0RX26|A0A4Q0RX26_9BRAD Epoxyqueuosine reductase OS=Bradyrhizobium nanningense OX=1325118 GN=queG PE=3 SV=1
MAGRRAGVADLRGPGFLSSDPTELKTALAREARALGFDCIGITAPGTIENAGRYFLEFIASGGHGDMDWLAAQPERRVDPRGLWSDVRSVIMLGVNYGPDQDPLAVLKQRTRAAISVYAQGDDYHDLIKKRLKALARWLVATAPSDVKVFVDTAAVMEKPLAQTAGLGWQGKHTNLVSREFGSWLFLGAIYTTLELPRDETEIDHCGTCQACLDICPTAAFPAPYKLDARRCISYLTIENKGPIPREFRKAIGNRIYGCDDCLAACPWNKFAQEGREAKLAARDELRAPNLAELARLDDAAFRALFTKSPVKRIGRDRFVRNVLIAIGNSGEVALAAEARRLLQDASPLVRGAAVWALAQLMSKEELAAMKSAALSGESDDSVREEWRAAS

SEQ ID NO: 75168 - protein, 393 aa, Bradyrhizobium neotropicale
  misc_feature (1)..(393): tr|A0A176YNY2|A0A176YNY2_9BRAD Epoxyqueuosine reductase OS=Bradyrhizobium neotropicale OX=1497615 GN=queG PE=3 SV=1
MAGRRAGVADLCGSGFLNSASELSELKTALAREARALGFDCIGITAPGAIESAGKYFLEFIASGGHGDMDWLAAQPERRVDPRGLWQDVRSVIMLGVNYGPDQDPLTILEERTRAAISVYAQGDDYHDIIKKRLKALARWLVATAPSEVKVFVDTAAVMEKPLAQAAHLGWQGKHTNLVSREFGSWLFLGAIYTTLELPQDEAEIDHCGSCHACLDICPTAAFPAPYKLDARRCISYLTIENKGPIPREFRKAIGNRIYGCDDCLAACPWNKFAQEGREAKLAARDELRAPRLAELARLDDAAFRALFTKSPVKRIGRDRFLRNVLIAIGNSGDAALAEDARRLLDDASPLVRGAAVWALRQLLSREEIATIETDAIANENDASVREEWQAAS

SEQ ID NO: 75169 - protein, 345 aa, Bradyrhizobium oligotrophicum
  misc_feature (1)..(345): tr|M4Z0X3|M4Z0X3_9BRAD 4Fe-4S ferredoxin-type domain-co ntaining protein OS=Bradyrhizobium oligotrophicum S58 O X=1245469 GN=S58_01470 PE=4 SV=1
MSAERAAAFERFLAEGHHGDMDWLAREPSRRTDPATLWSDVRSVIMLGVNYGPDEDPRAVLAARSRGAISVYARGGDYHDIIKKNLKALARWLVATAGCDVKVFVDTAAVMEKPLAEAAGLGWQGKHTNLVSRGFGSWLFLGAIYTTLDLPADTSEQDHCGSCRACLDSCPTAAFPAPYQLDARRCISYLTIETKGPIPREFRKAIGNRIYGCDDCLAACPWNKFAQAGREAKLAAREALRAPSLAELAALDDAGFRALFTKSPVKRVGRDRFLRNVLIAIGNSGDATLVGAAERLTSDPNPLVRGAAAWALAQLLDAEGFARRAHAALGFEADDSVRAEWQAPR

SEQ ID NO: 75170 - protein, 391 aa, Bradyrhizobium ottawaense
  misc_feature (1)..(391): tr|A0A2U8P4K8|A0A2U8P4K8_9BRAD Epoxyqueuosine reductase OS=Bradyrhizobium ottawaense OX=931866 GN=queG PE=3 SV =1
MAGRRAGVADLRGPGFLNSDPTELKAALTREARALGFDCIGVTAPGTIESAGKYFLEFIASGGHGDMDWLAAQPERRVDPRGLWSDVRSVIMLGVNYGPDQDPLAILEQRTRAAISVYAQGDDYHDLIKKRLKALARWLVATAPSDVKVFVDTAAVMEKPLAQAAHLGWQGKHTNLVSREFGSWLFLGAIYTTLELPRDAAEIDHCGSCQACLDICPTAAFPAPYKLDARRCISYLTIENKGPIPHEFRKAIGNRIYGCDDCLAACPWNKFAQEGREAKLAARSELRAPGLAELARLDDAAFRALFTKSPVKRIGRDRFLRNVLIAIGNSGDVTLSEEARRLLEDASPLVRGAAVWALGQLVGREEFEAMKTAALDDERDDSVREEWQTVA

SEQ ID NO: 75171 - protein, 396 aa, Bradyrhizobium pachyrhizi
  misc_feature (1)..(396): tr|A0A0R3BUS7|A0A0R3BUS7_9BRAD Epoxyqueuosine reductase OS=Bradyrhizobium pachyrhizi OX=280333 GN=queG PE=3 SV =1
MAGGGAGVAHLCGPRLLNPAVRLSPSDLKAALQREAHALGFDAIGFTAPDATSEAGKYFLEFLGSGGHGDMDWLAANPERRADPRVLWGGVRSIIMLGVNYGPDDNPLDILARRSHGAISVYAQGDDYHDVIKKRLKVLARWLATITGDEVKVFVDTAAVMEKPLAQAAGIGWQGKHTNLVSREFGSWLFLGAIYSATELPRDDAEADHCGSCRACQDICPTAAFPAPYKLDARRCISYLTIENKGPIPHEFRKSIGNRIYGCDDCLAVCPWNKFAQAGREQKLAARDALRAPALADLARLDDAAFRALFTKSPVKRIGRDRFIRNVLIAIGNSGDASLAAEARRLLDDASPLVRGAAVWALSQLTAREAFAALASRAGGEPDVTVQQEWRAATAS

SEQ ID NO: 75172 - protein, 395 aa, Bradyrhizobium retamae
  misc_feature (1)..(395): tr|A0A0R3MVG0|A0A0R3MVG0_9BRAD Epoxyqueuosine reductase OS=Bradyrhizobium retamae OX=1300035 GN=queG PE=3 SV=1
MAGGRTGVTHLRGPRLLNKAVKLSASDLKSALVREAATLGFDCIGVTDPGALGNAGKYFREFLDAGAHGDMDWLATQPERRMDPRVLWPGVRSIIMLGVNYGPDENPLALLERRTRGAISAYAQGDDYHDVIKKRLKTLARWLVAASGEEVKVFIDTAAVMEKPLAQAAGLGWQGKHTNLVSREFGSWLFLGAIFTAAELPRDTADTDHCGTCNACQEICPTAAFPAPYKLDARRCISYLTIENKGPIPREFRKSISNRIYGCDDCLAVCPWNKFAQKGRETKLAARAELRAPSLGELARLDDAAFRALFSKSPVKRIGRDRFVRNVLIALGNAGDAALAIEAERLLGDASPLVRGAAVWALSQLMERERFDALAVRASKSEADESVRQEWLQAS

SEQ ID NO: 75173 - protein, 393 aa, Bradyrhizobium rifense
  misc_feature (1)..(393): tr|A0A5D3KBT9|A0A5D3KBT9_9BRAD Epoxyqueuosine reductase OS=Bradyrhizobium rifense OX=515499 GN=queG PE=3 SV=1
MAGGRAGVADLRGPGFLNSDPTELKAALAREARALGFDCIGITEPGTIESAGQHFLEFIASGGHGDMDWLANQPERRVDPRGLWADVRSVIMLGVNYGPDSDPLAILRERTRAAISVYAQGDDYHDLIKKRLKALARWLVATAPSEVKVFVDTAAVMEKPLAQAAHLGWQGKHTNLVSREFGSWLFLGAIYTTLDLPRDGAEIDHCGSCQACLDICPTAAFPAPYKLDARRCISYLTIENKGPIPQDFRKAIGNRIYGCDDCLAACPWNKFAQEGREAKLAARDELRAPGLAELSRLDDAAFRALFTKSPVKRIGRDRFLRNVLIAIGNSGDVTLAEEARRLLDDTSPLVRGAAVWALGQLVEREEFEAAKSAALGGERDESVCKEWRAVSQT

SEQ ID NO: 75174 - protein, 391 aa, Bradyrhizobium sacchari
  misc_feature (1)..(391): tr|A0A560KLL5|A0A560KLL5_9BRAD Epoxyqueuosine reductase OS=Bradyrhizobium sacchari OX=1399419 GN=queG PE=3 SV= 1
MAGRRAGVADLCGPGFLNADPTELKAALEREARALGFDCIGVTAPGTIEAAGKHFLEFIAAGGHGDMDWLAAQPERRVDPRGLWADVRSVIMLGINYGPDSDPLAILKQRTRAAISVYAQGDDYHDLIKKRLKALARWLVATAPSDVKVFVDTAAVMEKPLAQAAHLGWQGKHTNLVSRDFGSWLFLGAIYTTLELPRDDPEIDHCGSCRACLDICPTAAFPAPYRLDARRCISYLTIENKGPIPQEFRKSIGNRIYGCDDCLAACPWNKFAQEGREAKLAARDELRAPSLAELARLDDAAFRTLFTKSPVKRIGRDRFLRNVLIAIGNSGEATLAEEARRLLDDGSPLVRGAAVWALAQLVARDEFEALMTSAIANEHDESVREEWQAAS

SEQ ID NO: 75175 - protein, 391 aa, Bradyrhizobium shewense
  misc_feature (1)..(391): tr|A0A1C3XAL4|A0A1C3XAL4_9BRAD Epoxyqueuosine reductase OS=Bradyrhizobium shewense OX=1761772 GN=queG PE=3 SV= 1
MAGRRAGIADLRGPGFLNSDPTELKAALTREARALGFDCIGVTAPGTIESAGKYFLEFIASGGHGDMDWLAAQPERRVDPRGLWGDVRSVIMLGVNYGPDQDPLAILEQRTRAAISVYAQGDDYHDLIKKRLKALARWLVATAPSDVKVFVDTAAVMEKPLAQTAGLGWQGKHTNLVSREFGSWLFLGAIYTTLELPRDDAEIDHCGSCQACLDICSTAAFPAPYKLDARRCISYLTIENKGPIPHEFRKAIGNRIYGCDDCLAACPWNKFAQEGREAKLAARSELRAPGLAELARLDDAAFRALFTKSPVKRIGRDRFLRNVLIAIGNSGEAALAEEARRLLEDASPLVRGAAVWALGQLVGRGEFEAMKAAALDHERDDSVREEWQTVA

SEQ ID NO: 75176 - protein, 409 aa, Bradyrhizobium sp.
  misc_feature (1)..(409): tr|A0A525I705|A0A525I705_BRASZ Epoxyqueuosine reductase OS=Bradyrhizobium sp. OX=376 GN=queG PE=3 SV=1
MVRPDQVPTVVPHFAERASAGRERQSELRRSRLLSGLRAKARELGFGLCRITAAAPPPGAADGLAEWLATGAQGDMAWMAETFARRADPKTLWPEARSVIALALNYGPSVDPRDALAHKDRGAISVYARHRDYHDVIKGRLKTLAAWLVVAARPDRAQVKVFVDTAPVMEKPLAAAAGLGWQGKHTNLVSREFGSWLFLGSIFTDLALTPDAPEADHCGQCRACLDACPTAAFPAPYKLDARRCISYLTIENQGAIAPEFRSLIGNRIYGCDDCLAVCPWNKFAQVGREAKLAQRDDLAAPPLAELAALDEAGFRARFAGGPIKRIGHARFLRNVMIAIGNSGDRSLIGAAKSGLASPHSLVRAMAVWALSRLASQAELAALAERFMPRERDDQTREEWRMALNSSPER

SEQ ID NO: 75177 - protein, 391 aa, Bradyrhizobium sp.
  misc_feature (1)..(391): tr|J3CK71|J3CK71_9BRAD Epoxyqueuosine reductase OS=Brad yrhizobium sp. YR681 OX=1144344 GN=queG PE=3 SV=1
MAGGGAGVADLRGPGFLSSEPTELKAALAREARALGFDCIGITEPGTIESAGQRFLEFIASGGHGDMDWLAAQPERRVDPRGLWADVRSVIMLGVNYGPDSDPLTILKERTRAAISVYAQGDDYHDLIKKRLKALARWLVAAAPSEVKVFVDTAAVMEKPLAQTAHLGWQGKHTNLVSREFGSWLFLGAIYTTLDLPRDGAEIDHCGSCRACLDICPTSAFPAPYRLDARRCISYLTIEKKGPIPREFRKAIGNRIYGCDDCLAACPWNKFAQEGREARLAARDELRAPSLAELARLDDAAFRALFTKSPVKRIGRDRFLRNVLIAIGNSGEMALAEEARRLLEDASPLVRGAAVWALGQLVGRSEFDAMKSAAMSAERDEGVRQEWHTAA

SEQ ID NO: 75178 - protein, 385 aa, Bradyrhizobium stylosanthis
  misc_feature (1)..(385): tr|A0A560ECX0|A0A560ECX0_9BRAD Epoxyqueuosine reductase OS=Bradyrhizobium stylosanthis OX=1803665 GN=queG PE=3 SV=1
MTSVDALVIRSSTDTVELRAALEREARALGFDCIGITAPGTIEKAGAHFLEFIASGGHGDMDWLAAQPERRVDPRGLWRDVRSVIMLGVNYGPDSDPLAILQERTRAAISVYAQGDDYHDLIKKRLKALARWLVAAAPSEVKVFVDTAAVMEKPLAQTAHLGWQGKHTNLVSREFGSWLFLGAIYTTLELPRDDAEIDHCGSCRACLDICPTSAFPAPYKLDARRCISYLTIENKGPIPHEFRKAIGNRIYGCDDCLAACPWNKFAQEGREAKLAARDELRAPGLAELARLDDAAFRALFTKSPVKRIGRDRFLRNVLIAIGNSGEMTLAEEARQLLEDASPLVRGAAVWALGQLVTREEFAALRANAIAGEHDESVREEWQTAA

SEQ ID NO: 75179 - protein, 397 aa, Bradyrhizobium valentinum
  misc_feature (1)..(397): tr|A0A0R3M5C1|A0A0R3M5C1_9BRAD Epoxyqueuosine reductase OS=Bradyrhizobium valentinum OX=1518501 GN=queG PE=3 S V=1
MAGGGAGIADLRGPRLLNKDTRLSAADLKAALAREAETLGFDCIGVTDPDAIASAGKYFREFLDAGAHGDMDWLAAQPERRMDPRVLWRGVRSIIMLGVNYGPAEDPLALLAKRTRGAISAYAQGDDYHDVIKKRLKALARWFVAASGEEVKVFIDTAAVMERPLAQAAGLGWQGKHTNLVSREFGSWLFLGAIFTAADLPRDDADTDRCGSCNACQEICPTAAFPAPYKLDARRCISYLTIENKGPIPHEFRKSIGNRIYGCDDCLAVCPWNKFAQQGREAKLAARTELRAPSLAELVRLDDTAFRALFSKSPVKRIGRDRFVRNVLIAIGNADDASLAPEAERLLDDASPLVRGAAVWALSQLVDRVKFNALAARAMGAETDEDVRAEWHLATAV

SEQ ID NO: 75180 - protein, 391 aa, Bradyrhizobium vignae
  misc_feature (1)..(391): tr|A0A4Q0R9R5|A0A4Q0R9R5_9BRAD Epoxyqueuosine reductase OS=Bradyrhizobium vignae OX=1549949 GN=queG PE=3 SV=1
MAGWRAGVADLRGPGFLNSDPTELKAALEHEARALGFDCVGITAPGTIESAGKHFLEFIASGGHGDMDWLAVQPERRVDPRGLWQDVRSVIMLGVNYGPDQDPLAILKQRTRAAISVYAQGDDYHDLIKKRLKALARWLVATAPSEVKVFVDTAAVMEKPLAQAAHLGWQGKHTNLVSREFGSWLFLGAIYTTLDLPRDAAEIDHCGSCRACLDICPTAAFPTPYKLDARRCISYLTIENKGPIPQEFRKAIGNRIYGCDDCLAACPWNKFAREGREAKLAARDELRAPSLAELARLDDAAFRALFTKSPVKRIGRDRFLRNVLIAIGNSGEAALAEEARRLLDDANPLVRGAAVWALAQLVSREEFDAMRANAIADEQDESVREEWQLAS

SEQ ID NO: 75181 - protein, 391 aa, Bradyrhizobium yuanmingense
  misc_feature (1)..(391): tr|A0A0R3BI67|A0A0R3BI67_9BRAD Epoxyqueuosine reductase OS=Bradyrhizobium yuanmingense OX=108015 GN=queG PE=3 SV=1
MAGRRAGVADLCGPGFLSSDPTELKAALAREAHALGFDCIGVTAPGSIDAAGQHFLEFIASGGHGDMDWLANQPERRVDPRGLWADVRSVIMLGVNYGPDSDPLAILKQRARAAISVYAQGDDYHDLIKKRLKALARWLVATAPSEVKVFVDTAAVMEKPLAQAAHLGWQGKHTNLVSREFGSWLFLGAIYTTLELPRDAAEIDHCGSCRACLDICPTAAFPAPYKLDARRCISYLTIENKSPIPHEFRKAIGNRIYGCDDCLAACPWNKFAREGREAKLSARDELRAPSLAELARLDDAAFRALFTKSPVKRIGRDRFVRNVLIAIGNSDEAALAEEARRLLDDASPLVRGAAVWALAQLLSREEFEAMKGAAISNEHDESVRKEWRAAS

SEQ ID NO: 75182 - protein, 378 aa, Bradyrhizobium yuanmingense
  misc_feature (1)..(378): tr|A0A4E0Q5Z4|A0A4E0Q5Z4_9BRAD Epoxyqueuosine reductase OS=Bradyrhizobium yuanmingense OX=108015 GN=queG PE=3 SV=1
MNNIDTDTDRLRSALEEQAHALGFDCIGVTAPGSIDAAGQHFLEFIASGGHGDMDWLANQPERRVDPRGLWADVRSVIMLGVNYGPDSDPLAILKQRTRAAISVYAQGDDYHDLIKKRLKALARWLVATAPSEVKVFVDTAAVMEKPLAQAAHLGWQGKHTNLVSREFGSWLFLGAIYTTLELPRDAAEIDHCGSCRACLDICPTAAFPAPYKLDARRCISYLTIENKGPIPHEFRKSIGNRIYGCDDCLAACPWNKFAREGREAKLAARDELRAPSLAELARLDDAAFRALFTKSPVKRIGRDRFLRNVLIAIGNSGEVALAEAARRLLDDASPLVRGAAVWALGQLLAREEFEAMKSAAASSERDESVREEWRAAS

SEQ ID NO: 75183 - protein, 391 aa, Bradyrhizobium zhanjiangense
  misc_feature (1)..(391): tr|A0A4Q0QU51|A0A4Q0QU51_9BRAD Epoxyqueuosine reductase OS=Bradyrhizobium zhanjiangense OX=1325107 GN=queG PE= 3 SV=1
MAGRRTGVPDLRGPGFLSSDPAELKTALAREARALGFDCIGITAPGTIESAGKYFLEFIASGGHGDMDWLAASPERRVDPRGLWQDVRSVIMLGVNYGPDQDPLVILKQRTRAAISVYAQGDDYHDLIKKRLKALARWLVATAPSDVKVFVDTAAVMEKPLAQAAHLGWQGKHTNLVSRAFGSWLFLGAIYTTLELPRDDAEIDHCGSCRACLDICPTAAFPAPYKLDARRCISYLTIENKGPIPHEFRKSIGNRIYGCDDCLAACPWNKFAQEGRETKLAARDELRAPGLAELARLDDAAFRALFTKSPIKRIGRDRFVRNVLIAIGNSGEGALAAEARRLLEDASPLVRGAAVWALGQLMSEEELAAMKSAAMDGESDESVREEWRIAS

SEQ ID NO: 75184 - protein, 391 aa, Bradyrhizobium zhanjiangense
  misc_feature (1)..(391): tr|A0A4Q0SRT1|A0A4Q0SRT1_9BRAD Epoxyqueuosine reductase OS=Bradyrhizobium zhanjiangense OX=1325107 GN=queG PE= 3 SV=1
MAGRRAGVADLRGPGFLSSDPAELKTALAREARALGFDCIGITAPGTIESAGKYFLEFIASGGHGDMDWLAASPERRVDPRGLWQDVRSVIMLGVNYGPDQDPLAILEQRTRAAISVYAQGDDYHDLIKKRLKALARWLVATAPSDVKVFVDTAAVMEKPLAQAAHLGWQGKHTNLVSREFGSWLFLGAIYTTLELPRDDAEIDHCGSCRACLDICPTSAFPAPYKLDARRCISYLTIENKGPIPHEFRKAIGNRIYGCDDCLAACPWNKFAQEGRETKLAARDELRAPGLAELARLDDAAFRALFTKSPIKRIGRDRFVRNVLIAIGNSGEVALAAEARRLLEDASPLVRGAAVWALGQLMSEEELAAMKSAAMDGEPDESVREEWRAAS

SEQ ID NO: 75185 - protein, 379 aa, Brenneria alni
  misc_feature (1)..(379): tr|A0A421DU55|A0A421DU55_9GAMM Epoxyqueuosine reductase OS=Brenneria alni OX=71656 GN=queG PE=3 SV=1
MAYPYDLSELAQLIKQWGQSLGFQQVGICDTDLSSEEPKLQAWLDKQYHGEMAWMARHGMLRARPHELLPGTLRVISVRMNYLPAKAAFASTLKNPQLGYVSRYALGRDYHKLLRQRLKKLGDQIQDYCGALSFRPFVDSAPIMERPLAAKAGLGWVGKHSLLLNRESGSWFFLGELLIDLPLPVDQPQEEQCGRCVACMTACPTGAIIEPYTVDARRCISYLTIELEGPIPETLRPLMGNRIYGCDDCQLICPWNRFSQLTDETDFSPRAALHTPELLDLFNWSEEKFLRITEGSAIRRIGHLRWLRNIAVALGNAPYQDQIVLALQTRLGESDLLDEHIHWAIKQQRIRRSSQEIEVQPPQKKRLIRAIEKGLPRDA

SEQ ID NO: 75186 - protein, 379 aa, Brenneria goodwinii
  misc_feature (1)..(379): tr|A0A250BJV8|A0A250BJV8_9GAMM Epoxyqueuosine reductase OS=Brenneria goodwinii OX=1109412 GN=queG PE=3 SV=1
MIYPYDLSELAQLIKQWGLSLGFQQVGICDTDLSAEEPKLQAWLDKQYHGEMAWMARHGMLRARPHELLPGTLRVISVRMNYLPAKAAFACTLKNPLKGYVSRYALGRDYHKLLRQRLKKLGDQIQNYCGELNFRPFVDSAPIMERPLAAKAGLGWIGKHSLLLNRESGSWFFLGELLIDLPLPIDQPQEEQCGRCVACMTTCPTGAIVEPYTVDARRCISYLTIELEGPIPEEFRPLMGNRIYGCDDCQLICPWNRFSQLTDETDFSPRAALHTPELLDLFNWSEDKFLRITEGSAIRRIGHLRWLRNIAVALGNAPYQDQIVLALRTRLGESELLDEHIHWAIHQQLMRRSSREVEVQPARKKRLIRAVEKGLPRDA

SEQ ID NO: 75187 - protein, 379 aa, Brenneria goodwinii
  misc_feature (1)..(379): tr|A0A0G4JVT2|A0A0G4JVT2_9GAMM Epoxyqueuosine reductase OS=Brenneria goodwinii OX=1109412 GN=queG PE=3 SV=1
MIYPYDLSELAQLIKQWGLSLGFQQVGICDTDLSAEEPKLQAWLDKQYHGEMAWMARHGMLRARPHELLPGTLRVISVRMNYLPAKAAFASTLKNPLKGYVSRYALGRDYHKLLRQRLKKLGDQIQNYCGELNFRPFVDSAPIMERPLAAKAGLGWIGKHSLLLNRESGSWFFLGELLIDLPLPVDQPQEEQCGRCVACMTTCPTGAIVEPYTVDARRCISYLTIELEGPIPEEFRPLMGNRIYGCDDCQLICPWNRFSQLTDESDFSPRTALHTPELLDLFNWSEDKFLRITEGSAIRRIGHLRWLRNIAVALGNAPYQDQIVLALRTRLGESELLDEHIHWAIHQQLMRRSSREIEVQPARKKRLIRAVEKGLPRDA

SEQ ID NO: 75188 - protein, 379 aa, Brenneria nigrifluens
  misc_feature (1)..(379): tr|A0A2U1UFE8|A0A2U1UFE8_9GAMM Epoxyqueuosine reductase OS=Brenneria nigrifluens DSM 30175 = ATCC 13028 OX=112 1120 GN=queG PE=3 SV=1
MAYPYDLGELAQLIKQWGLSLGFQQVGICDTDLSAEEPRLQAWLDKQYHGEMAWMARHGMLRARPHELLPGTLRVISVRMNYLPAKAAFASTLKNPQLGYVSRYALGRDYHKLLRQRLKKLGERIQDYCGELNFRPFVDSAPIMERPLAAKAGLGWVGKHSLLLNRESGSWFFLGELLIDLPLPVDQPQQEQCGRCVACITTCPTGAIVEPYTVDARRCISYLTIELEGAIPEAFRPLIGNRIYGCDDCQLICPWNRFSQLTDETDFSPRAALHAPELLELFQWSEEKFLRITEGSAIRRIGHLRWLRNIAVALGNAPYQDRIVLTLQTRLGENDLLDEHIHWAIKQQRTRRAAQGIEVQSARKKRLIRAVEKGLPRDA

SEQ ID NO: 75189 - protein, 379 aa, Brenneria roseae
  misc_feature (1)..(379): tr|A0A2U1U1P9|A0A2U1U1P9_9GAMM Epoxyqueuosine reductase OS=Brenneria roseae subsp. americana OX=1508507 GN=que G PE=3 SV=1
MSYPYDLSELAQLIKQWGQELGFQQIGICDTDLSHEEPKLQAWLDKQYHGEMEWMARHGMLRARPHELLPGTLRVISVRMNYLPAKAAFASTLNNPLSGYVSRYALGRDYHKLLRQRLKKLGDRIQHYCGELNFRPFVDSAPIMERPLAAKAGIGWVGKHSLILNRESGSWFFLGELLIDLPLPVDQPQDEQCGRCVACMTTCPTGAIVAPYTVDARRCISYLTIELEGPIPEEFRPLMGNRIYGCDDCQLICPWNRFSQLTDEADFSPRAALHAPELVTLFAWNEEKFLRITEGSAIRRIGHVRWLRNIAVALGNAPYQDYIVLALQNRLGEHDLLDEHIHWAIEQQLARRAEQQIDVQSSQKKRLIRAVEKGLPRDA

SEQ ID NO: 75190 - protein, 379 aa, Brenneria rubrifaciens
  misc_feature (1)..(379): tr|A0A4P8QRC4|A0A4P8QRC4_9GAMM Epoxyqueuosine reductase OS=Brenneria rubrifaciens OX=55213 GN=queG PE=3 SV=1
MSYPYDLGELAQLIKQWGQALGFQQIGICDTDLSKEEPKLQDWLDKQYHGEMAWMVRHGMLRARPHELLPGTLRVISVRMNYLPAQAAFASTLKNPQLGYVSRYALGRDYHKLLRQRLKKLGDRIQNYCGELNFRPFVDSAPIMERPLAAKAGIGWIGKHSLILNRASGSWFFLGELLIDLPLPVDQPQEEQCGRCVACMTTCPTGAIIAPYTVDARRCISYLTIELEGPIPEELRPLMGNRIYGCDDCQLICPWNRFSPLTEEADFSPRAALHAPELVTLFLWSEEKFLRITEGSAIRRIGHVRWLRNIAVALGNAPYQDHIVLALRNRLGESELLDEHIHWAIKQQLTRHAEQGIEVQSPQKKRLIRAVEKGLPRDA

SEQ ID NO: 75191 - protein, 379 aa, Brenneria salicis
  misc_feature (1)..(379): tr|A0A366I2N3|A0A366I2N3_9GAMM Epoxyqueuosine reductase OS=Brenneria salicis ATCC 15712 = DSM 30166 OX=714314 GN=queG PE=3 SV=1
MSYPYDLSELAQLIKQWGQALGFQQVGICDTDLSHEEPKLQDWLDKQYHGEMAWMARHGMLRARPHELLPGTLRVISVRMNYLPAKAAFASTLKNPRLGYVSRYALGRDYHKLLRQRLKKLGEQIQRYCGELNFRPFVDSAPIMERPLAAKAGIGWVGKHSLILNRESGSWFFLGELLIDLPLPVDQPQEEQCGRCVACITTCPTGAIVAPYTVDARRCISYLTIELEGPIPEAFRPLMGNRIYGCDDCQLICPWNRFSQLTDEADFSPRAALHAPELAALFAWSEEKFLRITEGSAIRRIGHVRWLRNIAVALGNAPYEDHIVLALQRRLGESDLLDEHIHWAIKQQLARRAEQEIEVQSARKNRLIRAVEKGLPRDA

SEQ ID NO: 75192 - protein, 379 aa, Brenneria sp.
  misc_feature (1)..(379): tr|A0A2U1U504|A0A2U1U504_9GAMM Epoxyqueuosine reductase OS=Brenneria sp. CFCC 11842 OX=2173106 GN=queG PE=3 SV =1
MAYPYDLGELAQLIKQWGLSLGFQQVGICDTDLSAEEPRLQAWLDKQYHGEMAWMARHGMLRARPHELLPGTLRVISVRMNYLPAKAAFASTLKNPQLGYVSRYALGRDYHKLLRQRLKKLGERIQDYCGELNFRPFVDSAPIMERPLAAKAGLGWVGKHSLLLNRESGSWFFLGELLIDLPLPVDQPQQEQCGRCVACITTCPTGAIVEPYTVDARRCISYLTIELEGPIPEAFRPLIGNRIYGCDDCQLICPWNRFSQLTDETDFSPRAALHAPELLELFQWSEEKFLRITEGSAIRRIGHLRWLRNIAVALGNAPYQDRIVLTLQTRLGENDLLDEHIHWAIEQQRIGRASQGIEVQSARKKRLIRAVEKGLPRDA

SEQ ID NO: 75193 - protein, 379 aa, Brenneria sp.; identical to SEQ ID NO: 75188
  misc_feature (1)..(379): tr|G7LW20|G7LW20_9GAMM Epoxyqueuosine reductase OS=Bren neria sp. EniD312 OX=598467 GN=queG PE=3 SV=1

SEQ ID NO: 75194 - protein, 375 aa, Breoghania corrubedonensis
  misc_feature (1)..(375): tr|A0A2T5VFV8|A0A2T5VFV8_9RHIZ Epoxyqueuosine reductase OS=Breoghania corrubedonensis OX=665038 GN=queG PE=3 S V=1
MRLEKAIAEKARALGFDACRITHADAIPEAPERLARFLADGHHATMEWMAETADRRAAPRVLWQDVRSIVMLGMNYGPDRDPLENLTRPEVGSISVYARHRDYHDVIKGKLKTLAGQIGALARDGGPDVKVFVDTAPVMEKPLAAAAGLGWQGKHTNLVSREFGSWLFLGAIFTTLDLEADAPEADRCGSCRACLDICPTRAFPAPYRLDAGRCISYLTIEHKGPIPREFRQAIGNRIYGCDDCLAACPWNKFAETAREAKLKARADLEAPALADLAKLDDAAFRALFSGSPVKRIGRDRFIRNVAIAIGNSGDAALAQTARRLLGDPAPDVRGAAVWALSRLLPGDEFARLGRENAEREEDPSVREEWHSGAAS

SEQ ID NO: 75195 - protein, 392 aa, Breoghania sp.
  misc_feature (1)..(392): tr|A0A346QY43|A0A346QY43_9RHIZ Epoxyqueuosine reductase OS=Breoghania sp. L-A4 OX=2304600 GN=queG PE=3 SV=1
MTRDAGTQKAERLKAEIAARAGALGFDACRVTSADAIPQAAPRLRQFLSDGHHASMEWMAETAERRASPRALWPEVRSVIMLGMNYGPDGDPLEHLAHPDRAGISVYARNRDYHDIIKGRLKTLAGQIAARASAAAEPGAAPLDVKVFVDTAPVMEKPLAEAAGLGWQGKHTNLVSRELGSWLFLGAIFTTLDLPADAPEADHCGSCRACLDACPTDAFPAPYRLDARRCISYLTIEHKGPIPLEFREAMGNRIYGCDDCLAVCPWNKFAAEAHEAKLHARDDLKLPALAGFLGLDDAGFRKQFAGSPIKRIGRDRFLRNVLIAAGNSGSEALAQPVAALLDDGAAEVRGAAVWALSRLLPKEKLRRLRNAREATETEADVRAEWGEADGAS

SEQ ID NO: 75196 - protein, 359 aa, Brevefilum fermentans
  misc_feature (1)..(359): tr|A0A1Y6K8W2|A0A1Y6K8W2_9CHLR Epoxyqueuosine reductase OS=Brevefilum fermentans OX=1986204 GN=queG PE=4 SV=1
MRCLAELKRAFSTRAHQLGFTHVGITPAHPVPHFDAFERWIRAGHHADMHYLARQDTLAKRADPSLVLEGCQRVICLAMPYTPPQSSLTAISPGFGRVSAYARPADYHQVIQNKLVELENLICSLADGAVKIKSYVDTGPVLERAFAVQAGLGMVGKNSNLIIQGKGTYFFLAVMLTDLELPVDAPFTHDLCGSCQRCIEACPTSCILPDRTIDARRCISYLTIENKGVIPDALKCQVGNWLFGCDICQMVCPHNIRAQTQPSMLGEPLLPEQMNLTDILNWDEEDFKSATQNTALNRPKQRGLVRNAIVVLGNQAQATALPLLRDHLDKEAHPMVLDALYWAIDQIERNQTDDARSNG

SEQ ID NO: 75197 - protein, 405 aa, Brevibacillus agri
  misc_feature (1)..(405): tr|A0A3M8A5C8|A0A3M8A5C8_9BACL Epoxyqueuosine reductase OS=Brevibacillus agri OX=51101 GN=queG PE=3 SV=1
MIDEQDLRYWEQTKQSIIDYAKEIGIDKIGFASADPFLTLKERLIEHREKGYESGFEEPDLEKRTNPSLLLEGARSLISIALAYPSKLENPPKSEPGAYRGILCRAAWGVDYHHVLRDKLDKLGKFIQELEPGAKIESMVDTGALSDRAVAERAGVGFVGKNCAVITPEFGSWVYLGELLTNLPLPIDHPIEEGCGDCNICVDACPTGALVQGGQLNAQRCVAFLTQVKDFIPDEFRGKIGNRLYGCDTCQTVCPKNRRINSNHHPEFQPDPEIAKPLLIPLLEMSNKEFKEKFGLSSSSWRGKKPIQRNAILALAHFKDRTAVPHLARLLANDPRPVIRGTAAWALGKIGGADAEAALVRAQETEQVAEVQDEIAKGMKLLAEQSAQGEKQRRQEQQEQQEQLP

SEQ ID NO: 75198 - protein, 399 aa, Brevibacillus borstelensis
  misc_feature (1)..(399): tr|M8DA91|M8DA91_9BACL Epoxyqueuosine reductase OS=Brev ibacillus borstelensis AK1 OX=1300222 GN=queG PE=3 SV=1
MNERQYWEDTKQAIIRYAKEMGIDKIGFASADPFLTLKQRLVEHREKGYESGFEEPDLDKRTEPSLSLEGARSIISIALAYPSKLKNPPKSEPGAYRGIMCRAAWGTDYHHVLREKLDKLADYIRQLEPHARLESMVDTGALSDRAVAERAGLGWVGKNCALITPEFGSWVYLGEMLTNLPLPPDTPVEEGCGDCNLCVEACPTGALVQGGQLDSQKCVAFLTQVKGFIPDQYRSKIGNRLYGCDTCQTVCPKNRGLHFEHHPEFQPDPELVKPLLLPLLQMSNKEFKQKFGHSSSSWRGKKPIQRNAILALTHFRDQSAVPDLIRLMESDPREVIRGTAAWALGKIGGEEAAEALHKAAEQEQSEEVMAEIRKGISMLQQPPSLRKGTVSREKTEEIS

SEQ ID NO: 75199 - protein, 383 aa, Brevibacillus brevis
  misc_feature (1)..(383): tr|A0A1Y4X625|A0A1Y4X625_BREBE Epoxyqueuosine reductase OS=Brevibacillus brevis OX=1393 GN=queG PE=3 SV=1
MNDLLYWEQTKQSIIDYAKEIGIDKIGFASADPFTTLKERLIVHREKGYESGFEEPDFEKRTNPELLLDGARSLISIALAYPSKLKNPPKSEPGAYRGILCRAAWGTDYHHVLRDKLDKLTRFIMELEPGARIESMVDTGALSDRAVAERAGIGFVGKNCAIITPEFGSWVYLGELVTNLPLPSDQPIEEGCGDCNICVDACPTGALIQGGQLDAQRCVAYLTQVKDFIPDEFRGKIGNRLYGCDTCQTVCPKNRRIDNDHHAEFQPDPEIAKPLLIPLLQMSNKEFKEKFGQSSSSWRGKKPIQRNAILALAHFKDRTAVPHLERLLFEDPRPVIRGTAAWALGKIGGEQAQEALITAKAKEASPEVVEEIEKGMSMIREQA

SEQ ID NO: 75200 - protein, 383 aa, Brevibacillus brevis
  misc_feature (1)..(383): tr|A0A291BEW8|A0A291BEW8_BREBE tRNA epoxyqueuosine(34) reductase QueG OS=Brevibacillus brevis X23 OX=1200792 G N=queG PE=4 SV=1
MNDLQYWEQTKQSIIDYAKEIGIDKIGFASADPFTTLKERLLVHREKGYESGFEEPDLEKRTNPELLLDGARSLISIALAYPSKLKNPPKSEPGAYRGILCRAAWGTDYHHVLRDKLDKLTRFIMELEPGARIESMVDTGALSDRAVAERAGIGFVGKNCAIITPEFGSWVYLGELVTNLPLPSDLPIEEGCGDCNICVDACPTGALIQGGQLDAQRCVAYLTQVKDFIPDEFRGKIGNRLYGCDTCQTVCPKNRRIDNDHHAEFQPDPEIAKPLLIPLLQMSNKEFKEKFGLSSSSWRGKKPIQRNAILALAHFKDRTAVPHLERLLFEDPRPVIRGTAAWALGKIGGEQAQEALISAKAKEASPEVVEEIEKGMSMIRAQA

SEQ ID NO: 75201 - protein, 387 aa, Brevibacillus choshinensis
  misc_feature (1)..(387): tr|A0A0Q3WHD8|A0A0Q3WHD8_BRECH Epoxyqueuosine reductase OS=Brevibacillus choshinensis OX=54911 GN=queG PE=3 SV =1
MNEQQYWEQTKQSIIAYAKQIGIDKIGFASADPFIDLKGRLIEHREKGYESGFEEQDLDKRTQPGLLVEGARSLISIALAYPSKLEQPPKSEPGAYRGILCRAAWGTDYHHVLRDRLDKLAGYIAQLEPGVRIESMVDTGELSDRAVAERAGVGWSGKNCSIITPEFGSWVYLGELVTNLPLPADHPIEEGCGDCNICVDACPTGALVQGGQLDAQRCIAFLTQVKDFIPDEFRGKIGNRLYGCDTCQTVCPKNRRINATHHPEFQPDPEIAKPLLLPLLDMSNKEFKEKFGLSSSSWRGKKPIQRNAILALAHFKDKTAVPQLSRLLESDPRPVIRGTAAWALGKIGGDEAQVALDKAKEREDAPEVLAEVEKGLRMIEEHTATGK

SEQ ID NO: 75202 - protein, 386 aa, Brevibacillus fluminis
  misc_feature (1)..(386): tr|A0A3M8DPF1|A0A3M8DPF1_9BACL tRNA epoxyqueuosine(34) reductase QueG OS=Brevibacillus fluminis OX=511487 GN=q ueG PE=4 SV=1
MTSEQTYWQQTKEAIIRYAGEIGIDKIGFATADPFLDLKERLEVHRESGFESGFEEPDLEKRTDPTLTIPEARSLIAIALAYPSKMKNPPKSVPGAYRGILSRSAWGTDYHHVLREKMEKLTAFIRDLEPGAMIESMVDTGGLSDRAVAERAGIGWSGKNCAIITPEFGSWVYLGELVTSLPLPPDAPIEEGCGDCNICVDACPTGALVQGGQLNSQRCVAFLTQVKDFIPDEFRSKIGNRLYGCDTCQTVCPKNKGKHFDYHPEFSPDPEVAKPLLVPILSMGNREFKEVFGKSSSAWRGRKPIQRNAILALAHFKDQSAVPDLIRLLQKDPRPVIRGTAAWALGKIGGTQAGEALQEALSLEKDEEALAEIHKGLALWQQEATV

SEQ ID NO: 75203 - protein, 383 aa, Brevibacillus formosus
  misc_feature (1)..(383): tr|A0A4Y4I624|A0A4Y4I624_9BACL Epoxyqueuosine reductase OS=Brevibacillus formosus OX=54913 GN=queG PE=3 SV=1
MNDLLYWEQTKQSIIDYAKEIGIDKIGFASADPFTTLKERLIVHREKGYESGFEEPDLEKRTNPELLLGGARSLISIALAYPSKLKNPPKSEPGAYRGILCRAAWGTDYHHVLRDKLDKLTRFIMELEPGARIESMVDTGALSDRAVAERAGIGFVGKNCAIITPEFGSWVYLGELVTNLPLPSDQPIEEGCGDCNICVDACPTGALIQGGQLDAQRCVAYLTQVKDFIPDEFRGKIGNRLYGCDTCQTVCPKNRRIDNAHHAEFQPDPEIAKPLLIPLLQMSNKEFKEKFGQSSSSWRGKKPIQRNAILALAHFKDRTAVPHLERLLFEDPRPVIRGTAAWALGKIGGEQAQGALITAKAKETSPEVVEEIEKGMSMIRAQA

SEQ ID NO: 75204 - protein, 383 aa, Brevibacillus formosus
  misc_feature (1)..(383): tr|A0A220MBR5|A0A220MBR5_9BACL Epoxyqueuosine reductase OS=Brevibacillus formosus OX=54913 GN=queG PE=3 SV=1
MNDLLYWEQTKQSIIDYAKEIGIDKIGFASADPFTTLKERLIVHREKGYESGFEEPDLEKRTNPELLLDGARSLISIALAYPSKLKNPPKSEPGAYRGILCRAAWGTDYHHVLRDKLDKLTRFIMELEPGARIESMVDTGALSDRAVAERAGIGFVGKNCAIITPEFGSWVYLGELVTNLPLPSDQPIEEGCGDCNICVDACPTGALIQGGQLDAQRCVAYLTQVKDFIPDEFRGKIGNRLYGCDTCQTVCPKNRRIDNDHHAEFQPDPEIAKPLLIPLLQMSNKEFKEKFGQSSSSWRGKKPIQRNVILALAHFKDRTAVPHLERLLFEDPRPVIRGTAAWALGKIGGEQAQGALITAKAKEASPEVVEEIEKGISMIRAQA

SEQ ID NO: 75205 - protein, 406 aa, Brevibacillus gelatini
  misc_feature (1)..(406): tr|A0A3M8AW56|A0A3M8AW56_9BACL Epoxyqueuosine reductase OS=Brevibacillus gelatini OX=1655277 GN=queG PE=3 SV=1
MDGQDLRYWEQTKQSIIHYAKEIGIDKIGFASADPFLTLKERLIEHREKGYESGFEEPDLEKRTNPGLLLEGARSLISIALAYPSRLENPPKSEPGAYRGILCRAAWGVDYHHVLRDKLDKLGKFIQELEPGAKIESMVDTGALSDRAVAERAGVGFVGKNCALITPEFGSWVYLGELLTNLPLPADQPIEEGCGDCNICVDACPTGALVQGGQLNAQRCVAFLTQVKDFMPDEFRGKIGNRLYGCDTCQTVCPKNRRINFNHHPEFQPDPEIAKPLLIPLLEMSNKEFKEKFGLSSSSWRGKKPIQRNAILALAHFKDRTAVPHLARLLANDPRPVIRGTAAWALGKIGGADAEAALVSAQETEQVAEVQAEIAKGMKLLAEQGAQGKQREPQEPAKQQRQQEQL

SEQ ID NO: 75206 - protein, 392 aa, Brevibacillus invocatus
  misc_feature (1)..(392): tr|A0A3M8C5G7|A0A3M8C5G7_9BACL Epoxyqueuosine reductase OS=Brevibacillus invocatus OX=173959 GN=queG PE=3 SV=1
MNDQQYWVQTKQAIIAYAKEIGIDKIGFASADPFVELRGRLIEHREKGYESGFEEPDLEKRTQPDLILEGARTLISIALAYPSKLENPPKSEPGAYRGILCRAAWGTDYHHVLRDRLAKLARFIRELEPGAQIESMVDTGALSDRAVAERAGLGWVGKNCALITPEFGSWVYLGELVTNLPLPFDQPVEEGCGDCNICVDACPTGALVQGGQLNAQRCVAYLTQVKDFIPDEFRTKIGNRLYGCDTCQTVCPKNRGIHNSHQTEFIPDPEVAKPLLIPLLEMSNKEFKEKFGLSSSSWRGKKPIQRNAILALAHFKDRSAVPHLARLLEHDPRPVIRGTAAWALGKIGGEDAEAALNRSKEREDSPEVLEEVRKGLEIMNSQVQQKNTEQTK

SEQ ID NO: 75207 - protein, 392 aa, Brevibacillus laterosporus
  misc_feature (1)..(392): tr|A0A502HUQ0|A0A502HUQ0_BRELA tRNA epoxyqueuosine(34) reductase QueG OS=Brevibacillus laterosporus OX=1465 GN =queG PE=4 SV=1
MKSTLDPTYWQRLKETIQRYAAEIGIDKIGFTSADPFLELKDRLIVHREKGYESGFEEKDIDKRVYPELTLEGARSIIAIAIAYPSKMTNFPKSEPEAYRGILARSAWGLDYHHVLRDKLNRLADFIQELEPDARLESMVDTGVLSDRAVAERAGIGWVGKNCSIITLEFGSYVYLGEMITNLPFPSDQPIEDQCGDCTLCLDTCPTQALVQGGQLNSQRCVAFLTQVKNEIPEEFREKIGNRLYGCDTCQTTCPKNKGMNFTHHLETLPDPELVKPLLKPLLTIGNKEFKERFGTSSAAWRGKKPIQRNAILGLAHFRDKSAVPDLIELLHKDTRPVIRGTSAWALGRIGGELAMEALELACQKEQDESVLPEIQKAIKKLESKNREQQGS

SEQ ID NO: 75208 - protein, 393 aa, Brevibacillus laterosporus
  misc_feature (1)..(393): tr|A0A075QZT6|A0A075QZT6_BRELA Epoxyqueuosine reductase OS=Brevibacillus laterosporus LMG 15441 OX=1042163 GN= queG PE=3 SV=1
MKPSLDTAYWQQIKETIQRYAAEIGIDKIGFTSADPFLELKDRLIVHREKGYESGFEEKDIDKRVYPELTLEGARSIIAIAIAYPSKMTNFPKSEPEAYRGILARSAWGVDYHHILRDKLNQLADFIQTLESEARLESMVDTGVLSDRAVAERAGIGWVGKNCSIITPEFGSYVYLGEMITNLPLPSDQPIEDQCGDCTLCLDTCPTQALVQGGQLNSQRCVAFLTQVKDEIPEEFREKIGNRLYGCDTCQTVCPKNKGMNFTHHPETLPDPELVKPLLKPLLTIGNKEFKARFGKSAAAWRGKKPIQRNAILGLAHFRDKSAIPDLIELLNKDLRPVIRGTSAWALGRIGGELAVEALKLANLKEQDESVLQEIQKALKKLEGKNVTANNNT

SEQ ID NO: 75209 - protein, 400 aa, Brevibacillus nitrificans
  misc_feature (1)..(400): tr|A0A3M8DHK3|A0A3M8DHK3_9BACL tRNA epoxyqueuosine(34) reductase QueG OS=Brevibacillus nitrificans OX=651560 G N=queG PE=4 SV=1
MRRARDRSDQAAVSKQQQYWEQTKQSIIDYAAQIGIDKIGFASADPFLELKERLIVHRGKGYESGFEEPDLDKRTEPGLLVEGARSLISIALAYPSKLENPPKSEPGAYRGILCRAAWGTDYHHVLRDKLEKLSAFITELEPGAKIESMVDTGALSDRAVAERAGLGFVGKNCALITEEFGSWVYLGELVTNLPLPADQPVEEGCGDCNICVDACPTGALVQGGQLDAQRCVAYLTQVKDFIPDEFRGKIGNRLYGCDTCQTVCPKNRRLNHTHHAEFQPDPEIAKPLLLPLLDMSNKEFKEKFGLSSSSWRGKKPIQRNAILALAHFKDKTAVPHLARLLENDPRPVIRGTAGWALGKIGGDEARLALLKAMERESDTAVLAEVQKGLAMLPEQSASSH

SEQ ID NO: 75210 - protein, 383 aa, Brevibacillus panacihumi
  misc_feature (1)..(383): tr|A0A3M8DDV5|A0A3M8DDV5_9BACL Epoxyqueuosine reductase OS=Brevibacillus panacihumi OX=497735 GN=queG PE=3 SV= 1
MSDRQYWEQTKQAIKDYASKIGIDKIGFASADPFVELRERLVEHREKGYESGFEEPDLEKRTQPQRIMEGARSLISIALAYPSKLENPPKSEPGAYRGILCRAAWGTDYHHVLRDRMDKLSRFIQELEPGVKIESMVDTGALSDRAVAERAGLGWVGKNCALITPEFGSWVYLGELVTNLPLPPDQPVEEGCGDCNICVDACPTGALVQGGQLNAQRCVAYLTQVKDFIPDEFRAKIGNRLYGCDTCQTVCPKNRGIHFQNHEEFRPDPEVAKPLLIPLLEMSNKEFKEKFGISSSSWRGKKPIQRNAILALAHFKDRTAVPHLVRLLENDPRPVIRGTAAWALGKIGGEDAHASLLQAKDREESPEVLQEIDKGLDMLKAAL

SEQ ID NO: 75211 - protein, 383 aa, Brevibacillus panacihumi
  misc_feature (1)..(383): tr|V6M9N2|V6M9N2_9BACL Epoxyqueuosine reductase OS=Brev ibacillus panacihumi W25 OX=1408254 GN=queG PE=3 SV=1
MSDRQYWEQTKQAIKEYASKIGIDKIGFASADPFVELRERLVEHREKGYESGFEEPDLEKRTQPQRIMEGARSLISIALAYPSKLENPPKSEPGAYRGILCRAAWGTDYHHVLRDRMDKLSRFIQELEPGAKIESMVDTGALSDRAVAERAGLGWVGKNCALITPEFGSWVYLGELVTNLPLPPDQPVEEGCGDCNICVDACPTGALVQGGQLNAQRCVAYLTQVKDFIPDEFRAKIGNRLYGCDTCQTVCPKNRGIHFQNHAEFTPDPEVAKPLLIPLLEMSNKEFKEKFGISSSSWRGKKPIQRNAILALAHFQDRSAVPHLVRLLENDPRPVIRGTAAWALGKIGGEDAHAALLQAKDRDDSPEVLQEIDKGLDILTAAR

SEQ ID NO: 75212 - protein, 398 aa, Brevibacillus parabrevis
  misc_feature (1)..(398): tr|A0A4Y3PMQ7|A0A4Y3PMQ7_BREPA Epoxyqueuosine reductase OS=Brevibacillus parabrevis OX=54914 GN=queG PE=3 SV=1
MIDEQDVRYWQQTKQSIIDYAKEIGIDKIGFASADPFLTLKERLMEHREKGYESGFEEPDLEKRTHPELLLDGARSLISIALAYPSKLENPPKSEPGAYRGILCRAAWGTDYHHVLRDKLDKLAKFIAELEPGAKIESMVDTGALSDRAVAERAGVGFVGKNCAVITPEFGSWVYLGELLTNLPLPTDQPIEEGCGDCNICVDACPTGALVQGGQLNAQRCIAFLTQVKNFIPDEFRGKIGNRLYGCDTCQTVCPKNRRINSNHHPEFQPDPETAKPLLIPLLEMSNKEFKEKFGLSSSSWRGKKPIQRNAILALAHFKDRTAIPHLSRLLANDPRPVIRGTAAWALGKIGGAEAEAALLRAQELEQDAEVQDEIAKGMSLLAKQEKQEKQDRQQEAK

SEQ ID NO: 75213 - protein, 380 aa, Brevibacillus reuszeri
  misc_feature (1)..(380): tr|A0A0K9YWH2|A0A0K9YWH2_9BACL Epoxyqueuosine reductase OS=Brevibacillus reuszeri OX=54915 GN=ADS79_03610 PE=4 SV=1
MNDQQYWEQTKQSIIDYAMEIGIDKIGFASADPFTTLKERLIEHREQGYESGFEEPDLDKRTDPGLLVEGARSLISIALAYPSKLENPLKSEPGAYRGILCRAAWGTDYHHVLREKLDKLAQFIKELEPGALIESMVDTGALSDRAVAERAGVGFTGKNCAIITPEFGSWVYLGELVTTLPLPSDQPIEEGCGDCNICVDACPTGALVQGGQLNAQRCIAFLTQVKDFIPDEFRGKIGNRLYGCDTCQTVCPKNRRIHTNHHPEFQPDPETAKPLLIPLLEMSNKEFKQKFGLSSSSWRGKKPIQRNAILALAHFKDKSAVPHLIRLLTNDPRPVIRGTAAWALGKIGGEDAKAALEQSREKEDSPEVLLEIEKGMDFIT

SEQ ID NO: 75214 - protein, 401 aa, Brevibacillus sp.
  misc_feature (1)..(401): tr|A0A3E0R4M1|A0A3E0R4M1_9BACL Epoxyqueuosine reductase OS=Brevibacillus sp. OX=1882945 GN=queG PE=3 SV=1
MSDRQYWEQTKQAIIAYAREIGIDKIGFASADPFLTLKERLLEHREKGYESGFEEPDLDKRTDPGLSLDGARSLIAIALAYPSKMDNPPKSEPGAYRGILCRAAWGTDYHHVLREKLDKLAGYICELEPGARVESMVDTGALSDRAVAERAGLGWVGKNCALITPEFGSWVYLGELITNLPLPPDEPVEEGCGDCNLCVEACPTGALVQGGQLNAQKCVAFLTQVKDFIPDQYRAKIGNRLYGCDTCQMVCPKNRGKHFAHHAEFRPDPEVAKPLLRPLLHMSNKEFKQTFGASSAAWRGKKPIQRNAILALAHFHDRSAVPDLIRLLEEDPRPVIRGTAAWALGKIGGEEAEAALAAARERESSPEVLAEVEKGFALLRQHGASGAAKSHDVRSGKGAHA

SEQ ID NO: 75215 - protein, 401 aa, Brevibacillus sp.
  misc_feature (1)..(401): tr|A0A1A5X768|A0A1A5X768_9BACL Epoxyqueuosine reductase OS=Brevibacillus sp. WF146 OX=319501 GN=queG PE=3 SV=1
MSDRQYWEQTKQAIIAYANEIGIDKIGFASADPFLTLKERLVEHREKGYESGFEEPDLDKRTDPSLSLEGARSLIAIALAYPSKMENPPKSEPGAYRGILCRAAWGMDYHHVLREKLDKLARFICRLEPGARVESMVDTGALSDRAVAERAGLGWVGKNCALITPEFGSWVYLGELITNLPLPPDMPVEEGCGDCNLCVEACPTGALVQGGQLNAQKCVAFLTQVKDFIPDQYRAKIGNRLYGCDTCQTVCPKNRGKHFAHHAEFRPDPEVAKPLLRPLLHMSNKEFKQTFGTSSAAWRGKKPIQRNAILALAHFRDRTAVPDLIRLLEEDPRPVIRGTAAWALGRIGGAEAEAALQTARERETSPDVLAEVEKGIALLHQPGSSRAAQTDNERGSKGANV

SEQ ID NO: 75216 - protein, 379 aa, [Brevibacterium] frigoritolerans
  misc_feature (1)..(379): tr|A0A3Q9SE78|A0A3Q9SE78_9BACI tRNA epoxyqueuosine(34) reductase QueG OS=[Brevibacterium] frigoritolerans OX=4 50367 GN=queG PE=4 SV=1
MDMNSFKQEVILYSKEIGIDKIGFTSATAFTELKGRLIRQQELDYQSGFEEADIEKRVRPELIFDKPQSIISIALAYPSKLKDAPQSTKSERRGIFCRASWGTDYHTVLRNKLQLLENFIKDKVPGAMMKSMVDTGELSDRAVAERAGIGWSAKNSMIITPEFGSFVYLGDMITNLPFEPDQPMEDQCGTCNKCVDVCPTGALVQGGQLNSKRCIAFLTQTKGFLPDEFRTKIGNRLYGCDTCQTVCPKNKGMDFHFHEEMEPDPELAKPLLKFLLTISNRDFKETYGHVSGSWRGKKPIQRNAILALAHFKDETALPLLIQVMKNDPRPVIRGTAAWAVGKIGREQAVSALEEARMKEKDEEVLAEIEKGLQFTLETK

SEQ ID NO: 75217 - protein, 377 aa, [Brevibacterium] frigoritolerans
  misc_feature (1)..(377): tr|A0A4R6AAL2|A0A4R6AAL2_9BACI Epoxyqueuosine reductase OS=[Brevibacterium] frigoritolerans OX=450367 GN=queG PE=3 SV=1
MNYEELKQDILSFSKSIGIDKIGFAQASVFDELKQRLIVHEQNGYQSGFEEPDLEKRTNPDVLLPGAKSIISIALAYPSKLKDAPRSTKEDRRGIFCRASWGQDYHHVLRDRLNKLEVYIRERVPNAEFKSMVDTGELSDRAVAERAGIGWSGKNCAIITPEFGSYVYLGEIVTNIPFSPDTPMEDRCGSCNICVDACPTGALVQGGQLDSNKCIAFLTQTKGFLADKYRKKLGNRLYGCDTCQTVCPENKGKDFHLHAEMEPDPEIAKPKLKPLLTMSNREFKEKFGHVSGSWRGKKPIQRNAIIALAHFKDQTAIPELIQLMHKDPRPVIRGTAAWAIGSIGGKERLIDLKKALQHEEDEEVRDEIEKGISLIEA

SEQ ID NO: 75218 - protein, 357 aa, Brevifollis gellanilyticus
  misc_feature (1)..(357): tr|A0A512M4M2|A0A512M4M2_9BACT Epoxyqueuosine reductase OS=Brevifollis gellanilyticus OX=748831 GN=queG PE=3 S V=1
MNDLKARLIAKAQELGFADCRVARAAEAARRDLYEQWVAEGKHGDMAWMARNMERRGDPRLVQEGAQSVIVLAMNYFQGPPPREPGYRIARYAWNDDYHDLIEAKLKTFEAWLIEQGGVQRRYVDTGPVLERNWASEAGLGWGGKSTMQIHRQLGTWFFLAELITTLEIEPDAPAKDHCGTCTRCIVACPTQAITAPRRLDARRCVSYLTIENKGSIPVEFRRAIRDRLYGCDDCLAACPWNKFAQISHEATFQARQSVFGMSLRDFLTLTDESFRALFAKSPIKRIKRHAFLRNVCVVLGNVGTAEDLPALLPLVDDPHPLIAEHAAWAVEEIRQRNQTSHEAPAYYESPESHVSN

SEQ ID NO: 75219 - protein, 357 aa, Brevirhabdus pacifica
  misc_feature (1)..(357): tr|A0A2M9DAX4|A0A2M9DAX4_9RHOB Epoxyqueuosine reductase OS=Brevirhabdus pacifica OX=1267768 GN=queG PE=3 SV=1
MTSSRDSDLPGSDLKARLAVFARESGFASMGVCRPDAVPELAGRLEAFVAAGRHGQMGWMEERRNWRGNPAALWPEARSIVMLADLYTPHADPLEVLERPDRGAISVYARNRDYHDVVKKRLKKVGRWLLEQSRGEEIKVFVDTAPVMEKPLAAAAGLGWQGKHTNLLSRDLGNWFFLGAIFTTVELPPDTPGRENCGSCTACLDICPTAAFPAPFQLDARRCISYLTIEHHGPVPEELRPALGNRIYGCDDCLAVCPWNKFARDAQEIRYHARDDLDAPELSRLAALDDAGFRALFSGSPIKRIGRARFLRNVCYAIGNSGRPDMLPSLGPLLDDPDPALADAARWAVARLRDHAA

SEQ ID NO: 75220 - protein, 349 aa, Brevirhabdus pacifica
  misc_feature (1)..(349): tr|A0A1U7DM78|A0A1U7DM78_9RHOB Epoxyqueuosine reductase OS=Brevirhabdus pacifica OX=1267768 GN=queG PE=3 SV=1
MPGSDLKARLAVFARESGFASMGVCRPDAVPELAGRLEAFVAAGRHGQMGWMEERRNWRGNPAALWPEARSIVMLADLYTPHADPLEVLERPDRGAISVYARNRDYHDVVKKRLKKVGRWLLEQSRGEEIKVFVDTAPVMEKPLAAAAGLGWQGKHTNLLSRDLGNWFFLGAIFTTVELPPDTPGRENCGSCTACLDICPTAAFPAPFQLDARRCISYLTIEHHGPVPEELRPALGNRIYGCDDCLAVCPWNKFARDAQEIRYHARDDLDAPELSRLAALDDAGFRALFSGSPIKRIGRARFLRNVCYAIGNSGRPDMLPSLGPLLDDPDPALADAARWAVARLRDHAA

SEQ ID NO: 75221 - protein, 298 aa, Brevundimonas abyssalis
  misc_feature (1)..(298): tr|U3APY7|U3APY7_9CAUL Iron-sulfur cluster-binding prot ein OS=Brevundimonas abyssalis TAR-001 OX=1391729 GN=MB EBAB_2034 PE=4 SV=1
METTLARRAHPTAMWADARTAIVLGLNYGPGHDPLPEMEDRSAGYISVYARGDDYHELIKGRLKQLAGIVAVRSGAEVKVFVDTAPLMEKPLAQRAGLGWQGKHTNLLSRTHGNWLFLGVILSAADYEPDPSEDEHCGSCRACLDACPTNAFPAPFQLDARRCLSYLTIEFAGPWPEEFRAAAGSRIYGCDDCLAVCPWNKFAQGAHEARLHARDSLSAPRLVDLAALDDASFRTLFAKSPVKRIGRDRFVRNVLYAIGNSGDPALIPSAERLLEDPDPVVRDAAGWALGRLRAGDVA

SEQ ID NO: 75222 - protein, 391 aa, Brevundimonas diminuta
  misc_feature (1)..(391): tr|A0A2D0AP32|A0A2D0AP32_BREDI Epoxyqueuosine reductase OS=Brevundimonas diminuta OX=293 GN=queG PE=4 SV=1
MAADPRIFIRQRAAELGFGVCRFASASDPWSAGEKLAHFIDAGRHGDMGWMETTLERRAHPTAMWDGAKTAIVLGMNYGPDEDPRPELEEASAGYISVYARGDDYHEVIKGRLKILAGQIAARLGQEVKVFVDTAPLMEKPLAQRAGLGWQGKHTNLLSRTHGNWLFLGTILTAAEIEADEAEVEHCGRCTACLDACPTQAFPAPFQIDARRCLSYLTIEYAGAWPHEFRIATGNRIYGCDDCLAACPWNKFAQEASETRLQARDALKSPPLADLLALDDPAFRALFAKSPVKRIGRDRFTRNALYAAGNSGEATLIGAVERLLDDPAPVVRGAAVWALSQLSPERFAELRETRRASETDEAVKQEWRPSPLAGEGGPRSGSDEGSRRPQT

SEQ ID NO: 75223 - protein, 375 aa, Brevundimonas diminuta
  misc_feature (1)..(375): tr|L1QIJ1|L1QIJ1_BREDI Putative iron-sulfur cluster-bin ding protein OS=Brevundimonas diminuta 470-4 OX=1035191 GN=HMPREF0185_02064 PE=4 SV=1
MAADPRIFIRQRAAELGFGVCRFASASEPWSAGERLAYFVDAGRHGDMGWMETTLERRAHPTAMWDGARTAIVLGMNYGPDEDPRPELEQASSGYISVYARGDDYHEVIKGRLKILAGQIAARLKQEVKVFVDTAPLMEKPLAQRAGLGWQGKHTNLLSRTHGNWLFLGVILTAAEIEPDEAETEHCGRCTACLDACPTKAFPAPFQIDARRCISYLTIEYAGAWPREFRLATGNRIYGCDDCLAACPWNKFAQSASEARLQARDALKSPPLTDLLALDDPAFRALFTKSPVKRIGRDRFIRNVLYAAGNSGDAALIASVEALLDDPAPVVRGAAAWALSRLSPERFAMERAARLASEPDADVRQEWSFSPCGRR

SEQ ID NO: 75224 - protein, 375 aa, Brevundimonas intermedia
  misc_feature (1)..(375): tr|A0A4Y9RZ03|A0A4Y9RZ03_9CAUL tRNA epoxyqueuosine(34) reductase QueG OS=Brevundimonas intermedia OX=74315 GN= queG PE=4 SV=1
MSDRLKTFIRQRAAELGFDVCRFASAADAWPAGERLRHFVDEGRHGDMEWMETTLDRRQHPTAMWDEARTAIVLGMNYGPDDNPLDQLADRSAGYISVYARGDDYHEVIKGRLKQLAGQIAARNGADIKVFVDTAPLMEKPLAQRAGMGWQGKHTNLLSRTHGNWLFLGTILTAAEIEPDAAETEHCGRCTACLDACPTKAFPAPFQLDARRCLSYLTIEFADPWPVEFRTLTGSRIYGCDDCLAVCPWNKFAQSAREIRLAPRPAFQSPRLHDLLALNDAAFRALFTKSPVKRIGRDRFLRNVLYAVGNSDDASLIAPTKALLSDPSPLVRGAAVWALSQLTPPGEFAALSDATDETDPQVLAEWRRAQTPQPA

SEQ ID NO: 75225 - protein, 371 aa, Brevundimonas naejangsanensis
  misc_feature (1)..(371): tr|A0A172Y7E6|A0A172Y7E6_9CAUL tRNA epoxyqueuosine(34) reductase QueG OS=Brevundimonas naejangsanensis OX=5889 32 GN=DA69_10490 PE=4 SV=1
MAADPRIFIRQRAAELGFGVCRFASASDPWSAGERLAYFVDAGRHGEMGWMETTLERRAHPTAMWDGARTAIVLGMNYGPDEDPRPELQEASAGYISVYARGDDYHEVIKGRLKILAGQIAARLGQEVKVFVDTAPLMEKPLAQRAGLGWQGKHTNLLSRTHGNWLFLGTILTAAEIEPDAAESEHCGRCTACLDACPTKAFPAPFQIDARRCLSYLTIEYAGAWPREFRLATGNRIYGCDDCLAACPWNKFAQSASEARLQARDALKSPPLIDLLALGDPAFRALFTKSPVKRIGRDRFIRNALYAAGNSGDAALVAPVEALLDDPAPVVRGAAIWALAQLAPERFETERAARLRQETDDEVKQEWSFSP

SEQ ID NO: 75226 - protein, 380 aa, Brevundimonas naejangsanensis
  misc_feature (1)..(380): tr|A0A494RDX6|A0A494RDX6_9CAUL tRNA epoxyqueuosine(34) reductase QueG OS=Brevundimonas naejangsanensis OX=5889 32 GN=queG PE=4 SV=1
MAADPRIFIRQRAAELGFGVCRFASASEPWSAGEKLAHFVEADRHGDMGWMETTLERRAHPTAMWDGARTAIVLGMNYGPDEDPRPELDQPSAGYISVYARGDDYHEVIKGRLKILAGQIAARLGQEVKVFVDTAPLMEKPLAQRAGLGWQGKHTNLLSRTHGSWLFLGVILTAAEIEADEAESEHCGRCTACLDACPTNAFPAPFQIDARRCLSYLTIEYAGAWPREFRVATGNRIYGCDDCLAACPWNKFAQAASEARLQAREALKSPPLAELLALDDPAFRTLFAKSPVKRIGRDRFLRNVLYAAGNSGETGLVGAVERLLDDAASMVRGAATWALGRLAPERFEAAREARLAGEADEAVREEWRATPLPPRPGEGG

SEQ ID NO: 75227 - protein, 373 aa, Brevundimonas nasdae
  misc_feature (1)..(373): tr|A0A0B4D1B2|A0A0B4D1B2_9CAUL 4Fe-4S ferredoxin OS=Bre vundimonas nasdae OX=172043 GN=RM53_08775 PE=4 SV=1
MPRPVSDRLKTFIRQRAAELGFDVCRFASAADAWPAGERLRHFVDEGRHGDMEWMETTLDRRQHPTAMWDEARTAIVLGMNYGPEQNPLDQLADRSAGYISVYARGDDYHEVIKGRLKQLAGQIAARNGADIKVFVDTAPLMEKPLAQRAGLGWQGKHTNLLSRSHGNWLFLGTILTAAEIEPDAAETEHCGRCTACLDACPTKAFPAPFQLDARRCLSYLTIEFADPWPVEFRTLTGSRIYGCDDCLAVCPWNKFAQEAREIRLAPRPAFESPRLHDLLALDDAAFRALFTKSPVKRIGRDRFLRNVLYAVGNSGDASLVAPTKALLADPSPLVRGAAVWALSRLMPADAFATLAEATKETDPVVLTEWRRA

SEQ ID NO: 75228 - protein, 375 aa, Brevundimonas sp.
  misc_feature (1)..(375): tr|A0A358IYB0|A0A358IYB0_9CAUL tRNA epoxyqueuosine(34) reductase QueG OS=Brevundimonas sp. OX=1871086 GN=queG PE=4 SV=1
MAADPRIFIRQRAAELGFGVCRFASASEPWSAGERLAYFVDAGRHGDMGWMETTLERRAHPTAMWDGARTAIVLGMNYGPDEDPRPELEQASSGYISVYARGDDYHEVIKGRLKILAGQIAARLKEEVKVFVDTAPLMEKPLAQRAGLGWQGKHTNLLSRTHGNWLFLGAILTAADIEPDEAETEHCGRCTACLDACPTQAFPAPFQIDARRCISYLTIEYAGAWPREFRIAAGNRIYGCDDCLAACPWNKFAQSASEARLQARDALKSPPLTDLLALDDPAFRALFTRSPVKRIGRDRFIRNALYAAGNSGDAALIASVEALLDDPAPVVRGASAWALSRLSPERFAMERAARLASETDEEVRHEWSFSPCGRR

SEQ ID NO: 75229 - protein, 391 aa, Brevundimonas sp.
  misc_feature (1)..(391): tr|A0A1R1IAR4|A0A1R1IAR4_9CAUL tRNA epoxyqueuosine(34) reductase QueG OS=Brevundimonas sp. ZS04 OX=1906854 GN= BJP32_14135 PE=4 SV=1
MAADPRIFIRQRAAELGFGVCRFASASDPWSAGEKLAHFVDAGRHGDMGWMETTLERRAHPTAMWDGAKTAIVLGMNYGPDEDPRPELEEASAGYISVYARGDDYHEVIKGRLKILAGQIAARLGQEVKVFVDTAPLMEKPLAQRAGLGWQGKHTNLLSRTHGNWLFLGTVLTAAEIEADEAEVEHCGRCTACLDACPTQAFPAPFQIDARRCLSYLTIEYAGAWPREFRIATGNRIYGCDDCLAACPWNKFAQEASETRLQARDALKSPPLADLLALDDPAFRALFTKSPVKRIGRDRFIRNALYAAGNSSEATLIEAVERLLDDPAPVVRGAAVWALSQLSPERFAELRETRRASETDEAVKQEWRPSPLAGEGGPRSGSDEGSRRPQT

SEQ ID NO: 75230 - protein, 384 aa, Brevundimonas subvibrioides
  misc_feature (1)..(384): tr|A0A258FR43|A0A258FR43_9CAUL tRNA epoxyqueuosine(34) reductase QueG OS=Brevundimonas subvibrioides OX=74313 GN=B7Z01_03605 PE=4 SV=1
MSDPRDILRAKAADLGFDVCRFASASEPWTAGERLAHFVEAGRHGDMGWMETTLERRAHPTAMWQGARTAMVLGMNYGSGRDPLPEMEDRSAAYISVYARGDDYHEVIKGRLKTLAGQVAARLGAAHLPSEVKVFVDTAPLMEKPLAQRAGLGWQGKHTNLLSREHGNWLFLGVILTAAEIEADAPEAEHCGSCTACLTACPTNAFPAPFQLDARRCLSYLTIEHAGPWPVEFRAAAGSRIYGCDDCLAVCPWNKFAETAREARLTAREALVSPRLADLAALDDAAFRALFSKSPIKRIGRDRFMRNVLYAIGNSGDAALVDSAMRLLNDPSPLVRGAAVWALSRLLDPDAFEGVRDLRLAGEDDKGVRSEWHHHSPSPAGEGG

SEQ ID NO: 75231 - protein, 371 aa, Brevundimonas subvibrioides
  misc_feature (1)..(371): tr|D9QFD5|D9QFD5_BRESC 4Fe-4S ferredoxin-type domain-co ntaining protein OS=Brevundimonas subvibrioides (strain ATCC 15264 / DSM 4735 / LMG 14903 / NBRC 16000 / CB 81 ) OX=633149 GN=Bresu_3144 PE=4 SV=1
MSDPRDILRVQAAGLGFSVCRFASASEPWTAGERLAHFVAAGRHGDMGWMETTLERRAHPTAMWPDARTAIVLGMNYGPDADPLPEMSDRSAGYISVYARGDDYHEVIKGRLKTLAGQVAARLGAEVKVFVDTAPLMEKPLAQRAGLGWQGKHTNLLSREHGNWLFLGVILTAAEIEPDAAEAEHCGSCTACLTACPTNAFPGPFQLDARRCLSYLTIEHAGPWPVEFRALTGARIYGCDDCLAVCPWNKFAQGGREARLAAREASISPRLEDLAALDDPAFRALFSKSPIKRIGRDRFVRNVLYAIGNSGDAALVAVASRLTADASPLVRGAAVWALSRLLDERAFADLRLSGQAGEADAGVLAEWARAA

SEQ ID NO: 75232 - protein, 391 aa, Brevundimonas vancanneytii
  misc_feature (1)..(391): tr|A0A4P1KHL0|A0A4P1KHL0_9CAUL Epoxyqueuosine reductase OS=Brevundimonas vancanneytii OX=1325724 GN=queG PE=4 SV=1
MAADPRIFIRQRAAELGFGVCRFASASDPWSAGEKLAHFVDAGRHGDMGWMETTLERRAHPTAMWDGAKTAIVLGMNYGPDEDPRPELEEASAGYISVYARGDDYHEVIKGRLKILAGQIAARLGQEVKVFVDTAPLMEKPLAQRAGLGWQGKHTNLLSRTHGNWLFLGTILTAAEIEADEAEVEHCGRCTACLDACPTQAFPAPFQIDARRCLSYLTIEYAGAWPREFRIATGNRIYGCDDCLAACPWNKFAQEASETRLQARDALKSPPLADLLALDDPAFRALFTKSPVKRIGRDRFIRNALYAAGNSGEATLIGAVERLLDDPAPVVRGAAVWALSQLSPERFAGLRETRRASETDEAVKQEWRPSPLAGEGGPRSGSDEGSRRPQT

SEQ ID NO: 75233 - protein, 391 aa, Brevundimonas vesicularis
  misc_feature (1)..(391): tr|A0A2X1BSB9|A0A2X1BSB9_BREVE Epoxyqueuosine reductase OS=Brevundimonas vesicularis OX=41276 GN=queG PE=3 SV= 1
MRRATSPLRREETSCYPPPVSDRLKTFIRQRAAELGFDVCRFASAADAWLAGERLRRFVDEGRHGDMEWMETTLDRRQHPTAMWDEARTAIVLGMNYGPEQNPLDQLADRSAGYISVYARGDDYHEVIKGRLKQLAGQIAARNGADIKVFVDTAPLMEKPLAQRAGLGWQGKHTNLLSRTHGNWLFLGTILTAAEIEADAAETEHCGRCTACLDACPTKAFPAPFQLDARRCLSYLTIEFAGPWPVEFRTLTGSRIYGCDDCLAVCPWNKFAQEAREIRLAPRPAFESPRLHDLLALDDAAFRALFNKSPVKRIGRDRFLRNVLYAVGNSGDATLIAPTQALLADPSALVRGAAVWALSELMPAGAFATLAEATTETDAHVLSEWRRLEPT

SEQ ID NO: 75234 - protein, 369 aa, Brevundimonas vesicularis
  misc_feature (1)..(369): tr|A0A1Z3U777|A0A1Z3U777_BREVE Epoxyqueuosine reductase OS=Brevundimonas vesicularis OX=41276 GN=queG PE=3 SV= 1
MSDRLKTFIRQRSAELGFDVCRFASAADAWPAGERLRHFVDEGRHGDMEWMETTLDRRQHPTAMWDEARTAIVLGMNYGPENNPLDQLADRSAGYISVYARGDDYHEVIKGRLKQLAGQIAARNGADIKVFVDTAPLMEKPLAQRAGLGWQGKHTNLLSRTHGNWLFLGTILTAAEIEPDAAETEHCGRCTACLDACPTNAFPAPFQLDARRCLSYLTIEFAGPWPEEFRTLTGSRIYGCDDCLAVCPWNKFAQEAREIRLAPRPAFQSPRLHDLLALDDAAFRALFTKSPVKRIGRDRFLRNVLYAVGNSDDASLIAPTKALLDDPSPLVRSAAVWALSQMTPPDDFAALAKSTTETDPQVLSEWRRA

SEQ ID NO: 75235 - protein, 351 aa, Brevundimonas viscosa
  misc_feature (1)..(351): tr|A0A1I6T568|A0A1I6T568_9CAUL Epoxyqueuosine reductase OS=Brevundimonas viscosa OX=871741 GN=SAMN05192570_297 3 PE=4 SV=1
MARDPRIFIRERAAALGFDVCRFGSASEPWSAGERLAHFVEDGRHGDMGWMETTLERRAHPTSMWEGARTAIVLGLNYGPGHDPLPELADRSAGYLSVYARGDDYHELIKGRLKTLAGQIAARTGEEVKVFVDTAPLMEKPLAQRAGLGWQGKHTNLLSRDHGNWLFLGVILSAATFEPDEAETQHCGSCTACLDACPTNAFPAPFQLDARRCLSYLTIEFAGPWPEDFRVATGNRIYGCDDCLAICPWNKFAAESREGRLQAREALLSPRLADLAALDDAAFRALFSKSPVKRIGRDRFVRNVLYAIGNSRDAALVPAAEALMDDPDPVVRDAAAWAVARLRSLSHRERA

SEQ ID NO: 75236 - protein, 379 aa, Brochothrix campestris
  misc_feature (1)..(379): tr|W7CNV3|W7CNV3_9LIST YhbA protein OS=Brochothrix camp estris FSL F6-1037 OX=1265861 GN=BCAMP_08831 PE=4 SV=1
MVDTLKDEIKAYAKTIGIQKIGFTTADYFQTLEKRLSFAQEHDLLTGFEHPVIAERVNPSLIFEQPQSIIAIALAYPNQMDNTLRSKRGEWRGVFARASWGVDYHTVLREKLALLEAFIKTKVPEARTKSMVDTGELSDVAVAERAGIGWRGKNTLLITPEYGSFVYLGEMITNIAFEPDEPMGDQCGECTQCIKACPTGALLGDGKMNGKECLSYQTQTKGMMPERFRDKLHNRLYGCDTCQVVCPYNRGKDFHLHPAMEPDEAKVKPLLKPLLTISNREFKETFGPMAGSWRGKKPLQRNAILILGRYKDETAIPDLVNCLLADPRPVIRGTAAYALAKIGGHIALEALQTAQQEETDDEARAEITAALLNLSQKEG

SEQ ID NO: 75237 - protein, 382 aa, Brochothrix thermosphacta
  misc_feature (1)..(382): tr|A0A1D2KBD5|A0A1D2KBD5_BROTH Epoxyqueuosine reductase OS=Brochothrix thermosphacta OX=2756 GN=queG PE=4 SV=1
MVNAQLKAEIKAYAQSIGVQKIGFTHADYFQTLEKRLTFAAEHDLLTGFEHPVIKERVDPSVIFEEPRSIIAIALAYPNQTDNNLRSKRGEWRGVFARASWGVDYHTILREKLALIEAFIKEKVPTARFKSMVDTGELSDVAVAERAGIGWRGKNTLLITPEFGSFVYLGEMITNLEFEADEPMADGCGECTQCIKACPTGALLGEGRMDGKECLSYQTQTKGMMPERFREKLHNRLYGCDTCQVVCPYNRGKDFHLHPEMEPEEAKIKPLLKPLLTISNREFKETFGPMAGSWRGKKPLQRNAILILGRYKDQTAVPDLVNCLLEDPRPVIRGTAAYSLSKIGGGIAYDALIAAEKEETDAEAYQEISKALLQLSEKEGSY

SEQ ID NO: 75238 - protein, 398 aa, Brucella abortus
  misc_feature (1)..(398): tr|A0A4Z1PGK9|A0A4Z1PGK9_BRUAO Epoxyqueuosine reductase OS=Brucella abortus OX=235 GN=queG PE=3 SV=1
MATSTSDSGQIAENNTPVRQKPALEKELRLKRFLIEEAKAAGFDAIAFTTPDAIPQAPQRLRQYISEGCHADMLWMEETEERRANPSVLWPEVRSIMVLAMNYGPDTNPLAILDKKDRAAISVYAQNRDYHDIIKGKFKHVASRFSARAGQDVKVFVDTAPVMEKPLAEAAGLGWQGKHTNLVSRELGSWLFLGSIFTTAQIPPDEPDHDHCGSCHACLDICPTGAFPAPYRVDARRCISYLTIENKGPIPLEFRKPMGNRIYGCDDCLSICPWNKFAQVTSEMKLKARDDLKAPHLKDLLVLDDPSFRMLFSGSPVKRIGRDRFIRNVLIATGNSGDITLLPQVEALLEDPAPVVRGAAVWALKQLASPQHIADQQMRLATREEDATVQAEWTMETH

SEQ ID NO: 75239 - protein, 404 aa, Brucella abortus
  misc_feature (1)..(404): tr|C4IWK1|C4IWK1_BRUAO Epoxyqueuosine reductase OS=Bruc ella abortus str. 2308 A OX=641140 GN=queG PE=3 SV=1
MPRWLIMATSTSDSGQIAENNTPVRQKPALEKELRLKRFLIEEAKAAGFDAIAFTTPDAIPQAPQRLRQYISEGCHADMLWMEETEERRANPSVLWPEVRSIMVLAMNYGPDTNPLAILDKKDRAAISVYAQNRDYHDIIKGKFKHVASRFAARAGQDVKVFVDTAPVMEKPLAEAAGLGWQGKHTNLVSRELGSWLFLGSIFTTAQIPPDEPDHDHCGSCHACLDICPTGAFPAPYRVDARRCISYLTIENKGPIPLEFRKPMGNRIYGCDDCLSICPWNKFAQVTSEMKLKARDDLKAPHLKDLLVLDDPSFRMLFSGSPVKRIGRDRFIRNVLIATGNSGDITLLPQVEALLEDPAPVVRGAAVWALKQLASPQHIADQQMRLATREEDATVQAEWTMETH

SEQ ID NO: 75240 - protein, 398 aa, Brucella canis
  misc_feature (1)..(398): tr|A9MCX1|A9MCX1_BRUC2 Epoxyqueuosine reductase OS=Bruc ella canis (strain ATCC 23365 / NCTC 10854) OX=483179 G N=queG PE=3 SV=1
MATSTSDSGQIAENNTPVRQKPALEKELRLKRFLIEEAKAAGFDAIAFTTPDAIPQAPQRLRQYIAEGCHADMLWMEETEERRANPSVLWPEVRSIMVLAMNYGPDTNPLAILDKKDRAAISVYAQNRDYHDIIKGKLKHVASRFAARAGQDVKVFVDTAPVMEKPLAEAAGLGWQGKHTNLVSRELGSWLFLGSIFTTAQIPPDEPDHDHCGSCHACLDICPTGAFPAPYRVDARRCISYLTIENKGSIPLEFRKPMGNRIYGCDDCLSICPWNKFAQVTSEMKLKARDDLKAPHLKDLLVLDDPSFRMLFSGSPVKRIGRDRFIRNVLIATGNSGDITLLPQVEALLEDPAPVVRGAAVWALKQLASPQHIADQQMRLATREEDATVQAEWTMETH

SEQ ID NO: 75241 - protein, 404 aa, Brucella ceti
  misc_feature (1)..(404): tr|C0GB21|C0GB21_9RHIZ Epoxyqueuosine reductase OS=Bruc ella ceti str. Cudo OX=595497 GN=queG PE=3 SV=1
MPRWLIMATSTSDSGQIAENNTPVRQKPALEKELRLKRFLIEEAKAAGFDAIAFTTPDAIPQAPQRLRQYIAEGCHADMLWMEETEERRANPSVLWPEVRSIMVLAMNYGPDTNPLAILDKKDRAAISVYAQNRDYHDIIKGKLKHVASRFAARAGQDVKVFVDTAPVMEKPLAEAAGLGWQGKHTNLVSRELGSWLFLGSIFTTAQIPPDEPDHDHCGSCHACLDICPTGAFPAPYRVDARRCISYLTIENKGPIPLEFRKPMGNRIYGCDDCLSICPWNKFAQVTSEMKLKARDDLKAPHLKDLLVLDDPSFRMLFSGSPVKRIGRDRFIRNVLIATGNSGDITLLPQVEALLEDPAPVVRGAAVWALKQLASPQHIADQQMRLATREEDATVQAEWTMETH

SEQ ID NO: 75242 - protein, 398 aa, Brucella melitensis
  misc_feature (1)..(398): tr|A0A4P6KRE5|A0A4P6KRE5_BRUML Epoxyqueuosine reductase OS=Brucella melitensis OX=29459 GN=queG PE=3 SV=1
MATSTSDSGQIAENNTPVRQKPALEKELRLKRFLIEEAKAAGFDAIAFTTPDAIPQAPQRLRQYIAEGCHADMLWMEETEERRANPSVLWPEVRSIMVLAMNYGPDTNPLAILDKKDRAAISVYAQNRDYHDIIKGKLKHVASRFAARAGQDVKVFVDTAPVMEKPLAEAAGLGWQGKHTNLVSRELGSWLFLGSIFTTAQIPPDEPDHDHCGSCHACLDICPTGAFPAPYRVDARRCISYLTIENKGPIPLEFRKPMGNRIYGCDDCLSICPWNKFAQVTSEMKLKARDDLKAPHLKDLLVLDDPSFRMLFSGSPVKRIGRDRFIRNVLIATGNSGDITLLPQVEALLEDPAPVVRGAAVWALKQLASPQHIADQQMRLATREEDATVQAEWTMETH

SEQ ID NO: 75243 - protein, 398 aa, Brucella melitensis; identical to SEQ ID NO: 75242
  misc_feature (1)..(398): tr|C0RMI4|C0RMI4_BRUMB Epoxyqueuosine reductase OS=Bruc ella melitensis biotype 2 (strain ATCC 23457) OX=546272 GN=queG PE=3 SV=1

SEQ ID NO: 75244 - protein, 398 aa, Brucella microti
  misc_feature (1)..(398): tr|C7LJG3|C7LJG3_BRUMC Epoxyqueuosine reductase OS=Bruc ella microti (strain CCM 4915) OX=568815 GN=queG PE=3 S V=1
MATSTSDSGQIAENNTPVRQKPALEKELRLKRFLIEEAKAAGFDAIAFTTPDAIPQAPQRLRQYIAEGCHADMLWMEETEERRANPSVLWPEVRSIMVLAMNYGPDTNPLAILDKKDRAAISVYAQNRDYHDIIKGKLKHVASRFAARAGQDVKVFVDTAPVMEKPLAEAAGLGWQGKHTNLVSRELGSWLFLGSIFTTAQIPPDEPDHDHCGSCHACLDICPTGAFPAPYRVDARRCISYLTIENKGPIPLEFRKPMGNRIYGCDDCLSICPWNKFAQVTSEMKLKARDDLKAPHLKDLLVLDDPSFRMLFSGSPVKRIGRDRFIRNVLIATGNSGDITLLPQVEALLEDPAPVVQGAAVWALKQLASPQHIADQQMRLATREEDATVQAEWTMETH

SEQ ID NO: 75245 - protein, 398 aa, Brucella neotomae; identical to SEQ ID NO: 75242
  misc_feature (1)..(398): tr|A0A381BZ92|A0A381BZ92_BRUNE Epoxyqueuosine reductase OS=Brucella neotomae OX=29460 GN=queG PE=3 SV=1

SEQ ID NO: 75246 - protein, 404 aa, Brucella ovis
  misc_feature (1)..(404): tr|A0A0H3AU06|A0A0H3AU06_BRUO2 Epoxyqueuosine reductase OS=Brucella ovis (strain ATCC 25840 / 63/290 / NCTC 10 512) OX=444178 GN=queG PE=3 SV=1
MPRWLIMATSTSDSGQIAENNTPVRQKPALKKELRLKRFLIEEAKAAGFDAIAFTTPDAIPQAPQRLRQYIAEGCHADMLWMEETEERRANPSVLWPEVRSIMVLAMNYGPDTNPLAILDKKDRAAISVYAQNRDYHDIIKGKLKHVASRFAARAGQDVKVFVDTAPVMEKPLAEAAGLGWQGKHTNLVSRELGSWLFLGSIFTTAQIPPDEPDHDHCGSCHACLDICPTGAFPAPYRVDARRCISYLTIENKGPIPLEFRKPMGNRIYGCDDCLSICPWNKFAQVTSEMKLKARDDLKAPHLKDLLVLDDPSFRMLFSGSPVKRIGRDRFIRNVLIATGNSGDITLLPQVEALLEDPAPVVRGAAVWALKQLASPQHIADQQMRLATREEDATVQAEWTMETH

SEQ ID NO: 75247 - protein, 398 aa, Brucella ovis
  misc_feature (1)..(398): tr|N8LPF1|N8LPF1_BRUOV Epoxyqueuosine reductase OS=Bruc ella ovis IntaBari-2002-82-58 OX=1293916 GN=queG PE=3 S V=1
MATSTSDSGQIAENNTPVRQKPALKKELRLKRFLIEEAKAAGFDAIAFTTPDAIPQAPQRLRQYIAEGCHADMLWMEETEERRANPSVLWPEVRSIMVLAMNYGPDTNPLAILDKKDRAAISVYAQNRDYHDIIKGKLKHVASRFAARAGQDVKVFVDTAPVMEKPLAEAAGLGWQGKHTNLVSRELGSWLFLGSIFTTAQIPPDEPDHDHCGSCHACLDICPTGAFPAPYRVDARRCISYLTIENKGPIPLEFRKPMGNRIYGCDDCLSICPWNKFAQVTSEMKLKARDDLKAPHLKDLLVLDDPSFRMLFSGSPVKRIGRDRFIRNVLIATGNSGDITLLPQVEALLEDPAPVVRGAAVWALKQLASPQHIADQQMRLATREEDATVQAEWTMETH

SEQ ID NO: 75248 - protein, 398 aa, Brucella pinnipedialis; identical to SEQ ID NO: 75242
  misc_feature (1)..(398): tr|A0A0E1WUR0|A0A0E1WUR0_9RHIZ Epoxyqueuosine reductase OS=Brucella pinnipedialis M292/94/1 OX=520462 GN=queG PE=3 SV=1

SEQ ID NO: 75249 - protein, 398 aa, Brucella sp.
  misc_feature (1)..(398): tr|A0A1P8S7Z7|A0A1P8S7Z7_9RHIZ Epoxyqueuosine reductase OS=Brucella sp. 09RB8910 OX=1844051 GN=queG PE=3 SV=1
MATSTSDSGQIAENNTPVRQKPALEKELRLKRFLIEEAKAAGFDAIAFTTPDAIPQAPERLRQYIAEGCHADMLWMEETEERRANPSVLWPEVRSIMVLAMNYGPDTNPLAILDKKDRAAISVYAQNRDYHDIIKGKLKHVASRFAARAGQDVKVFVDTAPVMEKPLAEAAGLGWQGKHTNLVSRELGSWLFLGSIFTTAQIPPDEPDHDHCGSCHACLDICPTGAFPAPYRVDARRCISYLTIENKGPIPLEFRKPMGNRIYGCDDCLSVCPWNKFAQVTSEMKLKARDDLKAPRLKDLLVLDDPSFRTLFSGSPVKRIGRDRFIRNVLIATGNSGDITLLPQVEALLEDPAPVVRGAAVWALKQLASPQHIADQQMRLATREEDATVRAEWTMETH

SEQ ID NO: 75250 - protein, 398 aa, Brucella sp.
  misc_feature (1)..(398): tr|D6LTV1|D6LTV1_9RHIZ Epoxyqueuosine reductase OS=Bruc ella sp. NVSL 07-0026 OX=520448 GN=queG PE=3 SV=1
MATSTSDSGQIAENNTPVRQKPALEKELRLKRFLIEEAKAAGFDAIAFTTPDAIPQAPQRLRQYIAEGCHADMLWMEETEERRANPSVLWPEVRSIMVLAMNYGPDTNPLAILDKKDRAAISVYAQNRDYHDIIKGKLKHVASRFAARAGQDVKVFVDTAPVMEKPLAEAAGLGWQGKHTNLVSRELGSWLFLGSIFTTAQIPPDEPDHDHCGSCHACLDICPTGAFPAPYRVDARRCISYLTIENKGPIPLEFRKPMGNRIYGCDDCLSICPWNKFAQVTSEMKLKARDDLKAPHLKDLLVLDDPSFRMLFSGSPVKRIERDRFIRNVLIATGNSGDITLLPQVEALLEDPAPVVRGAAVWALKQLASPQHIADQQMRLATREEDATVQAEWTMETH

SEQ ID NO: 75251 - protein, 398 aa, Brucella suis; identical to SEQ ID NO: 75240
  misc_feature (1)..(398): tr|A0A4Z0F1X6|A0A4Z0F1X6_BRUSS Epoxyqueuosine reductase OS=Brucella suis OX=29461 GN=queG PE=3 SV=1

SEQ ID NO: 75252 - protein, 398 aa, Brucella suis; identical to SEQ ID NO: 75240
  misc_feature (1)..(398): tr|A0A0H3G8A9|A0A0H3G8A9_BRUSU Epoxyqueuosine reductase OS=Brucella suis biovar 1 (strain 1330) OX=204722 GN=q ueG PE=3 SV=1

SEQ ID NO: 75253 - protein, 381 aa, Brucellaceae bacterium
  misc_feature (1)..(381): tr|A0A3P1UMG6|A0A3P1UMG6_9RHIZ Epoxyqueuosine reductase OS=Brucellaceae bacterium VT-16-1752 OX=2487907 GN=que G PE=3 SV=1
MAISTSNSKTEKLKRFLIEEAKAVGFDAVAFTTPDAIPQAPERLRQYIADGHHADMLWMEETEERRANPGVLWPEVRSIMMLAMNYGPDTDPLAILDQKDRAAISVYAQNRDYHDIIKGKLKHVASRFAARAGQDVKVFVDTAPVMEKPLAEAAGLGWQGKHTNLVSRELGSWLFLGSIFTTAEIPPDEPDRDHCGSCRACLDACPTRAFPAPYRINAGRCISYLTIENKGPIPAEFRKVMGNRIYGCDDCLSVCPWNKFAQATSEMKLKARDDLKAPRLSDLLALDDPAFRALFSGSPVKRIGRDRFIRNVLIAAGNSGDTTLLPQIEALLGDAAPVVRGAAVWALKQLAEPGHVDALQKRLASTEEDATVQEEWNTETV

SEQ ID NO: 75254 - protein, 289 aa, Brumimicrobium salinarum
  misc_feature (1)..(289): tr|A0A2I0R6X6|A0A2I0R6X6_9FLAO tRNA epoxyqueuosine(34) reductase QueG OS=Brumimicrobium salinarum OX=2058658 G N=queG PE=4 SV=1
MYCGISKAEFLEEEAPHLAQWLKDNKNGKMAYMENHFDKRLDPRKLVPGAQSVVSLLFNYYPDQQQCADETYKISKYAYGEDYHFIIKDKLKTFFQEIQDEIGEVGGRVFTDSAPVMDKAWAKKSGLGWVGKNTNLIHPKNGSFFFIAELILDLPLNADGPIKDYCGTCTKCIDACPTDAITPYVVDGSKCISYLTIELKDEIPNQFKGKMENWMFGCDICQDVCPWNRFSKAHNVPRLKPHDDLLDMKRTDWEELTEEVFRKVFKKSAVKRTKFSGLKRNIDFIKSKN

SEQ ID NO: 75255 - protein, 332 aa, Bryobacterales bacterium
  misc_feature (1)..(332): tr|A0A3D1B0Y9|A0A3D1B0Y9_9BACT tRNA epoxyqueuosine(34) reductase QueG OS=Bryobacterales bacterium OX=2026791 G N=queG PE=4 SV=1
MSLAELRNIAAACGFELCGVTPARPAADAVWFERWAEAGYAGRMGYLTDYRKERRRDPRSLLPAAETVVCVGKLYNGPQAGHPQISRYAWGRDYHDVLRAGLEQLARALGEHEYKICVDTAPLLERSYAQLAGLGWIGKNTCLINQQAGSWFFLGEMLTSLRITGEPQLAADRCGTCTRCIDACPTQAILPLDGRRHSIDARLCIAYLTIELRGAVPEELRPAMGNRIFGCDICQDVCPWNARAPVTDEFAPLHPAQSLEQLAALTAEQFQAMYRDTPVPHARYTGFLRNVAIAMGNAAETRFRPALEELSRHSHPSVAESARWALGLLPSV

SEQ ID NO: 75256 - protein, 354 aa, Bryobacterales bacterium
  misc_feature (1)..(354): tr|A0A2E5FK41|A0A2E5FK41_9BACT tRNA epoxyqueuosine(34) reductase QueG OS=Bryobacterales bacterium OX=2026791 G N=queG PE=4 SV=1
MSTERIKARALEIGFDLVGISEARPTLEAAFYPEWIELGFAGNMSYLKGRRGDMRSDPRSLLPSANSVISVGIVYNTQHPYSTDVDFNGQGWVSRYAWGEDYHHVLKRRLQALVDILHKDLGAFETKICVDTAPLLERAYAHRSGLGWIGHNTCLINQQLGSWLFLGEVLTSLSLECDNPAAFRCGSCTRCIEACPTDALVPTGELEGPAYALDSNKCISYWSIELKGSLPESARAMMGEHLFGCDICQDVCPWNRRAAVTKADEFQPRNALPNLEEVASMTPEEFDRCFGDTPVERTRYRGFLRNVAVAMGNSGKEQFLELLYRMTDSPDPVIVEHALWAIDTLKDKIAVSKS

SEQ ID NO: 75257 - protein, 409 aa, Bryocella elongata
  misc_feature (1)..(409): tr|A0A1H5SM66|A0A1H5SM66_9BACT Epoxyqueuosine reductase OS=Bryocella elongata OX=863522 GN=SAMN05421819_0236 P E=4 SV=1
MTGEDRTWLVERALAAGFDLAGIAAVPAVESDAAVRLDARYAAWIAEGRAGGMEWLKRTDEAGQLVRGDVRRAFPWARSVLVCALEYGLQGAPRSIDAAEAGAGWIARYAWSGGAAEQQNGKAAEQQNGKAAEQQNSGTAEHGSAVPGGSDYHEVLLPRLKAVEAELKARFGEALETRCYVDTGPIVERAIAEWAGIGWVGKNACLLNQERGSWMLLGVIVTELELESAQWTLPAADRCGSCTRCIDACPTDALVAPRQMDASRCIAYLTIEHKGAIDEALREPMGRQVFGCDICQDVCPWNAKSARGPVVADWKRMPSREALINPDLAWLASMESRDFKQWFRGSPLERTGKKRLHRNVAIAMGNSGEARFVPQLETWAAGADEVLADAARWAMARIEALGQSGERRD

SEQ ID NO: 75258 - protein, 356 aa, Budvicia aquatica
  misc_feature (1)..(356): tr|A0A484ZEZ0|A0A484ZEZ0_9GAMM Epoxyqueuosine reductase OS=Budvicia aquatica OX=82979 GN=queG PE=3 SV=1
MGISDTDLTEEEPKLQAWLDKQYHGEMAWMARHGMLRARPHELHPGTLRVISVRMNYLPPAAAFAQTLKNPELGYISRYALGRDYHKVLRQRLKKLGEQIQAYCSEFDLNFRPFVDSAPIMERPLATKAGIGWTGKHSLIINREAGSWFFLGELLIDLPLPVDSPVEEECGRCVACMTICPTGAIVEPYTVDARRCISYLTIELEGAIPEELRPLMGNRIYGCDDCQMTCPWNKLSQLTDEADFYPRSYLYQPPLLELYSWDEPTFLHKTEGSPIRRIGYFRWLRNISVALGNAPYQADIISALEKRKGFSLLLDQHIDWAISQQMTKRNNAAIEIQQPKQKRLIRSVEKGLPRDA

SEQ ID NO: 75259 - protein, 381 aa, Budvicia aquatica
  misc_feature (1)..(381): tr|A0A2C6DKQ8|A0A2C6DKQ8_9GAMM Epoxyqueuosine reductase OS=Budvicia aquatica OX=82979 GN=queG PE=3 SV=1
MSHPLDFNRLAQDIKLWGQALGFQQVGISDTDLTEEEPKLQAWLDKQYHGEMAWMARHGMLRARPHELHPGTLRVISVRMNYLPPAAAFAQTLKNPELGYISRYALGRDYHKVLRQRLKKLGEQIQAYCSEFDLNFRPFVDSAPIMERPLATKAGIGWTGKHSLIINREAGSWFFLGELLIDLPLPVDSPVEEECGRCVACMTICPTGAIVEPYTVDARRCISYLTIELEGAIPEELRPLMGNRIYGCDDCQMTCPWNKLSQLTDEADFYPRSYLYQPPLLELYSWDEPTFLHKTEGSPIRRIGYFRWLRNISVALGNAPYQADIISALEKRKGFSLLLDQHIDWAISQQMTKRNNAAIEIQQPKQKRLIRSVEKGLPRDA

SEQ ID NO: 75260 - protein, 411 aa, Burkholderia ambifaria
  misc_feature (1)..(411): tr|A0A2S9KWB4|A0A2S9KWB4_9BURK Epoxyqueuosine reductase OS=Burkholderia ambifaria OX=152480 GN=queG PE=3 SV=1
MNRLPELAASDRPSTRTEGVAPCALDDATLTALATRIKAWGRELGFGAIGISDTDLSDAEAGLAAWLEAGYHGEMDYMAKHGTKRARPAELVAGTRRVISARLAYLPAQTLAADAPDASSGALVPHDWRARERARLDDPQAAVVSIYARGRDYHKVLRNRLQTLAERIEREIGAFGYRVFTDSAPVLEVELAQKAGVGWRGKHTLLLQRDAGSLFFLGEIYVDVPLPTDAQTAPDVAPETPGAHCGNCTRCIDACPTGAIVEPYRVDARRCISYLTIELKGSIPEALRPMIGNRVYGCDDCQLVCPWNKFAQAAPVADFDVRHGLDRATLVELFGWDADTFDTRMQGSAIRRIGHESWLRNLAVGLGNALRAPTDRLAPDARDAVIAALRARADDPSPIVREHVEWALRAA

SEQ ID NO: 75261 - protein, 411 aa, Burkholderia ambifaria
  misc_feature (1)..(411): tr|B1TAK8|B1TAK8_9BURK Epoxyqueuosine reductase OS=Burk holderia ambifaria MEX-5 OX=396597 GN=queG PE=3 SV=1
MNRLPELAASDRPSTRTEGAAPCALDDATLTALATRIKAWGRELGFGAIGISDTDLSDAEAGLAAWLEAGYHGEMDYMAKHGTKRARPAELVAGTRRVISARLAYLPAQTLAADAPDASAGALAPHDWRARERARLDDPQAAVVSIYARGRDYHKVLRNRLQTLAERIEGAIGAFGYRVFTDSAPVLEVELAQKAGVGWRGKHTLLLQRDAGSLFFLGEIYVDVPLPTDAQTAPDVAPETPGAHCGSCTRCIDACPTGAIVEPYRVDARRCISYLTIELKGSIPEPLRPMIGNRVYGCDDCQLVCPWNKFAQAAPVADFDVRHGLDRATLVELFGWDADTFDTRMQGSAIRRIGHESWLRNLAVGLGNALRAPADRLAPDARDAIVAALRARADDPSPIVREHVEWALRAA

SEQ ID NO: 75262 - protein, 407 aa, Burkholderia anthina
  misc_feature (1)..(407): tr|A0A103T8B1|A0A103T8B1_9BURK Epoxyqueuosine reductase OS=Burkholderia anthina OX=179879 GN=queG PE=3 SV=1
MNRLPERAASDRPSTRAEGAAPCALDDAALTALAARIRAWGRELGFGAIGISDTDLSDAEAGLAAWLEAGYHGEMDYMAKHGMKRARPAELVAGTRRVISVRLAYLPAQTLADDEPGALVPHDWRTRERARLDDPQAAVVSIYARGRDYHKVLRNRLQTLAERIEHEIGGFGYRVFTDSAPVLEVELAQKAGVGWRGKHTLLLQRDAGSLFFLGEIYVDLPLPTDARTSPDTAPETPGAHCGSCTRCIDACPTGAIVEPYRVDARRCISYLTIELKGSIPEPLRPMIGNRVYGCDDCQLVCPWNKFAQAAPVADFDVRHGLDRATLVELFAWDAGTFDTRMQGSAIRRIGYESWLRNLAVGLGNALRAGADRLSPAARDAIVAALRARADDPSPVVREHVEWALRAA

SEQ ID NO: 75263 - protein, 407 aa, Burkholderia anthina
  misc_feature (1)..(407): tr|A0A3P0BZ24|A0A3P0BZ24_9BURK Epoxyqueuosine reductase OS=Burkholderia anthina OX=179879 GN=queG PE=3 SV=1
MNRLPERAASDRPSTRAEGAAPCALDDAALTALAARIRAWGRELGFGAIGISDTDLSDAEAGLAAWLEAGYHGEMDYMAKHGMKRARPAELVAGTRRVISVRLAYLPAQTLADDEPGALVPHDWRARERARLDDPQAAVVSIYARGRDYHKVLRNRLQTLAERIEHEIGGFGYRVFTDSAPVLEVELAQKAGVGWRGKHTLLLQRDAGSLFFLGEIYVDLPLPTDARTSPDTAPETPGAHCGSCTRCIDACPTGAIVEPYRVDARRCISYLTIELKGSIPEPLRPMIGNRVYGCDDCQLVCPWNKFAQAAPVADFDVRHGLDRATLVELFAWDAGTFDTRMQGSAIRRIGYESWLRNLAVGLGNALRAGADRLSPAARDAIVAALRARADDPSPVVREHVEWALRAA

SEQ ID NO: 75264 - protein, 411 aa, Burkholderia cenocepacia
  misc_feature (1)..(411): tr|A0A3N8XWY4|A0A3N8XWY4_9BURK Epoxyqueuosine reductase OS=Burkholderia cenocepacia OX=95486 GN=queG PE=3 SV=1
MNRLPERTASDRPSTRAEGAAPCALDDAALTALAARIRAWGRELGFGAIGISDTDLSDAEAGLAAWLEAGYHGEMDYMAKHGMKRARPAELVAGTRRVISVRLAYLPAQTLAADAPGGEPGALAPHDWRARERARLDDPRAAVVSIYARGRDYHKVLRNRLQTLAERIEHEIGGFGYRVFTDSAPVLEVELAQKAGVGWRGKHTLLLQRDAGSLFFLGEIYVDLPLPTDAHTSPDSAPETPGAHCGSCTRCIDACPTGAIVEPYRVDARRCISYLTIELKGSIPEPLRPMIGNRVYGCDDCQLVCPWNKFAQAAPVADFDVRHGLDRATLVELFAWDGETFDTRMQGSAIRRIGYESWLRNLAVGLGNALRAGADRLAPSARDAIVAALRARADDPSPVVREHVEWALRAA

SEQ ID NO: 75265 - protein, 411 aa, Burkholderia cenocepacia
  misc_feature (1)..(411): tr|A2VVZ2|A2VVZ2_9BURK Epoxyqueuosine reductase OS=Burk holderia cenocepacia PC184 OX=350702 GN=queG PE=3 SV=1
MNRLPERAASDRPSTRDEGAAPCALDDAALTALAARIRAWGRELGFGAIGISDTDLSDAEAGLAAWLEAGYHGAMDYMAKHGMKRARPAELVAGTRRVISVRLAYLPAQTLAADAPAGEPGALVPHDWRARERARLDDPQAAVVSIYARGRDYHKVLRNRLQTLAERIEHEIGGFGYRVFTDSAPVLEVELAQKAGVGWRGKHTLLLQRDAGSLFFLGEIYVDLPLPTDAHTLPDTAPETPGAHCGSCTRCIDACPTGAIVEPYRVDARRCISYLTIELKGSIPEPLRPMIGNRVYGCDDCQLVCPWNKFAQAAPVADFDVRHGLDRATLVELFAWDAEAFDTRMQGSAIRRIGYESWLRNLAVGLGNALRAGADRLAPPARDAIVAALRARADDPSPVVREHVEWALRAA

SEQ ID NO: 75266 - protein, 411 aa, Burkholderia cepacia
  misc_feature (1)..(411): tr|A0A1B4PUD2|A0A1B4PUD2_BURCE Epoxyqueuosine reductase OS=Burkholderia cepacia OX=292 GN=queG PE=3 SV=1
MNRLPELAASDRPSTRAEGAAPCALDDAALTALAARIRAWGRELGFGAIGISDTDLSDAEAGLAAWLEAGYHGEMDYMAKHGMKRARPAELVAGTRRVISARLAYLPAQTLAAGAPGDEPGALAPHDWRARERARLDDPRAAVVSIYARGRDYHKVLRNRLQTLAERIEQAIGAFGYRVFTDSAPVLEVELAQKAGVGWRGKHTLLLQRDAGSLFFLGEIYVDVPLPTDAHTSPDTAPETPGAHCGSCTRCIDACPTGAIVEPYRVDARRCISYLTIELKGSIPEPLRPMIGNRVYGCDDCQLVCPWNKFAQAAPVADFDVRHGLDRATLVELFAWDADTFDARMQGSAIRRIGYESWLRNLAVGLGNALRAGEGRLAPQARDAIVAALRARADDPSPVVREHVEWALRAA

SEQ ID NO: 75267 - protein, 411 aa, Burkholderia cepacia
  misc_feature (1)..(411): tr|A0A0U4D8J0|A0A0U4D8J0_BURCE Epoxyqueuosine reductase OS=Burkholderia cepacia JBK9 OX=1395570 GN=queG PE=3 S V=1
MNRLPELAASDRPSTQAEGAAPCALDDAALTALAARIRAWGRELGFGAIGISDTDLSDAEAGLAAWLEAGYHGEMDYMAKHGMKRARPAELVAGTRRVISVRLAYLPAQTLADDAPGGEPGALVPHDWRARERARLDDPQAAVVSIYARGRDYHKVLRNRLQTLAERIEGEIGAFGYRVFTDSAPVLEVELAQKAGVGWRGKHTLLLQRDAGSLFFLGEIYVDLPLPADAHTSPDTAPETPGAHCGSCTRCIDACPTGAIVEPYRVDARRCISYLTIELKGSIPEALRPMIGNRVYGCDDCQLVCPWNKFAQAAPVADFDVRHGLDRATLVDLFAWDADTFDTRMQGSAIRRIGYESWLRNLAVGLGNALRVGPDRLAPPARDAIVAALRARADDPSPVVREHVEWALRAA

SEQ ID NO: 75268 - protein, 382 aa, Burkholderia contaminans
  misc_feature (1)..(382): tr|A0A250LEX7|A0A250LEX7_9BURK Epoxyqueuosine reductase OS=Burkholderia contaminans OX=488447 GN=queG PE=3 SV= 1
MTALAARIRAWGRELGFGAIGISDTDLSDAEAGLAAWLEAGYHGEMDYMAKHGMKRARPAELVAGTRRVISARLAYLPAETLAPDAAESGPGALALHDWRARERARLDDPQAAVVSIYARGRDYHKVLRNRLQTLAERIEQEIGAFGYRVFTDSAPVLEVELAQKAGVGWRGKHTLLLQRDAGSLFFLGEIYVDVPLPTDALTSPDTAPETPGAHCGSCTRCIDACPTGAIVEPYRVDARRCISYLTIELKGSIPEPLRPMIGNRVYGCDDCQLVCPWNKFAQAAPVADFDVRHGLDRATLVELFAWDADAFDTRMQGSAIRRIGYESWLRNLAVGLGNALRADAGRLTPQARDAIVAALRARADDPSPVVREHVEWALRAA

SEQ ID NO: 75269 - protein, 411 aa, Burkholderia contaminans
  misc_feature (1)..(411): tr|A0A3N8R645|A0A3N8R645_9BURK Epoxyqueuosine reductase OS=Burkholderia contaminans OX=488447 GN=queG PE=3 SV= 1
MNRLPELAASDRPSTRAEGAAPCALDDAALTALAARIRAWGRELGFGAIGISDTDLSDAEAGLAAWLEAGYHGEMDYMAKHGMKRARPAELVAGTRRVISARLAYLPAETLAADAPESEPGALALHDWRARERARLDDPQAAVVSIYARGRDYHKVLRNRLQTLAERIEQEIGAFGYRVFTDSAPVLEVELAQKAGVGWRGKHTLLLQRDAGSLFFLGEIYVDVPLPTDAHTSPDTAPETPGAHCGSCTRCIDACPTGAIVEPYRVDARRCISYLTIELKGSIPEPLRPMIGNRVYGCDDCQLVCPWNKFAQAAPVADFDVRHGLDRATLVELFAWDADAFDTRMQGSAIRRIGYESWLRNLAVGLGNALRADAGRLTPQARDAIVAALRARADDPSPVVREHVEWALRAA

SEQ ID NO: 75270 - protein, 438 aa, Burkholderia dabaoshanensis
  misc_feature (1)..(438): tr|A0A2N7VJQ2|A0A2N7VJQ2_9BURK Epoxyqueuosine reductase OS=Burkholderia dabaoshanensis OX=564714 GN=queG PE=3 SV=1
MKRSPEQAAHGARTLGEAEAGGGADDRAPPLDDAALAALARQIKAWGLELGFSAVGISDTDLSDAEAALTAWLEAGCHGEMDYMAKHGAKRARPAELVAGTRRVITARMAYLPAAAFSPEPDVSASSGEPRATGGDWRARELARLGDPAAAVVSIYARGRDYHKVMRQRLQQLAERIERVVGAYGYRVFTDSAPVLEVALAQKAGVGWRGKHTLLLERDAGSLFFLGEIYVDLALPADAQTDPERATREAGAHCGQCTRCIDACPTGAIVGPYRVDARRCISYLTIELKGSIPEPLRPLIGNRIYGCDDCQLVCPWNKFAQPAPVDDFDVRHGLDRATLADLFAWSAEEFDTRMQGSAIRRIGYERWLRNLAVAMGNALRAGLRPPSSAAPAPVHARAAEPAAPSSEARERIVQALRARAQDPSPLVREHVQWALQAA

SEQ ID NO: 75271 - protein, 411 aa, Burkholderia diffusa
  misc_feature (1)..(411): tr|A0A1B4BUJ1|A0A1B4BUJ1_9BURK Epoxyqueuosine reductase OS=Burkholderia diffusa OX=488732 GN=queG PE=3 SV=1
MNRLPELAASDRPSTRAEGAAPCALDDATLTALAARIRAWGRELGFGAIGISDTDLSDAEAGLAAWLEAGYHGEMDYMAKHGMKRARPAELVAGTRRVISARLAYLPAETLAVDTPDARSGALAPHDWRARERARLDDPQAAVVSIYARGRDYHKVLRNRLQTLAERIEREIGAFGYRVFTDSAPVLEVELAQKAGVGWRGKHTLLLQRDAGSLFFLGEIYVDVPLPTDAQTAPDVAPETPGAHCGSCTRCIDACPTGAIVEPYRVDARRCISYLTIELKGSIPEPLRPMIGNRVYGCDDCQLVCPWNKFAQAAPVADFDVRHGLDRATLVELFGWDADAFDTRMQGSAIRRIGYESWLRNLAVGLGNALRAPADRLAPDARDAIVAALRARADDPSPVVREHVEWALRAA

SEQ ID NO: 75272 - protein, 411 aa, Burkholderia dolosa
  misc_feature (1)..(411): tr|A2W7X7|A2W7X7_9BURK Epoxyqueuosine reductase OS=Burk holderia dolosa AU0158 OX=350701 GN=queG PE=3 SV=1
MNRLPELAASDGPSTRAEGAAPCALDDAALTALAARIRAWGHELGFGAIGISDTDLSDAEAGLAAWLEAGCHGEMDYMAKHGMKRARPAELVAGTRRVISVRLAYLPAETLAGDAHDETGGALAPRDWRARERARLDDPQAAVVSIYARGRDYHKVLRNRLQTLAERIERDIGAFGYRVFTDSAPVLEVELAQKAGVGWRGKHTLLLQRDAGSLFFLGEIYVDIPLPTDAQTSPDAAPETPGAHCGSCTRCIAACPTGAIVEPYRVDARRCISYLTIELKGSIPEPLRPMIGNRVYGCDDCQLVCPWNKFAQAAPVADFDVRHGLDRATLVDLFGWDAGTFDARMQGSAIRRIGYESWLRNLAVGLGNALRAPAERLAPAARDAIVAALRARADDPSPIVREHVEWALRAA

SEQ ID NO: 75273 - protein, 405 aa, Burkholderia gladioli
  misc_feature (1)..(405): tr|A0A2S4NUA0|A0A2S4NUA0_BURGA Epoxyqueuosine reductase OS=Burkholderia gladioli OX=28095 GN=queG PE=3 SV=1
MNRKPELAMMDAPSTQREGAAPRRLDDAALDALVVRIKAWGRELGFGAIGISDTDLSDAEAGLAAWLEAGCHGEMDYMAKHGMKRARPAELVAGTLRVISARLAYLPAETAAADVASKGGGWRARELARLEDPAAAVVSIYARGRDYHKVLRNRLQTLAERIEAEIGPFGYRVFTDSAPVLEVELAQKAGTGWRGKHTLLLQRDAGSLFFLGEIFVDLPLPTDAETSPATAPETPGSHCGSCTRCIDACPTGAIVEPYRVDARRCISYLTIELKGSIPESLRPLIGNRVYGCDDCQLVCPWNKFAQPAPVADFDVRHGLGSASLVDLFGWSAEQFDERMQGSAIRRIGHERWLRNLAVGLGNALRAPRERLGDETREAIVAALAARADDASELVREHVEWALQAA

SEQ ID NO: 75274 - protein, 405 aa, Burkholderia gladioli
  misc_feature (1)..(405): tr|F2L8U7|F2L8U7_BURGS Epoxyqueuosine reductase OS=Burk holderia gladioli (strain BSR3) OX=999541 GN=queG PE=3 SV=1
MNRKPELAMMDAPSTQGEGAAPRRLDDAALDALVVRIKAWGRELGFGAIGISDTDLSDAEAGLAAWLEAGCHGEMDYMAKHGMKRARPAELVAGTLRVISARLAYLPAETAAADAASAGGGWRARELARLEDPAAAVVSVYARGRDYHKVLRNRLQTLAERIEAEIGPFGYRVFTDSAPVLEVELAQKAGTGWRGKHTLLLQRDAGSLFFLGEIFVDLPLPTDAETSPATAPETPGSHCGSCTRCIDACPTGAIVEPYRVDARRCISYLTIELKGSIPESLRPLIGNRVYGCDDCQLVCPWNKFAQPAPVADFDVRHGLGSASLVELFGWSAEQFDQRMQGSAIRRIGHERWLRNLAVGLGNALRAPRERLGDETREAIVAALAARADDASELVREHVEWALQAA

SEQ ID NO: 75275 - protein, 405 aa, Burkholderia glumae
  misc_feature (1)..(405): tr|A0A2J9H7V0|A0A2J9H7V0_BURGL Epoxyqueuosine reductase OS=Burkholderia glumae OX=337 GN=queG PE=3 SV=1
MNRKPELAVIDAPASPSDGAAWRCLDEAALEALARRIRAWGRELGFGAIGISDADLSEAEAGLAAWLEAGCHGEMDYMAKHGMKRARPAELVAGTRRVISVRLAYLPAATAAAGAASNASGWRAHELARLEDPAAAVVSIYARGRDYHKVLRSRLQTLAERIEAEIGPFGYRVFTDSAPVLEVELAQKAGTGWRGKHTLLLQRDAGSLFFLGEIFVDVPLPTDAELHPEAAPETPGSHCGSCTRCLDACPTAAIVAPFRVDARRCISYLTIELKGSIPEALRPLIGNRVYGCDDCQLVCPWNKFAQAAPVADFDVRHGLDRASLVELFGWSATEFDERMQGSAIRRIGHERWLRNLAVGLGNALRAPAGRLTGDARAAIVAALESRAGDASALVREHVEWALRAA

SEQ ID NO: 75276 - protein, 405 aa, Burkholderia glumae; identical to SEQ ID NO: 75275
  misc_feature (1)..(405): tr|C5AC96|C5AC96_BURGB Epoxyqueuosine reductase OS=Burk holderia glumae (strain BGR1) OX=626418 GN=queG PE=3 SV =1

SEQ ID NO: 75277 - protein, 390 aa, Burkholderia insecticola
  misc_feature (1)..(390): tr|R4WST0|R4WST0_9BURK Epoxyqueuosine reductase OS=Burk holderia insecticola OX=758793 GN=queG PE=3 SV=1
MSRAFTREEEAALSELAQRIKAWGRELGFGAVGISDIDLTDAEKGLAEWLEAGYHGEMDYMAKHGMKRARPAELVAGTRRVITARMAYLPAQTLEKTGDESVLTADGQKNDWRAIEWTRLAQPAQANVSIYARGRDYHKVMRQRLQQLAERIEGEIGPFGYRAFTDSAPVLEVALAQKAGNGWRGKHTLLLDRDAGSLFFLGEIFVDVPLPVDPHPEQDGAHCGQCTRCIGACPTGAIVAPYRVDARRCISYLTIELHGSIPEDMRPLIGNRIYGCDDCQLVCPWNKFAQAAPVADFDVRHGLDRATLVELFAWSAADFDTRMQGSAIRRIGHERWLRNIAVAMGNALRASGLDAGERKAIVEALDARADDPSTLVREHVRWALAQGSRT

SEQ ID NO: 75278 - protein, 382 aa, Burkholderia lata
  misc_feature (1)..(382): tr|Q39DH9|Q39DH9_BURL3 Epoxyqueuosine reductase OS=Burk holderia lata (strain ATCC 17760 / DSM 23089 / LMG 2248 5 / NCIMB 9086 / R18194 / 383) OX=482957 GN=queG PE=3 S V=1
MTALAARIRAWGRELGFGAIGISDTDLSDAEAGLAAWLEAGYHGEMDYMAKHGMKRARPAELVAGTRRVISARLAYLPAETLAADAPESEPGTLALHDWRARERARLDDPQAAVVSIYARGRDYHKVLRNRLQTLAERIEQEIGAFGYRVFTDSAPVLEVELAQKAGVGWRGKHTLLLQRDAGSLFFLGEIYVDVPLPTDAHTSPDTAPETPGAHCGSCTRCIGACPTGAIVEPYRVDARRCISYLTIELKGSIPEPLRPMIGNRVYGCDDCQLVCPWNKFAQAAPVADFDVRHGLDRATLVELFAWDADTFDTRMQGSAIRRIGYESWLRNLAVGLGNALRADAGRLTPQAREAIVAALRARADDPSPVVREHVEWALRAV

SEQ ID NO: 75279 - protein, 411 aa, Burkholderia lata
  misc_feature (1)..(411): tr|A0A3G3H7T0|A0A3G3H7T0_BURL3 Epoxyqueuosine reductase OS=Burkholderia lata (strain ATCC 17760 / DSM 23089 / LMG 22485 / NCIMB 9086 / R18194 / 383) OX=482957 GN=que G PE=3 SV=1
MNRLPELAASDRPSTRDEGAASCALDDAALTALAARIRAWGRELGFGAIGISDTDLSDAEAGLAAWLEAGYHGEMDYMAKHGMKRARPAELVAGTRRVISVRLAYLPAETLAGDAPGEPAGALVPHDWRARERARLDDPQAAVVSIYARGRDYHKVLRNRLQTLAERIEQEIGAFGYRVFTDSAPVLEVELAQKAGVGWRGKHTLLLQRDAGSLFFLGEIYVDVPLPTDAHTSPDTAPETPGAHCGSCTRCIGACPTGAIVEPYRVDARRCISYLTIELKGSIPEPLRPMIGNRVYGCDDCQLVCPWNKFAQAAPVADFDVRHGLDRATLVELFAWDADTFDTRMQGSAIRRIGYESWLRNLAVGLGNALRADPGRLTPPARDAIVAALRARADDPSPVVREHVEWALRAA

SEQ ID NO: 75280 - protein, 411 aa, Burkholderia latens
  misc_feature (1)..(411): tr|A0A1B4NU50|A0A1B4NU50_9BURK Epoxyqueuosine reductase OS=Burkholderia latens OX=488446 GN=queG PE=3 SV=1
MNRLPELAASDTPSTRAEGAAPCALDDATLTALAARIRAWGRELGFGAIGISDTDLSDAEAGLAAWLEAGYHGEMDYMAKHGMKRARPAELVAGTRRVISARLAYLPAETLAADAPDAAAGALAPHDWRARERARVDDPQAAVVSIYARGRDYHKVLRNRLQTLAERIEREIGGFGYRVFTDSAPVLEVELAQKAGVGWRGKHTLLLQRDAGSLFFLGEIYVDIPLPTDAQTAPGTAPETPGAHCGSCTRCIDACPTGAIVEPYRVDARRCISYLTIELKGSIPEPLRPLIGNRVYGCDDCQLVCPWNKFAQAAPVADFDVRHGLDRATLVELFDWDADTFETRMQGSAIRRIGHESWLRNLAVGLGNALRAPRDRLAPDARDAIVAALRARAEDPSPVVREHVEWALRAA

SEQ ID NO: 75281 - protein, 409 aa, Burkholderia mallei
  misc_feature (1)..(409): tr|A0A3N4FW15|A0A3N4FW15_BURML Epoxyqueuosine reductase OS=Burkholderia mallei OX=13373 GN=queG PE=3 SV=1
MDRNPELAIADARPSQDGRAAPSRLDDAQLAELASRIKAWGRELGFGAIGISDTDLSEAEAGLAAWLEAGCHGEMDYMAKHGMKRARPAELVAGTRRVISARLAYLPAGTLDGAPDAQGARRDWRAREAARIADPQAAVVSVYARGRDYHKVLRNRLQTLAERIEAEIGVFGHRVFTDSAPVLEVELAQKAGVGWRGKHTLLLQRDAGSFFFLGEIYVDVPLPADAQTSPDAAPETPGAHCGSCTRCLGACPTGAIVAPYRVDARRCISYLTIELHGSIPEPLRPLIGNRVYGCDDCQLVCPWNKFAQAAPVADFDVRHGLDRASLVELFEWTAEQFDERMQGSAIRRIGYERWLRNLAVGLGNALRAAPGGIEPDARAAIVAALRARLDDPCVSALVREHVEWALRAA

SEQ ID NO: 75282 - protein, 409 aa, Burkholderia mallei; identical to SEQ ID NO: 75281
  misc_feature (1)..(409): tr|C4ARB3|C4ARB3_BURML Epoxyqueuosine reductase OS=Burk holderia mallei GB8 horse 4 OX=320390 GN=queG PE=3 SV=1

SEQ ID NO: 75283 - protein, 411 aa, Burkholderia metallica
  misc_feature (1)..(411): tr|A0A1B4HW41|A0A1B4HW41_9BURK Epoxyqueuosine reductase OS=Burkholderia metallica OX=488729 GN=queG PE=3 SV=1
MNRLPELAASDRPSTRAEGAAPCALDDAALTALAARIRAWGHELGFGAIGISDTDLSDAEAGLAAWLEAGYHGEMDYMAKHGMKRARPAELVAGTRRVISARLAYLPAETLAADARDGAPGALAPHDWRARERARLDDPQAAVVSIYARGRDYHKVLRNRLQTLAERIEQEIGAFGYRVFTDSAPVLEVELAQKAGVGWRGKHTLLLQRDAGSLFFLGEIYVDVPLPTDAHTSPDTAPETPGAHCGSCTRCIDACPTGAIVEPYRVDARRCISYLTIELKGSIPEPLRPMIGNRVYGCDDCQLVCPWNKFAQAAPVADFDVRHGLDRATLVELFAWDAHAFDTRMQGSAIRRIGYESWLRNLAVGLGNALRAGPDRLAPQARDAIVAALRARADDPSPVVREHVEWALRAA

SEQ ID NO: 75284 - protein, 404 aa, Burkholderia multivorans
  misc_feature (1)..(404): tr|A0A2S9LHF9|A0A2S9LHF9_9BURK Epoxyqueuosine reductase OS=Burkholderia multivorans OX=87883 GN=queG PE=3 SV=1
MNRLPELAASDRTSTRDEGAASCALDDAALTALAVRIRAWGRELGFGAIGISDTDLSDAEAGLAAWLEAGCHGEMDYMAKHGMKRARPAELVAGTRRVISARLAYLPADTLAGDASGAFDWRARERARLDDPQAAVVSIYARGRDYHKVLRNRLQTLAERIEREIGAFGHRVFTDSAPVLEVELAQKAGVGWRGKHTLLLQRDAGSLFFLGEIYVDIPVPTDAQTSPDAAPESPGAHCGSCTRCIDACPTGAIVEPYRVDARRCISYLTIELKGSIPEPLRPLIGNRVYGCDDCQLVCPWNKFAQAAPVADFDVRHGLDRATLVELFGWDAGEFDTRMQGSAIRRIGYESWLRNLAVGLGNALRAPAQRLAPEARDAIVAALRARADDPSPIVREHVEWALRAA

SEQ ID NO: 75285 - protein, 346 aa, Burkholderia multivorans
  misc_feature (1)..(346): tr|B9BTC4|B9BTC4_9BURK Putative iron-sulfur cluster-bin ding protein, degenerate OS=Burkholderia multivorans CG D2 OX=513052 GN=BURMUCGD2_0895 PE=4 SV=1
MPKQPRRLAGSRCHGEMDYMAKHGMKRARPAELVAGTRRVISARLAYLPADTLAGDASGAFDWRARERARLDDPQAAVVSIYARGRDYHKVLRNRLQTLAERIEREIGAFGHRVFTDSAPVLEVELAQKAGVGWRGKHTLLLQRDAGSLFFLGEIYVDIPVPTDAQTSSDAAPESPGAHCGSCTRCIDACPTGAIVEPYRVDARRCISYLTIELKGSIPEPLRPLIGNRVYGCDDCQLVCPWNKFAQAAPVADFDVRHGLDRATLVELFGWDAGEFDTRMQGSAIRRIGYESWLRNLAVGLGNALRAPAQRLAPEARDAIVAALRARADDPSPIVREHVEWALRAA

SEQ ID NO: 75286 - protein, 413 aa, Burkholderia novacaledonica
  misc_feature (1)..(413): tr|A0A2U3I6K2|A0A2U3I6K2_9BURK Epoxyqueuosine reductase OS=Burkholderia novacaledonica OX=1544861 GN=queG PE=3 SV=1
MNRLPEHSVEVTTASSDAAAESVSESRVFDIDENALAELAQRIKMWGRDLGFGAVGISDIDLTDAEKGLAEWLEAGYHGEMDYMAKHGMKRARPAELVAGTRRVITVRMAYLPMETLAKTGDESVATADGQKNDWRAIEWSRLSKPAEAMVSIYARGRDYHKVMRNRLQQLAERIEREIGPFGHRAFTDSAPVLEVALAQKAGNGWRGKHTLLLDRDAGSLFFLGEIFVDVPLPVDPDPEQEGAHCGQCTRCIGACPTGAIVAPYRVDARRCISYLTIELHGSIPEDMRPLIGNRVYGCDDCQLVCPWNKFAQAAPVADFDVRHGLDRATLVELFAWSAGDFDTRMQGSAIRRIGHERWLRNIAVAMGNALRASSLGAGERQAIVEALEARADDPSALVREHVLWALEQGKQT

SEQ ID NO: 75287 - protein, 407 aa, Burkholderia oklahomensis
  misc_feature (1)..(407): tr|A0A381BYY2|A0A381BYY2_9BURK Epoxyqueuosine reductase OS=Burkholderia oklahomensis OX=342113 GN=queG PE=3 SV =1
MDRIPELAVADARPSQDGRAAPSRLDDAKLAELASRIKAWGRELGFGAIGISDTELSDAEAGLAAWLEAGCHGEMDYMAKHGMKRARPAELVAGTRRVISARLAYLPAATLGDAPDSSAAPRDWRAREAARIADPQAAVVSVYARGRDYHKVLRNRLQTLAERIEAEIGAFGYRVFTDSAPVLEVELAQKAGVGWRGKHTLLLQRDAGSFFFLGEIYVDVPLPADAQTSPAAAPETPGAHCGSCTRCIGACPTGAIVAPYRVDARRCISYLTIELHGSIPEPLRPLVGNRVYGCDDCQLVCPWNKFAQAAPVADFDVRHGLDRASLVELFAWTAEQFDERMQGSAIRRIGYERWLRNLAVGLGNALRAAPGSVEPAARAAIVAALRARADDSSELVREHVEWALRAA

SEQ ID NO: 75288 - protein, 405 aa, Burkholderia plantarii
  misc_feature (1)..(405): tr|A0A0B6RZE8|A0A0B6RZE8_9BURK Epoxyqueuosine reductase OS=Burkholderia plantarii OX=41899 GN=queG PE=3 SV=1
MNRKPELAVIDAPASQSDGAAWRRLDDAALEALARRIRAWGRELGFGAIGISDTDLSDAEAGLAAWLEAGCHGEMDYMAKHGMKRARPAELVAGTRRVISARLAYLPAATVADGAASDAGGWRAHELARLEDPAAAVVSIYARGRDYHKVLRNRLQTLAERIEAEIGPFGYRVFTDSAPVLEVELAQKAGNGWRGKHTLLLQRDAGSLFFLGEIFVDVPLPTDAELHPEAAPETPGSHCGSCTRCLDACPTAAIVEPFRVDARRCISYLTIELKGSIPEAMRPLIGNRVYGCDDCQLVCPWNKFAQAAPVADFDVRHGLDRASLVELFGWSATEFDERMQGSAIRRIGYECWLRNLAVGLGNALRAPAGRVTDEARAAIVAALAARADDASGLVREHVEWALRAA

SEQ ID NO: 75289 - protein, 409 aa, Burkholderia pseudomallei
  misc_feature (1)..(409): tr|A0A3B6WA22|A0A3B6WA22_BURPE Epoxyqueuosine reductase OS=Burkholderia pseudomallei OX=28450 GN=queG PE=3 SV= 1
MDRNPEFAIADARPSQDGRAAPSRLDDAQLAELASRIKAWGRELGFGAIGISDTDLSEAEAGLAAWLEAGCHGEMDYMAKHGMKRARPAELVAGTRRVISARLAYLPAGTLDGAPDAQGARRDWRAREAARIADPQAAVVSVYARGRDYHKVLRNRLQTLAERIEAEIGAFGHRVFTDSAPVLEVELAQKAGVGWRGKHTLLLQRDAGSFFFLGEIYVDVPLPADAQTSPDAAPETPGAHCGSCTRCLGACPTGAIVAPYRVDARRCISYLTIELHGSIPEPLRPLIGNRVYGCDDCQLVCPWNKFAQAAPVADFDVRHGLDRASLVELFEWTAEQFDERMQGSAIRRIGYERWLRNLAVGLGNALRAAPGGIEPDARAAIVAALRARLDDPCVSALVREHVEWALRAA

SEQ ID NO: 75290 - protein, 409 aa, Burkholderia pseudomallei; identical to SEQ ID NO: 75289
  misc_feature (1)..(409): tr|B1HF52|B1HF52_BURPE Epoxyqueuosine reductase OS=Burk holderia pseudomallei S13 OX=320374 GN=queG PE=3 SV=1

SEQ ID NO: 75291 - protein, 411 aa, Burkholderia pseudomultivorans
  misc_feature (1)..(411): tr|A0A132EY93|A0A132EY93_9BURK Epoxyqueuosine reductase OS=Burkholderia pseudomultivorans OX=1207504 GN=queG P E=3 SV=1
MNRLPELAASDRPSTRAEGAAPCALDDATLTALAARIRAWGRELGFGAIGISDTDLSDAEAGLAAWLEAGCHGEMDYMAKHGMKRARPAELVAGTRRVISARLAYLPAQTLAGDAPDAAAGALAPRDWRARERARLDDPQAAVVSIYARGRDYHKVLRNRLQTLAERIEHEIGAFGYRVFTDSAPVLEVELAQKAGVGWRGKHTLLLQRDAGSLFFLGEIYVDIPLPTDAQSSPDAAPESPGAHCGSCTRCIDACPTGAIVEPYRVDARRCISYLTIELKGSIPEPLRPLIGNRVYGCDDCQLVCPWNKFAQAAPVADFDVRHGLDRATLVELFGWDADTFETRMQGSAIRRIGHESWLRNLAVGLGNALRAPAGQLAPAAREAIVAALRARADDPSPIVREHVEWALRAA

SEQ ID NO: 75292 - protein, 411 aa, Burkholderia pseudomultivorans
  misc_feature (1)..(411): tr|A0A132EB83|A0A132EB83_9BURK Epoxyqueuosine reductase OS=Burkholderia pseudomultivorans OX=1207504 GN=queG P E=3 SV=1
MNRLPELAASDRPSTRAEGAAPCALDDATLTALAARIRAWGRELGFGAIGISDTDLSDAEAGLAAWLEAGCHGEMDYMAKHGMKRARPAELVAGTRRVISARLAYLPAETRAVDAPDGTPGALAPRDWRARERARLDDPQAAVVSIYARGRDYHKVLRNRLQTLAERIEQEIGAFGYRVFTDSAPVLEVELAQKAGVGWRGKHTLLLQRDAGSLFFLGEIYVDIPLPTDAQRSPDAAPESPGAHCGSCTRCIDACPTGAIVEPYRVDARRCISYLTIELKGSIPERLRPLIGNRVYGCDDCQLVCPWNKFAQAAPVADFDVRHGLDRATLVELFGWDADTFETRMQGSAIRRIGHESWLRNLAVGLGNALRAPAGQLAPAARDAIVAALRARADDPSPIVREHVEWALRAA

SEQ ID NO: 75293 - protein, 411 aa, Burkholderia puraquae
  misc_feature (1)..(411): tr|A0A1X1PCV2|A0A1X1PCV2_9BURK Epoxyqueuosine reductase OS=Burkholderia puraquae OX=1904757 GN=queG PE=3 SV=1
MNRLPELAASDRPSTRAEGAAPCALDDAALTALAARIRAWGRELGFGAIGISDTDLSDAEAGLAAWLEAGYHGEMDYMAKHGMKRARPAELVAGTRRVISARLAYLPAETLAAGTPDGEPGAHALHDWRARERARLDDPQAAVVSIYARGRDYHKVLRNRLQTLAERIEQEIGAFGYRVFTDSAPVLEVELAQKAGVGWRGKHTLLLQRDAGSLFFLGEIYVDVPLPTDAHTSPDTAPETPGAHCGSCTRCIGACPTGAIVEPYRVDARRCISYLTIELKGSIPEPLRPMIGNRVYGCDDCQLVCPWNKFAQAAPVADFDVRHGLDRATLVELFAWDADTFDTRMQGSAIRRIGYESWLRNLAVGLGNALRADAGRLAPQARDAIVAALRARADDPSPVVREHVEWALRAA

SEQ ID NO: 75294 - protein, 411 aa, Burkholderia pyrrocinia
  misc_feature (1)..(411): tr|A0A2Z5MXX3|A0A2Z5MXX3_BURPY Epoxyqueuosine reductase OS=Burkholderia pyrrocinia OX=60550 GN=queG PE=3 SV=1
MNRLPELSASDKPSTRAEGAAPCALDDAALTALAARIRAWGRELGFGAIGISGTDLSDAEAGLAAWLEAGCHGEMDYMAKHGMKRARPAELVAGTRRVISVRLAYLPAETLDAGAPGGEPGALAPHDWRARERARLDDPQAAVVSIYARGRDYHKVLRNRLQTLAERIEGEIGAFGYRVFTDSAPVLEVELAQKAGVGWRGKHTLLLQRDAGSLFFLGEIYVDIPLPTDAHTSPDTAPETPGAHCGSCTRCIDACPTGAIVEPYRVDARRCISYLTIELKGSIPEPLRPMIGNRVYGCDDCQLVCPWNKFAQAAPVADFDVRHGLDRATLVELFAWDADAFDTRMQGSAIRRIGYESWLRNLAVGLGNALRTGADRLAPQARDAIVAALRARADDRSPVVREHVEWALRAA

SEQ ID NO: 75295 - protein, 411 aa, Burkholderia pyrrocinia
  misc_feature (1)..(411): tr|A0A318IKS4|A0A318IKS4_BURPY Epoxyqueuosine reductase OS=Burkholderia pyrrocinia OX=60550 GN=queG PE=3 SV=1
MNRLPELAASDRPSTHAEGAAPCALDDAALTALAARIRTWGRELGFGAIGISDTDLSDAEAGLAAWLEAGYHGEMDYMAKHGMKRARPAELVAGTRRVISVRLAYLPAETLAAGAPDGEPGALAPHDWRARERARLDDPQAAVVSIYARGRDYHKVLRNRLQTLAERIEREIGAFGYRVFTDSAPVLEVELAQKAGVGWRGKHTLLLQRDAGSLFFLGEIYVDIPLPTDAHTSPDTAPEAPGAHCGNCTRCIDACPTGAIVEPYRVDARRCISYLTIELKGSIPEPLRPMIGNRVYGCDDCQLVCPWNKFAQAAPVADFDVRHGLDRATLVELFGWDAEAFDTRMQGSAIRRIGYESWLRNLAVGLGNALRASADRLSPQARDAIVAALRARADDPSPVVREHVEWALRAA

SEQ ID NO: 75296 - protein, 407 aa, Burkholderia reimsis
  misc_feature (1)..(407): tr|A0A365QX05|A0A365QX05_9BURK Epoxyqueuosine reductase OS=Burkholderia reimsis OX=2234132 GN=queG PE=3 SV=1
MNRLPELAASDRPSTRAEGAAPCALDDAALTALAARIRAWGRELGFGAIGISDTDLSDAEAGLAAWLEAGYHGEMDYMAKHGMKRARPAELVAGTRRVISARLAYLPAQTLVDDAPDALVPHDWRARERSRLDDPQAAVVSIYARGRDYHKVLRNRLQTLAERIEREIGAFGYRVFTDSAPVLEVELAQKAGVGWRGKHTLLLQRDAGSLFFLGEIYVDVPLPTDAHTSPDTAPETPGAHCGSCTRCIDACPTGAIVEPYRVDARRCISYLTIELKGSIPEPLRPMIGNRVYGCDDCQLVCPWNKFAQAAPVADFDVRHGLDRASLVELFAWDADTFDTRMQGSAIRRIGYESWLRNLAVGLGNALRAGEGRLAPQAREAIVDALRARADDPSPVVREHVEWALRAA

SEQ ID NO: 75297 - protein, 411 aa, Burkholderia seminalis
  misc_feature (1)..(411): tr|A0A124Q9J8|A0A124Q9J8_9BURK Epoxyqueuosine reductase OS=Burkholderia seminalis OX=488731 GN=queG PE=3 SV=1
MNRLPELAASDRPSTRAEGAAPCALDDAALTALAARIRAWGRELGFGAIGISDTDLSDAEAGLAAWLEAGYHGEMDYMAKHGMKRARPAELVAGTRRVISVRLAYLPAETLAGDARGGAPGALVPHDWRARERARLDDPQAAVVSIYARGRDYHKVLRNRLQTLAERIEHEIGAFGYRVFTDSAPVLEVELAQKAGVGWRGKHTLLLQRDAGSLFFLGEIYVDLPLPTDAHTAPDAAPETPGAHCGSCTRCIDACPTGAIVEPYRVDARRCISYLTIELKGSIPEALRPMIGNRVYGCDDCQLVCPWNKFAQAAPVADFDVRHGLDRATLVELFAWDADTFDTRMQGSAIRRIGYESWLRNLAVGLGNALRAGADRLAPPARDAIVAALRARADDPSPVVREHVEWALRAA

SEQ ID NO: 75298 - protein, 255 aa, Burkholderia singularis
  misc_feature (1)..(255): tr|A0A238HBL4|A0A238HBL4_9BURK Epoxyqueuosine (OQ) redu ctase QueG OS=Burkholderia singularis OX=1503053 GN=BSI N_5060 PE=4 SV=1
MRARLQTLAERIEAEIGAFGHRVFTDSAPVLEVELAQKAGIGWRGKHTLLLQRDAGSFFFLGEIYVDLPLPTDEQTSPSTAPETPGAHCGSCTRCIDACPTGAIVEPYRVDARRCISYLTIELHGSIPEPLRPLIGNRVYGCDDCQLVCPWNKFAQACAVADFDVRHGLDRASLVELFSWSAEQFDERMQGSAIRRIGHERWLRNLAVGLGNALRAPPARLEPAARAAIVDALRARAGDASALVREHVEWALRAA

SEQ ID NO: 75299 - protein, 424 aa, Burkholderia sp.
  misc_feature (1)..(424): tr|D5WCB9|D5WCB9_BURSC Epoxyqueuosine reductase OS=Burk holderia sp. (strain CCGE1002) OX=640511 GN=queG PE=3 S V=1
MNRSPKSPVSCTPASADDAARASDATSLFDEAALRALALDIKTWGRELGFGAIGISDTDLSAAEAPLAAWLEAGCHGEMDYMAKHGMKRARPAELVAGTRRVITVRIAYLPARTLEGEAPESMPEDVTPRASRATPRTRDWRAAEHARLADPSTAVVSIYARGRDYHKVMRQRLQQLADRIEAAIGPFGYRVFTDSAPVLEVELAQKAGIGWRGKHTLLLQRDVGSLFFLGEIYVDIPLPTDAETSPEAAPETPGSHCGSCARCIGACPTGAIVAPYKVDARRCISYLTIELKGSIPLELRPLIGNRVYGCDDCQLVCPWNKFAQAAPVADFDVRHGLDRASLVELFGWSAQEFDTRMQGSAIRRIGYECWLRNLAVGMGNALRAAPGTLDVDARAAIVRALKQRADDPSALVREHVEWALEAA

SEQ ID NO: 75300 - protein, 409 aa, Burkholderia sp.
  misc_feature (1)..(409): tr|A0A329DS55|A0A329DS55_9BURK Epoxyqueuosine reductase OS=Burkholderia sp. yr520 OX=1761779 GN=queG PE=3 SV=1
MEVTTASGNAAADSRAFDIHDEAALAELAQRIKMWGRELGFGAVGISDADLTDAEEGLASWLEAGYHGEMDYMAKHGMKRARPAELVAGTRRVITARIAYLPAATLAAKGDESVTTADGQRNDWRAIEWSRLADPTAAVVSIYARGRDYHKVMRNRLQQLAERIEGEIGGFGYRAFTDSAPVLEVALAQKAGVGWRGKHTLLLQRDAGSLFFLGEIYVDIPLPPDAVTNAQNAPEHDGAHCGQCTRCITACPTGAIVGPYRVDARRCISYLTIELKGSIPEDLRPLIGNRVYGCDDCQLVCPWNKFAQAAPVADFDVRHRLDRASLVELFRWNADDFDVRMQGSAIRRIGHERWLRNIAVAMGNALRAEIADDERARIIDALQARADDPSPVVREHVEWALRYGETPGE

SEQ ID NO: 75301 - protein, 411 aa, Burkholderia stabilis
  misc_feature (1)..(411): tr|A0A4Q2ARW2|A0A4Q2ARW2_9BURK Epoxyqueuosine reductase OS=Burkholderia stabilis OX=95485 GN=queG PE=3 SV=1
MNRLPELAASDTPSTQAEGAAPCALDDAALTALAARIRAWGRELGFGAIGISDTDLSDAEAGLAAWLEAGYHGEMDYMAKHGMKRARPAELVAGTRRVISVRLAYLPAETLAAAAPDGEPGALVPHDWRARERARLDDPQAAVVSIYARGRDYHKVLRNRLQTLAERIEHEIGAFGYRVFTDSAPVLEVELAQKAGVGWRGKHTLLLQRDAGSLFFLGEIYVDIPLPTDAHTSPDTAPETPGAHCGSCTRCIDACPTGAIVEPYRVDARRCISYLTIELKGSIPEPLRPMIGNRVYGCDDCQLVCPWNKFAQAAPVADFDVRHGLDRATLVELFAWDADAFDTRMQGSAIRRIGYESWLRNLAVGLGNALRADADRLAPQTRDAIVAALRARADDPSPVVREHVEWALRAA

SEQ ID NO: 75302 - protein, 411 aa, Burkholderia stabilis
  misc_feature (1)..(411): tr|A0A1D7ZGG2|A0A1D7ZGG2_9BURK Epoxyqueuosine reductase OS=Burkholderia stabilis OX=95485 GN=queG PE=3 SV=1
MNRLPELAASDRPSTHAEGAAPCALDDAALTALAARIRAWGRELGFGAIGISDTDLSDAEAGLAAWLEAGYHGEMDYMAKHGMKRARPAELVAGTRRVISVRLAYLPAETLAPSAPDGEPGALALHDWRARERARLDDPQAAVVSIYARGRDYHKVLRNRLQTLAERIELEIGAFGYRVFTDSAPVLEVELAQKAGVGWRGKHTLLLQRDAGSLFFLGEIYVDIPLPTDAHTSPDTAPETPGAHCGSCTRCIDACPTGAIVEPYRVDARRCISYLTIELKGSIPEPLRPMIGNRVYGCDDCQLVCPWNKFAQAAPVADFDVRHGLDRATLVELFAWDADAFDTRMQGSAIRRIGYESWLRNLAVGLGNALRASTERLSPQAREAIVAALRARADDPSPVVREHVEWALRAA

SEQ ID NO: 75303 - protein, 411 aa, Burkholderia stagnalis
  misc_feature (1)..(411): tr|A0A107A5Q5|A0A107A5Q5_9BURK Epoxyqueuosine reductase OS=Burkholderia stagnalis OX=1503054 GN=queG PE=3 SV=1
MNRLPELAASDTHSTEVEGAAPCVLDDAALTALAARIRAWGRELGFGAIGISDTDLSDAEAGLAAWLEAGCHGEMDYMAKHGMKRARPAELVAGTRRVISARLAYLPADTLAGDTQDDTSGALAPRDWRARELARLDDPQAAVVSIYARGRDYHKVLRNRLQTLAERIEGEIGAFGHRVFTDSAPVLEVELAQKAGIGWRGKHTLLLQRDAGSLFFLGEIYVDIPLPTDAQTAPDAAPETPGAHCGSCTRCIGACPTGAIVAPYRVDARRCISYLTIELKGSIPEPLRPLIGNRVYGCDDCQLVCPWNKFAQAAPVADFDVRHGLDRATLVELFGWRADEFDTRMQGSAIRRIGYECWLRNLAVGLGNALRAPAGRLAPGARDAIVAALRAREDDPSPLVREHVEWALRAA

SEQ ID NO: 75304 - protein, 411 aa, Burkholderia stagnalis
  misc_feature (1)..(411): tr|A0A3P0G8A6|A0A3P0G8A6_9BURK Epoxyqueuosine reductase OS=Burkholderia stagnalis OX=1503054 GN=queG PE=3 SV=1
MNRLPELAASDTHSTEVEGAAPCVLDDAALTALAARIRAWGRELGFGAIGISDTDLSDAEAGLAAWLEAGCHGEMDYMAKHGMKRARPAELVAGTRRVISARLAYLPADTLAGDTQDDTSGALAPRDWRARELARLDDPQAAVVSIYARGRDYHKVLRNRLQTLAERIEGEIGAFGHRVFTDSAPVLEVELAQKAGIGWRGKHTLLLQRDAGSLFFLGEIYVDIPLPTDAQTAPDAAPETPGAHCGSCTRCIGACPTGAIVAPYRVDARRCISYLTIELKGSIPEPLRPLIGNRVYGCDDCQLVCPWNKFAQAAPVADFDVRHGLDRATLVELFGWSADEFDTRMQGSAIRRIGHECWLRNLAVGLGNALRAPAGRLAPGARDAIVAALRAREHDPSPLVREHVEWALRAA

SEQ ID NO: 75305 - protein, 411 aa, Burkholderia territorii
  misc_feature (1)..(411): tr|A0A106E3G0|A0A106E3G0_9BURK Epoxyqueuosine reductase OS=Burkholderia territorii OX=1503055 GN=queG PE=3 SV= 1
MNRLPELAASDRPSTRVEGATPCALDDATLTALAARIRAWGRELGFGAIGISDTDLSDAEAGLAAWLEAGYHGEMDYMAKHGMKRARPPELVAGTRRVISARLAYLPAETLAADTRDAPSGARAPHDWRARERARLDDPQAAVVSIYARGRDYHKVLRNRLQTLAERIEREIGAFGYRVFTDSAPVLEVELAQKAGVGWRGKHTLLLQRDAGSLFFLGEIYVDVPLPTDAQTAPDVAPETPGAHCGSCTRCIDACPTGAIVEPYRVDARRCISYLTIELKGSIPEPLRPMIGNRVYGCDDCQLVCPWNKFAQAAPVADFDVRHGLDRATLVELFGWDADAFDTRMQGSAIRRIGYESWLRNLAVGLGNALRAPADRLAPDARAAIVAALRGRADDPSPVVREHVEWALRAA

SEQ ID NO: 75306 - protein, 411 aa, Burkholderia territorii
  misc_feature (1)..(411): tr|A0A102GAJ0|A0A102GAJ0_9BURK Epoxyqueuosine reductase OS=Burkholderia territorii OX=1503055 GN=queG PE=3 SV= 1
MNRLPELAASDRPSTRVEGATPCALDDATLTALAARIRAWGRELGFGAIGISDTDLSDAEAGLAAWLEAGYHGEMDYMAKHGMKRARPAELVAGTRRVISARLAYLPAETLAADTRDAPSGARAPHDWRARERARLDDPQAAVVSIYARGRDYHKVLRNRLQTLAERIEREIGAFGYRVFTDSAPVLEVELAQKAGVGWRGKHTLLLQRDAGSLFFLGEIYVDVPLPTDAQTAPDVAPETPGAHCGSCTRCIDACPTGAIVEPYRVDARRCISYLTIELKGSIPEPLRPMIGNRVYGCDDCQLVCPWNKFAQAAPVADFDVRHGLDRATLVELFGWDADAFDTRMQGSAIRRIGYESWLRNLAVGLGNALRAPADRLAPDARAAIVAALRARADDPSPVVREHVEWALRAA

SEQ ID NO: 75307 - protein, 409 aa, Burkholderia thailandensis
  misc_feature (1)..(409): tr|A0A2N8QZ03|A0A2N8QZ03_BURTH Epoxyqueuosine reductase OS=Burkholderia thailandensis OX=57975 GN=queG PE=3 SV =1
MNRIPELAVADARPSQDGRAAPSRLDDARLAELASRIKAWGRELGFGAIGISDTDLSDAEAGLAAWLEAGCHGEMDYMAKHGMKRARPAELVAGTRRVISARLAYLPAETLGDALDSGGARRDWRAREAARIADPQAAVVSVYARGRDYHKVLRNRLQTLAERIEAEIGAFGHRVFTDSAPVLEVELAQKAGVGWRGKHTLLLQRDAGSFFFLGEIYVDVPLPTDAQTSPDAAPETPGAHCGSCARCIGACPTGAIVAPYRVDARRCISYLTIELHGSIPEPLRPLIGNRVYGCDDCQLVCPWNKFAQAAPVADFDVRHGLDRASLVELFEWTAEQFDERMQGSAIRRIGYERWLRNLAVGLGNALRAAPGRIEPGARAAIVAALHARLGDPSVSVLVREHVEWALRAA

SEQ ID NO: 75308 - protein, 409 aa, Burkholderia thailandensis
  misc_feature (1)..(409): tr|Q2T0L9|Q2T0L9_BURTA Epoxyqueuosine reductase OS=Burk holderia thailandensis (strain ATCC 700388 / DSM 13276 / CIP 106301 / E264) OX=271848 GN=queG PE=3 SV=1
MNRIPELAVADARPSQDGRAAPSRLDDARLAELASRIKAWGRELGFGAIGISDTDLSDAEAGLAAWLEAGCHGEMDYMAKHGMKRARPAELVAGTRRVISARLAYLPAETLGDALDSGGARRDWRAREAARIADPQAAVVSVYARGRDYHKVLRNRLQTLAERIEAEIGAFGHRVFTDSAPVLEVELAQKAGVGWRGKHTLLLQRDAGSFFFLGEIYVDVPLPTDAQTSPDAAPETPGAHCGSCARCIGACPTGAIVAPYRVDARRCISYLTIELHGSIPEPLRPLIGNRVYGCDDCQLVCPWNKFAQAAPVADFDVRHGLDRASLVELFEWTAEQFDERMQGSAIRRIGYERWLRNLAVGLGNALRAAPGRIEPGARAAIVAALHARLGDPSVSALVREHVEWALRAA

SEQ ID NO: 75309 - protein, 411 aa, Burkholderia ubonensis
  misc_feature (1)..(411): tr|A0A102K2T4|A0A102K2T4_9BURK Epoxyqueuosine reductase OS=Burkholderia ubonensis OX=101571 GN=queG PE=3 SV=1
MNRLPELAASDPRSTQAERAAPCVLDDAALTALAARIRAWGRELGFGAIGISDTDLSDAEAGLAAWLEAGCHGEMDYMAKHGMKRARPAELVAGTRRVISARLAYLPAQTLAADAPDDAPGASAPRDWRAREQARLDDPQAAVVSIYARGRDYHKVLRNRLQTLAERIEREIGAFGYRVFTDSAPVLEVELAQKAGVGWRGKHTLLLQRDAGSLFFLGEIYVDIPLPTDAQTAPDAAPETPGAHCGSCTRCIDACPTGAIVAPYRVDARRCISYLTIELKGSIPEPLRPLIGNRVYGCDDCQLVCPWNKFAQAAPVADFDVRHGLDRATLVELFGWSAEEFDARMQGSAIRRIGHECWLRNLAVGLGNALRAPPERLAPAARDAIVAALRARADDPSPLVREHVEWALRAA

SEQ ID NO: 75310 - protein, 411 aa, Burkholderia ubonensis
  misc_feature (1)..(411): tr|A0A125JS08|A0A125JS08_9BURK Epoxyqueuosine reductase OS=Burkholderia ubonensis OX=101571 GN=queG PE=3 SV=1
MNRLPELAASDPRPTQAERAAPCVLDDAALTALAARIRAWGRELGFGAIGISDTDLSDAEAGLAAWLEAGCHGEMDYMAKHGMKRARPAELVAGTRRVISARLAYLPAQTLAADAPDDARGAPAPRDWRAREQARLDDPQAAVVSIYARGRDYHKVLRNRLQTLAERIEREIGAFGYRVFTDSAPVLEVELAQKAGVGWRGKHTLLLQRDAGSLFFLGEIYVDIPLPTDAQTAPDAAPETPGAHCGSCTRCIDACPTGAIVAPYRVDARRCISYLTIELKGSIPEPLRPLIGNRVYGCDDCQLVCPWNKFAQAAPVADFDVRHGLDRATLVELFGWSADEFDARMQGSAIRRIGHECWLRNLAVGLGNALRAPPERLAPAARDAIVAALRARADDPSPLVREHVEWALRAA

SEQ ID NO: 75311 - protein, 408 aa, Burkholderia vietnamiensis
  misc_feature (1)..(408): tr|A0A103HUQ9|A0A103HUQ9_BURVI Epoxyqueuosine reductase OS=Burkholderia vietnamiensis OX=60552 GN=queG PE=3 SV =1
MNRLPELAASDGPSTRAEGAAPCALDDAALTALAARIRAWGRELGFGAIGISDTDLSDAEAGLAAWLEAGYHGEMDYMAKHGTKRARPAELVAGTRRVISARLAYLPAATLAADAPDASSAPPDWRAHERARLDDPQAAVVSIYARGRDYHKVLRNRLQTLAERIEREIGAYGYRVFTDSAPVLEVELAQKAGVGWRGKHTLLLQRDAGSLFFLGEIYVDVALPTDAQTAPDAAPETPGAHCGSCTRCLGACPTGAIVEPYRVDARRCISYLTIELKGSIPEPLRPLIGNRVYGCDDCQLVCPWNKFAQAAPVADFDVRHGLDRATLVELFGWDAETFDTRMQGSAIRRIGHESWLRNLAVGLGNALRAPAGRLAPAARDAIVAALRARADDPSPVVREHVEWALRAA

SEQ ID NO: 75312 - protein, 379 aa, Burkholderia vietnamiensis
  misc_feature (1)..(379): tr|A4JH93|A4JH93_BURVG Epoxyqueuosine reductase OS=Burk holderia vietnamiensis (strain G4 / LMG 22486) OX=26948 2 GN=queG PE=3 SV=1
MTALAARIRAWGRELGFGAIGISDTDLSDAEAGLAAWLEAGYHGEMDYMAKHGMKRARPAELVAGTRRVISARLAYLPAATLAADAPDASSAPHDWRARERARLDDPQAAVVSIYARGRDYHKVLRNRLQTLAERIEREIGAYGYRVFTDSAPVLEVELAQKAGVGWRGKHTLLLQRDAGSLFFLGEIYVDVALPTDAQTAPDAAPETPGAHCGSCTRCLGACPTGAIVEPYRVDARRCISYLTIELKGSIPEPLRPLIGNRVYGCDDCQLVCPWNKFAQAAPVADFDVRHGLDRATLVELFGWDDETFDTRMQGSAIRRIGHESWLRNLAVGLGNALRAPAGRLAPAARDAIVAALRARADDPSPVVREHVEWALRAA

SEQ ID NO: 75313 - protein, 167 aa, Burkholderiaceae bacterium
  misc_feature (1)..(167): tr|A0A5C7PYA6|A0A5C7PYA6_9BURK tRNA epoxyqueuosine(34) reductase QueG (Fragment) OS=Burkholderiaceae bacterium OX=2030806 GN=E6Q93_21965 PE=4 SV=1
AAPRIDPLGRDDGLPRAHPEAGRAAAAMRLGRRCISYLTIEHDGAIPVELRAAIGNRIYGCDDCQLVCPWNKYARRATLPDFDPRAPLGQATLLELWRWDEAEFLHRTEGSAIRRIGHARWRRNLAVAMGNALRAGVDEGLRAALVAAREGASELLREHIDWALGQG

SEQ ID NO: 75314 - protein, 370 aa, Burkholderiaceae bacterium
  misc_feature (1)..(370): tr|A0A4U8V2V4|A0A4U8V2V4_9BURK Epoxyqueuosine reductase OS=Burkholderiaceae bacterium PBA OX=795666 GN=queG PE =3 SV=1
MPHATEPPRYDPIVLVAQIRDWGQALGFDRVQIADIDLGDAEAGLLAWLEKGFHGSMDYMANHGLKRARPAELVPGTVRAIVARMPYLPIDTPPDWRDREQRRLMQPGEAVVSLYARGRDYHKVLRSRLQQLADRIADAIGPFGYRVFTDSAPVMEVALATRGGLGWRGKHTLLLDRDAGSMFFLGEILIDLPLPADPPSEPHCGTCTRCLDVCPTQAIVAPYVLDARRCISYLTIEHTGSIPEALRAPLGNRIYGCDDCQTVCPWNKFARCATLPDFDVRHALDSSTLLELFAWDADAFSRHLEGSPIRRIGHERWLRNLAVALGNALRSETDSAHAAAMRAALQARLTHPSPLVREHVQWALDQSPIT

SEQ ID NO: 75315 - protein, 378 aa, Burkholderiales bacterium
  misc_feature (1)..(378): tr|A0A3N5F521|A0A3N5F521_9BURK Epoxyqueuosine reductase OS=Burkholderiales bacterium OX=1891238 GN=queG PE=3 S V=1
MDEATLDDWMERLRGWARELGFASIGVADVSGIEHSPAADGLARWLDAGFHGEMDYMARHAGLRARPDALVPGTLRAVMVSLDYAPDDPAWLEQAWLTLADPERAYVSRYALGRDYHKVVRSRLSRLAERLQAAVGPFGWRAFCDSAPVMEVELARRAGLGWRGKHTLLLAREGGSMRFLGTLYTDLPLPVDAPVDEHCGRCTACLDACPTRAIVAPYRLDARRCIAYLTIEAKGAIPVEFREAIGNRIYGCDDCQLACPWNKYAAMASLPDFASRNRLDAASLVELFGWDRPAFESRMEGSAIRRIGHERWLRNIAVALGNAPASPQVIAALRSREHDPSPLVAEHVRWALERHRAAGVPDPESEARTEPSRPASAS

SEQ ID NO: 75316 - protein, 361 aa, Burkholderiales bacterium
  misc_feature (1)..(361): tr|A0A1F4ML92|A0A1F4ML92_9BURK Epoxyqueuosine reductase OS=Burkholderiales bacterium RIFOXYD12_FULL_59_19 OX=1 797574 GN=queG PE=3 SV=1
MQQLNSSQWVSRIQEWGRALGFSQIGVAGVDLTAAEPGLSAWLAAGCHGDMFYMASHGLKRARPAELVPGTLRVITARMDYLPADTSDGWQALELDRLNRRAEGIVSIYARGRDYHKVMRSRLQKLSDQIAAALGPLGYRVFTDSAPVLEAELASLSGLGWRGKHTLLLSREAGSTFFLGEIFVDMALPVTDPVAGHCGSCSACIDICPTRAIIAPYRLDARRCISYLMIEHAGQIPLELRPLMGNRIYGCDDCQLICPWNKFAKRSALPDFDARAGLVGGQLVALFGWSEETFLRLCEGSPIRRIGHERWLRNIAVALGNALRAADADLAGSLVTVLASRSAHPSSLVREHVAWALEQKN

SEQ ID NO: 75317 - protein, 379 aa, Buttiauxella agrestis
  misc_feature (1)..(379): tr|A0A381CCS5|A0A381CCS5_9ENTR Epoxyqueuosine reductase OS=Buttiauxella agrestis OX=82977 GN=queG PE=3 SV=1
MSQPLDLNQLAQNIKQWGIELGFQQVGITDTDLSASEPALQLWLDKQYHGEMDWMARHGMMRARPHELLPGTLRVISVRMNYLPANAAFASTLKNPKIGYISRYALGRDYHKLLRNRLKKLGEMIQSHCSTLNFRPFVDSAPILERPLADKAGLGWTGKHSLILNQEAGSFFFLGELLVDIPLPIDKPVEEKCGRCVACMTICPTGAIVEPYTVDARRCISYLTIELEGAIPEEFRPLIGNRIYGCDDCQLICPWNRFSQLTGEDDFSPRRALHAPPLIELFAWSEEYFLRVTEGSAIRRIGHLRWLRNIAVALGNAPWEEVILEALQQRKGEHPLLDEHIDWAIAQQLSKRSANATEVQLPQKQRLVRVIEKGLKRDA

SEQ ID NO: 75318 - protein, 379 aa, Buttiauxella agrestis
  misc_feature (1)..(379): tr|A0A085GKR6|A0A085GKR6_9ENTR Epoxyqueuosine reductase OS=Buttiauxella agrestis ATCC 33320 OX=1006004 GN=queG PE=3 SV=1
MSQPLDLNQLAQNIKQWGIELGFQQVGITDTDLSASEPALQLWLDKQYHGEMDWMARHGMMRARPHELLPGTLRVISVRMNYLPANAAFASTLKNPKIGYISRYALGRDYHKLLRNRLKKLGEMIQSHCSTLNFRPFVDSAPILERPLADKAGLGWTGKHSLILNQEAGSFFFLGELLVDIPLPIDKPVEEKCGRCVACMTICPTGAIVEPYTVDARRCISYLTIELEGAIPEEFRPLIGNRIYGCDDCQLICPWNRFSQLTVEDDFSPRRALHAPPLVELFAWSEEYFLRVTEGSAIRRIGHLRWLRNIAVALGNAPWEEVILEALQQRKGEHPLLDEHIEWAIAQQLSKRSANATEVQLPQKQRLVRVIEKGLKRDA

SEQ ID NO: 75319 - protein, 379 aa, Buttiauxella brennerae
  misc_feature (1)..(379): tr|A0A1B7IEC4|A0A1B7IEC4_9ENTR Epoxyqueuosine reductase OS=Buttiauxella brennerae ATCC 51605 OX=1354251 GN=que G PE=3 SV=1
MSQPLDLNQLAQNIKQWGIELGFQQVGITDTDLTASEPALQIWLDKQYHGEMDWMARHGMMRARPHELLPGTLRVISVRMNYLPANAAFASTLKNPKIGYISRYALGRDYHKLLRNRLKKLGEMIQSHCSTLNFRPFVDSAPILERPLADKAGLGWTGKHSLILNQEAGSFFFLGELLVDIPLPIDKPVEEKCGRCVACMTICPTGAIVEPYTVDARRCISYLTIELEGSIPEEFRPLIGNRIYGCDDCQLICPWNRFSQLTTEEDFSPRSKLHAPELAELFTWSEDYFLRVTEGSAIRRIGHLRWLRNIAVALGNAPWDEAILGVLQQRKGEHPLLDEHIDWAIAQQLIKRNANATEVQLPQKQRLVRVIEKGLKRDA

SEQ ID NO: 75320 - protein, 379 aa, Buttiauxella gaviniae
  misc_feature (1)..(379): tr|A0A1B7HWK4|A0A1B7HWK4_9ENTR Epoxyqueuosine reductase OS=Buttiauxella gaviniae ATCC 51604 OX=1354253 GN=queG PE=3 SV=1
MSQPLDLNQLAQNIKQWGIELGFQQVGITDTDLTASEPALQIWLDKQYHGEMDWMARHGMMRARPHELLPGTLRVISVRMNYLPANAAFASTLKNPKIGYISRYALGRDYHKLLRNRLKKLGEMIQSHCSTLNFRPFVDSAPILERPLADKAGLGWTGKHSLILNQEAGSFFFLGELLVDIPLPIDKPVEEKCGRCVACMTICPTGAIVEPYTVDARRCISYLTIELEGAIPEEFRPLIGNRIYGCDDCQLICPWNRFSQLTTEEDFSPRSKLHAPELAELFTWGEDYFLRVTEGSAIRRIGHLRWLRNIAVALGNAPWDEAILETLQQRKGEHPLLDEHIDWAIAQQLIKRSEGATEVQRPQKQRLVRVIEKGLKRDA

SEQ ID NO: 75321 - protein, 379 aa, Buttiauxella izardii
  misc_feature (1)..(379): tr|A0A3A5JL93|A0A3A5JL93_9ENTR Epoxyqueuosine reductase OS=Buttiauxella izardii OX=82991 GN=queG PE=3 SV=1
MSQPLDLNQLAQNIKQWGIELGFQQVGIADTDLTASEPALQLWLDKQYHGEMDWMARHGMMRARPHELLPGTLRVISVRMNYLPANAAFASTLKNPKIGYISRYALGRDYHKLLRNRLKKLGEMIQSHCSTLNFRPFVDSAPILERPLAEKAGLGWTGKHSLILNQEAGSFFFLGELLVDIPLPVDKPVEEKCGRCVACMTICPTGAIVEPYTVDARRCISYLTIELEGAIPEEFRPLIGNRIYGCDDCQLICPWNRFSQLTTEDDFSPRSKLHAPELVALFAWNEEYFLRVTEGSAIRRIGHLRWLRNIAVALGNAPWDEAILEALQQRKGEHPLLDEHIDWAIAQQLSKRSANATEVQLPQKQRLVRVIEKGLKRDA

SEQ ID NO: 75322 - protein, 379 aa, Buttiauxella noackiae
  misc_feature (1)..(379): tr|A0A1B7HHC6|A0A1B7HHC6_9ENTR Epoxyqueuosine reductase OS=Buttiauxella noackiae ATCC 51607 OX=1354255 GN=queG PE=3 SV=1
MSQPLDLNQLAQNIKQWGIELGFQQVGITDTDLSASEPALQMWLDKQYHGEMDWMARHGMMRARPHELLPGTLRVISVRMNYLPANAAFASTLKNPKIGYISRYALGRDYHKLLRNRLKKLGEMIQSHCSTLNFRPFVDSAPILERPLAEKAGLGWTGKHSLILNQEAGSFFFLGELLVDIPLPIDNPIEEKCGRCVACMTICPTGAIVEPYTVDARRCISYLTIELEGAIPEEFRPLIGNRIYGCDDCQLICPWNRFSQLTTEDDFSPRSKLHAPELAELFTWSEEYFLRVTEGSAIRRIGHLRWLRNIAVALGNAPWDEAILETLQQRKCEHPLLDEHIDWAIAQQLIKRSEDATEVQLPQKQRLVRVIEKGLKRDA

SEQ ID NO: 75323 - protein, 379 aa, Buttiauxella sp.
  misc_feature (1)..(379): tr|A0A3G2IFB7|A0A3G2IFB7_9ENTR Epoxyqueuosine reductase OS=Buttiauxella sp. 3AFRM03 OX=2479367 GN=queG PE=3 SV =1
MSQPLDLNQLAQNIKQWGIELGFQQVGISDTDLTASEPALQMWLDKQYHGEMDWMARHGMMRARPHELLPGTLRVISVRMNYLPANAAFASTLKNPKIGYISRYALGRDYHKLLRNRLKKLGEMIQSHCSTLNFRPFVDSAPILERPLAEKAGLGWTGKHSLILNQEAGSFFFLGELLVDIPLPVDKAIEEQCGRCVACMTICPTGAIVEPYTVDARRCISYLTIELEGAIPEEFRPLIGNRIYGCDDCQLICPWNRFSQLTTEDDFSPRRALHAPPLVELFAWSEEYFLRVTEGSAIRRIGHLRWLRNIAVAMGNAPWDEAILEALQQRKGEHPLLDEHIDWAIAQQLTRRSANATEVQLPQKQRLVRVIEKGLKRDA

SEQ ID NO: 75324 - protein, 338 aa, Buttiauxella sp.
  misc_feature (1)..(338): tr|A0A4R6DVV6|A0A4R6DVV6_9ENTR Epoxyqueuosine reductase OS=Buttiauxella sp. JUb87 OX=2485129 GN=queG PE=3 SV=1
MWLDKQYHGEMDWMARHGMMRARPHELLPGTLRVISVRMNYLPANAAFASTLKNPKIGYISRYALGRDYHKLLRNRLKKLGEMIQSHCSTLNFRPFVDSAPILERPLAEKAGLGWTGKHSLILNQEAGSFFFLGELLVDIPLPVDKAIEEQCGRCVACMTICPTGAIVEPYTVDARRCISYLTIELEGAIPEEFRPLIGNRIYGCDDCQLICPWNRFSQLTTEDDFSPRRALHAPPLVELFAWSEEYFLRVTEGSAIRRIGHLRWLRNIAVAMGNAPWDEAILEALQQRKGEHPLLDEHIDWAIAQQLTRRSANATEVQLPQKQRLVRVIEKGLKRDA

SEQ ID NO: 75325 - protein, 379 aa, Buttiauxella warmboldiae
  misc_feature (1)..(379): tr|A0A3N5E0U4|A0A3N5E0U4_9ENTR Epoxyqueuosine reductase OS=Buttiauxella warmboldiae OX=82993 GN=queG PE=3 SV=1
MSQPLDLNQLAQNIKQWGRELGFQQVGITDTDLCASEPALQLWLDKQYHGEMDWMARHGMMRARPHELLPGTLRVISVRMNYLPANAAFATTLKDPKIGYISRYALGRDYHKLLRNRLKKLGEMIQSHCSTLNFRPFVDSAPILERPLAEKAGLGWTGKHSLILNQEAGSFFFLGELLVDIPLPVDKPVEEKCGRCVACMTICPTGAIVEPYTVDARRCISYLTIELEGAIPEAFRPLIGNRIYGCDDCQLICPWNRFSQLTAEDDFSPRRALHAPPLVELFAWSEEYFLRATEGSAIRRIGHLRWLRNIAVALGNAPWDEAILNALQQRKGEHPLLDEHIEWAIAQQLTRRNAQATEVQPAQKQRLVRVIEKGLKRDA

SEQ ID NO: 75326 - protein, 230 aa, Butyribacterium methylotrophicum
  misc_feature (1)..(230): tr|A0A1E7S015|A0A1E7S015_BUTME Epoxyqueuosine reductase OS=Butyribacterium methylotrophicum OX=1487 GN=queG_2 PE=4 SV=1
MNPLNEKIEALGKGLGAAQVGFADLSGLPDGLNLGYPGAVSVVVRLSKGILAQMDDAPTATYFSHYRIVNRLIDEITLRVALALEEGGAMAVAVPASQSLPSVKGENPYRGLFAHKTAAVIAGMGWIGKSALFIHRDYGPAVRLGTVLTDAPLDIVAAPGKSECGSCQACVKACPSMSIEGTLWEPGMERSYLLDAHSCSEYMKEAYQHIGRGSVCGLCMVSCPHFGKNL

SEQ ID NO: 75327 - protein, 315 aa, Butyribacterium methylotrophicum
  misc_feature (1)..(315): tr|A0A1E7S1L5|A0A1E7S1L5_BUTME Epoxyqueuosine reductase OS=Butyribacterium methylotrophicum OX=1487 GN=queG_1 PE=4 SV=1
MLKEEKIREAARAAGIEMIGFAEPHPLTEWLEILEKRREQGRITSFERTPPSRRVDYSQAFPKVKGIIVIGVPYCTELPEPEDNTAHGRMASVAWGQDYHEVVTEKMNGLMALLKETAPSLEYRSYVDNSRLLDRATAWRAGLGFFGKNNTLINPEYGSFFFIGQILVSSLIDFKHAVPLKSQCGTCQRCLMACPNQALGEGYTLEPERCVSYLTQKKKLTPEEERLLGVTYLYGCDDCQRACPWNIKSSDGGQAWPDIAPESIYPGLDETEAISESDFEEKFGKTAAAWRGKDVLARNARIIKNNLKNHAKDKN

SEQ ID NO: 75328 - protein, 273 aa, Butyricicoccus porcorum
  misc_feature (1)..(273): tr|A0A252F490|A0A252F490_9CLOT 4Fe-4S ferredoxin-type d omain-containing protein OS=Butyricicoccus porcorum OX= 1945634 GN=CBW42_07145 PE=4 SV=1
MDFLSRFFDIPHTGGKGICRLSALELDEETVRTVQVRCPGAARVIVVLFPYLVRDAGNVSLYARGLDYHAVIMRALEPVCARLRQEFSQNRFVPLVDASPLPEVRAAWVSGAGILGQNGLIFDRTYGSFVFIGTVLTDLELPPTPSAREICPGCGACTRACPAQALQHGCVDEASCLSALTQSKQPMTEEQLRQLAHHPLVWGCDICSLACPLNRDAAETTNPAFRGNRICSLEADNVDGLTRKQFLAAFPERAFTWRGPAPLARNLSLKRQK

SEQ ID NO: 75329 - protein, 272 aa, Butyricicoccus pullicaecorum
  misc_feature (1)..(272): tr|A0A1Y4LBD6|A0A1Y4LBD6_9CLOT 4Fe-4S ferredoxin-type d omain-containing protein OS=Butyricicoccus pullicaecoru m OX=501571 GN=B5F17_02170 PE=4 SV=1
MNIVDRLSVSDGLCACGVCAMGTLLSHMDDRQQLGLSRLIDSPRSVLVALFPYLTGAPSGNLSLYARGRDYHAVIADRLGAAVEAFQAEYPENHFVVLADDSPLPEVYAAACAGLGCIGDNGLLIHPDYGSYVFIGTIVTDLDLPVTEQTPKGCLHCGACRRACPVDLDKGRCLSALTQQGGTLTEEQAALVREHPLVWGCDTCQLVCPMNRHAKQTDIPDFGQFLIDTLTLADVDGLTRRQFYEKYPDRAFTWRGPAPLRRNLTLKEGDNS

SEQ ID NO: 75330 - protein, 272 aa, Butyricicoccus pullicaecorum
  misc_feature (1)..(272): tr|R8W5B8|R8W5B8_9CLOT 4Fe-4S ferredoxin-type domain-co ntaining protein OS=Butyricicoccus pullicaecorum 1.2 OX =1203606 GN=HMPREF1526_01373 PE=4 SV=1
MNIVDRLSVSGGLCACGVCAMGTLLSHMDDRQRLGLSRLIDSPRSVLVALFPYLTGAPSGNLSLYARGRDYHAVIADRLGAVAKAFQAEYPDNHFVVLADDSPLPEVYAAACAGLGCIGDNGLLIHPDYGSYVFIGTIVTDLDLPATEQTPQGCLHCGACRRACPVELDKERCLSALTQQGGTLTEEQAALVREHPLVWGCDTCQLVCPMNKHAKQTDIPDFRQSPIDTLTLADVDGLTRRQFCEKYPDRAFTWRGPAPLRRNLSLKEGDNP

SEQ ID NO: 75331 - protein, 298 aa, Butyricimonas faecalis
  misc_feature (1)..(298): tr|A0A3S9VST2|A0A3S9VST2_9BACT tRNA epoxyqueuosine(34) reductase QueG OS=Butyricimonas faecalis OX=2093856 GN= queG PE=4 SV=1
MESLSEIAKACGFDACGVVPVDILSRERERLEQWVERGFHAGMNYMANNMEKRENPALLVEGARSVIVTLTNYYTPKLQLEGVPVVARYAYGKDYHRVVKDRLFKLYACLEETIGRKIMGRVFVDSAPVFEHEWARRAGLGWVGRNSLLINPRLGSYCFIGVIISDFEPSTYSLPEKRNFCGQCNRCVEACPTGALSAYEVNANLCISYNTIERKGEIPSEIKKKMGVRFFGCDACQDICPWNRKAVAHHIDEFSPNEWLMWMSREDWLSLDEETFRERFKNSPLLRPGLEQIKRNVK

SEQ ID NO: 75332 - protein, 298 aa, Butyricimonas sp.
  misc_feature (1)..(298): tr|A0A3D2DWK0|A0A3D2DWK0_9BACT tRNA epoxyqueuosine(34) reductase QueG OS=Butyricimonas sp. OX=1969738 GN=queG PE=4 SV=1
MEVLSEIAKACGFDACGVVPVDVLSRERERLERWIRQGFHAGMNYMANNIEKRENPALLVEGARSVIVTLTNYYTPKLQLEGIPVVARYAYGKDYHRVVKDRLFKLYACLEEAIGQKITGRVFVDSAPVFEHEWARRAGLGWIGRNSLLIHPRLGSYCFIGVIISDFEPSRYSLPEERNFCGQCNRCVEACPTGALSSHEVNANLCIAYNTIERKDDIPSEMKKKMGDRFFGCDACQEVCPWNRKAVLHHVEEFSPNEWLMRMSREDWLSLDEEIFRERFKDSPLLRPGLEQIKRSVK

SEQ ID NO: 75333 - protein, 297 aa, Butyricimonas sp.
  misc_feature (1)..(297): tr|A0A1Y3VTD4|A0A1Y3VTD4_9BACT tRNA epoxyqueuosine(34) reductase QueG OS=Butyricimonas sp. An62 OX=1965649 GN= B5G13_14840 PE=4 SV=1
MEALLEKAKECGFDACGVVPVDVLSRERERLERWIGQGFHAGMNYMANNIEKRENPALFVEGARSVIVTLTNYYTPKLQSEGIPVVARYAYGKDYHRVVKDRLFKLHTCLEEVSGRKITGRAFVDSAPVFEHEWARRAGLGWIGRNSLLIHPRLGSYCFIGVIISDFEPSRYSLPEERNFCGQCNRCVEACPTGALSSHEVNANLCISYNTIERKDDIPSEIKKKMGDRFFGCDACQEVCPWNRKAVLHHVEEFSPNEWLMRMSREEWLALDEETFQVRFKESPLQRPGLERIKHNL

SEQ ID NO: 75334 - protein, 297 aa, Butyricimonas synergistica
  misc_feature (1)..(297): tr|A0A1U7LFL1|A0A1U7LFL1_9BACT tRNA epoxyqueuosine(34) reductase QueG OS=Butyricimonas synergistica OX=544644 GN=BHV81_00745 PE=4 SV=1
MESLLEKARECEFDACGVVPVDVLFRERERLERWIGRGFHAGMNYMANNIEKRENPALLVEGARSVIVTLTNYYTPKLQSEGIPVVARYAYGKDYHRVVKDRLFKLHTCLEEVTGRKITGRAFVDSAPVFEHEWARRAGLGWIGLNSLLIHPRLGSYCFIGVIISDFEPSRYSLPEERNFCGQCNRCVEACPTGALSSHEVNANLCISYNTIERKDDIPSEIKKKMGDRFFGCDACQEVCPWNRKAVLHHVEEFSPNEWLMRMSREEWLALDEEAFQVRFKESPLQRPGLERIKHNL

SEQ ID NO: 75335 - protein, 298 aa, Butyricimonas virosa
  misc_feature (1)..(298): tr|A0A413IM86|A0A413IM86_9BACT tRNA epoxyqueuosine(34) reductase QueG OS=Butyricimonas virosa OX=544645 GN=que G PE=4 SV=1
MEVLSEIAKACGFDACGVVPVDVLFRERERLERWIRQGFHAGMNYMANNIEKRVNPALLVEGARSVIVTLTNYYTPKLQLEGIPVVARYAYGKDYHGVVKDRLFKLYACLEEAIGQKITGRVFVDSAPVFEHEWARRAGLGWIGRNSLLIHPRLGSYCFIGVIISDFEPSRYSLPEERNFCGQCNRCVEACPTGALSSHEVNANLCIAYNTIERKDDIPSEMKKKMGDRFFGCDACQEVCPWNRKAVLHHVEEFSPNEWLMRMSREDWLSLDEEIFRERFKDSPLLRPGLEQIKRSVK

SEQ ID NO: 75336 - protein, 298 aa, Butyricimonas virosa; identical to SEQ ID NO: 75332
  misc_feature (1)..(298): tr|A0A412WW87|A0A412WW87_9BACT tRNA epoxyqueuosine(34) reductase QueG OS=Butyricimonas virosa OX=544645 GN=que G PE=4 SV=1

SEQ ID NO: 75337 - protein, 381 aa, Bythopirellula goksoyri
  misc_feature (1)..(381): tr|A0A5B9QND4|A0A5B9QND4_9PLAN Epoxyqueuosine reductase OS=Bythopirellula goksoyri OX=1400387 GN=queG PE=4 SV= 1
MSPDEITKRIKQNANELGFQLCGICPAISPPGAARLDEWLAAGYGGQMHYIADRREAYVDPKHVLEGVQSLVMLGMMYHGTGESVPTTGTVGRVARYAQGTVDYHNVIRERLHSLADSLREMAPKATTRGVVDTAPLLEREFAQMAGLGWAGKNTLLLSRHAGSYFFLAALLTDATLEYDKPFEADHCGTCTACLDACPTDAFPQPYVLDASRCISYLTIELRDAVPSELREGIGDWVFGCDVCQEVCPWNRDVPLSEEPNFAPQSELNPLELPPLFEMDESDFRQRFRHTPLWRAHRRGLLRSAAIVLGNQRDPEALPALMKGLNDEEPLVRGAAAWALGQFDIAEARLQLLNRQQRESDESVLMEIQHSLGHKLNKNQP

SEQ ID NO: 75338 - protein, 420 aa, Caballeronia arationis
  misc_feature (1)..(420): tr|A0A157ZXG9|A0A157ZXG9_9BURK Epoxyqueuosine reductase OS=Caballeronia arationis OX=1777142 GN=queG PE=3 SV=1
MNRLPEHSIEVAAASGNAADDVRAFDIHDEAALAGLAQRIRTWGRELGFGAVGISDADLTDAEKGLASWLEAGYHGEMDYMAKHGMKRARPAELVAGTRRVITARIAYLPASTLGQKGDESVVTAASKSAGQRNDWRAVEWSRLADPAAAVVSIYARGRDYHKVMRNRLQQLAERIEGEIGRFGYRAFTDSAPVLEVELAQKAGVGWRGKHTLLLQRDAGSLFFLGEIYVDIPLPTDAETHPSSAPEHEGAHCGQCTRCIAACPTGAIVAPYRVDARRCISYLTIELAGSIPEDLRPLIGNRVYGCDDCQLVCPWNKFAQAAPVADFDVRHGLDEASLVDLFRWSAADFDVRMQGSAIRRIGYERWSRNIAVAMGNALRTKLEPAQRGEIVEALRSRADDSSALVREHVEWALRGAAPEE

SEQ ID NO: 75339 - protein, 413 aa, Caballeronia arvi
  misc_feature (1)..(413): tr|A0A158JER9|A0A158JER9_9BURK Epoxyqueuosine reductase OS=Caballeronia arvi OX=1777135 GN=queG PE=3 SV=1
MNRLPEHSVEITTASSDAAAESASESRVFDLDENALAALAQRIKVWGRELGFGAVGISDIDLSDAEKGLNDWLEAGYHGEMDYMAKHGMKRARPAELVAGTRRVITARMAYLPEQTLAKTGDESVATADGQKNDWRAIEWSRLSKPSEAVVSIYARGRDYHKVMRNRLQQLAERIEAEIGPFGHRAFTDSAPVLEVALAQKAANGWRGKHTLLLDRDAGSLFFLGEIFVDVPLPADPHPEEDGAHCGQCARCIGACPTGAIVGPYRVDARRCISYLTIELHGSIPEEMRPLIGNRVYGCDDCQLVCPWNKFAQAAPVADFDVRHGLDRATLVELFAWSAGDFDTRMQGSAIRRIGHERWLRNIAVAMGNALRSSTLDTVERKAIAEALEARADDPSALVREHVHWALAQGSGK

SEQ ID NO: 75340 - protein, 413 aa, Caballeronia calidae
  misc_feature (1)..(413): tr|A0A158BSP5|A0A158BSP5_9BURK Epoxyqueuosine reductase OS=Caballeronia calidae OX=1777139 GN=queG PE=3 SV=1
MNRLPEHSVEITTASSDAAAESVSESRVIELDENALAELAQRIKVWGRELGFGAVGISDIDLTDAEKGLNDWLEAGYHGEMDYMAKHGMKRARPAELVAGTRRVITARMAYLPAATLAKKGDESVATADGQKNDWRAIEWKRLAKPEQATVSIYARGRDYHKVMRNRLQQLAERIEKAIGPFGHRAFTDSAPVLEVALAQKAGNGWRGKHTLLLDRDAGSLFFLGEIFVDVPLPVDPYPEHEGAHCGQCTRCIGACPTGAIVAPYRVDARRCISYLTIELHGSIPEDMRPLIGNRVYGCDDCQLVCPWNKFAQAAPVADFDVRHGLDRATLVELFAWSAEDFDTRMQGSAIRRIGHERWLRNIAVAMGNALRSAELDASEREVIVEALEARAGDASALVREHVQWALAQRSQT

SEQ ID NO: 75341 - protein, 413 aa, Caballeronia catudaia
  misc_feature (1)..(413): tr|A0A157ZDI9|A0A157ZDI9_9BURK Epoxyqueuosine reductase OS=Caballeronia catudaia OX=1777136 GN=queG PE=3 SV=1
MNRLPEHSVEITTASSDAAAESASESRVFDLDENALAALAQRIRVWGRELGFGAVGISDIDLSDAEKGLNDWLEAGYHGEMDYMAKHGMKRARPAELVAGTRRVITARMAYLPAETLGKIGDESVATADGQKNDWRAIEWSRLSKPSEAVVSIYARGRDYHKVMRNRLQQLAERIEGEIGPFGHRAFTDSAPVLEVALAQKAGNGWRGKHTLLLDRDAGSLFFLGEIYVDVPLPFDPHPEEDGAHCGQCARCIGACPTGAIVAPYRVDARRCISYLTIELHGSIPEEMRPLIGNRVYGCDDCQLVCPWNKFAQAAPVADFDVRHGLDRATLVELFAWSAGDFDIRMQGSAIRRIGHERWLRNIAVAMGNALRSSTLDTVERKAVTEALEARADDPSALVREHVHWALAQGSRK

SEQ ID NO: 75342 - protein, 422 aa, Caballeronia choica
  misc_feature (1)..(422): tr|A0A158G7F3|A0A158G7F3_9BURK Epoxyqueuosine reductase OS=Caballeronia choica OX=326476 GN=queG PE=3 SV=1
MNRLPEHSIEVTAASGNAAADMRAFDIHDEAALAELAQRIKTWGRELGFGAVGISDADLTEAEEGLASWLEAGYHGEMDYMAKHGMKRARPAELVAGTRRVITARIAYLPASTLASQGDESVTTGRGGHGGHTSQRNDWRAIEWSRLADPTAAVVSIYARGRDYHKVMRNRLQQLAARIEDEIGHFGYRAFTDSAPVLEVALAQKAGVGWRGKHTLLLQRDAGSLFFLGEIYVDIPLPPDAATNPSSAPEHDGAHCGQCTRCIAACPTGAIVGPYRVDARRCISYLTIELAGSIPEDLRPLIGNRVYGCDDCQLVCPWNKFAQAAPVADFDVRHGLDRASLVDLFGWSAADFDVRMQGSAIRRIGYERWLRNIAVAMGNALRAELGREERAAIVDALRARADDASAVVREHVEWALRSCIEE

SEQ ID NO: 75343 - protein, 412 aa, Caballeronia cordobensis
  misc_feature (1)..(412): tr|A0A158JC36|A0A158JC36_9BURK Epoxyqueuosine reductase OS=Caballeronia cordobensis OX=1353886 GN=queG PE=3 SV =1
MNRLPEHSVEVTTASSDAAAESASEPRVFDLDEHALAALAQRIKEWGRELGFGAVGISDIDLSDAEEGLASWLEAGYHGEMDYMAKHGMKRARPAELVAGTRRVITARMAYLPAETLAKTGDESVATADAQKNDWRAIEWTRLSKPSEAVVSIYARGRDYHKVMRNRLQQLAERIEREIGPFGHRAFTDSAPVLEVALAQKAGNGWRGKHTLLLDRDAGSLFFLGEIYVDVPLPADPHPEQDGAHCGQCTRCIGACPTGAIVGPYRVDARRCISYLTIELHGSIPEAMRPLIGNRVYGCDDCQLICPWNKFAQAAPVADFDVRHGLDRATLVELFAWSAADFDTRMQGSAIRRIGHERWLRNIAVAMGNALSAASLDAGERRAITDALEARADDPSALVREHVHWALAQGSQ

SEQ ID NO: 75344 - protein, 410 aa, Caballeronia fortuita
  misc_feature (1)..(410): tr|A0A158BQ24|A0A158BQ24_9BURK Epoxyqueuosine reductase OS=Caballeronia fortuita OX=1777138 GN=queG PE=3 SV=1
MNRLPEHSVEITTASSDAAAESVTESRVFDLDENALAELAQRIKLWARELGFGAVGISDVDLTDAEKGLNDWLEAGYHGEMDYMAKHGMKRARPAELVAGTRRVITARMAYLPAQTLAKTGDESVATADGQKNDWRAIEWSRLADPSQAMVSVYARGRDYHKVMRNRLQQLAERIEKEIGPFGHRAFTDSAPVLEVALAQKAGTGWRGKHTLLLDRDAGSLFFLGEIFVDVPLPVDPHPEHEGAHCGQCTRCIGACPTGAIVAPYRVDARRCISYLTIELHGSIPEEMRPLIGNRVYGCDDCQLVCPWNKFAQAAPVADFDVRHGLDRATLVELFAWSADDFDTRMQGSAIRRIGHERWLRNIAVAMGNALRASSLDAGERERIVDALRAREHDPSELVREHVRWALEQA

SEQ ID NO: 75345 - protein, 414 aa, Caballeronia glathei
  misc_feature (1)..(414): tr|A0A069Q4H6|A0A069Q4H6_9BURK Epoxyqueuosine reductase OS=Caballeronia glathei OX=60547 GN=queG PE=3 SV=1
MNRLPEHSVEITTASGNAAADTRAFDMLDEAALAELAQRIRTWGRELGFGAVGISDADLTDAEKGLASWLEAGYHGEMDYMAKHGMKRARPAELVAGTRRVITARIAYLPAATLASTGDAGVMTGDGQRNDWRAVEWSRLADPSAAVVSIYARGRDYHKVMRNRLQQLAERIEGEIGRFGHRAFTDSAPVLEVELAQKAGVGWRGKHTLLLQRDAGSLFFLGEIYVDIPLPADAVTRPASAPEHEGAHCGQCTRCIDACPTGAIVAPYRVDARRCISYLTIELAGSIPEDLRPLIGNRVYGCDDCQLVCPWNKFAQAAPVADFDVRHGLDRATLVDLFGWSAADFDVRMQGSAIRRIGHERWLRNIAVAMGNALRAELGGEARAAIVDALLARADDPSALVREHVEWALRQRDA

SEQ ID NO: 75346 - protein, 410 aa, Caballeronia glebae
  misc_feature (1)..(410): tr|A0A158AFZ7|A0A158AFZ7_9BURK Epoxyqueuosine reductase OS=Caballeronia glebae OX=1777143 GN=queG PE=3 SV=1
MNRLPAHSVEITTASSDAAAESDSESRVFDLDENALTELAQRIKLWGRELGFGAVGISDIDLTDAEKGLADWLEAGYHGEMDYMAKHGMKRARPAELVAGTRRVITARMAYLPARTLAKKGDESVATADGQKNDWRAIEWSRLAKPSQALVSIYARGRDYHKVMRNRLQQLAERIEKEIGPFGHRAFTDSAPVLEVALAQKAGNGWRGKHTLLLDRDAGSLFFLGEIFVDVPLPVDPHPEQDGAHCGQCTRCIGACPTGAIVAPYRVDARRCISYLTIELHGSIPEDMRPLIGNRVYGCDDCQLVCPWNKFAQAAPVADFDVRHGLDRATLVELFAWSAEDFDTRMQGSAIRRIGHERWLRNIAVAMGNALRASSLDAGERKAIVDALEARADDPSELVREHVRWALEQS

SEQ ID NO: 75347 - protein, 413 aa, Caballeronia grimmiae
  misc_feature (1)..(413): tr|A0A069NR93|A0A069NR93_9BURK Epoxyqueuosine reductase OS=Caballeronia grimmiae OX=1071679 GN=queG PE=3 SV=1
MNRLPEHSDEVTTAASDAAVEPRALHRLESDEAGLAELAQRIKAWGRELGFGAVGISDTDLTDAEEGLASWLEAGYHGEMDYMAKHGMKRARPAELVAGTRRVITARMAYLPAATLASTGDESVATADGQKNDWRAIEWKRLAQPAQAQVSIYARGRDYHKVMRNRLQQLAERIEKEIGAFGHRAFTDSAPVLEVALAQKAGNGWRGKHTLLLDRDAGSLFFLGEIYVDLALPVDPEPEHDGAHCGQCTRCIGACPTGAIVGPYRVDARRCISYLTIELHGSIPEDLRPLIGNRVYGCDDCQLVCPWNKFAQAAPVADFDVRHGLDRATLVELFAWSADDFDTRMQGSAIRRIGHERWLRNIAVAMGNALRDASLDARERGSIIGALHARADDASALVREHVSWALEQGDRHE

SEQ ID NO: 75348 - protein, 409 aa, Caballeronia humi
  misc_feature (1)..(409): tr|A0A158EUP3|A0A158EUP3_9BURK Epoxyqueuosine reductase OS=Caballeronia humi OX=326474 GN=queG PE=3 SV=1
MEVTTASGNAAADSRAFDIHDEAALAELAQRIKTWGRELGFGAVGISDADLTDAEEGLASWLEAGYHGEMDYMAKHGMKRARPAELVAGTRRVITARIAYLPASTLGLTGDESVMTADGQRNDWRAIEWSRLADPTAAVVSIYARGRDYHKVMRNRLQQLAERIEGEIGGFGYRAFTDSAPVLEVALAQKAGVGWRGKHTLLLQRDAGSLFFLGEIYVDIPLPPDAVTNAQNAPEHDGAHCGQCTRCIAACPTGAIVGPYRVDARRCISYLTIELKGSIPEDLRPLIGNRVYGCDDCQLVCPWNKFAQAAPVADFDVRHGLDRASLVELFRWNADDFDVRMQGSAIRRIGHERWLRNIAVAMGNALRAEIGDDERARIIDALQARADDPSPVVREHVEWALRYGETPGE

SEQ ID NO: 75349 - protein, 419 aa, Caballeronia hypogeia
  misc_feature (1)..(419): tr|A0A158BJ55|A0A158BJ55_9BURK Epoxyqueuosine reductase OS=Caballeronia hypogeia OX=1777140 GN=queG PE=3 SV=1
MNRLPEHSVEITTASSDAAAESVSESRAFTHDEEAALAELAQRIKAWGRELGFGAVGISDIDLTDAEKGLADWLEAGYHGEMDYMAKHGMKRARPAELVAGTRRVITARMAYLPAQTLAKQGDESVVTADGQKNDWRAIEWSRLSKPSQAMVSIYARGRDYHKVMRNRLQQLAERIEGEIGQFGYRAFTDSAPVLEVALAQKAGNGWRGKHTLLLDRDAGSLFFLGEIFVDVPLPVDPDSEHDGAHCGQCTRCIGACPTGAIVAPYRVDARRCISYLTIELHGAIPEDMRPLIGNRVYGCDDCQLVCPWNKFAQAAPVADFDVRHGLDRATLVELFAWSPDDFDTRMQGSAIRRIGHERWLRNIATAMGNALRAASLDAGERHAIVEALRARADDPSALVREHVLWALKQGDTHEEPAV

SEQ ID NO: 75350 - protein, 410 aa, Caballeronia jiangsuensis
  misc_feature (1)..(410): tr|A0A038H172|A0A038H172_9BURK Epoxyqueuosine reductase OS=Caballeronia jiangsuensis OX=1458357 GN=queG PE=3 S V=1
MNRLPEHSVEVTTASSDAAAESVSESRVFDIDENALAELAQRIRNWGRELGFGAVGISDIDLTDAEKGLTDWLEAGYHGEMDYMAKHGMKRARPAELVAGTRRVITVRMAYLPAQTLAKTGDESVATADGQKNDWRAIEWTRLAKPSQAMVSIYARGRDYHKVMRNRLQQLAERIEKEIGPFGHRAFTDSAPVLEVALAQKAGTGWRGKHTLLLDRDAGSLFFLGEIFVDVPLPVDPNPEREGAHCGQCTRCIGACPTGAIVAPYRVDARRCISYLTIELHGSIPEDMRPLIGNRIYGCDDCQLVCPWNKFAQAAPVADFDVRHGLDRATLVELFAWSAGDFDTRMQGSAIRRIGHERWLRNIAVAMGNALRASGLDAGEREAIVDALRAREDDSSELVREHVRWALEQS

SEQ ID NO: 75351 - protein, 410 aa, Caballeronia megalochromosomata
  misc_feature (1)..(410): tr|A0A149PWR4|A0A149PWR4_9BURK Epoxyqueuosine reductase OS=Caballeronia megalochromosomata OX=1399969 GN=queG PE=3 SV=1
MNRLPEHSVEVTTASSDAAAESVSESRVFDIDENALAELAQRVKVWGRELGFGAVGISDIDLTDAEQGLADWLEAGYHGEMDYMAKHGMKRARPAELVAGTRRVITARMAYLPAQTLAKTGDESVATADGQKNDWRAIEWSRLAKPSQALVSIYARGRDYHKVMRNRLQQLAERIESEIGPFGHRAFTDSAPVLEVALAQKAGNGWRGKHTLLLDRDAGSLFFLGEIFVDVPLPVDPHPEQEGAHCGQCTRCIDACPTGAIVAPYRVDARRCISYLTIELHGSIPEEMRPLIGNRVYGCDDCQLVCPWNKFAQAAPVADFDVRHGLDRATLVELFAWSAGDFDTRMQGSAIRRIGHERWLRNIAVGMGNALRSSALDAGEREAIVDALRAREDDSSELVREHVRWALEQS

SEQ ID NO: 75352 - protein, 414 aa, Caballeronia mineralivorans
  misc_feature (1)..(414): tr|A0A0J1D4M0|A0A0J1D4M0_9BURK Epoxyqueuosine reductase OS=Caballeronia mineralivorans PML1(12) OX=908627 GN=q ueG PE=3 SV=1
MNRLPEHPVERGSASDDATANTRHFSIDDEAALAELALRIKAWGRELGFGAVGVSDADLTEAEEGLASWLEAGYHGEMDYMAKHAMKRARPAELVAGTRRVITVRMAYLPASTLSGKAQESAATADGQASDWRAAEWARIDDPAAAVVSVYARGRDYHKVMRSRLQQLADRIDAEIGAYGYRVFTDSAPVLEVELAQKAGTGWRGKHTLLLQRDAGSLFFIGEILVDIPLPADALTHPEHAPEHDGSHCGSCTRCIDVCPTGAIVAPYRVDARRCISYLTIELKGSIPEEMRPLIGNRVYGCDDCQLVCPWNKFAQAAPVADFDVRHGLDRASLVALFGWSALDFDERMQGSAIRRIGHERWLRNIAVAMGNALRSPALDANERLEIHNALNARAADASELVREHVEWALRQEA

SEQ ID NO: 75353 - protein, 410 aa, Caballeronia pedi
  misc_feature (1)..(410): tr|A0A158BYG3|A0A158BYG3_9BURK Epoxyqueuosine reductase OS=Caballeronia pedi OX=1777141 GN=queG PE=3 SV=1
MNRLPEHSVEFTTASSDAAAESVSESRVIELDENALAELAQRIKAWGRELGFGAVGISDIDLTDAEKGLNDWLEAGYHGEMDYMAKHGMKRARPAELVAGTRRVITARMAYLPAQTLAKQGDESVATADGQKNDWRAIEWSRLAKPSQAMVSIYARGRDYHKVMRNRLQQLAERIESEIGPFGHRAFTDSAPVLEVALAQKAGNGWRGKHTLLLDRDAGSLFFLGEIFVDVPLPVDPHPEQEGAHCGQCTRCIGACPTGAIVAPYRVDARRCISYLTIELHGSIPEELRPLIGNRVYGCDDCQLVCPWNKFAQAAPVADFDVRHGLDRATLVELFAWSAGDFDTRMQGSAIRRIGHERWLRNIAVGMGNALRSSALDAGEREAIVDALRAREDDSSELVREHVRWALEQS

SEQ ID NO: 75354 - protein, 390 aa, Caballeronia peredens
  misc_feature (1)..(390): tr|A0A158K2F9|A0A158K2F9_9BURK Epoxyqueuosine reductase OS=Caballeronia peredens OX=1777132 GN=queG PE=3 SV=1
MSRAFTREEEAALAELAQRIKAWGRELGFGAVGISDIDLTDAEKGLADWLEAGYHGEMDYMAKHGMKRARPAELVAGTRRVITARMAYLPAQTLEKTGDESVATADGQKNDWRAIEWTRLAQPAQANVSIYARGRDYHKVMRHRLQQLAERIEGAIGPFGYRVFTDSAPVLEVALAQKAGNGWRGKHTLLLDRDAGSLFFLGEILVDVPLPADPHPEQDGAHCGQCTRCIGACPTGAIVAPYRVDARRCISYLTIELHGSIPEDMRPLIGNRVYGCDDCQLVCPWNKFAQAAPVADFDVRHGLDRATLVELFAWSAADFDTRMQGSAIRRIGHERWLRNLAVAMGNALRASGLDTGEREAIVEALTARADDASALVREHVRWALAQGSET

SEQ ID NO: 75355 - protein, 413 aa, Caballeronia ptereochthonis
  misc_feature (1)..(413): tr|A0A158DLK2|A0A158DLK2_9BURK Epoxyqueuosine reductase OS=Caballeronia ptereochthonis OX=1777144 GN=queG PE=3 SV=1
MNRLPEHSVEITTASSDAAAESVSESRAFTHGEEAALAELAQRIKAWGRELGFGAVGISDIDLTDAEKGLADWLEAGYHGEMDYMAKHGMKRARPAELVAGTRRVITARMAYLPAETLAKKGAESVATADGQKNDWRAIEWSRLAKPSQAMVSIYARGRDYHKVMRNRLQQLAERIEGEIGSFGYRAFTDSAPVLEVALAQKAGNGWRGKHTLLLDRDAGSLFFLGEIFVDVPLPVDPHPEQDGAHCGQCARCIGACPTGAIVAPYRVDARRCISYLTIELHGSIPEDLRPLIGNRVYGCDDCQLVCPWNKFAQAAPVADFDVRHGLDRATLVELFGWSAEDFDARMQGSAIRRIGHERWLRNIAVAMGNALRASIGESERAAIVEALQARADDPSALVREHVHWALAQGRQT

SEQ ID NO: 75356 - protein, 406 aa, Caballeronia sordidicola
  misc_feature (1)..(406): tr|A0A242N2H0|A0A242N2H0_9BURK Epoxyqueuosine reductase OS=Caballeronia sordidicola OX=196367 GN=queG PE=3 SV= 1
MEHERTSDDAAENLRHFRIDDKAALAELALRIKAWGRELGFGAVGVSDADLTDAEEGLASWLEAGYHGEMDYMAKHAMKRTRPAELVAGTRRVITVRMAYLPASTLDGKARESTSTAGAEPLDWRAAEWARIDDPAAAVVSVYARGRDYHKVMRSRLQHLADRIEAEIGPFGYRVFTDSAPVLEVELAQKAGNGWRGKHTLLLQRDAGSLFFIGEILVDIPLPADAETHPEHAPEHEGSHCGSCTKCIDVCPTQAIIAPYRLDARRCISYLTIELKGSIPEEMRPLIGNRVYGCDDCQLVCPWNKFAQAAPVADFDVRHGLDRASLVTLFGWSAAEFDERMQGSAIRRIGHERWLRNIAVGMGNALRSTSLDADSRSEIRNALHARAGDASELVREHVQWALRQAA

SEQ ID NO: 75357 - protein, 406 aa, Caballeronia sordidicola
  misc_feature (1)..(406): tr|A0A226WKI7|A0A226WKI7_9BURK Epoxyqueuosine reductase OS=Caballeronia sordidicola OX=196367 GN=queG PE=3 SV= 1
MERESASDDAVAHTRHFRLDDEAALAELALRIKAWGRELGFGAVGISDADLTEAEEGLASWLEAGYHGEMDYMAKHAMKRARPAELVAGTRRVITVRMAYLPASTLDGKARESAATADGQAIDWRAAEWARLDDPAAAVVSVYARGRDYHKVMRSRLQQLAERMEAEIGAYGYRVFTDSAPVLEVELAQKAGNGWRGKHTLLLESDAGSLFFIGEILVDIALPPDALTNPDQAPEHDGAHCGSCTRCIDVCPTGAIVAPYRVDARRCISYLTIELKGSIPEDMRPLIGNRVYGCDDCQLVCPWNKFAQAAPVADFDVRHGLDRASLVMLFGWSDHDFDERMQGSAIRRIGHEQWLRNIAVAMGNALRSPALGADERSAIRNALNGRVADDSALVREHVEWALRQQA

SEQ ID NO: 75358 - protein, 416 aa, Caballeronia telluris
  misc_feature (1)..(416): tr|A0A158I0U6|A0A158I0U6_9BURK Epoxyqueuosine reductase OS=Caballeronia telluris OX=326475 GN=queG PE=3 SV=1
MNRLPEHSTEVAAASGNAADDARVFDIRDEAALAELAQRIKAWGRELGFGAVGISDADLTDAEKGLASWLEAGYHGEMDYMAKHGMKRARPAELVAGTRRVITARIAYLPASTLESAGDESVMTVDGQRNDWRAVEWSRLADPAAAVVSIYARGRDYHKVMRNRLQQLAERIEAEIGRFGYRAFTDSAPVLEVELAQKAGVGWRGKHTLLLQRDAGSLFFLGEIYVDIPLPTDAETHPSSAPEHEGAHCGQCTRCIAACPTGAIVAPYRVDARRCISYLTIELAGSIPEDLRPLIGNRVYGCDDCQLVCPWNKFAQAAPVADFDVRHGLNEASLVDLFRWSAADFDVRMQGSAIRRIGYERWSRNIAVAMGNALRAKLEPALRAEIVDALRSRADDASALVREHVEWALRGAAIEA

SEQ ID NO: 75359 - protein, 410 aa, Caballeronia temeraria
  misc_feature (1)..(410): tr|A0A158C3M9|A0A158C3M9_9BURK Epoxyqueuosine reductase OS=Caballeronia temeraria OX=1777137 GN=queG PE=3 SV=1
MNRLPAHSVEVTTASSDAAAESVSESRVFDLDENALAELAQRIKAWGRELGFGAVGISDIDLTDAEKGLNDWLEAGYHGEMDYMAKHGMKRARPAELVAGTRRVITARMAYLPAATLAKKGAESVATADGQKNDWRAIEWSRLAKPSQAMVSIYARGRDYHKVMRNRLQQLAERIEQEIGPFGHRAFTDSAPVLEVALAQKAGNGWRGKHTLLLDRDAGSLFFLGEIFVDVPLPVDPHPEQEGAHCGQCTRCIGACPTGAIVAPYRVDARRCISYLTIELHGAIPEAMRPLIGNRVYGCDDCQLVCPWNKFAQAAPVADFDVRHGLDRATLVELFAWSAQDFDTRMQGSAIRRIGHERWLRNIAVAMGNALRAPSLDAGEREAIADALNARADDPSELVREHVRWALEQA

SEQ ID NO: 75360 - protein, 409 aa, Caballeronia terrestris
  misc_feature (1)..(409): tr|A0A158JSV3|A0A158JSV3_9BURK Epoxyqueuosine reductase OS=Caballeronia terrestris OX=1226301 GN=queG PE=3 SV= 1
MEVTTASGNAAADSRAFDIHDEAALAELAQRIKTWGRELGFGAVGISDADLTDAEEGLASWLEAGYHGEMDYMAKHGMKRARPAELVAGTRRVITARIAYLPASTLGLTGDESVMTADGQRNDWRAIEWSRLADPTAAVVSIYARGRDYHKVMRNRLQQLAERIEGEIGGFGYRAFTDSAPVLEVALAQKAGVGWRGKHTLLLQRDAGSLFFLGEIYVDMPLPPDTVTNPLGAPEHDGAHCGQCTRCIAACPTGAIVGPYRVDARRCISYLTIELKGSIPEDLRPLIGNRVYGCDDCQLVCPWNKFARAAPVADFDVRHGLDRASLVELFRWSADDFDVRMQGSAIRRIGHERWLRNIAVAMGNALRAEIEDDERAGIIEALQARADDPSPVVREHVEWALRYGETPGE

SEQ ID NO: 75361 - protein, 410 aa, Caballeronia turbans
  misc_feature (1)..(410): tr|A0A158H4U7|A0A158H4U7_9BURK Epoxyqueuosine reductase OS=Caballeronia turbans OX=1777134 GN=queG PE=3 SV=1
MNRLPEHSVEVTTASCDAAAESVSEPRVFDIDENALAELAQRIKVWGRELGFGAVGISDIDLADAEKGLTDWLEAGYHGEMNYMAIHGMKRARPAELVAGTRRVITVRMAYLPAQTLAKTGDESVATADGQKNDWRAIEWSRLAKPSQAMVSIYARGRDYHKVMRNRLQQLAERIEKEIGPFGHRAFTDSAPVLEVALAQQAGNGWRGKHTLLLDRDAGSLFFLGEIFVDVPLPVDPHPEREGAHCGQCTRCIGACPTGAIVAPYRVDARRCISYLTIELHGSIPEDMRPLIGNRVYGCDDCQLVCPWNKFAQAAPVADFDVRHGLDRATLVELFAWSAADFDTRMQGSAIRRIGHERWLRNIAVAMGNALRASGLDAGERQAIVDALEAREDDPSELVREHVRWALEQS

SEQ ID NO: 75362 - protein, 414 aa, Caballeronia udeis
  misc_feature (1)..(414): tr|A0A3M0V4M3|A0A3M0V4M3_9BURK Epoxyqueuosine reductase OS=Caballeronia udeis OX=1232866 GN=queG PE=3 SV=1
MNRLPEHPVERESASDDATANTRHFSIDDEAALAELALRIKAWGRELGFGAVGVSDADLTEAEEGLASWLDAGYHGEMDYMAKHAMKRARPAELVAGTRRVITVRMAYLPASTLSGKAQESAATADAQASDWRAAEWARIDDPAAAVVSVYARGRDYHKVMRSRLQQLADRIEAEIGAYGYRVFTDSAPVLEVELAQKAGTGWRGKHTLLLQRDAGSLFFIGEILVDIPLPADAVTNPEHAPEHDGSHCGSCTRCIDVCPTGAIVAPYRVDARRCISYLTIELKGSIPEEMRPLIGNRVYGCDDCQLVCPWNKFAQAAPVADFDVRHGLDRASLVALFGWSALDFDERMQGSAIRRIGHERWLRNIAVAMGNALRSPALDANARLEIHNALNARAADASELVREHVEWALRQEA

SEQ ID NO: 75363 - protein, 418 aa, Caballeronia udeis
  misc_feature (1)..(418): tr|A0A158F0P2|A0A158F0P2_9BURK Epoxyqueuosine reductase OS=Caballeronia udeis OX=1232866 GN=queG PE=3 SV=1
MNRLPEHPVERESASDDAAADTRHFRFDDEAALAELALRIKAWGRELGFAAVGVSDADLTEAEEGLASWLEAGYHGEMDYMAKHAMKRARPAELVAGTRRVITVRMAYLPASTLAGKARESAATADGQATDWRAAEWARIADPAAAVVSVYARGRDYHKVMRTRLQQLAERIEAEIGTYGYRVFTDSAPVLEVELAQKAGTGWRGKHTLLLQSDAGSLFFIGEILVDIPLPADADVNPDQAPEHDGAHCGSCRRCIDVCPTGAIVAPYRVDARRCISYLTIELKGSIPEDLRPLIGNRVYGCDDCQLVCPWNKFAQAAPVADFDVRHGLDRASLVMLFGWSAHDFDERMQGSAIRRIGHERWLRNIAVAMGNALRSPVLGADERSAIRDALNARAGDASELVREHVEWALRQEASPHV

SEQ ID NO: 75364 - protein, 356 aa, Caenimonas sp.
  misc_feature (1)..(356): tr|A0A562ZX29|A0A562ZX29_9BURK Epoxyqueuosine reductase OS=Caenimonas sp. HX-9-20 OX=2596921 GN=queG PE=3 SV=1
MRDWARELGFSQIGVAGVDLSSAEPGLLAWLANGFHGEMDYMARHGVRRARPAELVPGTVSVITARMDYLPATTPEGWQAIEFERLQRSGEAIVSLYARGRDYHKVLRARLQALSERMAAALGPFGHRVFTDSAPVLEVELAARSGQGWRGRHTLVLNREGGSMFFLGEIYVDLALPVTETVADHCGTCAACIAVCPTQAIVAPYRLDARRCISYLTIEHAGPIPAELRPLMGNRIYGCDDCQLACPWNKFAATSPLPDFEARPGLAGASLVELFAWTEEEFLRRTEGSPIRRIGHERWLRNIAVALGNALRAGGGYDVRQALQARAGHPSTLVREHVVWALAQQPESERQAQHAQ

SEQ ID NO: 75365 - protein, 398 aa, Caenispirillum bisanense
  misc_feature (1)..(398): tr|A0A286GY52|A0A286GY52_9PROT Epoxyqueuosine reductase OS=Caenispirillum bisanense OX=414052 GN=queG PE=3 SV= 1
MSIKQAITDEARRLGFDDVRFTRAMLPAEVRANLDAYLAEGRHADMAWMAETAERRAHPQALWPEAVTGIVLGANYGPGLDPRTLQDHPDRGHISVYARNRDYHDWIKGRMKTLGQWLIARFGGDIKVFVDTAPVMEKPLAAQAGLGWQGKHTNLVSRGFGSWLFLGEILTTLDVEPDPPESDHCGSCSRCLPACPTGAITAERQIDARRCISYLTIENKGPIPRELRSLVGNRIYGCDDCLAVCPWNRFARPTPHAAFQPRAEFMAPRLADLAQLDDAGFRSLFTVSPVKRIGRDRFIRNVFVAIGNSGDRTLAPLARKAACTDPSPLVRGAAVWCLARLVDPEGYISCYENFRDHEGDPSVRDEWDAAYPSARAAATTTCGTLGGPRGPSEDEGRG

SEQ ID NO: 75366 - protein, 398 aa, Caenispirillum salinarum
  misc_feature (1)..(398): tr|K9HPL5|K9HPL5_9PROT Epoxyqueuosine reductase OS=Caen ispirillum salinarum AK4 OX=1238182 GN=queG PE=3 SV=1
MDARQAITHKAHELGFDAVRFTRAALPARVRDHLNRFVAEGRHADMGWMADTAERRGDPQSLWPQAVTAVSLGVNYGPGHDPRVLQDHPGRGHISVYARNRDYHDWVKGRMKTLGQWMASRFGGDLKVFVDTAPVMEKPLAEQAGLGWQGKHTNLVSRDFGSWLFLGEILTTLEVEPDAAESDHCGSCTRCITACPTDAITAAGEIDARLCISYLTIENKGPIPRRLRPMMGNRIYGCDDCLAVCPWNRFSLPTRHDAFKPRAELAAPRLGDLAELDDAAFRTLFSASPIKRIGRDRFMRNVFIAIGNSQDEKLIPRVRKAATDDPSPLVRGTAVWALSRLEGPEGYISIYTDHRDRENDPIVQEEWDAGYPSAQAPEPPGHGILTTAHHSQETEGRG

SEQ ID NO: 75367 - protein, 394 aa, Caldalkalibacillus thermarum
  misc_feature (1)..(394): tr|F5L4R6|F5L4R6_CALTT Epoxyqueuosine reductase OS=Cald alkalibacillus thermarum (strain TA2.A1) OX=986075 GN=q ueG PE=3 SV=1
MGLAQTEQRIDLRQLKQEIIEYSRSIGIDKIGFASADPFDELKQRLLRHRELGYESGFEEPDIDKRTTPTKILPEAKSIIAIALAYPSRLKNPPRSRKGAYRGILCRASWGLDYHHILRDKLIKLEAFIKSKVPDARCESMVDTGALSDRAVAERAGIGWSGKNTAIITKEFGSWVYLGEMLTSIPFEPDQPVTESCGSCTKCLDACPTGALVQPGQLDSTKCLAYLTQVKNFVPAAFREKMGNRLYGCDTCQVVCPVNHKKNFTHHPEMEPDPEVAKPLLKPLLRMSKREFREKFGPTSSAWRGKKPLQRNAIIALGNFKDESAVPELIDLLHHDPRPAIRGTAAWALGKIGTEEGRQALEEANRQEQDEQVLAEIEQALGMFEETHSSEGRQ

SEQ ID NO: 75368 - protein, 373 aa, Caldanaerobacter subterraneus
  misc_feature (1)..(373): tr|A0A101E6J2|A0A101E6J2_9THEO Epoxyqueuosine reductase OS=Caldanaerobacter subterraneus OX=911092 GN=queG PE= 4 SV=1
MSCISKKEITDFAKAVGIDLIGFASADCLKGYKSFLEERKSLGYECPIEERMPDKRVSPEFILPEVKTIISVALSYNIEYQVKLPSKSFGIISKSSWGMDYHLVLKEKMKRVCEFVKSKCPDVKTVSLVDNNPLLERAIAYHAGIGWFGKNGLIINEEYGSYLFLGEILINEYFEPDTPQESKCGDCDLCMKACPTKAIEKPYIVNANKCLSFITVKKGEIEEEFLKKLGRRIYGCDTCQEVCPFNKEAKKVKREEFTPSKLLPRPNLIEILNMSNKEFKEIFGPTASSWRGKSVIIRNAIIACVNTKDQECIEPIKKLLKSPSPLLRGYSAWAISYLEERDKAIEEIKEALNKEKDGFAIKMMAEALQKLER

SEQ ID NO: 75369 - protein, 373 aa, Caldanaerobacter subterraneus
  misc_feature (1)..(373): tr|U5CTU9|U5CTU9_CALSX 4Fe-4S ferredoxin-type domain-co ntaining protein OS=Caldanaerobacter subterraneus subsp . yonseiensis KB-1 OX=1388761 GN=O163_00895 PE=4 SV=1
MSCISKKEITDFAKAVGIDLIGFASADCLKGYKSFLEERKSLGYECPIEERMPDKRVSPEFILPEVKTIISVALSYNIEYQVKLPSKSFGIISKSSWGMDYHLVLKEKMKRVCEFVKSKCPDVKTVSLVDNNPLLERAIAYHAGIGWFGKNGLIINEEYGSYLFLGEILINKYFEPDTPQESKCGDCDLCMKACPTKAIEKPYIVNANKCLSFITVKKGEIDEEFSRKLGRRIYGCDTCQEVCPFNKKGKKVKKEEFIPSKLLPRHSLIHILNMTNKEFEEIFGPTASSWRGKSVIIRNAIIACVNTKDQECIEPIKKLLKSPSPLLRGYSAWAISYLEERDKAIEEIKEALNKEKDGFAIKMMAEALQKLER

SEQ ID NO: 75370 - protein, 345 aa, Caldanaerobius fijiensis
  misc_feature (1)..(345): tr|A0A1M4YQJ1|A0A1M4YQJ1_9THEO Epoxyqueuosine reductase OS=Caldanaerobius fijiensis DSM 17918 OX=1121256 GN=SA MN02746089_01263 PE=4 SV=1
MDSVEIKDEIKNFAYSLGFDLVGFTTAEAFNAEILYQRKAEGYLSGLEEKDIKKRVTPRLSLNTAKSIIALGLSYNIPIKYVPQRGYAIISRSAYGKDYHKVMSDMMLKLVKYIEKMYNVKSIYMVDTGPLVDRMVAYRAGIGWYGKNCSIINDEYGSWIFLGEILTELELPPDSPVESRCGDCDLCLKACPTGALVSPYTLNANRCLSYNTVKKGILPDDIKDKMGMRIYGCDTCQEVCPVNKRAKYTNKNEFIPQPPMPLIPLEDVAKMDKKIFEEIFKHTSAGWRGKTTLQRNGIIAMGNSGDSRYLEILESFLNDSRPGISDAARWSLEKIRSRANGQGNS

SEQ ID NO: 75371 - protein, 336 aa, Caldanaerovirga acetigignens
  misc_feature (1)..(336): tr|A0A1M7LYW6|A0A1M7LYW6_9FIRM Epoxyqueuosine reductase OS=Caldanaerovirga acetigignens OX=447595 GN=SAMN05660 826_02082 PE=4 SV=1
MFDRKEQIRNYAKQIGFDKIGFASAEPFWEEKEILMERKRAGLFSPFEESDIELRCHLEKHLPGAKTIICFAVSYFFEKEDVPGENSSEPLGIISKYALMRDYHDVLFQKLKLMADFIYSMWGAKSKIFVDSGGLLERAAARRAGIGWIGQNTCLFTEEFGSWVFLGELITDLEIEPDMPCRNLCDNCGKCVKACPTGALEEPYRLNPFRCLSYITQMKGTIPEEFRDIMGLRLFGCDICQEACPKNKKIILVKHEEFMLDYQIERRLTKLIFMDKVEFDKNFKLTPIAWRGRNVLRRNATVALANAGVGCKRYFEKLLSDPSPLIREHAMWALKR

SEQ ID NO: 75372 - protein, 369 aa, Calderihabitans maritimus
  misc_feature (1)..(369): tr|A0A1Z5HNX9|A0A1Z5HNX9_9THEO 4Fe-4S ferredoxin-type d omain-containing protein OS=Calderihabitans maritimus O X=1246530 GN=KKC1_03860 PE=4 SV=1
MSLSQEIKNYAEGLGINRVRICGPEPFEELLPLLQKRKEAGYGTPFEERDLQLRIEPRRLLPEVRSIIAVSVSYGGKAVGSRVPQELKPGISYHAWGEDYHRALRRQLEQLVDFLEIRVGRKVQSLICVDATPLVERAVARRSGLGWYGKNCSLITPDEGSWVFLGEILVDVELDRDYPLDHRGCGNCSRCLEACPAGALRAPYTLDSSRCLSYISQKSGFIPEEFRSLLGTRLYGCDTCQLVCPYNHSPEPVSQASIARPERFTAELVKVLSLNRQEFYQMFGFSVLAWRGKNVLARNAAVALGNLGDEDAVPGLKKALLEHPSPTVRGHAAWALGRIGGSSAGEALVRAKKMETDSRVLKEIERALV

SEQ ID NO: 75373 - protein, 377 aa, Caldibacillus debilis
  misc_feature (1)..(377): tr|A0A3E0K7H8|A0A3E0K7H8_9BACI Epoxyqueuosine reductase OS=Caldibacillus debilis OX=301148 GN=queG PE=3 SV=1
MEALNTLKKEIIAYSKEIGIDKIGFTTADPFTELKNRLIRQRELNYQSGFEEPDIEKRTNPRLSLEGAQSIISIAVCYPSKMKNPVRGNREERRGIFARSSWGEDYHRVLNDKLEKLGQFIRSKVPDARYKPMVDTGPLADRAVAERAGIGWSGKNCAIITPEFGSYVYLGELITNIPFEPDAPIEDRCGSCNRCLEACPTGALVRAGQINAKICISYLTQTKEDIPEPYRKKIGNRLYGCDTCQVVCPYNKGKDFHFHPEFEPDPEAAKPLLKPLLSISNREFKERFGHMSGAWRGKKPIQRNAIIALAHFKDVTAVEDLGKVLAEDPREVIRKTAAWALGKIGGERAKEILSSARDREKSEQVLAEIGRALKMLQ

SEQ ID NO: 75374 - protein, 377 aa, Caldibacillus debilis
  misc_feature (1)..(377): tr|A0A420VIX2|A0A420VIX2_9BACI Epoxyqueuosine reductase OS=Caldibacillus debilis GB1 OX=1339248 GN=queG PE=3 S V=1
MEALNTLKKEIIAYSKEIGIDKIGFTTADPFTELKNRLIRQRELNYQSGFEEPDIEKRTDPRLSLEGAQSIISIAVCYPSKMKNPVRGNREERRGIFARSSWGEDYHRVLNDKLEKLGQFIRSKVPDARYKPMVDTGPLADRAVAERAGIGWSGKNCAIITPEFGSYVYLGELITNIPFEPDAPIEDRCGSCNRCLEACPTGALVRAGQINAKICISYLTQTKEDIPEPYRKKIGNRLYGCDTCQVVCPYNKGKDFHFHPEFEPDPEAAKPLLKPLLSISNREFKERFGHMSGAWRGKKPIQRNAIIALAHFKDVTAVEDLGKVLAEDPREVIRKTAAWALGKIGGERAKEILSSARDREKSEQVLAEIGQALKMLQ

SEQ ID NO: 75375 - protein, 373 aa, Caldicoprobacter faecalis
  misc_feature (1)..(373): tr|A0A1I5SX07|A0A1I5SX07_9FIRM Epoxyqueuosine reductase OS=Caldicoprobacter faecalis OX=937334 GN=SAMN05444406 _10391 PE=4 SV=1
MENLDILKAELIERGKHLGFPVIGITDARPFDLWCQAVEVRRTMDSKVERVLSRLTPYPEDLMPDARAIVVAVHPYLPYPEEFPEGVPRYSAHYVEYPGARKAVEELARVIGQRGYKVMVEPPLPAKAAAYRAGVGTFGKNGLIYVGEYGSWVTLHLILTDAPLSCDSQSQDLCLCGECNRCIQACPAHAIADDGAVLPGRCLRAYMLSSEFVPVDIREKLGTRLLGCDICQMVCHRNSRITRQARLPEDDHLRPFDVYALIKALVENDRKSIEAVASLIGSNYARPQRLLSSAIIVAGNFGQPKFVPLLIKTLKHPHPPIRAYSAWALGKIGGRESMNALADALKDETDERVIQEIKRAQEIAGLSECRSDA

SEQ ID NO: 75376 - protein, 384 aa, Caldicoprobacter oshimai
  misc_feature (1)..(384): tr|A0A2W4KHH4|A0A2W4KHH4_9FIRM 4Fe-4S ferredoxin-type d omain-containing protein OS=Caldicoprobacter oshimai OX =551788 GN=DIU64_05515 PE=4 SV=1
MQKLLKKGAAVVENLDILKAELIERGKHLGFPVIGITDARPFDLWCQAVEVRRTMESKVERVLSRLTPYPEDLMPDARAIVVAVHPYLPYPEEFPEGVPRYSAHYVEYPGARKAVEELARVIGQRGYKVMVEPPLPAKAAAYRAGVGTFGKNGLIYVGEYGSWVTLHLILTDAPLSCDSQSQDLSLCGECNRCIQACPAHAIADDGAVLPGRCLRAYMLSSEFVPVDIREKLGTRLLGCDICQMVCPRNSRITRQARLPEDDHLRPFDVYALIKALVENDRKSIEAVASLIGSNYARPQRLLSSAIIVAGNFGQPKFVPLLIKTLKHPHPPIRAYSAWALGKIGGRESMNALADALKDETDERVIQEIKRAQEIAGLSECRSDA

SEQ ID NO: 75377 - protein, 405 aa, Caldilinea aerophila
  misc_feature (1)..(405): tr|I0I483|I0I483_CALAS Putative iron-sulfur binding pro tein OS=Caldilinea aerophila (strain DSM 14535 / JCM 11 387 / NBRC 104270 / STL-6-O1) OX=926550 GN=CLDAP_20310 PE=4 SV=1
MQLSPVLIQAIRRQAHQLGFDFCSFAPAGEAPHADFFDAWIEAGRAGEMSYLERHREKRRFPALLAEPPSPPFETMVVLAVDYHQFDLPPEVRNDPSRGIIASYAWGDDYHEILRPLLYELDAFIRSQTGRSTLGKCLVDTGPVLERDWAAVAGIGFTGKNCCTIRPSVGSWLFLAVILIPERLPAGWTSRREEGREEEGKRPMTCGRCTRCLSACPTDAFVGPYELDPLRCIAYWTIEARSIIPRSLRSAFGNRIFGCDICQEVCPYNRRLGERTPRLAGLRARHERVAPPLLEGFDPAHPYWLNQEAFNKQFARSPVRRARRGGMLRNVCVALGNWGAPATVPALAHALRDPEPVARAHAAWALGRVLARQPHEQAANLLAMAMEQETDSRVREEIHLALHGV

SEQ ID NO: 75378 - protein, 206 aa, Caldilineae bacterium
  misc_feature (1)..(206): tr|A0A3M1G293|A0A3M1G293_9CHLR DUF1730 domain-containin g protein (Fragment) OS=Caldilineae bacterium OX=242033 2 GN=D6790_04565 PE=4 SV=1
MSESELAVEIKAEAERLGFDACRIAAVDAPPHLAFFQRWLALGRAGEMTYLARHVAKRANPARLAEDAPPFRSLIVLAVDYHQFDLPREVVADPSRGLIASYAWGNDYHDLIRPALHELDGFIRAHTGRTTRGKALVDTGPVLERDWAYKSGLGFTGKNCCTIRPGLGSWLFLAVLLVPEALPADPPPQIVDAPQISPDDVAAGLA

SEQ ID NO: 75379 - protein, 402 aa, Caldilineae bacterium
  misc_feature (1)..(402): tr|A0A3M1ER36|A0A3M1ER36_9CHLR tRNA epoxyqueuosine(34) reductase QueG OS=Caldilineae bacterium OX=2420332 GN=q ueG PE=4 SV=1
MKSARRAGQTFKTSASHLMAEQLRFLTKRLLLHSVRYCSPNAANGKTMTRQILAQRIKERARAMGFTGAAIVPATPAEHARYYRAWLEAGYHAEMAYLARPDAVARRANMARTVPNAQSVVVVTANYHTQHLPPSILNDPSRGIIASYAWGVDYHDLLTPRLYELQAWIASQVEDPLHGRAYVDTGPVLERALAARGGLGFIGKNTCLIDPLRGSYLFVGEIILDCPLPFDAPSPRGTCGRCTRCLSACPTGAFPAPHTLDSRLCISYLTIELKGEIPVALRPKLGNRIFGCDICQEVCPYNRRFAMPTDEPAFRATLERAAPPLLELVALDEAGFRERFRGSPVRRAKRRGLLRNVCVALGNWGDPAAIPALQRARHDPEPLIRHHAAWALAQIAARRAKS

SEQ ID NO: 75380 - protein, 374 aa, Caldisalinibacter kiritimatiensis
  misc_feature (1)..(374): tr|R1CT77|R1CT77_9CLOT Epoxyqueuosine (OQ) reductase Qu eG OS=Caldisalinibacter kiritimatiensis OX=1304284 GN=L 21TH_2050 PE=4 SV=1
MNLKDYIIDKAKGIGIDIIGFTDAEPFDEVKEFLIQRKEKGFHTEFEEEDLEKRYNPKLHLPSAKSIIVIGLSYNVDFKLKRDNKLVGRLSKSSWGIDYHKVVKEKIQLLVEEIRKIIDFDYKAFVDTGPLIDRYIAEKSGIGWYGKNCSIINDEFGSFIFLGYILTDLDLQKDNSLKSKCEDCRLCIDACPTNAIQEDYKINATRCVSYLTQTKKRIPYELRDKMGVKIYGCDTCQLVCPKNKNVKKGQIKEFIPHKTSGYLDLLELLKISNKEFKKKYGHISGSWRGKNILKRNAIIALGNIGDKKYLDLIEKQLNDPSPMIREYAAWAILKIDIKRGKELLKQRLQLEKDKEVKEELEKLLKYFKVENKLT

SEQ ID NO: 75381 - protein, 317 aa, Caldithrix abyssi
  misc_feature (1)..(317): tr|H1XPY3|H1XPY3_9BACT Epoxyqueuosine reductase OS=Cald ithrix abyssi DSM 13497 OX=880073 GN=queG PE=3 SV=1
MTKENLTRAIKQIAMELKFDRVGIAQAEKTPGAAQLDEWLAQGKHGEMLWMEKYRDIRKDIRKFFPQARSIIMVALNYYTPYQIKDNPHTAKISRYAWGSDYHKILKKKLKRFLSELKKIDDGMEGRAFVDSAPVMEKQWAVLAGIGWQGKNTNVLTRDMGSWFFLGGLAVNRELIYDRPLQDYCGSCNACVEACPTDALKPYELDANRCISYLTIEYRDKPIPTELGGKLHNWVFGCDICQDVCPWNRFARETEEQRFHPKQPVLVNPPLTFLQKLSPKDFDMLFAGTPVRRARYANFKRNVQTVMDSRPGQDKKA

SEQ ID NO: 75382 - protein, 361 aa, Caldithrix sp.
  misc_feature (1)..(361): tr|A0A523J479|A0A523J479_9BACT Epoxyqueuosine reductase OS=Caldithrix sp. OX=1962856 GN=queG PE=3 SV=1
MTLTKKIKHKAHLLGFELVGVAPVEPVPELSFYKEWIEAGYAGKMEYLARNPDKRTDVREVVAEAKSVVVCALIYHTRHPLSTEQNDPGRGWISRYAWGDDYHNVIQEKLYELIDFIKAESPDEVISRLYVDTGPVVDRVFAKYAGIGWFGKNTCIINQQKGSWFFLGEIITNLELDYDSTVPDRCGTCNRCIEACPTDAILEPYVLDSRLCISYLTIELRDEIPVELREPMGNHIFGCDICQDVCPWNHRAAATDKPAFQPREGLLNPDLEEIAKLSIEEFREKFRQSPVKRAKYAGFLRNVAVAMGNSGNSKFLSVLEELSEHEEPLVSGHAKWAVEKIHGVEENNLLANTQREESLST

SEQ ID NO: 75383 - protein, 360 aa, Caldithrix sp.
  misc_feature (1)..(360): tr|A0A523HR19|A0A523HR19_9BACT Epoxyqueuosine reductase OS=Caldithrix sp. OX=1962856 GN=queG PE=3 SV=1
MANVTILAPDFGIQNQVTLTDKIKQKALALGFDLAGVAPVGPVPELSFYRDWIDAGYAGKMAYLEKNIDKREDITRVVPEAKSVIVCARIYNTNQPLSVEQTDRTRGWISRYSWGDDYHDVLQKMLFELLDFITLAAQDEVIGRIYVDTGPVIDRVYAKYAGIGWFGKNTCLINQEKGSWFFIGEIITNLELAYDSPTPDRCGTCTRCIDACPTDAILEPYVLDARQCISYLTIELKEDIPVELREGIGNHVFGCDICQDVCPWNRKAAETDSDAFKPREGMMNPELDTLANLSLEEFRQRFQGSPIKRTKYKGFLRNVAVALGNSGESRFLPLLQKLAQNEEPLIARHAAWAIKKLKQS

SEQ ID NO: 75384 - protein, 317 aa, Calditrichaeota bacterium
  misc_feature (1)..(317): tr|A0A3M1NLZ2|A0A3M1NLZ2_9BACT Epoxyqueuosine reductase OS=Calditrichaeota bacterium OX=2212469 GN=queG PE=3 S V=1
MDDLVTRIKEKGMALGFSAVGICDAAPLEEESRKLDLWLSRKFHGTMEWMERTRSQRVDPRSYFPEAKSIVVVAVNYFRKDEPLKLPQDKASISIYARGRDYHKVIRKKLKALLKEIQQWVPGVKGRVCVDSFPIMEKSLAVKAGLGWIGKHTNLILKSKGSYFFLGELLLNISIPSDTPFTFDHCGSCHRCQEACPTDALSEAYVLDSRKCISYLTIEHKEGIDENLKPGIGNWVFGCDICQIVCPWNKFSESTQISDFHTRIPESWLPLERLEKITSDEFEHLFQGTPVKRAGYENFKRNVGIALTNYRATVKRS

SEQ ID NO: 75385 - protein, 320 aa, Calditrichaeota bacterium
  misc_feature (1)..(320): tr|A0A3M2FQ66|A0A3M2FQ66_9BACT Epoxyqueuosine reductase OS=Calditrichaeota bacterium OX=2212469 GN=queG PE=3 S V=1
MNPFELTRIIKEKARALGFDKVGVAGAGPLPKADFLKEWLSRGHHGQMTWMENYVEKRMDVRKLYPQARSVVAVAMNYYTPFEHNPAPDSAKISRYAWGRDYHRIMKKKLKHLLREIRELDPELDGRLFVDTAPIQDKLWAEQAGIGWQGKNTNIISREYGSWLFLGELVLNRELVYDRPIRDFCGSCTACIDACPTDALTPYRLAAEKCLSYITIEMWDRPIPASIQSRMEGWVFGCDICQDVCPWNRFQKPSEEPAYYPENANHHTTVKELEALTEETYKTRFKKSPVYRAGYKNFMRNVRALKKEGALSPEHDRDRK

SEQ ID NO: 75386 - protein, 119 aa, Calditrichales bacterium
  misc_feature (1)..(119): tr|A0A524LCC3|A0A524LCC3_9BACT DUF1730 domain-containin g protein (Fragment) OS=Calditrichales bacterium OX=252 8038 GN=E4H13_11955 PE=4 SV=1
MTSLTAQIKELAYASGFDKVGITAARQPGKSAYLTEWLNRSYHGTMNWMDTHRSKRISIQEFVPGARSVICVACNYNAPDIHSSDPARGKISRYAWGEDYHKIIKKKLKRLLSEIKKYD

SEQ ID NO: 75387 - protein, 331 aa, Caloramator australicus
  misc_feature (1)..(331): tr|I7LKH2|I7LKH2_9CLOT Iron-sulfur cluster-binding prot ein OS=Caloramator australicus RC3 OX=857293 GN=CAAU_23 82 PE=4 SV=1
MIKEKIINYAKHIGIEYIGFSSINFKDEFVNRLREKRLNGHLSGFEEQDEYKRTNVKNIMENAKSFISIAVPYRTMEIDYNKPYFSKSSLGLDYHKVLYNKLNKIQIYLKEEFNANSFYFCDIGPLHDREIAYMSGIGFYGKNTNIYTEKYGSFVFLGELVTDIYIEPDIPIESKCGDCEICMKACPTGAIERPYYVNSKKCLSYITQKKDGLTYEEMAKMGNRIYGCDTCQDVCPLNKRALFSNIKDFMPEEWNINIVAEDFLNMSNKRFKETYQKTSGGWRGKKILQRNLIIALANSRTNEGHAKIKSLINDDYFSYYVEYYLKRMGGY

SEQ ID NO: 75388 - protein, 342 aa, Caloramator fervidus
  misc_feature (1)..(342): tr|A0A1H5SJN5|A0A1H5SJN5_9CLOT Epoxyqueuosine reductase OS=Caloramator fervidus OX=29344 GN=SAMN05660865_00380 PE=4 SV=1
MYRKKLWGEKMIKEKIKEYANKIGIEYIGFSSVEFSFDFIERLKERRLNGHLSGFEEKDEFKRVDVSSILSNAKSFISIAVPYRTVDLDYSRPYLSKSSLGIDYHIVLKNKLELLKVFLKEELGAESIYFCDIGPLHDREIAYKCGIGFYGKNTNIYTKKYGSFVFLGELITDLYIEPDYPIESKCGSCDICIKSCPVGAIEKPFYLNSKKCLSFITQKKETLTYDEMIKMGSRIYGCDICQDVCPFNKKAEYSNIVDFKPESWNINIEVERFLTMSNKQFKETFQKTSAGWRGKKVLQRNLIIALANLKSKEGYNKIKSLIEDEYFSYYVKYYLNRLGEFK

SEQ ID NO: 75389 - protein, 330 aa, Caloramator mitchellensis
  misc_feature (1)..(330): tr|A0A0R3JWP5|A0A0R3JWP5_9CLOT Epoxyqueuosine reductase OS=Caloramator mitchellensis OX=908809 GN=queG PE=4 SV =1
MAKEKLISFARKIGIDYIGFSDINFSDNFVERLVEKRNNGHLSGFEEFDVIKRIDVKSLLKDAKTFISIAIPYKTIDIDYSKPYFSKSSMGIDYHKVVSKKLELIKNYLMDEFGANSVYYCDTGALHDREIAKKCGIGFYGKNTNIYTEKYGSYVFLGELITDMYIEPDIEKLSKCGECDICIKACPVGAIEKPYYVNSQKCLSYVTQKKELLTENEMNSMGLRIYGCDICQDACPFNKSIGISNIIDFLPNDWNININIEKFLTMSNKEFKETYGKISGGWRGKKILQRNLIIALGNSKRGEYKELIKKYMNDEYLNFYAKYFLKRLEE

SEQ ID NO: 75390 - protein, 333 aa, Caloramator proteoclasticus
  misc_feature (1)..(333): tr|A0A1M4W9S1|A0A1M4W9S1_9CLOT Epoxyqueuosine reductase OS=Caloramator proteoclasticus DSM 10124 OX=1121262 GN =SAMN02746091_01097 PE=4 SV=1
MSIKNQIIEFSKSIGVEYIGFCRAEYTDDFIKRLNYSYHKNYNCEFQTTEVQKRINIKEYMEDAKTFISIALPYKTIEINKSKPYFSKSSLGKDYHIVVKNKLKLIEDFLQNNYNAKTLSFVDTSPMHDREIAYMCGIGFYGKNSTLITEKYGSYVFLGEILTNIYIEPSTPMSSLCGSCDKCLKACPVGAIKKDYFIDANKCLSYITQKKDDLSEQEQTKLGLRIYGCDTCQDVCPFNHKAQISNIEDFLPEDWNININEDDFLNISNSQFNKTFKTTSAGWRGKKVLQRNLIIAMGNSGKKEYLDILKRLNKNEYLEKYIKNAIKKLEVKK

SEQ ID NO: 75391 - protein, 335 aa, Caloramator quimbayensis
  misc_feature (1)..(335): tr|A0A1T4XW23|A0A1T4XW23_9CLOT Epoxyqueuosine reductase OS=Caloramator quimbayensis OX=1147123 GN=SAMN05443428 _1143 PE=4 SV=1
MIREKIIKFANSIGIDCIGFTDIYFSDEFIKRLRERKIFGHLSGFENSDESIRTDVNRLLEGAKTIISIAVPYKTVEIDKTKPYISKSSLGMDYHKVMNYKLKSISEYITNEFSGKCVYYADTGCLHDREIAKKCGIGFYGKNTSIITQKYGSFVFLGEVITDLYIERDLEIDSLCKDCTLCIDVCPINALEKPYYLNAKKCLSYITQKKETINDIEIKKMGLRVYGCDTCQDVCPFNKGVIFSNVKEFHPEEWNINISPDKVLNMTNKEFKNFFGSTSSGWIGKKRFQRNMIIALGNSNNKDYIPLLESKLNDDYLKHYAEKSINRLRGNLNEK

SEQ ID NO: 75392 - protein, 331 aa, Caloramator sp.
  misc_feature (1)..(331): tr|A0A5B7TMJ7|A0A5B7TMJ7_9CLOT tRNA epoxyqueuosine(34) reductase QueG OS=Caloramator sp. E03 OX=2576307 GN=que G PE=4 SV=1
MIKDNIIKYAGSIGIDCIGFSDTYFDDIFLNRLKERREAGHLSGFEEVDENVRIDINSLLEDAKTIISIAIPYKTIEVDKSKPFLSKSSLGIDYHRILKDKLNNISEFIKNTYGAKTIYFADTGCLHDREVAKKCGIGFYGKNTSIITKEYGSFVFLGEIVTDLFIERDVEIESKCGDCTLCLDACPTKALEKPYYLNAKKCLSFVTQKKEILTDYEMKKMGLRLYGCDVCQDVCPYNKNVKTSSVKEFYPDTWNINIDPDKILKMTNNEFKKYFGLTSSGWIGKKRFQRNMIIALGNSNNKNYIPLLESKLEDDYLKYYVEKSIIKLKGD

SEQ ID NO: 75393 - protein, 231 aa, Caloranaerobacter azorensis
  misc_feature (1)..(231): tr|A0A1M5RA18|A0A1M5RA18_9CLOT Epoxyqueuosine reductase QueG (Queuosine biosynthesis) OS=Caloranaerobacter azo rensis DSM 13643 OX=1121264 GN=SAMN02745135_00140 PE=4 SV=1
MNLTFREKIIEKAISMGASKVGFAKLENFLPDNFSHLKTGISIIVRLSDQIMNDVVDKPTHTYFHHYRTVNFLIDQITLAITIMIQNEGYLAMAIPASQTVKTKTDAYTGIFQHKTVATLAGLGWIGKNACLVTEEFGPRIRLGTVLTNMILPYDEPIRNSKCGNCNICVKKCPALALKGNNWYQGMDRDALIDAFACSSYMSEQYKDIGRGSVCGLCISSCPKGTKIIRK

SEQ ID NO: 75394 - protein, 373 aa, Caloranaerobacter azorensis
  misc_feature (1)..(373): tr|A0A096DM22|A0A096DM22_9CLOT 4Fe-4S ferredoxin OS=Cal oranaerobacter azorensis H53214 OX=1156417 GN=Y919_0690 0 PE=4 SV=1
MDLKKFVKEKAIEVGLDIIGFCSAEPFYEIKEYLTFRKQKGYMAEFEQEDIKLRIAPKEIMPSANTIIAAGLSYNVDFKNNIDIKSIFKGRLSKSSWGIDYHNVLYRKLELLVDYIKEIKDDVEYKIFVDTGSLVDKEIAKRAGIGWYGKNCLIINDEYGSFIFIGYIITNLEIEADSESISKCGDCRLCLDACPTKALEDAYVLNPKRCISYLTQTKEKIPYELRDKMNNKIYGCDTCQLVCPKNKNVKKGKTEEFIPKVTGGYLDIVEIFNLSNKEFKKKYGHITGSWRGKNILKRNCIIALGNLRDKRAIELLNKSLEDSSPMIREYSAWALMKIDRKIGKRILLSHLEKEKSKEVKQEIYNLIEYFDSR

SEQ ID NO: 75395 - protein, 373 aa, Caloranaerobacter sp.
  misc_feature (1)..(373): tr|A0A0P8V449|A0A0P8V449_9CLOT 4Fe-4S ferredoxin OS=Cal oranaerobacter sp. TR13 OX=1302151 GN=TR13x_06815 PE=4 SV=1
MNLKKFIKEKAIEVGLDIIGFCSSEPFHEMKEYLVLRKQKGYVTEFESIDIESRINPKKIMSSAKTIIAAGLSYNIDFNNNDKENILQGRLSKSSWGIDYHNVLYGKLESLVSHLKKIKDIEYKIFVDTGPLVDREIAKRAGIGWYGKNCLIINDEYGSFIFIGYIITNLEIEVDSESVSNCGNCRLCLDACPTKALEDDYILNPKKCISYLTQTKEKIPYELRDKMNTKIYGCDTCQLVCPKNKNARKGKTKEFIPKVTGGYLDIVEMFNLSNKEFKRKYGHMAGSWRGKNILKRNCIIALGNLRDKRAIELLSKALGDSSLMIREYSAWALMKIDRKLGKKMLLSHLEKEKSIEIKEEIHKLIDYFDRIVD

SEQ ID NO: 75396 - protein, 324 aa, Calothrix brevissima
  misc_feature (1)..(324): tr|A0A1Z4K542|A0A1Z4K542_9CYAN Epoxyqueuosine reductase OS=Calothrix brevissima NIES-22 OX=1973478 GN=queG PE= 3 SV=1
MNNSGITTSDVVKKKAQELGFHKVGIAAVDGVEKTAAQRLQAWLALGYNADMGWMANPKRQDIHLVMPEGRSLICVALNYYTPHQRPEGEEYAKISRYGWGRDYHKVMDKKLKALTIWLRSQSEDVKAIYYADTGPVQDKVWAQKAGIGWIAKNGNVITREYGSWVFLGEIITNLSLESDRPATQHCGTCTRCLDACPTGAITSPYVVDANRCIAYHTIENRAETLPESVQSHLHGWVAGCDICQDICPWNLRFSQETDVAEFHPYPGNVAPKLIELAKITDEEWERQFPASALRRIKPEMLRRNARANLDASRQQNDSESNYL

SEQ ID NO: 75397 - protein, 321 aa, Calothrix desertica
  misc_feature (1)..(321): tr|A0A3S1AP86|A0A3S1AP86_9CYAN Epoxyqueuosine reductase OS=Calothrix desertica PCC 7102 OX=232991 GN=queG PE=3 SV=1
MSGLQKISSDEVKRKALELGVHKVGITVASANSFSEVNNLSKWLELGYQADMMWMSNKARQDIKLVMPDVKSLVCVALNYYTPHQHQEVTGTGDRCGKISRYAWGRDYHKVMHKKLKALSSWLESLHPDIKTRYYADTGPIQDKVWSEKAGIGWIAKNGNVISRSHGSWIFLGEVLTNLELTPDTPHTKHCGTCTRCIDACPTGAIIADGVVDANRCIAYHTIENRSEELPETIKSKMQGWVAGCDICQDVCPWNQRFANVTDVVEFQPYPENVAPSLTELAEISDEKWDKRFTASALRRIKPSMLRRNARANIEAFQAKL

SEQ ID NO: 75398 - protein, 324 aa, Calothrix elsteri
  misc_feature (1)..(324): tr|A0A2A2TE57|A0A2A2TE57_9CYAN Epoxyqueuosine reductase OS=Calothrix elsteri CCALA 953 OX=987040 GN=queG PE=3 SV=1
MNQLPRVSSNKVKEKALELGFHLVGIAEPDGMETQAVKKLQGWLTLGYQADMAWMANPKRQDIKLVMPSVRSLICVALNYYTTHQRPEGEEYGKISRYGWGRDYHKIMHKKLKALSIWLESLSDGVKARYYADTGPVQDKVWAQRAGIGWIAKNGNVITREYGSWVFLGEVVTNLELVPDQPHSEHCGTCTRCIDACPTNAIANPGVVDANLCIAYHTIENRSEALPEEIKSNLQGWVAGCDICQDVCPWNQRFAKNTNVSEFEPYTGNLAPKLVELAAISDEEWDKQFPASALRRIKPEMLRRNASANLEASRQKHDEESDYL

SEQ ID NO: 75399 - protein, 317 aa, Calothrix parasitica
  misc_feature (1)..(317): tr|A0A1Z4LVE9|A0A1Z4LVE9_9CYAN Epoxyqueuosine reductase OS=Calothrix parasitica NIES-267 OX=1973488 GN=queG PE =3 SV=1
MNQSSSPSSIQIKEKALELGFHKVGIAAVNLTETQVQRLQAWLALGYHADMEWMRNPKRQNIKLVMPEVRSLICVALNYYTEHQRPEKKEYGKISRYAWGRDYHKVVQKKLKAFSIWLESFGEEIKTRHYIDTGPIQDKVWAQQAGIGWIAKNGNVITREYGSWVFLGEILTNLELTPDTPHTQHCGNCTKCIESCPTDAIREPFVVDANRCIAYHTIENRDDKLPENIAENMQGWVAGCDICQDVCPWNQRFANNTDIEEFQPYPGNIAPKLIELARITDENWDKQFPASALRRIKPQMLRRNARANLKASRIQRP

SEQ ID NO: 75400 - protein, 326 aa, Calothrix sp.
  misc_feature (1)..(326): tr|A0A0T7BYL5|A0A0T7BYL5_9CYAN Epoxyqueuosine reductase OS=Calothrix sp. 336/3 OX=1337936 GN=queG PE=3 SV=1
MNQLPEKSQRLDALTIATSEIKDKALNIGFHKVGIARVADWEQETPHHLQAWLKQGFHGDMEWMTTPKRQDIKLVMPEARSVISLALNYYTAHQHPQGTEYAKISRYGWGRDYHKILHKKLKALTNWLQSLHPDIQARYYADTGPLQDKLWAQRAGIGWIAKNSNLITREYGSWVFLGEIVTNLPLTPDSPHTEHCGTCNRCLEACPTKAIAKPFTVDANLCIAYHTIENRAEQLPENITPHLNGWVAGCDICQDVCPWNQRFAKETDIEEFQPYPGNLTPKLLELAEISDQEWEKRFTASALRRIKPKMFRRNAQSNLKTLNQDK

SEQ ID NO: 75401 - protein, 324 aa, Calothrix sp.
  misc_feature (1)..(324): tr|K9PKC8|K9PKC8_9CYAN Epoxyqueuosine reductase OS=Calo thrix sp. PCC 7507 OX=99598 GN=queG PE=3 SV=1
MEKRAVINSNVIKEKASELGFHKVGIAAVDGVDATEVQRLQAWIALGYHAEMAWMANPKRQDISLIMPEVRSLICVALNYYTPDQRPQGEEYAKISRYGWGRDYHKVMHKKLKALTIWLQSLGESIQARYYADTGPVADKVWAQRAGIGWIAKNGNVITREYGSWVFLGEVLTNLELESDRPSTEHCGTCTRCLDACPTNAITQPFVIDANRCIAYHTIENRSEKLPQTVAPHLQGWVAGCDICQDVCPWNQRFAHVTDVAEFQPYPGNIAPKLIELAEISDEEWDQQLPASALRRIKPEMLRRNARANLDASKQSNDPESNYF

SEQ ID NO: 75402 - protein, 414 aa, Camelimonas lactis
  misc_feature (1)..(414): tr|A0A4R2GWT1|A0A4R2GWT1_9RHIZ Epoxyqueuosine reductase OS=Camelimonas lactis OX=659006 GN=queG PE=3 SV=1
MRDASPPDSRRQRSAGHGKTARPETLEGAALKGAALREAVVARARAEGFDVARVAPAAALPETGARLMAWLDAGYHGDMEWMREGAERRASPQAMWPEARSALVLGLNYGPDHNPLDHLAARDRGLISVYAQGRDYHEIIKGRLKQVAGFLASRGGADVKVFVDTAPLMEKPLAARAGVGWQGKHSVLVSRTLGNWLFLGVILTTAELPPDPPGQPSCGSCRACLDVCPTQAFPAPYQLDSRRCISYLTIEHAGPVPHAFRKAIGNRIFGCDDCLAVCPWNKFARVGHDAKLAARAENDRPALAELLTLDDATFRSRFAGTPVKRTGRDRFLRNVLIATGNSGDARLAEPAARLLDDPSALVRGATVWALGQLLDADSLGKLRRQNAAERDPEVLAEWEAAAGFPAQISEPEQA

SEQ ID NO: 75403 - protein, 373 aa, Caminicella sporogenes
  misc_feature (1)..(373): tr|A0A1M6MUW2|A0A1M6MUW2_9CLOT Epoxyqueuosine reductase OS=Caminicella sporogenes DSM 14501 OX=1121266 GN=SAMN 02745883_00655 PE=4 SV=1
MDIKKEIIRYSQKIGIDLIGFIKAEPLEELRGLLNDRKSKNYLSGFEEEDIEKRINPALTMKEANTIIVIAMSYYINDKEINYPKKYKYCGYISRSAWGMDYHIILKDKMEQLISFIKNKVDKLKYKYFVDTGPLVDRYLAYKANIGWYGKNNCIINKDYGSWIFIGYILCNLDIESDKFCKNSCLNCNKCINSCPTGALKDNYNYNAKKCISYLTQTKEELDYELREKMGNNIYGCDTCQSVCPHNQKIISKKNNFFYPNEFTYYPNLLEILEMSNKEFKEKYKMTAAGWRGKNIIKRNALIAIGNIGDREVIDVIKKYLNEKSIMIRKYTAWAILKLDRKRGKNILIKHLKVEENSEVIEEINNLFKYFNI

SEQ ID NO: 75404 - protein, 330 aa, Campylobacter jejuni
  misc_feature (1)..(330): tr|A0A4U9P0W7|A0A4U9P0W7_CAMJU Epoxyqueuosine reductase OS=Campylobacter jejuni OX=197 GN=queG PE=4 SV=1
MARHGMLRARPHELLPGTLRVISVRMNYLPAKAAFAKTLNNPQLGYVSRYALGRDYHKVLRQRLKKLGDMIQAHCTEHADQTVTFRPFVDSAPVMERPLAAKAGLGWVGKHSLTLNRESGSWFFLGELLIDLPLPVDQPQEEKCGKCVACITTCPTGAIVAPYTVDARRCISYLTIELEGAIPEEFRPLMGNRIYGCDDCQLICPWNRYSQLTDEEDFSPRAALHAPELIALFGWTEEKFLRITEGSPIRRIGHLRWLRNIAVALGNAPYAEDVLNALQSREGENALLDEHISWAIAQQVERRQEHRVEVQTSQQKRLIRAVEKGLPRDA

SEQ ID NO: 75405 - protein, 345 aa, Unknown
  misc_feature (1)..(345): tr|A0A1V5FIW4|A0A1V5FIW4_9BACT Epoxyqueuosine reductase OS=candidate division BRC1 bacterium ADurb.BinA292 OX= 1852824 GN=queG PE=4 SV=1
MVRVQANTEARELRERIRAEALAVGFSRAGFAGAEPLGPTIERRRTEWLAEGRAGAMQYLHREHPRRTHPRDLLPEARTALVVLAGYYDGDHPPAAPDEGRIARYAWGEDYHGVMRRRLDALAERIQRIAQGAGIAAPLRMRPCVDSAPIDERALAARAGLGFIGKNTLLIDPAGGSWTLIGVLLISLDLPPDEPLRGPAASCAGCRRCLDACPTGAIDRPYRLDARRCLSYLTIEQKNEIPLELAARMEGWAFGCDICQEVCPFNDRPLGRLLPELAADRGAGPLATPAMLERDPSARAFRRRWGHTPLERPGRKGLERNLRALAAGRRPVPAGAIRPIQEDPS

SEQ ID NO: 75406 - protein, 321 aa, Zixibacteria bacterium
  misc_feature (1)..(321): tr|A0A1F4YA03|A0A1F4YA03_9BACT tRNA epoxyqueuosine(34) reductase QueG OS=candidate division Zixibacteria bacte rium RBG_16_53_22 OX=1802787 GN=A2W25_13710 PE=4 SV=1
MAIKQALEKEALSLGFAAFGVAPAEYNPAPHNSHLRWLDKDYQGTMGYLERGVRRRFDPRVHLPGARSVIVCAHPYYSEPQNDPTRPYVSIYARGENYHTVLNDKLEALGRKMRELAGDIFYKIFVDSSPISEKTFAVKAGIGFIGRNGMVIIPRKRDGKKPQSHGSFHFLGLIITDLELEPDSPREGTCGQCRKCIETCPTEAIVDDGVVDANRCISYQTTQNKGRIPDDIARASGNMIFGCDICQIVCPYNSGISAAAEPRFFPDPDLVRADLTRLLEMTAAEFASRFEKSSIGEFKYEMFRRNAGIVNENIKSGKTEH

SEQ ID NO: 75407 - protein, 369 aa, Abawacabacteria bacterium
  misc_feature (1)..(369): tr|A0A1F4XKP5|A0A1F4XKP5_9BACT tRNA epoxyqueuosine(34) reductase QueG OS=Candidatus Abawacabacteria bacterium RBG_16_42_10 OX=1817814 GN=A2V81_01970 PE=4 SV=1
MHFDVSVHKIIHKLAYEQSFDLIRISKASVLQKDKEFYLQWLKNGEQGEMAYLDRDPERRYNPAKILPGVKSIIIAGLNYGEKPTKISDNTKVNIARYAKNKPDYHKVFEKKLSTFSESLTQNFSKINAKFYVDYGPLMERPYAAASSMGFIGKNTTLITPQFGSWVLLGEILTTLEIPEETPQKHGSCGSCRKCLDICPTKALKSAYDLDSRLCISYLTIENKGPIPVKLRKQIGTWLFGCDLCQEVCPHNVRAQAYVPQKWQDITIEPDLKNSMYLSSIAFLKKILTIKSEQEFKIFFKNTPFLRAKRVGLIRNACIVAGNLGNRELLPYLENLTNDESELIREHAAWAIDELKKPLHGRNSPPIVQ

SEQ ID NO: 75408 - protein, 346 aa, Abyssubacteria bacterium
  misc_feature (1)..(346): tr|A0A419EXQ5|A0A419EXQ5_9BACT Epoxyqueuosine reductase OS=Candidatus Abyssubacteria bacterium SURF_17 OX=2093 361 GN=C4532_10415 PE=4 SV=1
MQSLTEIVLDYVMCENACAAGIATVETLAGGPPTADLTYVLPNAKSAVCFALPLDQSLIPPYLAKKDRLSHERDNFRTNFLASGIALGLTRFLEQKGFPSYAVAANEVYRQDTPRGAIDMIPDVSLRYLAVRSGVASFGLSGNVLRKNEGAAIILGAVVTTADLEPTDPLPKEDNYCDNCRLCMASCASSFMDPEEEASVTLGGIEFKYSKRRSYLRCEFVCGGFTGLHSSGKWSTWSPGRFTIPTDEREFMPALLHGIDAYNQRPPTQGGHHHVLMDSRLYLTCGNCQLICHPDKEERKRRHKILRESGVIVQNADGSLDAVVPEVARERLASMDPEKRALYERV

SEQ ID NO: 75409 - protein, 348 aa, Abyssubacteria bacterium
  misc_feature (1)..(348): tr|A0A3A4PBZ4|A0A3A4PBZ4_9BACT Epoxyqueuosine reductase OS=Candidatus Abyssubacteria bacterium SURF_5 OX=20933 60 GN=C4520_00005 PE=4 SV=1
MYSLEQLIIDRVMGEGACAYGFATTETLAGGPPSVNLEYVLPGARSAISFAIPLDQSCIPPYLMKKDHLSQQKDNTRANKIASGIALDLARYLEQKGFPSYPVASNQVYRQDTPRGIFDLKPDVSLRYLAVRSGVSHMSLSGNAITKNEGAAIILGGVVTTAELHPTAPLPQEENYCDGCRLCMAACLSGLMDPEEEEIITLGGVSFTYAKRREYNRCGYVCGGFTGLHPSGTWSTWSPGRFPIPERDEDFGPAVMQHLDIHTRRPAMDGARIHPLIEGKFSMTCGMCQLVCAPDKEERKKRYKMLAESGCAVQNPDGLIEAVPPAEACRRLAAMDSETRALYEEVQG

SEQ ID NO: 75410 - protein, 403 aa, Accumulibacter aalborgensis
  misc_feature (1)..(403): tr|A0A1A8XKI3|A0A1A8XKI3_9PROT Epoxyqueuosine reductase OS=Candidatus Accumulibacter aalborgensis OX=1860102 G N=yjeS PE=3 SV=1
MQQGSQVTAKAGGGRLIGEVQAKRGLVMIGAMQEKDSKTNAAGGQTLGQNAYAEMARRIKDWGQELGFAAIGIAGADVSAATPRLMAWLALGRHGEMDYMAKHASLRADPGRLLPGTLSVISARLTYWPEAADAEKVLADRELAYVSRYALGRDYHKTVRQRLQALADRLRGDIAALAPAQPFSCRVFSDSAPVLETELARQSGIAWRGKHTLSLTRGGSWHFLGEIYTNLPLPPDAPIADHCGDCRRCLDVCPTQAIFAPYEVDARRCISYLTIELQGAIPVDLRSLIGNRIYGCDDCQLCCPWNRFAGLGDADFAVRNGLDAMPLAALFAWSEEEFNRRLAGSALRRIGHQRWLRNIAVALGNAPGSPAIVAALASRQDDPSPLVREHVRWALAQHTARGV

SEQ ID NO: 75411 - protein, 364 aa, Accumulibacter sp.
  misc_feature (1)..(364): tr|A0A011MQI9|A0A011MQI9_9PROT Epoxyqueuosine reductase OS=Candidatus Accumulibacter sp. SK-12 OX=1454001 GN=q ueG PE=3 SV=1
MRVAGDAPSLSVGDAAALRRQISSWGAELGFAAIGVSGIDVAAAAPGLLRWLDLGRHGEMDYMAKHAALRLAPQALLPGVRTVIAARLPYWPPAADALAVLGDDRLAYVSRYALGRDYHKTTRHRLRKIAARLQEAAAKLGQPCSCRVLSDSAPVLETEFARQSGVGWRGKHTLSLTREGSWHFLGEIYTTLPLPADPPAEEHCGDCRRCLDVCPTAAIVAPYELDARLCISYLTIELPGSIPPSLRPLIGNRIYGCDDCQLHCPWNRFARMGDADFAVRNGLDAAPLTALLAWSESEFDSRLAGSAIRRIGHERWLRNVSVALGNAHPGTPGVVTALRSRLDHPSPLVREHVVWALARHQAAV

SEQ ID NO: 75412 - protein, 365 aa, Actinomarina minuta
  misc_feature (1)..(365): tr|S5DXE7|S5DXE7_9ACTN Putative Fe-S protein OS=Candida tus Actinomarina minuta OX=1389454 PE=4 SV=1
MLIKMKDLNVINYLNKNNIEIPKNIKISTVDIPSYENKSQRIKEVKDQQKHANMKFTFSNPDYSGLGDKFTWAESCIIISYNYGEIYSTNISTSTGKGSIARFAIDDYYKPIKKFIEKLKDHFDTLDLRTQEFIDSPSHYDRLFFEGSGLGWQGKSSMMLSPSIGPWQLIGNLYVEMKFETPVAKSYSCGNCNMCQISCPTGALDNEYKIDSRKCISYWLQSPEIIPHEIRTKIANRFYGCDDCLTSCPPGQNKFISLKQTKEVDLEKIINMDKDNLISKFEWFYVPQRNADYLKRNAIIALANNPDENSHELFIKLLDSDSDIIRLYSIWALWRIGMLDKVNEESFIKKEVSSDVKKEFERLKK

SEQ ID NO: 75413 - protein, 365 aa, Actinomarina minuta
  misc_feature (1)..(365): tr|S5DQK2|S5DQK2_9ACTN Putative Fe-S protein OS=Candida tus Actinomarina minuta OX=1389454 PE=4 SV=1
MLIKMKEKNLFNYLKIHKVEVPENINISIVSLPSLISKTTEIKKSKNENKHANMKFTFSDPEYSGLGDKFEWAKSCIVISYNYIPKSVNNHSFAPGEGAIALFAAEDHYKPLKRFMNNLIELFDNKHIQTHEFIDSPQHYDRIFFNTSGLGWQGKSTMMLSPGIGPWQLIGNLYVSESFDSSDQKKFSCGSCNLCQISCPTGALDEEYTLDSNKCISYWLQSPEIIPHDMRSYIGNRFYGCDECLTSCPPGQTKDFNIDLTSKVDLKRIIKMSNDELINSYSWFYIPKRNGDYLKRNALIALANNPDRSAVDFIFTLLKSESEIIRFYSIWAIWKLQSLGDLPQHYDVSFEKSELVKDEYLRLMK

SEQ ID NO: 75414 - protein, 367 aa, Actinomarinales bacterium
  misc_feature (1)..(367): tr|A0A520VTX6|A0A520VTX6_9ACTN 4Fe-4S ferredoxin-type d omain-containing protein OS=Candidatus Actinomarinales bacterium OX=2510331 GN=EVA29_01625 PE=4 SV=1
MKDINLLNYLSENNIDIPDGFNISVVRLPSQLNKSLEINRAKEENRHANMKFTFSDPNYSGLGDKFEWAESCIVVSYSYITENYSNLGFLPGRGSIARFAKKDYYIPLKEFINQIKEHFKKNNLRTAEFIDNPKHYDRLFFEQSGLGWQGKSTMMLSPGKGPWQLIGNIYVEKKFDLAAEKDYSCGSCNLCQISCPTSALDEEFILDSNKCISYWLQSPDIIPHDMRAQIGNRFYGCDECLISCPPGQGSVMNINTDTSVDLVQVLNSESDDLVRLYNWFYIPKRNGDYLKRNAIIALANNPSSDTKEIFISLLKSHSDLIRFYCIWGLWKIGDFEIVTQYLDIKNEKSEMILQEYQRLNEMIYSNK

SEQ ID NO: 75415 - protein, 361 aa, Actinomarinales bacterium
  misc_feature (1)..(361): tr|A0A2A5YDR0|A0A2A5YDR0_9ACTN Uncharacterized protein OS=Candidatus Actinomarinales bacterium MED-G02 OX=1986 262 GN=CND04_01035 PE=4 SV=1
MKEKNIFNYLKLNNIHIPKDINIAVISLPSLIDKSLLIQEAKSEKRHANMKFTFSNPEYSGLGDKFEWAKSCIVISYNYSPGSSNNHSFKPGDGAIALFASENHYKPLDNFINLLTELFQRQGIRIQQFIDSPQHYDRIFFNSSGLGWQGKSTMMLSPGIGPWQLIGNLYTEEKFEDTEKNTFSCGACNLCQISCPTGALDKEYTLDSNKCISYWLQSPDIIPHEMRINIGNRFYGCDECLTSCPPGQTKEFDETKTSTVDLKKILSMTNEELVEKYSWFYIPKKNGDFLKRNALIALANNPDEYSVKIIHKLLKSDSEIIRFYSIWAIWKITKFIDIEKFYDVDLEESELVKNEYLRLMK

SEQ ID NO: 75416 - protein, 310 aa, Aerophobetes bacterium
  misc_feature (1)..(310): tr|A0A565E9Y8|A0A565E9Y8_9BACT Uncharacterized protein OS=Candidatus Aerophobetes bacterium Ae_b3a OX=2012485 GN=CEE34_02995 PE=4 SV=1
MTGTLFSQLAKRGYKGRIVPIQHLNDLEEEIEDRHSRGSFDKEFYKERLDFFEFDPPDSLPKAKSIVTIAVPRPQVRVIFNWKGERLPLIIPPTYVAYKNTYRQVENLLREILGGQEYRMAKASLPEKLLAVRSGLGFYGKNNICYVNGMGSFHQLVSFYTELPCKEHSWQELQPMKRCLNCSACLRRCPTGAITPKRFLLRAECCIVFHNERVGDFPSWLDPNWHNCVIGCLECQRVCPENKNLLEWIEDKGEFSQEETALLSEGKQLDRLPSSMVIKLEKLDLVEYLDVLPRNLSVLFNKGKHSYPPT

SEQ ID NO: 75417 - protein, 365 aa, Aminicenantes bacterium
  misc_feature (1)..(365): tr|A0A1V6B177|A0A1V6B177_9BACT Epoxyqueuosine reductase OS=Candidatus Aminicenantes bacterium ADurb.Bin147 OX= 1852831 GN=queG_2 PE=4 SV=1
MPDPPAAGEPQTTLWELAGHELNDPGAVLARVRRPAGEIGFPAGPGKWPEGNSMNGLLEELACHGFRARTVSADHAPELKAEIEERHRRGEFAEEFYRERLLDIRSSFNDAEPEIRTLIVVAAPQPIIRLIFHLPVKPVTLVVPPTYQYGVNEKAERLLKKCLKRAGCRLIRTSLPLKLLAARSGLGVYGRNNVCYVKGLGSFHRLMAFGTDLPWEEDSWGPARLMDTCSRCRACRRLCPTGAIQEEDFLLRAHRCLTFLNERSDPFPQWTDSSWHHAVVGCLHCQLVCPENKTVRNWSQAGDKFSEEETRLLLEGRRPEKIPADLRGRLERLGLLEYSEILPRNIQAALANSASSADSLLEEYA

SEQ ID NO: 75418 - protein, 302 aa, Aminicenantes bacterium
  misc_feature (1)..(302): tr|A0A1F5BAD5|A0A1F5BAD5_9BACT Uncharacterized protein OS=Candidatus Aminicenantes bacterium RBG_19FT_COMBO_59 _29 OX=1797276 GN=A2028_03955 PE=4 SV=1
MVHILRELNTKGLRARAVSIAHLPELEEELEERRINGDLQEGFFRERLADFQFEPPESMPKASTIIIIAFPQPIIQVSFHRNGDRSPLIIPPTYQFYPNTVTERLLKKVLSQTGHRLARTILPLKLLAVRSGLGSYGRNNICYVPGMGSYHRLMAFFTDFPLTEDSWQSAKLMESCSRCSACLYSCPTGAITPNRFLIRAHRCLTYLNERPSEFPAWVNPSWHNALVGCMRCQEVCPANASFKKIIEPRDYFSKEESRILLNEVNPAKLSLSMRKRLKKLGLWEYVDLLPRNIRLVMDELKK

SEQ ID NO: 75419 - protein, 335 aa, Amulumruptor caecigallinarius
  misc_feature (1)..(335): tr|A0A4V1LAJ1|A0A4V1LAJ1_9BACT tRNA epoxyqueuosine(34) reductase QueG OS=Candidatus Amulumruptor caecigallinar ius OX=2109911 GN=queG PE=4 SV=1
MRCRKASNGYSSKVMNLWSYRAIDHLSIPYMERSQVKEIVKGVGATAVGIARVAEVDAAARQSYLHWIESGRSAPLGYMDRYHEVRNNPRLLLDGANSIIVAAFSYYYPTPAAKSHFTIARYARGADYHDVVRRRLNDAVTAIIAETALDPSDFRVCVDTAPLRERYWARKAGVGFIGRNNALIVPGEGSYMVLGEILTTMELDADAPCTLTCGNCMACVKRCPAGALDCDEDGYCGVDASRCLSCLTIEHRGDFPEEIKLGGRIAGCDTCQDVCPHNRHAKTSPIAEFAPSNPLLDMTDDQILSLRAEDIRPLTRHTSLSRIKPSDFIRNIHTP

SEQ ID NO: 75420 - protein, 336 aa, Arthromitus sp.
  misc_feature (1)..(336): tr|G2IEX5|G2IEX5_9CLOT Iron-sulfur cluster-binding prot ein OS=Candidatus Arthromitus sp. SFB-rat-Yit OX=104150 4 GN=RATSFB_1137 PE=4 SV=1
MDNKLRETLVDYMNFLGILYGFTECRKFIELYDYLKFKSENGDLTEFENRDIDSRINPFLYLENGETIISIAIPYYREYSTYNQKFSKYTQGEDYHKVVLSYLEKIAYFIEMSGYEFKLFCDTNNLPERYIAYLCGIGHIGRNSLIYTSEYGSYVFLGEIITNAKLSVKNSYEYYKKKFDDISLFRECGICKKCLYKCPNKILFDKNFRLCVSNLTQQKKLSMYEMNKLNNMIFGCDICQDECIKNKNIKYSFIDEFDTLKFIENISDEDIVNMDNSFFKNNFKKLACSWRGKKILKRNSLIRNMNNKEFLHSLSLENNEELNNYKNLFLYNNFEE

SEQ ID NO: 75421 - protein, 337 aa, Arthromitus sp.
  misc_feature (1)..(337): tr|A0A1B7LKS0|A0A1B7LKS0_9CLOT FeS-binding protein OS=C andidatus Arthromitus sp. SFB-turkey OX=1840217 GN=A6P3 6_06890 PE=4 SV=1
MMINLNLKNKLIKFTESLNIFCYGFTECRRFIELKQYFNSKIDKLYLTEFEDKDVEKRINPFFYFEDGKTIISIAVPYFRKDNEYNKCFSKYTQGLDYHYVVNDYLNKICDFIRNFGYECKSFCDTNNLPERYIAYLCGVGHIGRNSLLYTKKYGSYVFLGEIITNANLCDSFSQEYYDNKFKEIGVFEHCGKCRNCMKKCPNDVLVEKNFNKCVSNLTQKKVLDSDEINNLNGMIFGCDICQDVCPKNRNVEYSFEERFNTEEFLKNIKDNDIVNMNNKFFKDNFKKLSCSWRGKNLLKRNVIIKNKEDINFIKSLNFDNNEHLNYYKNRFFNKKN

SEQ ID NO: 75422 - protein, 305 aa, Atelocyanobacterium thalassa
  misc_feature (1)..(305): tr|A0A086CIK0|A0A086CIK0_9CHRO Epoxyqueuosine reductase OS=Candidatus Atelocyanobacterium thalassa isolate SIO 64986 OX=1527444 GN=queG PE=3 SV=1
MLSTTRKIKNKAFDIGFDKIGIANPHIIYEDNAIYNLQNWLSLGYQADMAWMNNPKRFDITQCMPDVRSVITVALNYYTPHKHPNNINYGKVSRYAWGKDYHKVLKQKLKLFCKWLTKKNIKTVCYVDTGPIQEKVWAERSGIGWIAKNGNIITKEFGSWVFLGVVLTNLSLISDTPHVKHCGACRRCIDICPTKAIVSPSVVDSRRCIAYHTIENKSENLPEHIVNNLNGWVAGCDLCQDVCPWNQRFSQETNIQDFYPYPGNISLHLEEISNLTEIQWQQKFSSSSLKRIKAKAWRRNADANL

SEQ ID NO: 75423 - protein, 385 aa, Atribacteria bacterium
  misc_feature (1)..(385): tr|A0A3D3DHZ3|A0A3D3DHZ3_9BACT tRNA epoxyqueuosine(34) reductase QueG OS=Candidatus Atribacteria bacterium OX= 2053509 GN=queG PE=4 SV=1
MSLAAKIKELGEEIGLDIVRITNAESFPEAEKHLIESVEKGYIPKNDYYTSGNISVRPNQLNLNKISRRCNPKSILKRVKSIISVAECYLIEETEDVQDKGQLCGKIAKYDAGNFYYDVKLKLKKIIDFINQETNYKYKSKNKSCYISLTEKPIARRAGVGWYGKNGIIITERFGSWVVLGEVITELELDTDEPLQQDCGDCTICIDSCPTKAIVSPYVIDRTKCLQFISERPMNVPLAFREKWEDRLYGCTTCQEVCPQNRKVKLKKYKPEYGYIGSKIPLMPLLQITEEEFQRYFAYNQIAMRPKEAIKRNAILALGNIGDPRAVVPLIKVLQEDDNPMVRGHTAWALGKIGGEKAKFALEKALKIEGDREVREEITNALRMI

SEQ ID NO: 75424 - protein, 385 aa, Atribacteria bacterium
  misc_feature (1)..(385): tr|A0A1F5A8U8|A0A1F5A8U8_9BACT tRNA epoxyqueuosine(34) reductase QueG OS=Candidatus Atribacteria bacterium RBG _19FT_COMBO_35_14 OX=1797291 GN=A2V47_02295 PE=4 SV=1
MSLTTKIKELGEEIGLDIVRITHAESFPEAEKHIIESVEKGYIPENDYYISKNISERPNNPNLNKICKRCNPKSILKNAKSIISAAQCYLIEETEDIQDKNQPLGKIAKYDIGNFYYDVKLKLKKIVDFINQETDFKYKSKNKSCYVSLAEKPIAQRAGVGWYGKNGIIITERFGSWVVLGEIITELELDTDESLQRDCGDCTICIDSCPTKAIVSPYAIDRTKCLQFISERSMKVPLVFREKWGDRLYGCTTCQEVCPQNREVIPKKDKPEYGYIGLKIPLIPLLQMTEEEFQNYFAYNQIAMRPKEAIKRNTVLALGNIGDPRTVVPLIKVLQEDDNSIVRGHTAWALGKIGGEKAKFALEKALKIEKDKEVSEEITNALRMI

SEQ ID NO: 75425 - protein, 377 aa, Azambacteria bacterium
  misc_feature (1)..(377): tr|A0A350QGW1|A0A350QGW1_9BACT Epoxyqueuosine reductase OS=Candidatus Azambacteria bacterium OX=2053511 GN=que G PE=3 SV=1
MAIDYQQLARRIKQWALELGFQKLGITAPDLSAEEPRLQAWLNNEYHGDMHYMAEHGMMRARPAELLPGTLRVLSVRMDYLPAKAGFATNLADPAKAYISRYALGRDYHKLVRNRLKQLALKIRTEIPELNFRPFVDSAPVLERPLAQRAGLGWIGKHSLLLNHDGGSWFFLGELLVDIPLPVDAPHQGDCGSCVACITSCPTGAIVAPYVVDGRRCISYLTIELKTAIPEALRPLMGNRIYGCDDCQLVCPENRDAPLSIESDFQRRPQWLEQSLLQLFAWDEATFLRLTEGSAIRRIGFERWQRNIAVALGNAPYQVEITTALTQARVHSSDLVTEHIDWALAQQKRKSWQAENLLPRATGRLVRIIQKGLPRDA

SEQ ID NO: 75426 - protein, 217 aa, Brocadiae bacterium
  misc_feature (1)..(217): tr|A0A524H639|A0A524H639_9BACT Epoxyqueuosine reductase (Fragment) OS=Candidatus Brocadiae bacterium OX=251721 0 GN=E4H40_08420 PE=4 SV=1
ADVIEPLKPLVLFLENKGYQAVICDSSDGDRSVLPLKLAAVRAGLGWQGKHSLLISKKFGTFLALGGIITNALLEHNTRQEANHCGNCDKCQKACPVNALDRSYKLTRGKCLSYLMQVEHLSEEAPDAMANRVADCEICQDVCPWNRKHIAQPLATKLTVTFQKKIRDWERFFYLPDLVKMSEQEYIQSTDKLRAGIPYDLFRRNVRIALRNAAKGG

SEQ ID NO: 75427 - protein, 401 aa, Burkholderia pumila
  misc_feature (1)..(401): tr|A0A0J7JQX7|A0A0J7JQX7_9BURK Epoxyqueuosine reductase OS=Candidatus Burkholderia pumila OX=1090375 GN=queG P E=3 SV=1
MNRLPAHSAYHTTASGDDAVVTCALNDDEEALAELARRIKTWGRELGFGAVGISDTDLSDAEKGLTAWLEAGYHGEMDYMAKHRTKRARPAELVAGTLRVITVRMAYLPADTLQKKGDESVATANGQKNDWRAIEWTRLSKPAEAVVSIYARGRDYHKVMRNRLQQLAVRIENAIGAFGYRAFTDSAPVLEVALAQKAGTGWRGKHTLLLDRDAGSLFVLGEIYVDIPLPPDPYPETEGAHCGQCTRCVAACPTGAIVEPYRVDARRCISYLTIELHGSIPEEMRPLIGNRVYGCDDCQLVCPWNKFAQAALVADFDVRNGLDRATLVELFAWSAEEFDTRMQGNAIRRIGHERWLRNIAVAMGNALRVPLAVEERAAIADALQARSSDPSALVRGTCNGR

SEQ ID NO: 75428 - protein, 409 aa, Burkholderia verschuerenii
  misc_feature (1)..(409): tr|A0A0L0MCG5|A0A0L0MCG5_9BURK Epoxyqueuosine reductase OS=Candidatus Burkholderia verschuerenii OX=242163 GN= queG PE=3 SV=1
MNRLPEHSAKTTTASHDAAFESRLSHHDEEALAELARRIRTWGRELGFGAVGISDIDLSDAEQGLASWLEASYHGEMDYMAKHGLKRARPAELVAGTRRVITARMAYLPAETLAKQGAESVPTADGQKNDWRAIEWSRLTKPAEAVVSIYARGRDYHKVMRNRLQQLAERIEAEIGPYGHRAFTDSAPVLEVALAQKAGNGWRGKHTLLLDRDAGSLFFLGEIYVDIPLPADPHPEQDGAHCGQCTRCIGACPTGAIVAPYRVDARRCISYLTIELHGSIPEDMRPLIGNRVYGCDDCQLVCPWNKFAQAAPVADFDVRHGLDRASLVALFAWSADDFDTRMQGSAIRRIGHERWLRNIAVAMGNALRSTSLSAEERAAIVEALRARAHDASDIVREHVNWALRQESGT

SEQ ID NO: 75429 - protein, 414 aa, Carbobacillus altaicus
  misc_feature (1)..(414): tr|A0A2R6Y475|A0A2R6Y475_9BACL Epoxyqueuosine reductase OS=Candidatus Carbobacillus altaicus OX=2163959 GN=que G PE=3 SV=1
MIVHQNPDGTLSTKNDTIKKDIVPFIREDDEPEVYALKLKGEMKGAARSFGLDAVGVTTADPFYELEPKLKAYYEKGYDTGFEKGTIAEKVDPRATMPWAKSIIAVAMAYPTRLDRAPRSEQGAYRGFVARSAWGDDYHVVLRERLLLLAGWLKDRVPDVRYEVMVDTGVLSDRAVAERAGIGWIGKNGLLITPEYGSFVYLGELVVSVTLPPDQPMVEQCGSCRKCLDLCPTQAFEAPGVLNGKRCLSYHTQTKGFVPFYFREKMGNRLYGCDTCQLVCPYNRGQNWTHHERFRPDPELVKPLLMPLVGMSKKTFQNTWAKSAAGWRGKKTIERNAIIALGHYRSKEATALLTDRMLHDPRPVIRGTAAWALGKIGGEEVRVALEKARETERDADVLEEIEHALLICNNQRDF

SEQ ID NO: 75430 - protein, 314 aa, Chryseobacterium massiliae
  misc_feature (1)..(314): tr|A0A3D9BHR5|A0A3D9BHR5_9FLAO Epoxyqueuosine reductase OS=Candidatus Chryseobacterium massiliae OX=204089 GN= queG PE=3 SV=1
MTSNAEKYTQLIKSKAKTFGFQNCGISKADFLEEDAKPLENWLKNNFHGEMKYMENHFDKRLDPRLLVEGSRSVISLSYNYFPEEKISTLENFKISKYAYAEDYHEVIKDILRSMVAELQEEIGEFGFRVFVDSAPVLERSWARKSGIGWVGKNANLITRQSGSFYFLAEIICDLELVADHPVTDHCGTCRKCIDACPTNAIVSEKLIDGSKCISYATIELKDSIPDYFQDKMDDWMFGCDVCQDVCPWNRFSSPHQQTKFKPNESLKNFKKGEWKELTQELFSEIFRKSPVKRTKFAGLKRNIEFLEKSSQNK

SEQ ID NO: 75431 - protein, 542 aa, Chrysopegis kryptomonas
  misc_feature (1)..(542): tr|A0A0P1NX19|A0A0P1NX19_9BACT Epoxyqueuosine reductase OS=Candidatus Chrysopegis kryptomonas OX=1633643 GN=qu eG PE=3 SV=1
MDKFELTHKIKQKAIELGFSKVGIAKAEKLLDEAERLRQWLERKYHADMLWLKNNFEKRINPENILPDAKSIIVVGLNYFQKIPPAKKEQGKISIYALGKDYHIVLKSKLENLLNFIKEICPNVNAKIYVDTGPVMEKVWAVRAGLGWIGKHTNLITKEFGSWIFLGVLICDLELEYDEPMADFCGKCTRCINACPTSAIVEPYVLDSNKCISYWTIEFKGENFPEGIKKKFGNLIFGCDICQEVCPWNIKFQKETTVEEFKAFEHNINPDLFKLSNLTVDEFNLLYKFSPIKRAKFFGFMRNVKNAISNLTLEKILNLDFECAIFDLDGVVADTFLFHFSSWSEICRRYGRDLSLEEFRKIVFGRKGEESAKILFDGKISDEEAKEIGVEVDRIFRVIAKGQLKEVDGAIDFIKMLRENGIKTALATSAPFENVELIFNELSLNGLFDVVVSAKDVKRGKPEPDIFILAGSKLNCNPRECIVFEDSIAGLISAKRAGMLAVGVETTLTKIELSNYADLTIKNFLEIFENVKQNRKEKDATN

SEQ ID NO: 75432 - protein, 176 aa, Cloacimonas sp.
  misc_feature (1)..(176): tr|A0A1W9P0Y0|A0A1W9P0Y0_9BACT DUF1730 domain-containin g protein (Fragment) OS=Candidatus Cloacimonas sp. 4484 _209 OX=1968525 GN=B5M53_10085 PE=4 SV=1
MFLTEEIKRKALEIGFSKVGITDTQPFSFEIQKRYNEWLNKGFHSGMSYLSRDIIKRLNPSMIFKGAKSIISVAMNYYPGWIAGSTDSDMGFISRYALGYDYHRIITKKLQQLFDYIKRETNGKANGKIFCDTGPLLEKMIAERAGLGWIGKNGALVTKEFGSWVFLGEIVLDIEL

SEQ ID NO: 75433 - protein, 299 aa, Cloacimonetes bacterium
  misc_feature (1)..(299): tr|A0A523QY60|A0A523QY60_9BACT tRNA epoxyqueuosine(34) reductase QueG (Fragment) OS=Candidatus Cloacimonetes b acterium OX=2030808 GN=queG PE=4 SV=1
VEKRLNPLRIFEGAKSIISLAINYSPGWIEQSKDKNLAFISRYALGYDYHKVVFAKLKLLFDFIVKETKGKAKGKIYCDTGPLLEKAIAERAGLGWIGKNGLLITKEFGSWVFLGEIILDVELRKDTQAKNLCSDCNLCIKSCPSGAIIAPGIIDASRCFSYLTIENRKKIPFKLRNVLGSRVFGCDACQEVCPFNNNVPETEEPLFEPQKELLSMPLEKFFILANKQFKEYFKNSTIKRVKRNGLLRNITVAMGNSGNKEFLLLLKKASKESDSIIRKHAEWAICKIGGNRFANLVGR

SEQ ID NO: 75434 - protein, 315 aa, Cloacimonetes bacterium
  misc_feature (1)..(315): tr|A0A1Y1REH0|A0A1Y1REH0_9BACT Epoxyqueuosine reductase OS=Candidatus Cloacimonetes bacterium 4572_55 OX=19717 26 GN=queG PE=3 SV=1
MNKTLTDRIKISAKEAGFDLVGIASAAPTGEDDRLRSWLDQGCHASMSWMENHIDKRLDPTRLMPGAQSIVVLAMNYYPGRISHDDPSRARISRYALSHDYHRILKKRALGLLSEIKSWSESIQGRFFVDTAPIMEKFWAVQAGLGGMGKQGLIVTREFGSWVFLGEILLNIGLKQDEPQPDCCGSCRLCIDACPTRAIIAPYVVDANRCLSYLTIEHRGEIPPDAASEMGNRIFGCDICQEVCPWNIQRATVTNKKEFLPNPIHVDLQLKELADFTEEQFRQKFGKSPIKRAKFDGFQRNVRIGLRNAEPLPFT

SEQ ID NO: 75435 - protein, 355 aa, Competibacter denitrificans
  misc_feature (1)..(355): tr|W6M5W9|W6M5W9_9GAMM Epoxyqueuosine reductase OS=Cand idatus Competibacter denitrificans Run_A_D11 OX=1400863 GN=queG PE=3 SV=1
MTPNLTAESLAALVTAIKDWGNELGFQRVGVSGIDLVQHETWLLAWLAAGFHGEMAYMARHGVKRSRPAELVPETVRVISARMDYLPPMAAEPWSVLRRPELGYISRYTLGRDYHKVMRQRLQRLADRIAAVVGPFGYRVFTDSAPVLEKALAAQAGLGWIGKHSNLLDRSAGSWFFLGEIYVDLPLPPDEPVTAHCGRCVACLDICPTQAIVAPYQVDARRCISYHTIELQGSIPLAFRPAIGNRIYGCDDCQLVCPWNRFAQVAAEADFRTRHQLDAPDLLKLFAWDESEFLRRTEGSAIRRLGHERWLRNIAVALGNAPQSPAVIAALQARLAHPSALVREHVIWALERQTG

SEQ ID NO: 75436 - protein, 362 aa, Competibacteraceae bacterium
  misc_feature (1)..(362): tr|A0A3C1SV28|A0A3C1SV28_9GAMM tRNA epoxyqueuosine(34) reductase QueG (Fragment) OS=Candidatus Competibacterac eae bacterium OX=2053538 GN=queG PE=3 SV=1
LGFQQLGVARIDLGEHEAHLLDWLAAGFHGTMTYMARHGTRRARPAELVPGTVRVISARMDYWPPQSAEPWRVLRDPERAYLSRYALGRDYHKVMRRRLQRLVERIIAAVGPLGYRVFSDSAPVLEKALAQRAGLGWIGKHSNLLDRRAGSWFFLGEIYLDIPLPADAPATGHCGRCAACLDVCPTRAIVAPYRVDARRCISYHTIELQGSIPLEFRRAMGNRIYGCDDCQLVCPWNRFARPAAEPDFRVRHGLDAPDLIALFGWEEPDFLRHTEGSAIRRIGHERWLRNLAVALGNAPPSARAVDALQARAAHPSAVVAEHVAWALDEQAEKRDRRARGDPVQTPVLDGAGAADRRLSPPR

SEQ ID NO: 75437 - protein, 397 aa, Competibacteraceae bacterium
  misc_feature (1)..(397): tr|A0A3D2VQT5|A0A3D2VQT5_9GAMM Epoxyqueuosine reductase OS=Candidatus Competibacteraceae bacterium OX=2053538 GN=queG PE=3 SV=1
MKKLLDGGGWGHNTPVIFPHPAAAVTLVVTDPQLAELAVAIKRWGRELGFQRVGIAAIDLGEHEARLSEWLAAGFHGDMAYMARHGVRRSRPAELVPGTVRAISARMDYLPPEAAEPWRVLNDRALGYLSRYALGRDYHKLLRRRLQRLAERIAATVGPFGYRVFTDSAPALEKALAEKAGLGWIGKHSNLLDRRAGSWFFLGEIYVDLPLPADEAATAHCGRCTACLKVCPTRAIVAPYRVDARRCISYHTIELAGSIPLEFRRAIGNRIYGCDDCQLACPWNRFARPTVEVDFRARHGLDAPGLSGLFAWDEREFLRRTEGSAIRRIGHQRWLRNIAVALGNAPPSPAILAALQARLRHPSELVREHVAWALGVQQQTTAVRPTNAGPPSPRPKT

SEQ ID NO: 75438 - protein, 360 aa, Contendobacter odensis
  misc_feature (1)..(360): tr|A0A2G6PGI2|A0A2G6PGI2_9GAMM Epoxyqueuosine reductase OS=Candidatus Contendobacter odensis OX=1400860 GN=que G PE=3 SV=1
MPSVLSPTELANLATTIKTWGHSLGFQHVGISDITLDEHEVYLLNWLTAGYHGEMDYMARHGTKRSRPAQLVPGTLRVITARMNYWLSNAADPWHVLKRPDLGYISRYALGRDYHKLLRQRLQKLAKQITNAIGAFGYRVFTDSAPVLEKALAQKAGLGWIGKHSNLLDRRVGSWFFLGEIYVNLPLPVDQPATAHCGQCNACLEICPTQAIIAAYRVDARRCISYHTIELRGSIPLQFRRAMGNRIYGCDDCQLVCPWNRFAQNTVEPDFRIRHRLDAPDLIALFHWDEMEFLRRTEGSAIRRIGHERWLRNIAVALGNAPNTPAVMDALRMRLTHPSENVREHVHWALAEQAEKKRPT

SEQ ID NO: 75439 - protein, 321 aa, Cyclonatronum proteinivorum
  misc_feature (1)..(321): tr|A0A345UKU6|A0A345UKU6_9BACT Epoxyqueuosine reductase OS=Candidatus Cyclonatronum proteinivorum OX=1457365 G N=queG PE=3 SV=1
MNVSMNKQQLTAAVRAEANRLGFEGCGFAKAGFLEDEARRLEKWLLAGKHGKMHWMENHFDKRVDPTKLVPGAKSVISVLCSYHQPELFREHASDEANLRISKYALGEDYHFVLKDKLYQLFEFTKKLNGGLEGRVFVDSAPVMDKAWAVKSGLGWMGKHTNVISRKAGSCFFLGEMIVDAVFDYDSPTTDHCGSCTRCIDACPTDAITEPYSVDGSKCISYFTIELRDEIPAEYHDKLGNWIFGCDICQDVCPWNRKALPGSEPRLMARDELLGKDKGYWEELNLQEFRRLFKKNPVKRTKFDGLKRNIAAVRGNKKGKD

SEQ ID NO: 75440 - protein, 363 aa, Dactylopiibacterium carminicum
  misc_feature (1)..(363): tr|A0A272ET33|A0A272ET33_9RHOO Epoxyqueuosine reductase OS=Candidatus Dactylopiibacterium carminicum OX=857335 GN=queG PE=3 SV=1
MSGHSTDSLDTQELVRQIRAWGGELGLGAVAIAGIELPGAEAGLADWLTAGFHGDMDYMARHGMKRARPAELVPGTLSVVCARLDYWPEPDMTAARADFSRPERAVVSRYAWGRDYHKVLRARLQKLADRIADAVGPLGHRVFVDSAPVMEGALGAGAGLGWRGKHTLLLSREAGSTFFLGEIYVDLALPPDAPQIDHCGRCSACIEACPTRAIVAPYRLDARRCISYLTIEHAGAIPEAFRAAIGNRVYGCDDCQTVCPWNRFARPTRELDFAVRNGLDRATLVELFAWSEEDFNARLAGSPIYRIGHERWLRNLATGLGNAPTTPAVLAALRSRADHPSALVREHVAWALAQHAGKDLNPA

SEQ ID NO: 75441 - protein, 307 aa, Dadabacteria bacterium
  misc_feature (1)..(307): tr|A0A3M1KMI3|A0A3M1KMI3_9BACT tRNA epoxyqueuosine(34) reductase QueG (Fragment) OS=Candidatus Dadabacteria ba cterium OX=2080303 GN=queG PE=4 SV=1
MVALQNGPVAAPGAPVVSFQSTVPRMDAAALAVEVVDARTSDKLVEQIRRTGFDLVGIAPTTLPDAWRARFEDWLARGFHGEMNWMKRSADERAQPRVRAPWVRAVIVVALAYDRPDPEPGGIVSRISRYARGRSYHNVMRRRLRKAARVLEQYGASRVAFSSDTAPVAERELARLAGLGWIGRHSLLLHPRLGSYLFLGTLFCDLELKPGAPMASHCGTCTACVDACPTNAIVADGVVDARRCISYLNIEHRGPFDPPYDADLHGWLHGCDLCQEVCPFVARARRAGLAGDEAFSPREVWRQVRLA

SEQ ID NO: 75442 - protein, 378 aa, Dadabacteria bacterium
  misc_feature (1)..(378): tr|A0A1F5IZY4|A0A1F5IZY4_9BACT Epoxyqueuosine reductase OS=Candidatus Dadabacteria bacterium RIFCSPHIGHO2_12_F ULL_53_21 OX=1797756 GN=queG PE=3 SV=1
MGIKEITDSVKSKAYEIGFDLVGISPAGSFPESQFYKEWLSRGYAGEMKYMERNPEKREDPGQIVPGAKSVITCGLNYNTGFPYSTEAGDGSRGWIARYAWGEDYHAVMDDRLRALEDFISGEAPEGASCRRYVDTGPVLERVYGKYGGIGWTGKNTCLINQRIGSWIFLGEIITSMELDYDSPAPDRCGTCTRCIDACPTGAITEPYVLDSRLCISYLTIELKDGIPKELRDGIDNNIFGCDICQDVCPWNRKAEKTAEPGFQPREGLYNPGLRSFSGLGPDEFSARFKGSPVRRTKRKGLLRNVLVAMGNSGDTSLIPAIEEYLSDGEPLVRAHAAWALWKLEGEGSKDTLLDHIKLENDPMVLEEIDALLMDVQG

SEQ ID NO: 75443 - protein, 374 aa, Desulfosporosinus infrequens
  misc_feature (1)..(374): tr|A0A2U3KIQ1|A0A2U3KIQ1_9FIRM PBS lyase HEAT-like repe at family protein OS=Candidatus Desulfosporosinus infre quens OX=2043169 GN=SBF1_210007 PE=4 SV=1
MSLTSQIKEYALNIGYSKIGIIPAENFPEYIDDLTKRNEMYDFYVKSPYRPLAIADLKSLMPNAKSIITTVYDYAQKSFPKELTNKIGRVYQARSYDPPPEYINGARPELMRTFLRKLSCEVGEKIALPERVVAAKAGVTNYGRNGFAYAEGIGSFIYLKSFIVDRELEYDNPTRKEVCPVGCTACMKACPTKAIYEPHKINPLRCIAFHTFLTQEGMAGSYIQPEIREKMGTKIQGCDICQDVCPLNQERLKSILPEDEYLVKVAQDFSLSQVLNMTDEFYDTRVRPLLFNYIKERKYFQRNAAIALGNLRDPAFVPDLAFAMDDPEELVRGNAAWALGKIGVRSAKQVLEDKLGKETSEAVKEEIRQALSTG

SEQ ID NO: 75444 - protein, 334 aa, Desulfosporosinus infrequens
  misc_feature (1)..(334): tr|A0A2U3KH49|A0A2U3KH49_9FIRM Uncharacterized protein OS=Candidatus Desulfosporosinus infrequens OX=2043169 G N=SBF1_200003 PE=4 SV=1
MEADEQMRWQTKIKKWGSELGFVAIGFTTAKSVNGLAQVLQTRINQGLATPFEGKEIEQRIDPQAGWQDCQTVVVLAYPLPDTVPPRAGEGILARSAVGADYHRVLRQTISELVDTMISNGWTGNPRWQVDTGPLIERAFALRAGIGWIGRNQQLIIPSYGSFVSLALLLLERELPADRPSIDQCGACQRCVEACPAHILGQETFAAKHCVSYLTQSKEMLSNEECKRLGLRIFGCDTCQEVCPHNQKRMEKEQADSSRSTLRRGVDLLETLNLTKREFQQRFQATAAGWRGKAVLQRNAFLAMHNVQDPRLRLWLEEHGEDQSVPPIIVPYLL

SEQ ID NO: 75445 - protein, 447 aa, Dormibacter sp.
  misc_feature (1)..(447): tr|A0A2W5Z7X5|A0A2W5Z7X5_9BACT tRNA epoxyqueuosine(34) reductase QueG OS=Candidatus Dormibacter sp. RRmetageno me_bin12 OX=2599630 GN=queG PE=4 SV=1
MAVSSPSSLPSTSMAAGPSSPVKAVTRSASPPIVAGAPSPRIATVMCRPANVLACLPLLDKLEPTAPRAEWYRPGSATGGGILVGVSRWEAFREELRAHALESGWCALGVTGVEPFVEARRHGLDAIAAGRMEGMPWMTAERVAASTDLGPRYPWARSIIALAWPYRPVRGAAEHEGSTPRGRMAAYALLEQPGEPDAVDYHDVLARGCDELVAWLRERVPEVRAKRFVDHGWAMDRAVAERAGIGFTGKHAGLLTTTAGSYVLLAEIAVSLPLPADAPSKKGCGSCATCLPSCPTGAIIAPGVIDARRCISYLTIEHEGPIPHALRPLMGTWVFGCDLCQEACPINHRLAPPPLADTKHGRKGPVPAPDLVELLELDERGFAERFAGTAVARTGRARLARNTAIALGNAGVAATAASLRRAAAQDSDADVREAAAWALERVTAEVN

SEQ ID NO: 75446 - protein, 135 aa, Edwardsbacteria bacterium
  misc_feature (1)..(135): tr|A0A3B9EC26|A0A3B9EC26_9BACT tRNA epoxyqueuosine(34) reductase QueG (Fragment) OS=Candidatus Edwardsbacteria bacterium OX=2053551 GN=DCG35_11190 PE=4 SV=1
MISYTKIYFTRYNTPIGRLYLAATDKGLLNIAPEKGSELSFLIDLPIRHYDLVRSEKPFLQIKKQLDRYFKGQPVVFKFRADMSHGTGFQRSVWRKLSGLLPGQMMTYGILAREIGQPKAYRAVGQAVGANPLPI

SEQ ID NO: 75447 - protein, 427 aa, Eisenbacteria bacterium
  misc_feature (1)..(427): tr|A0A538SJT4|A0A538SJT4_9BACT Epoxyqueuosine reductase OS=Candidatus Eisenbacteria bacterium OX=2212470 GN=qu eG PE=3 SV=1
MRGAARASSGKRPHPAAGTGVLHRVQPSQTNASTKESIRREAQALGFGGVGFARADESPHAGRLRAWLEAGRHGTMHWIARDPGRRSDPRAVLSGARTVISVTVPYYRGDWPSEPNGAVAERSPHAPSRGRIARYAWGRDYHKRIRRRLRLLAKAIASVCPEARWLAYVDTGPVLDRSWAERAGVGWIGKNTNVIVQGKGSWFFLGELLTDLELDPDPPARNHCGTCARCIAACPTGAILGPYELDARRCISYLTIEHRGAIPLELRPSIGTRIFGCDDCQEVCPWNRFAVPTSDPDFAERPDQQTPELIPLLRLDEESFRTRYRGTAILRAKRSGFVRNVAVALGNLRDRRSVGPLTRTLNRDPDPLVRGHAAWALGRIGGTASRAALQEAATHESSEEVLVEIRSALESCEGAGATHRIEGDPEP

SEQ ID NO: 75448 - protein, 389 aa, Eisenbacteria bacterium
  misc_feature (1)..(389): tr|A0A1F5RJ20|A0A1F5RJ20_9BACT Epoxyqueuosine reductase OS=Candidatus Eisenbacteria bacterium RBG_16_71_46 OX= 1817856 GN=queG PE=3 SV=1
MSAPVGHAERIKRRALELGFDAAGVADVGPLEAVERFEAWLDAGRHGTMDYLAGTRNRGRRADLARILPGVRAVVCVALCHEPGREADRDRRLGRIARYAAGQDYHRVMHDLLGALADEIEALLPSARALWYADTGAILERGWAERAGLGWIGKHSGLLSPRLGSWLLLGEVLLDRPLDPDPPLPHGHCGTCVRCLDACPTRAIVAPYQVDARLCISYLTIELRGPIPRELRPLVGDWVFGCDVCQEVCPWNRFAPPAREARLHARALDGWTLERFLGLDEAGFAELFAGSPIRRAGRAGFLRNVCVALGNRREAAAVPALARVLAGDPGALVRGHAAWALGEIAAAIGAEGAGCAVGDIAAALARAARDDADPGVREEARLAHARARA

SEQ ID NO: 75449 - protein, 374 aa, Endobugula sertula
  misc_feature (1)..(374): tr|A0A1D2QPQ6|A0A1D2QPQ6_9GAMM Epoxyqueuosine reductase OS=Candidatus Endobugula sertula OX=62101 GN=queG PE=3 SV=1
MVALAANIPVWGQELGFQQIGITDIQLHQHNHYLQQWLDNGYHGEMQWMLAHQDKRQYPPELVPHAIRVISARMDYLPEDPQHIKTLKQGEKAYISHYALGRDYHKLIRKRLRVLAEKISQQFTELANTHQWNIGHISQRPFVDSAPVLEKAFAEKAGLGWIGKHTLVLNQHAGSWFFLGEVLTSIPLPINTHIADNKCGDCTACLKVCPTDAFIAPYTLDATRCISYLTIELKGTIPEEFREAMGNRVFGCDDCQAICPWNKYAKQTQEKDFSPRHQLDRADLITLFLWTEEEYLKKTEGSPIRRIGYERWLRNLAIGLGNAPKSETVYQTLRSRQNFPSKLVQEHIQWAIKQQLSDKKRRRKIKNPKKMGAG

SEQ ID NO: 75450 - protein, 373 aa, Endolissoclinum sp.
  misc_feature (1)..(373): tr|A0A1Z9Y1D1|A0A1Z9Y1D1_9PROT Epoxyqueuosine reductase OS=Candidatus Endolissoclinum sp. TMED26 OX=1986636 GN =queG PE=3 SV=1
MTSKEAAIRQRAVHYGFSTIGFTAPAIAPTAQMRFDALAAADGFGDMSWMVSTADRRRDPAALWPAARSVIVVTQNYTPEHDPMLALTAKQHGNVSVYARFKDYHNVLKKRLKKMAQELVCEHGCEVKVFVDTAPILEKPLAQRAGVGWQGKHSNLVSRDLGSWFFLGEIFTTLQLQPDTPEEDHCGSCQKCIDICPTAAITAPYQLDPLRCIAYLTIEHKGHIPRDFRGAIGNRVFGCDDCLAVCPWNKFAAPPMEPAYHPRAEHDLPALADLAALDDAAFRARFQGTPVRRTGRDRFVRNVLIAIGNSGDRRLLPSVAALLGDPAAIVRAMAVWALGCLADAAELTAFRQQFAHMEEDPEVCDEWRDAGSR

SEQ ID NO: 75451 - protein, 386 aa, Endolissoclinum sp.
  misc_feature (1)..(386): tr|A0A1Z8V3Q4|A0A1Z8V3Q4_9PROT Epoxyqueuosine reductase OS=Candidatus Endolissoclinum sp. TMED55 OX=1986641 GN =queG PE=3 SV=1
  misc_feature (378)..(378): Xaa can be any naturally occurring amino acid
MKERIRTKAKEEGFDAIGFAQAEMGFREKARLEAFVSLGQHGDMTWMSDHLERRKDPRTLWPDVRSVIAVAMNYGPKVNPLDDLRSINRANISVYARNKDYHNVIKKRLKKLGRWLGKEFNCDLKVFVDTAPILEKPLGQAAGIGWQGKHSNLVNQSFGSWLFLGEIFTTLKLDPDEMEVDHCGSCTKCLDICPTNAFPEPYMLDASRCISYLTIEHKGHIPLEYREKMGNRIYGCDDCLAVCPWNKFSKMAREAAFIPREDLNLPLLEDFLSLDDSLFREKFSGSPIKRIGRDRFIRNVLIALGNSSIRAPSIGLLNLLNDPSSIVRAMCVWVLGRILPINKMKELSVQHLKSEMDKTVREEWYMALNIDYNSESSXNSGSRGSI

SEQ ID NO: 75452 - protein, 365 aa, Entotheonella factor
  misc_feature (1)..(365): tr|W4LCM3|W4LCM3_9BACT Epoxyqueuosine reductase OS=Cand idatus Entotheonella factor OX=1429438 GN=queG PE=3 SV= 1
MMTTPSNLSQHDLTQRIKTKALELGFDLVGITPAQGSPELAFFDRWLNAGYAGEMHYLQRNAERRRDIQQVVPGAQSIVVCGLNYDTDYPYSTGCDDPDRGWVARYAWGGDYHDHMQEKLRQLQAFVAELVPEEIASKLYVDTGPVVERVYAKYAGLGWFGKNTCILNKQLGSWLFLGELILALPLDYDRPALDHCGTCTRCIDACPTDAILEPYVLDSRKCIAYLTIELKGSIPETLRPQIGHHIFGCDICQDVCPWNRKRTLTAEAALQPQPSHVYPSLADLAQLTPQAFKAQFRGTPLERTKRRGVLRNVCVAMGNSGNESFIPLLEVLAEDEEELIREHAVWALTRLRQAPNDTTPECRIS

SEQ ID NO: 75453 - protein, 391 aa, Entotheonella gemina
  misc_feature (1)..(391): tr|W4M6L7|W4M6L7_9BACT 4Fe-4S ferredoxin-type domain-co ntaining protein OS=Candidatus Entotheonella gemina OX= 1429439 GN=ETSY2_20655 PE=4 SV=1
MAPAAKPLSKEELTSKVKEFALISGACVVGITTRETLAGGPPSTDLSYVLEGARSAVTFGVPLNQDKILDFLGKVDRAGHQKDYCLASTIATGIAAEMANFVKHFGHAAVAVLANQVYRNEAPGTRRQPDLSHRYLAVRGGIGWFGFSGNVLTPSHGPNVQFATMVTDAGLEPTEPLPEQDNYCDDCQACNAACPSGFFRNGKTDKVTITMGGVDFTYSQRRRYDRCTYVCGGKTGLHQSGRWSTWSPARFPIPKTDEDEDLLPVLTEGELAWRARPELPGGGLQSPGQYGLAKRDIPLTCGNCALVCHPDREERDRRLKLLHSSGVVIQNEDGRVEAVSPKKAKAHIAAMEPGRRALYETPTPEKYDPKKYWGHKHHSQYGLAKTPGKKG

SEQ ID NO: 75454 - protein, 426 aa, Eremiobacter sp.
  misc_feature (1)..(426): tr|A0A2W5XV50|A0A2W5XV50_9BACT tRNA epoxyqueuosine(34) reductase QueG OS=Candidatus Eremiobacter sp. RRmetagen ome_bin22 OX=2599629 GN=queG PE=4 SV=1
MRLRPGDHERFARARNDRRRISGGNHKNHVIAAQPRPFSQDAKSRITARAQAIGFDLVGIASAEPFVDEQRTLCERRDRGYLDHWRYPDDLIARICDPAISLPGARSIICTATAYASRDAPHAPYAPGLRGAVSAHAWGRDYHRVIGGRLQELAAFIGSEYPDERCLACVDTGPLPERAAAVRAGIGWFGKSGNVLTKRFGSYVLLGEIITTLALEPDRPLLTHCGNCEDCIPACPTGAIQPDGAVDATRCISDLTQYKGAIPRALRKAIGNRLWGCDTCQTDCRVNARSRPAADGSFRPLPEVGTSMDLPAVLRMTKSQFREWFGPTSMGWRGKAVLQRNAAVALGNSRDERAIPHLVAALSDRKPLVRGHAAWALGEFGGDSARAALTALLHREGDAWVREEAELALRGPETGTTDRQLGKELT

SEQ ID NO: 75455 - protein, 380 aa, Eremiobacteraeota bacterium
  misc_feature (1)..(380): tr|A0A2W5X6C5|A0A2W5X6C5_9BACT tRNA epoxyqueuosine(34) reductase QueG OS=Candidatus Eremiobacteraeota bacteriu m OX=2052317 GN=queG PE=4 SV=1
MDDSLPSKLRARARELGALSVRISGAESDQHTRARLSRAFARGDFQTWHYDERYAAAATIPQMLLSKARSIVCVAMPYALGPPPAHLPLRGRVSNYAWGADYHKTMRPLLGDLSRLIDDYAGAPATAIACDTAPVAERAFAARAGLGWVGKHTNLIHPDLGSFVFLGEIVTSVALPADEPLKKHCGDCTRCVDACPTGALRGDYTIDAVRCISDLTQRTDSIPRELRALVGDWIWGCDICQTVCPPTMRAPFTAQRQLPPRAHGIDLHELLRLRSGTFKREYRTSAMGWRGAAVLRRNAAVALGNALDRASVPALCGSLQDDPHPMVREHAAWALGRIGSPTALTFLKKRLKEESDHTVCREIALGLEPFLPLQALRGVV

SEQ ID NO: 75456 - protein, 411 aa, Filomicrobium marinum
  misc_feature (1)..(411): tr|A0A0D6JDU4|A0A0D6JDU4_9RHIZ Epoxyqueuosine reductase OS=Candidatus Filomicrobium marinum OX=1608628 GN=queG PE=3 SV=1
MSNRDRHFERSSATASPALLPPRTTQTSISKQTDVAPAEAVALKEAVSKRARELGFDAFGVSRPDAIALAGARLETYVAAGHHGDMAWMETTLERRRDPKALMPNARSVIAVAMSYAPDTNPMEALSQTSRGLISVYAKGRDYHDVLKGRLKQLAGYLASRSGEDVKVFVDTAPLMEKPLAAAGGIGWQGKHTNLVSREHGSWLFLGAILTAAELPPDTAGRDNCGRCQRCLDVCPTAAFPAPYQLDARRCLAYLSIESKAHIPVEFRKPMGNRVYGCDDCLAVCPWNKFASAAREAKFAARVETDNPPIAELIAIDDRAFRERFAGTPVKRTGRDRIVRNALIAAGNSQDRTMIPLVEERLKDESELVRAMAVWALSQLADPDHFADLRKAYLPREADPDVRNEWEAQSA

SEQ ID NO: 75457 - protein, 348 aa, Fischerbacteria bacterium
  misc_feature (1)..(348): tr|A0A1F5VS52|A0A1F5VS52_9BACT tRNA epoxyqueuosine(34) reductase QueG OS=Candidatus Fischerbacteria bacterium RBG_13_37_8 OX=1817863 GN=A2Y62_16770 PE=4 SV=1
MANFSRAGLTPIIKQEAKTLGFDRIGIVEKKSLQHSGYIKQWIKQGYHADMKYMAENLEKRIDINKVFGSCESIIVVAENYYKPAKRDKYMHIARYAAAKDYHGRIKAKLVSLAKTIQSMEPSLQYKAYVDTGPVMEKLWAVEAGIGWMGKHSIIINKGIGSWFCIGILLVNQTLEPDHPVKDKCGDCMRCIETCPTGAIIQPYVVDARRCISYLTIENKQEIPTDYLDKLSGYFFGCDICQEACPWNKGRFKGTSKNIINIFARHKGTEAQRHKGIEIPGEFFLDCEKEEDNYFVREEEILPVSYSKEEMEKLLLIKEQEFKRIYSGYAIRRLVFKNFRRNIQAYMK

SEQ ID NO: 75458 - protein, 374 aa, Frackibacter sp.
  misc_feature (1)..(374): tr|A0A139CPE2|A0A139CPE2_9FIRM Iron-sulfur cluster bind ing protein OS=Candidatus Frackibacter sp. T328-2 OX=17 85949 GN=AWU54_1149 PE=4 SV=1
MTLTEEIKEYAKIIGIDEIRITGAEPFLEVREFLMNMEERDYLSKFINNDIELITEPKQILSTAQSVIVCAISYYHEIESPPSFKEELRGKFSKFAWGRDYHQVLGEKLEQLIGFLRTKNDNLEVKKFVDTGPTVDRALARRAGIGWQGKNCSIINPDYGSWIFIGGIITNLELEFDAPIEDQCSGCRKCIEACPTGALVDEYTLKSNKCLGYITLSKGYIEKEDRRKMGTRIWGCDTCQDVCPHNQKVKFGNHSDFLPQTLEAYPQLSSLLALTNKDYEEKFKPTPMNWRGKRPIQRNAAIVLGNLKNPKAIPHLLKGLDDPKPIVRAHSAWALGEIGEPSVIGDLKKRLAKEREEEVIVEIEGVIDKLSDLC

SEQ ID NO: 75459 - protein, 374 aa, Frackibacter sp.
  misc_feature (1)..(374): tr|A0A1H7YDQ5|A0A1H7YDQ5_9FIRM Epoxyqueuosine reductase OS=Candidatus Frackibacter sp. WG12 OX=2017977 GN=SAMN 04488698_10425 PE=4 SV=1
MTLTEELKEYAKSIGIDKIRITGVEPFLEAREFLMNMKERDYLSKFINNDIDLITNPKQVLPTAQSVIVCAISYYHEIESPPSFKEELRGKFSKFAWGRDYHQVLGEKLEQLIGFLRTRTDNLEVKKFVDTGPTVDRALARRAGIGWQGKNCSIINPDYGSWIFIGGIITNLELEFDAPIEDQCSGCRKCIEACPTGALVDEYTLKSNKCLGYITLSKGYIEKEDRRKMGTRIWGCDTCQDVCPHNQKVKFGNHSDFLPQTLEAYPQLSSLLALTNKDYEEKFKPTPMNWRGKRPIQRNAAIVLGNLKNPKAIPHLLKGLDDPKPIVRAHSAWALGEIGEPSVIGDLKKRLAKEREEEVIVEIEGVIDKLSDLC

SEQ ID NO: 75460 - protein, 359 aa, Gallionella acididurans
  misc_feature (1)..(359): tr|A0A139BY59|A0A139BY59_9PROT Epoxyqueuosine reductase OS=Candidatus Gallionella acididurans OX=1796491 GN=qu eG PE=3 SV=1
MQDGTPQKINYDELTAQIRRWAYELGFQAVGISDTDLTAAENGLLEWLSLGLHGELNYMANHGAKRSRPAELLPGTLRVISLRMNYLPSQSRDSWQVLAEGERAFISRYALGRDYHKVLRNRLANLADKIRNEVTEFNGRVFTDSAPVMEVELARKAGLGWRGKHTLLLSREHGSWFFLGEIYVNLPLPIDAPQLEHCGTCMRCIEICPTRAIIAPYRLDARRCISYLTIELKGSIPAEFRPLIGNRIYGCDDCQLVCPWNGFAQTTVEPDFAVRHGLDDVSLVELFAWDEAEFKARLAGSAIYRIGHEQWLRNIAVALGNATKSAVVVAALTRRATHQSGLVREHVEWALMRHAMTDG

SEQ ID NO: 75461 - protein, 377 aa, Glomeribacter gigasporarum
  misc_feature (1)..(377): tr|G2JAM5|G2JAM5_9BURK Epoxyqueuosine reductase OS=Cand idatus Glomeribacter gigasporarum BEG34 OX=1070319 GN=y jeS PE=3 SV=1
MGPFDDATCTQLTQRIREWGRELGFSAVGISDTDLSHAEAGFTQWIQAGYHGEMDYMVKHGSKRTRPAELVPGAQRVISVRMPYLPAATVRGQSHDWRASEHAKLAEPDRAVVSMYARGRDYHKVVRQRLQKLAERIEAQIGPFGYRVFADSAPVLEVEFGRKAGIGWRGKHTLLLQRDAGSFFFLGELYVDIPLLTDAQTAPSSAPQQDGAHCGHCTRCMNACPTGAIVAPYRVDARKCIAYLTIELHGSIPLALRPLIGNRIYGCDDCQLVCPWNKFAQMATCDDFDVRNGLDDAHLVDLFAWSADEFNRRFAGSAIRRIGHERWLRNIAVALGNALRSLLPSALRDELTAALRRRMDDSSALVREHIAWALEAA

SEQ ID NO: 75462 - protein, 324 aa, Gracilibacteria bacterium
  misc_feature (1)..(324): tr|A0A2M7FD11|A0A2M7FD11_9BACT tRNA epoxyqueuosine(34) reductase QueG OS=Candidatus Gracilibacteria bacterium CG17_big_fil_post_rev_8_21_14_2_50_48_13 OX=1974580 GN= queG PE=4 SV=1
MSPREASLHIKACAIEVGFDLCGITSSDIIPEARDRYIEWIQKGYNGGMQWLSDVQRRTNPRAVIPEAKSVIMLALNYFSRKEPEPEDGVIARYARGRDYHKVIASMQKHLILLLRKEFPEATFRSYVDYGPFMERPYAEKAGLGFIGKNGMLITEEFGSYVFLAEVLTSLELEHDAPAIRRCGTCDRCQTACPTGAFIADGMLDSTKCIAYYTIESKEDEIPEVVKKAMKGRTFGCDICQEVCPYNNRLRNKETTVPDFSPRYTSLDPEDPALRSDAAFLEKFAGTPLMRSKRKGLRRNLGLPKEDLQEGGTMVLLFRINLKS

SEQ ID NO: 75463 - protein, 286 aa, Hydrogenedentes bacterium
  misc_feature (1)..(286): tr|A0A3M2F4S7|A0A3M2F4S7_9BACT tRNA epoxyqueuosine(34) reductase QueG OS=Candidatus Hydrogenedentes bacterium OX=2030809 GN=queG PE=4 SV=1
MTDAIPLPGRARVLDVIPVKRRRRRWSGSSGKAADIRERLEELAFRNGFSDLGVVAPEIPREDRERFRRWLAQGRHGEMEYMARRVEHRLEFEDWVKSLIVLTRPYPPLRFPKGKKRYAAYAEGEDYHKTIRRALLPLAEEIRAAGGRARRFVDTSSVLERSLAARAGLGFIGRSTMLLSRTHGPYVFLCGIKTDLVLPPDSPGTGTCGECRRCIETCPGNALDEEGLDSRKCVSYLTIELKRPRTLEEERLVGEWEFGCDVCIEVCPYAKFALPPVVPRRRGVER

SEQ ID NO: 75464 - protein, 277 aa, Hydrogenedentes bacterium
  misc_feature (1)..(277): tr|A0A1J4VFX7|A0A1J4VFX7_9BACT tRNA epoxyqueuosine(34) reductase QueG OS=Candidatus Hydrogenedentes bacterium CG1_02_42_14 OX=1805216 GN=AUJ18_00695 PE=4 SV=1
MDIGYISSRELKMEKLKERIVIAGLTAGFGEIGFARSRVLNQDIEFMADWISKKRYADMNWLARNFERRGTPPEWVRTIIVAVKPYHPLEWNADEKRYSAFADGDDYHAAISAMLSGLLKEINTVGGRAKTCVDTSAIFEKAWAKEAGLGFIGKNKIFVSEKFGPFVLLGLVLTDLELPADEKKSNLNCGNCRLCIDRCPTSALDEFGLDVRRCISWMTIEKKSELSEEEKIIVGNRIFGCDECLLACPWSKKSLPSRRPTHLAISKRKPRMNIDKY

SEQ ID NO: 75465 - protein, 347 aa, Hydrothermae bacterium
  misc_feature (1)..(347): tr|A0A496U6Q1|A0A496U6Q1_9BACT tRNA epoxyqueuosine(34) reductase QueG OS=Candidatus Hydrothermae bacterium OX= 2250085 GN=queG PE=4 SV=1
MIEEVKDYIKELGIEIFAIIKPLDFSFRKDYLIRWISSRFHGEMDYMARNLEKRLSPEKLYPEVKSILIVGIPYDTLRWNDIDKKGRGLISKYAIRRDYHRVIKKKLKKILSFLREKNSEIQGRIYVDSAPVLEKELARLAGIGFIGKNTMLISKKFGSYFFLGELFLNIELEEIKHPPVPLLCVSCKRCVEACPSEAIVKPYILDASRCISYLTIEYRGIIKDELENQMGQWIFGCDECQEVCPFNRKNKPLEVSLIPDEKRLANIKLEELILLRKEDFEEIFKGTPVKRAGYEMFMRNVFIAAGNSGKKELLQSLRKREKDFLQNPIVYHHLLRAIKKLENNCSE

SEQ ID NO: 75466 - protein, 329 aa, Izimaplasma sp.
  misc_feature (1)..(329): tr|A0A088T2V9|A0A088T2V9_9BACT Epoxyqueuosine reductase OS=Candidatus Izimaplasma sp. HR1 OX=1541959 GN=queG P E=4 SV=1
MNNIILDVGEKMKDKVISILEKQTDTYSFLNVDTYIKNHKENSMHGNFDNYAFLNKFKTIITLAFPYPKKEVKYMGKGYGILARFSYSNDYHKVIASKLDEVISGLNTLGIKGYGSVDVSKIDEKYAASLSGIGYFGKHSILINPQYGSYMFLATILIDKSLNEDYKVVGSECGDCTICIDVCPSNALEDGFNRDKCISHLSQTKMPFNEEQISYFKSMIYGCDICLKACPKNKGIDFHKIEEFEPNGIENIWLEDMLLMSKKEFRKKFGNNTSHWIGASTMRRNALCIIGNQKLVEYIPKIKKSMSVYKDNLWYNKTADIVLKKLERE

SEQ ID NO: 75467 - protein, 317 aa, Izimaplasma sp.
  misc_feature (1)..(317): tr|A0A2A1ZLL2|A0A2A1ZLL2_9BACT Uncharacterized protein OS=Candidatus Izimaplasma sp. ZiA1 OX=2024899 GN=CI105_ 08655 PE=4 SV=1
MKKIINKVLSSSSFDDYSYVSVNEYIKQRSLVFSNDNFSDYSKLKDYQTIITVLMSYPSETVPYKGKGYGILSRYSYGTDYHIVLNKELDKVTKVLNEYDIKTHSSVDISFIDERFAASLSNLGYIGKNNFLINKKYGSYVYLATILIDKLVEEDINVKDDCNGCSICVDACPVSALDNHLDVSKCLSALSQNKEIQSVSTLKHYKEMIYGCDICQNVCPKNKLIDFHLHPEFEPSGIENIKVIDLFKMSNKEYKDIYLNNASSWKGPLIIKRNALGIIINQNLVEFIPVLTESMVKYKDVLWYYETVKAAIKEIRK

SEQ ID NO: 75468 - protein, 387 aa, Jacksonbacteria bacterium
  misc_feature (1)..(387): tr|A0A351ISI3|A0A351ISI3_9BACT Epoxyqueuosine reductase OS=Candidatus Jacksonbacteria bacterium OX=2053562 GN= queG PE=3 SV=1
MPKLSEKIKEYALNECFFDVIGFAPVQPSDHHTIVQNWVKQGYHGGMKWYERSVDTRVNPQKLFDSAKTIITLGVNYYPFDYPEEVLNDPSRGIIARYAVYDDYHEILLPKLIQLKEFIEKELGRKIEYRAYVDTGPVLEREIAARAGTGFIGRNTTLINFEYGSWVLLAELVVDVELGIRTVETLPWGVSNDETRKGHVSTPATCGTCTRCIDICPTKALVSPYTLDANKCISYLTIEHRGIIPREFRSAMKNRIYGCDICQEICPWNKSRQKQSTHPDFHARMDLYAPKLLDLFPMSQSHFSARFKNSPIKRAKREGFVRNVLVALGNWADPSLVPILEHGLQDESPVIRAHTVWALRHIGTQNAKDVILKHKSREIHPRVLEEI

SEQ ID NO: 75469 - protein, 324 aa, Kapabacteria thiocyanatum
  misc_feature (1)..(324): tr|A0A1M3KY48|A0A1M3KY48_9BACT Epoxyqueuosine reductase OS='Candidatus Kapabacteria' thiocyanatum OX=1895771 G N=queG PE=3 SV=1
MDDERYIRTQAVKQAALDAGFDAVAIARAEPLDEEYAMYREWLDRGYHGSMHYMERNGESRRDVSAIVPGARSVVVVARNYYTPSIHPDGTVGKLSRYAWGDDYHVVLPPMLDDLCERIRGIVPGAETRRYTDTGPVMEKQWAVRSGLGWMGKNGNILRRDIGSWFFLGVVITTADLEADTPMADYCGTCTACLDACPTQAIVQPSVVDATKCISYWTIETKGDTDIPLEIVRNLDGWLYGCDTCQDVCPWNRFQTPTSEARFEPREGETFLKLDDVLNLQPDNFVIRFRNSPIKRPKLAGLQRNARALGAHHSNNRDIHGSES

SEQ ID NO: 75470 - protein, 363 aa, Kentron sp.
  misc_feature (1)..(363): tr|A0A450S5Z1|A0A450S5Z1_9GAMM Epoxyqueuosine reductase OS=Candidatus Kentron sp. DK OX=2126562 GN=queG PE=3 S V=1
MDYRRLREDIGRWGAELGFREIGIASIKLGEEERQLRAWLAAGYHGEMAYMARHGHKRTRPAQLVPGTRRVISACMDCLPEGGMEEAARVLGDPTRGYIARYALGRDYHKVLRRRLAHLVGKIEETLEREGVRRPAPGKSRVFVDSAPVLEKPLARNAGIGWIGKHTNLVRRDGGSWFLLGEIYTDLPLPVDEPAPRRGHCGTCRACMTACPTGALIAPRRLDARRCLSYLTIEYRGAIPLEFRPKIGNRIFGCDDCQLACPWNRFAGAAKEPDFLPRDGLDNPDLIDLFRWPEAEFLERTAGSALRRIGYEGWLRNVAIAIGNAPPSPRAIAALEARIGHPSPLVSEHAAWALARQRSKMAG

SEQ ID NO: 75471 - protein, 386 aa, Kentron sp.
  misc_feature (1)..(386): tr|A0A451A3N3|A0A451A3N3_9GAMM Epoxyqueuosine reductase OS=Candidatus Kentron sp. UNK OX=2126344 GN=queG PE=3 SV=1
MDYQRLREDIKCWGQELGFRQVGISSIRLADDERRLQAWLAAGYHGEMHYMARHGHKRSRPAELVPGACRVISASMDYLPAAGIQGATQVLRDPRRGYVARYALGRDYHKVLRRRLARLLERIVERTGRGQYRMARAANRDNTHDWKASPAFLANFGHSDADSLGGRVFVDSAPVLEKALARNAGLGWIGKHTNLIAREAGSCFLLGEIVTNAPLPPDRPSQGHCGACRACMMACPTDAIVAPYRLDARRCIAYLTIEYRGAIPLELRPKIGNRIFGCDDCQLACPWNRFARAARERDFLPRNGLDAPSLVDLFRWSEAEFMERAQGSALRRVGYACWLRNLAVAMGNAPPSKRIAAALEERMGHPSPLVTEHVAWALARQRRIGS

SEQ ID NO: 75472 - protein, 350 aa, Kerfeldbacteria bacterium
  misc_feature (1)..(350): tr|A0A359MWL1|A0A359MWL1_9BACT tRNA epoxyqueuosine(34) reductase QueG OS=Candidatus Kerfeldbacteria bacterium OX=2053565 GN=queG PE=4 SV=1
MDDTMNLVHYAKEHLGFTQIGVLPVSPATTFPYFTDWVDHRYAADMDWMHTDGRKEKRASVDQVLSDAKSVITLAYTYRTEDLPPEILNDPARGIFARYTWGRDYHQVIKRKLLDLIHHLETELGTTIQARAYVDTGPILERELAERAGIGFTGNNSMLISPLFGSYLFLSEIIIDQELPVVSVKARGGCRTCRKCVKRCPTNAIVENKVIDARRCISYLTIESKGVIPEALRPLMKNRVYGCDICQEVCPWNGTPQARSTKNDWLDAALERQAPYLTDLAKLTEADFRERYRGTPIVRAKRRGLLRNVAVSLGNWGSPDAVAALEQLARDPDELISAHALWGLHQIISN

SEQ ID NO: 75473 - protein, 334 aa, Kerfeldbacteria bacterium
  misc_feature (1)..(334): tr|A0A1G2BGG9|A0A1G2BGG9_9BACT tRNA epoxyqueuosine(34) reductase QueG OS=Candidatus Kerfeldbacteria bacterium RIFOXYB2_FULL_38_14 OX=1798547 GN=A2319_03785 PE=4 SV=1
MPVSPSKTFFHFKNWLQAGNQAQMHWLARPDAVDKRADLRKIMPNAQSVLVLGFRYTPPAIPQNLLNDPARGIIARYALYDDYHQILKQKLKLIVVSLKQSLGDFSDKIYVDTGPILERELAVYANLGFIGRHSNLIHRQLGSYLFLAEIITSVKKENFLFFEKKLTVSQNNACQLCHKCQTNCPTQAIVDNKIIDARKCISYLTIEHQGVIPSALRPLLKNRIYGCDLCQEVCPYNQTAQAQKAVVKNDFTQHPDLVAPLLESLLFFQEEEFKEKFKNSPILRAKREGLMRNVAVALGNWHHPRARILLKQILRKDPSLLVRTHAQWGLMRQY

SEQ ID NO: 75474 - protein, 542 aa, Kryptonium thompsoni
  misc_feature (1)..(542): tr|A0A0P1LNF0|A0A0P1LNF0_9BACT Epoxyqueuosine reductase OS=Candidatus Kryptonium thompsoni OX=1633631 GN=queG PE=3 SV=1
MNKHELTQEIKRKAIEIGFSKVGIARVEELEQESVKLSNWLERKFHADMNWMGKNFDKRTNPKEILPEAKSIISVALNYFQKIPPAEPHQGRISIYALGQDYHIILKLKLEKLLDFIRQIVPDVKAKIYVDTGPVMEKVWAMRAGLGWIGKHTNLITREFGSWVFLGEIICDLELIYDEPIADFCGKCTRCIDACPTEAIVEPYVLDSNKCISYWTIEYKGDLFPEHIANKFENLIFGCDICQEVCPWNLKFQKETNITEFKAFDHNINPDLFELSKLNEESFKSLYKLSPIKRAKFHGFMRNVKNAIKNLALQKLLNLDFKCAIFDLDGVIADTFKLHRQSWGEICARFGYSLSDEEFKKIIFGRRGEESAKILFNGKITEEEARYIGIEVDRIFRKIAVGNLKTVDGVIEFIRILKENSIKIALATSAPDENVELIFSELNLHGLFDVVVTSKDVKHGKPAPDIFILAGQKLGCKPRECIVFEDSIAGLIAAKNADMLAVGVETTLDKNELMNYADVSIKNFNEVLRNLKLNKKVNNATN

SEQ ID NO: 75475 - protein, 303 aa, Lambdaproteobacteria bacterium
  misc_feature (1)..(303): tr|A0A1F6GET0|A0A1F6GET0_9PROT tRNA epoxyqueuosine(34) reductase QueG OS=Candidatus Lambdaproteobacteria bacte rium RIFOXYD2_FULL_50_16 OX=1817772 GN=A2527_03445 PE=4 SV=1
MQTQIKDILLQAGFPLVGFVGEAQAQFGDWYKKWLERGYQAEMAYMERNLAIRETPLVIEPWAKSMVVVGVPYKTQPPKGWEQKPPISCYAWGEDYHHWIKKRLRLALSQLSTEIPGFIGRALVDSAPIPEKLLAQRAGLGWIGKNSLLIHPKYGSYLFLAAVVTNLELESSQPLAQNCGDCALCLDACPNSAIKPRGFVDARLCISYLTIEKRGEFKPGQERLLAGSLFGCDRCQEVCPVNIQAPIQTDSPFCFDPKWSPTSPQWVLDLDLATFDQLKIKSPLKRAGLKGLQRNARAVLAYK

SEQ ID NO: 75476 - protein, 107 aa, Lambdaproteobacteria bacterium
  misc_feature (1)..(107): tr|A0A1F6GQZ3|A0A1F6GQZ3_9PROT Uncharacterized protein OS=Candidatus Lambdaproteobacteria bacterium RIFOXYD2_F ULL_56_26 OX=1817773 GN=A2557_10440 PE=4 SV=1
MVDANWCISYLTIEHIGPFTPVQAKATRGSLFGCDRCQEGCPYNQKAPVQPGGPFAFDPRWEGLEPAKVLGWSEREFEALKVKSPVKRAGLEGWVRNAKAALGEQDP

SEQ ID NO: 75477 - protein, 313 aa, Latescibacteria bacterium
  misc_feature (1)..(313): tr|A0A3N5WLC9|A0A3N5WLC9_9BACT tRNA epoxyqueuosine(34) reductase QueG OS=Candidatus Latescibacteria bacterium OX=2053570 GN=queG PE=4 SV=1
MNAEDAAREIGGEAARLGFDAFGAAPAAVPEIERERIDRWIAKRMHGTMAWMERSAAVRKDPTLLLPGARSVWIGAVNYFHEAPRREGDGRVSIYASGRDYHRAIGGLLRRLAETARRVFPGAAVRPFVDSAPVLEKYYAERAGIGWRGKHSNLIVPGAGSWFFLAGFLIDRDLAPGERAADRCGSCTACIDACPTGAIPAPYTVDGSRCISYLTIEHRGAVDSDLAARSGDWIFGCDICQEVCPWNRFAKPARLTDFHPRAGGASIGLEEALQLGRERFDARFEGSPLRRAGWERFRGSVERAIANRDPERE

SEQ ID NO: 75478 - protein, 372 aa, Latescibacteria bacterium
  misc_feature (1)..(372): tr|A0A1V5ZNM8|A0A1V5ZNM8_9BACT Epoxyqueuosine reductase OS=Candidatus Latescibacteria bacterium ADurb.Bin168 O X=1852850 GN=queG PE=4 SV=1
MGVDILTILRRHGRVHGLIGPFVAPKLTPDTWEPFCEWLDAGLAGDMVYLNRRRNERRDVRCLNPRARSLVVYALPYSGAPPGTETVHSGLLSAHATGEDYHHRCRNALEKVVEALRTELRTHVEGWIHVDTAPILERDFARQAGLGWVGKNTLLINPDLGSRFHICEIALPFDLPATPVVVPDGCGACTRCLDSCPTGALVAPRVLDARRCFSYLTIEYKGSIPRELRPVLGTRIFGCDTCQDVCPWNQKATVRSFSDAETLAMDAVDILDLDQGGFRTRFRNTPFERTGRTRLIRNTAVVAGNLKTQKATDSLLRLLKDTEPLLREHAAWALARVRGREAAESIRVAYEKETDARTRSDMALSLRDARET

SEQ ID NO: 75479 - protein, 367 aa, Macondimonas diazotrophica
  misc_feature (1)..(367): tr|A0A4Z0FDK1|A0A4Z0FDK1_9GAMM Epoxyqueuosine reductase OS=Candidatus Macondimonas diazotrophica OX=2305248 GN =queG PE=3 SV=1
MTVLANASSSSSGMRDPVALAREIKRWGVELGFQQVGISAFDLDDDADRLDAWLADGFHGEMGYMARNTGLRRHPEGLVPGSVRAICVRMDYRPVAEYPDHVLNVPALGYVARYALGRDYHKVLRKRLEQLARRIADAIGPHGYRVFTDSAPILEKALARQAGLGWIGKHTNLLDRQAGSWFFLGEILTDLPLPVDQPLDAHCGSCRACIDICPTGAIVGPYRLDARRCISYLTIEHHGPIPESLRPFMGNRIYGCDDCQLVCPWNRYAALSGEEAFAPRHALDAPRLVDLFGWDEATFESRLAGSPVRRIGHIRWLRNLAVAMGNAPPDPAIAAALAARLDHPAELVREHVHWALARQQTTRQGAQ

SEQ ID NO: 75480 - protein, 305 aa, Marinimicrobia bacterium
  misc_feature (1)..(305): tr|A0A2D8PG42|A0A2D8PG42_9BACT tRNA epoxyqueuosine(34) reductase QueG OS=Candidatus Marinimicrobia bacterium O X=2026760 GN=queG PE=4 SV=1
  misc_feature (274)..(274): Xaa can be any naturally occurring amino acid
  misc_feature (278)..(278): Xaa can be any naturally occurring amino acid
  misc_feature (280)..(280): Xaa can be any naturally occurring amino acid
MSYSLTQHIKDKAKDIGFEKIGITQAVSTNEEKVQLVDWLKNKHHGSMSWMEKRKDERGNIFNYFKEAKSVISVGLNYYSGHDQNDLESNNKFSNYAWGDDYHQIIKSKLYELLQFIKVEYPEIKGIVCVDTSPIMEKVWAQRAGLGWQGKHTNLITRDYGSWIFLGEILLDIELDYDDEFIDDLCGSCTACIDSCPTNALGDYEIYAEKCISYFTIEHRGEFKSNTELHNWIYGCDICQEVCPWNQKFSQITNEKNFYPKMEILSWTDKDWEXINEXEXRKIFKGSAVKRTKHVGLLRNIKEDK

SEQ ID NO: 75481 - protein, 315 aa, Marinimicrobia bacterium
  misc_feature (1)..(315): tr|A0A3M7KJU8|A0A3M7KJU8_9BACT Epoxyqueuosine reductase OS=Candidatus Marinimicrobia bacterium PRS2 OX=2483458 GN=queG PE=3 SV=1
MSTIELSQFIRTSASKLGFSKLGIAPATAQQQSTNKLKSWLQMGYHSTMYWMEKRADERGDVGKYYPEAKSVISLGINYFTGNALPESDVGKISNYAWGDDYHTLIKSRLYQLLGKIKTKFPHINGIACVDTAPIMEKDWAQRAGIGWIGKHTNLITRDYGSWIFLGELLLDVKLEYDTPFEDDLCGTCTACLDACPTNAFPEPYVLDASKCISYLTIEHRGDLPTELEDKLSGWIYGCDICQEVCPWNITFSHLSNENSFQPRENLKERPIRQWEKLTEEEYRRLFKKSTVKRTKYAGLKRNIESARKSLCESL

SEQ ID NO: 75482 - protein, 358 aa, Melainabacteria bacterium
  misc_feature (1)..(358): tr|A0A317IQN6|A0A317IQN6_9BACT tRNA epoxyqueuosine(34) reductase QueG OS=Candidatus Melainabacteria bacterium OX=2052166 GN=queG PE=4 SV=1
MDTKQTILHLARSLGFQRTVVASLTPMRRSLARYEEWIDKGYAGEMNYLKRDPKARHSPALLFPEARSAIIVSVSYYTPLPPDPGLYFGRVASYAVGLDYHAVLRKKIRELKTALETELGQPLLGKAYTDDVPLQERSLAARHGLGFAGRNTLIIGPKLMGSFNFIGELLTDLPLDADEPYVGTCGKCFRCGVQCPTDAILPEGQLNSNLCISYLTIENKGAIPIELRPKVGQWLFGCDVCQEVCPYNQRPPETPWPEFQPESGVGHYIDLLSLLEIKDEEEFLTRFRHTALRRPKRRGLLRNALVVLGNRLREQKAMGSRPDHVIERIEQYRDSESDPMLREHAEWAMAQYSARAAS

SEQ ID NO: 75483 - protein, 381 aa, Melainabacteria bacterium
  misc_feature (1)..(381): tr|A0A1F6QMX7|A0A1F6QMX7_9BACT tRNA epoxyqueuosine(34) reductase QueG OS=Candidatus Melainabacteria bacterium RIFCSPLOWO2_12_FULL_35_11 OX=1801609 GN=A3F80_07365 PE= 4 SV=1
MSDLKQLITNIAFDLGFDAAGITLADNLSKSNEHFLSWRKSGFAGDMNYLLRNNPINAKPGKIVQNAKSVISLLVNYYTEPPEEPGPNFGRVAAYAVGLDYHKVLKKKIKQFQERIQKEISGEFVSRGFSDSVPLLEKSFARNSGLGFFGKNTLIINKPFGSYFFICELISNLNIEPSEEQTGTCGKCTRCVDACPTGAFNTPTIPLLDARLCISYLTIENKINIPVNLRSKIGGWIFGCDLCQMICPYNKKIKETTWEEFKPKSGFGHWLNLKEVLSIRSDEEFHSKFCHTPLNRPRRQGLLRNAAIVAGNKLSEEALPELIWLAENESNSVIREHVLWALLKYDDRKAKQISYYSDVTARSVNDEATVIISNALTTPYE

SEQ ID NO: 75484 - protein, 396 aa, Methylomirabilis lanthanidiphila
  misc_feature (1)..(396): tr|A0A564ZHH3|A0A564ZHH3_9BACT Epoxyqueuosine reductase OS=Candidatus Methylomirabilis lanthanidiphila OX=2211 376 GN=queG PE=3 SV=1
MNAKPQEPDVVALTPERLAQAITGEARRLGFELVGIAPVDDPLHEQAFADWLQAGYSGEMAYMARTEQARRHPHTWMPWARSVVSVAINYATPFPHETRDTGVPRGWISRYAWGDDYHEMMESRLESLLSWIRDTVGGEIQGKVYVDTGPVLEHEFAVRAGIGWIGKNTLLISPQHGSYFFLGELFLSLELPADQPIRNRCGSCDLCLKACPTDAFVGPYRLDARRCISYLTIELKGRIPAEMRPLIGDHIFGCDICQEVCPYNINIGASKEPAFQPREGLHAPELIPLLALGDEQFRSRFKGSPIKRSKRRGFLRNVAVALGNNGSEKSVPALTPLLADPEPLVRSHAAWALGRIGTTEARAALDDARTRETDPDVHAEITQALIACALSPSPSL

SEQ ID NO: 75485 - protein, 396 aa, Methylomirabilis oxyfera
  misc_feature (1)..(396): tr|D5ML55|D5ML55_9BACT Epoxyqueuosine reductase OS=Cand idatus Methylomirabilis oxyfera OX=671143 GN=queG PE=3 SV=1
MSVAQNEADMAALTPEQLAQAIKAEARRLGFELVGISPVIDPPHEQSFADWLQEGYSGEMAYMARTEQARRHPEAWFPWARSVVAVAMNYYTPFPRETPPSDVPRGWISRYAWGEDYHTTIESRLDALLGWIRHTVGEEVQGKVYVDAGPVLEKGFAGLAGIGWIGKNTLLISPKHGSYFFLGELFLSLELPEDQPIRNRCGSCDLCLKACPTDAFVGPYRLDARRCISYLTIELKGSIPAEIRPLIGEHIFGCDICQEVCPYNINIGVSAEPTFQPREGLHAPELIPLLALDDEQFRSRFKGSPLKRSKRRGVLRNVAVALGNLGSKESVPALAKLLSDPEPLIRGHAAWALGRIGTTEARTALDEACARETDPDVQAEMTQALIACALSPSHGP

SEQ ID NO: 75486 - protein, 357 aa, Methylopumilus planktonicus
  misc_feature (1)..(357): tr|A0A5B8D435|A0A5B8D435_9PROT Epoxyqueuosine reductase OS=Candidatus Methylopumilus planktonicus OX=1581557 G N=queG PE=3 SV=1
MADIWDQLALQIKDWGQEIGFAQIGIADIDLNHTKDHYLEWIKQGFHGEMHYMVKHGSRRYQPDELVPYTIRIISARLNYFPHSHNSEAVLEDDQKAFISRYALGRDYHKVMRAKLKKLSEKIQKEAHKTLDQSFEFRLFTDSAPVMEVELAEKSGLGWRGKHTLLINKEHGSWFFLGEIYINLPLPVDKKVENHCGTCTSCMDVCPTKAIVGPYKLDARKCISYLTIEHKSSIPLEYRKQIGNRVYGCDDCQLYCPWNKFGQMTKEDDFKVRHGLDDIELVECFLWTEAEFIKYMEGSAILRIGYEQWLRNIAIGLGNAKTSETIVNALKGRLSEASPLVKEHISWALAQHNFHMN

SEQ ID NO: 75487 - protein, 357 aa, Methylopumilus universalis
  misc_feature (1)..(357): tr|A0A5B8CYW3|A0A5B8CYW3_9PROT Epoxyqueuosine reductase OS=Candidatus Methylopumilus universalis OX=2588536 GN =queG PE=3 SV=1
MADIWDQLALQIKDWGREIGFNQIGIADIDLNHTKDHYLEWIKQGFHGEMHYMVKHGSRRYQPDELVPNTIRIITARLNYLPHSHNSETILEDGQKAFISRYALGRDYHKVMRTKLKKLSEKIQKEAHKTLDRSFEFRLFTDSAPVMEVELAEKSGLGWRGKHTLLINKEHGSWFFLGEIYINLPLPVDKKVENHCGTCTSCIDVCPTKAIVGPYMLDARKCISYLTIEHKSSIPLEFRKQIGNRVYGCDDCQLFCPWNKFGQITKEEDFKVRHGLDDIELVECFLWTEAEFIKYMEGSAILRIGYDQWLRNIAIGLGNAKTSETIVNALKGRLNEASPLVKEHISWALAQHNFHMN

SEQ ID NO: 75488 - protein, 246 aa, Methyloumidiphilus alinensis
  misc_feature (1)..(246): tr|A0A2W4SXE8|A0A2W4SXE8_9GAMM tRNA epoxyqueuosine(34) reductase QueG (Fragment) OS=Candidatus Methyloumidiphi lus alinensis OX=2202197 GN=queG PE=4 SV=1
MSIISSPQSQAPHSSVRQLDSDQLAELAHKIKQWGMQLGFQQVGIADIDLSEAEGHLNAWLKAGFHGEMGYMERHGSKRTHPDELVPDTVKVISVRMDYLPENRVSMRDNMENPLAAYISRYALGRDYHKLMRSRLQKLASYIEADVGHFGYRVFSDSAPVLEKALAAKAGLGWIGKHSNLIHREAGSWFFLGEIYTSLDLPLDSSVKENCGTCSACLVICPTRAIVAPYRVDARRCISYLTIELH

SEQ ID NO: 75489 - protein, 127 aa, Micropelagos thuwalensis
  misc_feature (1)..(127): tr|U2XNG4|U2XNG4_9PROT UPF0102 protein RS24_01675 OS=Ca ndidatus Micropelagos thuwalensis OX=1397666 GN=queG PE =3 SV=1
MIFTEKKKLQNKKIQAYRRGIRAEIVAGLYLSVTGWRVLVWRWKCPLGEIDLVAKRGKIISFIEVKARRNEQAAIDSITAHQWRRISNAADLFMARHGQYADCSWRFDAIIIVPRKWPRRFKNMWLD

SEQ ID NO: 75490 - protein, 400 aa, Micropelagos thuwalensis
  misc_feature (1)..(400): tr|U2WTD5|U2WTD5_9PROT Epoxyqueuosine reductase OS=Cand idatus Micropelagos thuwalensis OX=1397666 GN=queG PE=3 SV=1
MTSKIENHAHIDAPEDLTRLFRDIAHAEGFDAVGFVSPDAIPEAATRLHEFISAGRHGDMDWMETHQTRREAPLNLWADVKTVIMLGMNYGPDTNPLDALEVKEKGVISVYARGHDYHDIIKKKLKKLARRLVEETGGAVKVFVDTAPIMEKPLAEAAGLGWQGKHTNLVSRTFGSWLFLGSIFTTSDLPKDTPEIDHCGSCSACLDICPTDAFPEPYKLDARRCISYLTIEAKSQIPLEFRSKMGNHIYGCDDCLTVCPWNKYASISREAKLHARTELTAPDLLTLVKLDDTNFRALFRASPIKRTGRDRFVRNVLIAIGNAAGAANNAQRLKYLTAIESRLADTAPLVRGMAVWALGQYLSADDMKSRATNVLSDSSSGVVSAQEMDETVRAEWEFWL

SEQ ID NO: 75491 - protein, 429 aa, Microthrix parvicella
  misc_feature (1)..(429): tr|A0A359A4B3|A0A359A4B3_9ACTN tRNA epoxyqueuosine(34) reductase QueG OS=Candidatus Microthrix parvicella OX=4 1950 GN=queG PE=4 SV=1
MRRQPAEPQRPAGPSVGCPPLRRRIVSIPLNVTASPGLDRLADRLLEVGREAGLVSVGICDTQPFLEARQELFDRREAGLAGTMAFTYRNPERSTDPQRLLRNAASLVVGAVSYRQPRTDVGAIGEPTARVARYATDDYYTTLRSALERVAEELRTAGYRARVVADDNALVDRAAAVRAGLGWIGRNTGLIAPEEGGEVVLGSVVTDAELPGRGTPVEDGCGSCRACEPACPTGALADGRLDARKCLAWLVQAPGEFPREHRAALGDRLYGCDECTVVCPPSRVAARRHGDGPLGDDPGPTVVVLDLLGLDDEEVLERYGRWYLPGRDPDALRRNALVILGNTGHAGRDPRNGGHPVDSEVEAALVRYLGGESELLAGHAAWAALALGRDDLVRPHRHRSAVAAELASFQPSEQQPSQQPPGIDQTGAS

SEQ ID NO: 75492 - protein, 404 aa, Microthrix parvicella
  misc_feature (1)..(404): tr|R4YXF1|R4YXF1_9ACTN 4Fe-4S ferredoxin-type domain-co ntaining protein OS=Candidatus Microthrix parvicella RN 1 OX=1229780 GN=BN381_140043 PE=4 SV=1
MSIPLNVTASPGLDRLADRLLEVGREAGLVSVGICDTQPFLEARQELFDRREAGLAGTMAFTYRNPERSTDPQRLLRNAASLVVGAVSYRQPRTDVGAIGEPTARVARYATDDYYTTLRSALERVAEELRTAGYRARVVADDNALVDRAAAVRAGLGWIGRNTGLIAPEEGGEVVLGSVVTDAELPGRGTPVEDGCGSCRACEPACPTGALADGRLDARKCLAWLVQAPGEFPREHRAALGDRLYGCDECTVVCPPSRVAARRHGDGPLGDDPGPTVVVLDLLGLDDEEVLERYGRWYLPGRDPDALRRNALVILGNTGHAGRDPRNGGHPVDSEVEAALVRYLGGESELLAGHAAWAALALGRDDLVRPHRHRSAVAAELASFQPSEQQPSQQPPGIDQTGAS

SEQ ID NO: 75493 - protein, 361 aa, Moanabacter tarae
  misc_feature (1)..(361): tr|A0A2Z4AHN8|A0A2Z4AHN8_9BACT Epoxyqueuosine reductase OS=Candidatus Moanabacter tarae OX=2200854 GN=queG PE= 3 SV=1
MLRTQKSDRSTPLGSEELKEDLRSIATSLGFQVCGIASVDAPLRRDFYLKWIAEGKQADMEWMHRNNNRRLHPSNVLPGARSIICVGLNYYQPQPKRRGRIAKYALGEDYHDLMSQRLRALCRWLQEKGGTNKPYVDTGPVLEKSIAVQAGLGWQAKSTMLLNSTFGTWLLLGEIFTTLEIPPDRPQNDHCGKCTACIDACPTGAITAPYQLDPRKCISYLTIEHKGPIPYPYRAAIGDRVFGCDDCLDVCPWNRWARITQEAKLQSRHYPDLREMLAWGDGEFRRFFRKTPVMRLGRVRWIRNVCIVLGNIGTNADLAALQICAQDPEPLIAEHAAWAISRIEDKDRKAESPRAGNGSNP

SEQ ID NO: 75494 - protein, 303 aa, Moduliflexus flocculans
  misc_feature (1)..(303): tr|A0A081BSN4|A0A081BSN4_9BACT Uncharacterized protein OS=Candidatus Moduliflexus flocculans OX=1499966 GN=U14 _05700 PE=4 SV=1
MRPLFIQEAFTNGEKAALLPIHRLQHLKDEIAQFKHDEALNGFQQWIVNDLYSFDVPTAEFVISSIILLAVPHPFYAPVEFIHRGKIYHCLSLVMSDFDRAEQSLQKALQSRNYQIIAAPNIPLKRLAVQSGFAAYGRNNICYIDGMGSNFSFSAYFSDMPCDDDDWTAAKMASNCAHCTVCVKHCPTKAIRMDRFLIDNERCLSYLNESGEPFPEWLPKTAHHCVYDCLRCQMVCPMNAAQVKQVGELIRFTESETEQLLAGAYADTFSASFKKKAVYLGLHQWPDGIAKNLKALMELSDRP

SEQ ID NO: 75495 - protein, 342 aa, Moduliflexus flocculans
  misc_feature (1)..(342): tr|A0A0S6VTF5|A0A0S6VTF5_9BACT Uncharacterized protein OS=Candidatus Moduliflexus flocculans OX=1499966 GN=U14 _02046 PE=4 SV=1
MNAAWIKTTAQELGFHLVGIASAERPPEADFLQEWLRKGFAGEMTYLSRNVEKREHPRLLFPPARSIIVCGLSYHSRTDETERISPQPIGQISRYARGADYHHVLKEKLFALLHLMQADTPRPIVAKVCVDTAPLLERACAKSAGLGWIGKHGGVINPRYGSWCFLGEILVDFECEYDTPMKDGCGACTRCLDACPTGALIAPYTLDARKCLSYLTIEHRGVIPETLRPALGNCVFGCDRCQEVCPYNQQADAPGLAEFLPRESLKHLSLEWLATLSEHDFPHIFADSPILRTGWRGLLRNTAVAIGNSHDRDLLPVLRQLSRSPESLIREHAEWGMTRLLS

SEQ ID NO: 75496 - protein, 361 aa, Muproteobacteria bacterium
  misc_feature (1)..(361): tr|A0A1F6UXF5|A0A1F6UXF5_9PROT Epoxyqueuosine reductase OS=Candidatus Muproteobacteria bacterium RBG_16_60_9 O X=1817755 GN=queG PE=3 SV=1
MESPAALIEPDFTELAERIKRWGGELGFQQVGITNVDLADAEVHLHEWLRQQRHGDMHYMERHGVRRSRPAQLVPGTIRVISARMDYFPNARDPEATLADSADAYVSRYALGRDYHKVLRARLRRLADQIEGEIGSFGYRVFTDSAPVLEKALAEKAGLGWIGKHTNVIARDAGSWFFLGEIYTDLPLPIDAPATNHCGTCAACIDVCPTRAIVAPYQLDARRCISYLTIELRGSIPEELRPLLGNRIYGCDDCQLVCPWNRYAHLAPEPDFAPRHGLDASMLITLFAWSEQEFLQRTEGSAIRRINYEQWLRNIAVALGNAPTSGVVIQALDDRRNYPSELVREHVAWALVQHSRLAKVY

SEQ ID NO: 75497 - protein, 355 aa, Muproteobacteria bacterium
  misc_feature (1)..(355): tr|A0A1F6U071|A0A1F6U071_9PROT Epoxyqueuosine reductase OS=Candidatus Muproteobacteria bacterium RIFCSPLOWO2_0 1_FULL_60_18 OX=1817768 GN=queG PE=3 SV=1
MHTARNNKIDLTRLATDIKAWGRELGFQRIGIADVELGDAETRLLNWLDRERHGEMHYMESHGTRRSRPQELQPGTLRVISARMDYLPGHAADSEAVMHNPSLGFISRYALGRDYHKVMRGRLQKLAERIESKVGPFQYRAFTDSAPVLEKALAEKAGLGWIGKHTNLIDKQTGSWFFLGELYTDLPLPVDAPAENHCGTCHACLDVCPTQAIVAPYELDARRCISYLTIELRGSIPEDLRPLIGNRIYGCDDCQLVCPWNRFARPTTEPDFAPRHDLDAPELIRLFSWTEEEFMKYTEGSAIRRIGYECWLRNIAVALGNAPTSGAIVNALRIRSDYPSELVREHVRWALARHR

SEQ ID NO: 75498 - protein, 311 aa, Nephrothrix sp.
  misc_feature (1)..(311): tr|A0A2B8A4F0|A0A2B8A4F0_9BACT Epoxyqueuosine reductase OS=Candidatus Nephrothrix sp. EaCA OX=2044729 GN=queG PE=3 SV=1
MNTLAHRSVAVKSIAHSLGFNFCGIAKAESLESERHKLETWLRRGYHGKMKYMENHFEKRLDPSKLVPGAKSVVCLMYNYFPTEDLSEKSELKISKYAYGEDYHRVIKDKLKIFAARIRETIGDVNARCFTDSAPVMERQWAALAGAGWIGKNSLLINRRQGSFFFLSEIIMDAELEYDSPIGDYCGTCTACIDACPTEAILEGGVVDASRCISYFTIELKDEIPRAMNGKFERWIFGCDICQDVCPWNRFSKPHREPRFNPSDEMQNLTASDWVEMTEETFHAVFKDSPLRRAGFERMKRNCEASNPPFR

SEQ ID NO: 75499 - protein, 344 aa, Nitrospira inopinata
  misc_feature (1)..(344): tr|A0A0S4KXF2|A0A0S4KXF2_9BACT Epoxyqueuosine reductase OS=Candidatus Nitrospira inopinata OX=1715989 GN=yjeS PE=3 SV=1
MTLTESIKREAFALGFDAVGIARIDEQERSRADAGSRADARPASVASSPNLLLNRLGEWLRRGYQGTMAWMSRDPAKRSDPRLVLPGCRSIISVGLNYLTEHRADERPGHGRIARYAWGQDYHKVFRDRLRQLERRIQSLAPDAHTRSYADTGPIMEKAWAERAGLGWIGKHSNLVSAEHGSWLLLGEVLTTLVLDADEPATDLCGSCSLCVQACPTGAIVEPYVVDATRCISYLTIELRGPQEEIPTDLQQRMDNKIFGCDDCLDVCPFNLRAEPTDEPTFQPMPLALAPNLDTLSGLDESTFSALFQRSPIRRAKLDGLRRNAAIAQRNQRSHSQSPLQPKP

SEQ ID NO: 75500 - protein, 335 aa, Nitrospira nitrosa
  misc_feature (1)..(335): tr|A0A0S4LPE0|A0A0S4LPE0_9BACT Epoxyqueuosine reductase OS=Candidatus Nitrospira nitrosa OX=1742972 GN=queG PE =3 SV=1
MSLTTAIKQQARTLGFDAIGIVRLANNDAPSTLTPQPLEPCSDNATKIVPQLYHRLTEWLRRGYHGTMTWMERAPDKRADPRVVLPGCQSIISVGINYLTDHRANEQPGHGRIARYAWGKDYHKVFETRLKQLEEFIKILAPATHTRSYSDTGPLMEKAWAEQAGLGWIGKHSNLVSADHGSWLLLGEILTTVELEPDAPATDLCGSCTLCIQACPTNAIVQPYEIDATRCISYLTIELRGDESVIPQELHAGMGNKIFGCDDCLDVCPFNLRAEPTRESAFQPSAVTLAPSLDELSRLDEQTFLTLFQQSPIRRAKIHGFQRNIAIAQKNKTRS

SEQ ID NO: 75501 - protein, 355 aa, Nitrotoga fabula
  misc_feature (1)..(355): tr|A0A2X0SKC6|A0A2X0SKC6_9PROT Epoxyqueuosine reductase OS=Candidatus Nitrotoga fabula OX=2182327 GN=yjeS PE=3 SV=1
MDYDALAVKIKEWGRALGFQAVGIGDVHLHDAEERLLQWLAQGFHGEMDYMAKHGVKRCRPAELIPGTVRVISVRMDYYPPNVKDSWKVMEDGTRAFISRYALGRDYHKVLRHRLERLAEKIRTGMSDFRYRVFTDSAPVMEVELASRSRLGWRGKHTLLLSREHGSWFFLGEIYTDLPLPLDEPAEPGHCGSCMACLNACPTQAIVAPYRLDARRCISYLTIELRGSIPLPLRPLIGNRIYGCDDCQLVCPWNRFAKKSIEPDFVARHGLDDVGLTELFGWDEKTFRKTFEGSAILRIGHEQWLRNIAVALGNAPGSPEVRTALEARAQDVSPLVREHVAWALERQRNWVGIAE

SEQ ID NO: 75502 - protein, 356 aa, Nitrotoga sp.
  misc_feature (1)..(356): tr|A0A3E1DI01|A0A3E1DI01_9PROT Epoxyqueuosine reductase OS=Candidatus Nitrotoga sp. SPKER OX=2184312 GN=queG P E=3 SV=1
MQIETPQIVDYTALAAKIKEWGRELGFQAVGIADINLHDAEERLLEWLARGFHGEMDYMAKHGAKRTRPAELIPGTLRVISVRMDYYPPTVKDGWEVLEDGTRAFISRYALGRDYHKVLRKRLEKLVQKIRIEVGGFSYRVFTDSAPVMEVELAYKARLGWRGKHTLLLSRDHGSWFFLGELYTDLPLPIDEPESEHCGTCMACVQVCPTQAIIAPYKLDARRCISYLTIELKSSIPVALRPLIGNRIYGCDDCQMVCPWNRFAHKSLEPDFAARHGLDDVALTELFGWDEETFNQKFAGSAVYRIGHEQWLRNIAVALGNAPNSMEVLAALQARAQDASPLVREHVAWALGQHGS

SEQ ID NO: 75503 - protein, 371 aa, Omnitrophica bacterium
  misc_feature (1)..(371): tr|A0A3A4NYT9|A0A3A4NYT9_9BACT Epoxyqueuosine reductase OS=Candidatus Omnitrophica bacterium OX=2035772 GN=que G PE=3 SV=1
MKEQLKAFAKSIGFDAVGIARSEPKTWDRYAEWLARGFHGEMEYLARRSLERRDISYLFKNPQSVIVAAKRYLTIDPIDHKQRPFQPVVSRYAWGDDYHAALRDGLNRICRWIEEKTNGVHTVRSCVDSAPILERDFAAQAGIGWFGKHTNLLNRSLGNWFFLGVVITSLELEEDEPVSSYCGTCTRCLDSCPTNAFVGPYLLDARRCISYLTIEVKGAIPRELRPLMGARVFGCDDCLAVCPWNRFAVPTAEITFFPRDTIETSDLIELLGLTDEEFRARYKKSPIKRSKRRGFLRNVAIALGNTGDPRAIPALARALSDHEPLIRSHAAWALGRIGGDEAKRILMSALNKESEEAVREEIQFAIDPRVL

SEQ ID NO: 75504 - protein, 366 aa, Omnitrophica bacterium
  misc_feature (1)..(366): tr|A0A2H0LC83|A0A2H0LC83_9BACT tRNA epoxyqueuosine(34) reductase QueG OS=Candidatus Omnitrophica bacterium CG1 1_big_fil_rev_8_21_14_0_20_64_10 OX=1974750 GN=queG PE= 4 SV=1
MTGTGRGLSPNGDCPRTPSDLIKTEAARLGFPACGIVKANAIGRREPELKAWLAAGRDGGLGYMQAFFDRRRRLLEGFPTFKTALVLAVPYARRNPPADPAAPVSGGRIARYARGRDYHPVISKRLRRLEQALRALFPKSGPMRPCVDTSPLQERALAEAAGLGFFGKNGCLIDPKSGSFFFLCALLTDLDLPADQPMLWDCGGCTRCITACPTGALEPPYQVNAGRCITLLTIENRGPIPEPLREKIGPWLFGCDICQEVCPYNKGGTGGSDPVNLWPELRPEQGAGERLPLSELLRIRTEADFLSRFQGTPLTRPKREGLLRNAAVAAGNSRNPALIPALREAAKEDLSPMVREHAAWALARLE

SEQ ID NO: 75505 - protein, 307 aa, Ornithobacterium hominis
  misc_feature (1)..(307): tr|A0A383TVS2|A0A383TVS2_9FLAO Epoxyqueuosine reductase OS=Candidatus Ornithobacterium hominis OX=2497989 GN=q ueG PE=3 SV=1
MNIQQRTTFVKKRAKELGFLNCGISKAEFLEEEAPRFEAWLKKGFHGELGYMENHFDKRLDPTKLVPGAKSVISFSFNYYTENQQPEDSYKISKYAYGKDYHFVVKDKLFQLFNELQDEIGEINGRVFVDSAPVLDRAWAKRSGLGWVGKNSNILAKGTGSFFFLAEIISDVEFEYDSPFKTDHCGSCTACIDACPTQAIEAPRTVNASKCISYATIELKNEIPAHFQDRMEDWMFGCDICQDVCPWNRFSKPHQEREFEPHPAIQSFKKKEWEELSQEMFNEIFRKSAVKRTKYTGLMRNMKFIKP

SEQ ID NO: 75506 - protein, 414 aa, Paraburkholderia kirkii
  misc_feature (1)..(414): tr|G4M9Z9|G4M9Z9_9BURK Epoxyqueuosine reductase OS=Cand idatus Paraburkholderia kirkii UZHbot1 OX=1055526 GN=qu eG PE=3 SV=1
MNRLPEHSVEVSTASSDAAAESVSESRAITREEEASLSELAQRIKAWGRELGFGAVGISDIDLTDAEKGLADWLDAGYYGEMDYMAKHGTKRARPAELVAGARRVITARMAYLPAETLAKTGDESVVTADGQKNDWRVIEWSRLAKPSQAVVSIYARGCDYHKVMRNRLQQLAERIEGEIGKFGYRAFTDSAPVLEVALAQKSGNGWRGKHTVLLDRDAGSLFFLGEIFVDVPLPVDPHPEQDGAHCGQCARCVGACPTGAIVAPYRVDARRCISYLTIELHGSIPEEMRPLIGNRVYGCDDCQLVCPWNKFAQAAPVADFDVRHGLDRATLVELFAWSAQDFDTRMQGSAIRRIGHERWLRNIAVAMGNALRACGLDVGERKAIVEALEARADDPSALVREHVKWALEQGEQT

SEQ ID NO: 75507 - protein, 417 aa, Paraburkholderia sp.
  misc_feature (1)..(417): tr|A0A4V2ZY85|A0A4V2ZY85_9BURK Epoxyqueuosine reductase OS=Candidatus Paraburkholderia sp. 4M-K11 OX=2528715 G N=queG PE=3 SV=1
MAPQNVAAPLDEAALAALATRIRAWGRELGFGAIGISDTDLSHAEAGLAAWLEAGCHGEMDYMAKHGMKRARPAELVAGTRRVITARMAYLPAATLAGAAHVGAQTEVPAAGEHEDWRGREHARLADPFAGVVSIYARGRDYHKVMRARLQQLAERIAAEIGAFGFRVFTDSAPVLEVELAQKAGIGWRGKHTLLLQRDAGSLFFLGEIYVDVPLPTDAENAQAAQDAQNSASHAPEQPGAHCGTCTRCIGACPTGAITGPYRVDARRCISYLTIELKGSIPLELRELIGNRVYGCDDCQLVCPWNKFAQAAPVADFDVRHGLDRASLVELFGWSAAQFNERMQGSAIRRIGYECWSRNIAVAMGNALRATRENDGACGQPHDAQEGRAAIVAALRAREHDESALVREHVQWALEAA

SEQ ID NO: 75508 - protein, 402 aa, Peregrinibacteria bacterium
  misc_feature (1)..(402): tr|A0A2M7UPG0|A0A2M7UPG0_9BACT Uncharacterized protein OS=Candidatus Peregrinibacteria bacterium CG_4_10_14_0_ 2_um_filter_38_24 OX=1974774 GN=COY05_03450 PE=4 SV=1
MSMLEHSTMGKILKKTEGLKNAINKTKSEIEIFALSIGFDLVGFSPAKIDKKYFDVYKKWLGEGMNAGMEYMEKSAQRKDVSKNLPNAKTVISLGINYFHSQENKKISKDEAIIARYAYGRDYHKIISKKLKQLEAYLKEKFPNEFTKSYVDTGSILERAYAETSGIGQIGKNGCIITKSFGSWIFLSEIITTLDLCPQEEFGKEGGRRCSRKIDCLASEPIKHRLRLYKSYMLDLYNGKTYFERTSPSSFQTNSICGNLQNVSAETFSPPPSICGTCTRCIDACPTKAIIAPGIIDSRKCIAYQTIENKGRIPKKIQDVIKKTKRIFGCDICQEVCPHNIGKQKITTHSEFLQPIAGDKISLKKIIATKSNEEFLQIYAGSPLMRAKLKKLKSTAKLISTN

SEQ ID NO: 75509 - protein, 392 aa, Peregrinibacteria bacterium
  misc_feature (1)..(392): tr|A0A1F7B3I6|A0A1F7B3I6_9BACT tRNA epoxyqueuosine(34) reductase QueG OS=Candidatus Peregrinibacteria bacteriu m RIFOXYB2_FULL_32_7 OX=1801906 GN=A2335_04085 PE=4 SV= 1
MGNKKFLEDKIINYAKELGFDLVKILPAQSLDENLQKSFYDWIYFEYAGDMEYMKKEPEKRADLLKKFPDAKSIIVLGMNYFMEEKASPTCPNDLFGRKDSFWRGKRESSFAKATADKKEKEKAEGKVARYAWGRDYHKVIELKLKKLKEFILRNVDSGETQNDIFKMYVDYGPILERAYAVKAGFGFIGRNTCLITKEFGSWVFLAELITNLEIQEKGERKEDEKDHFGCGNCVQCLQVCPTGALETPYKLNAKKCISYLTIENKGSIPEKSRPLIGDWLYGCDLCQEVCPYNARAKATKEPDFKKQILGDTQILKDVLSIRTDQEFRQKFAGSPVIRIKRKGLLRNACVVAGNLKDRSLLPVLEECLKKDPEPLIREHAKWGIRKINNEK

SEQ ID NO: 75510 - protein, 379 aa, Phycosocius bacilliformis
  misc_feature (1)..(379): tr|A0A2P2EC45|A0A2P2EC45_9PROT Epoxyqueuosine reductase OS=Candidatus Phycosocius bacilliformis OX=1445552 GN= queG PE=3 SV=1
MASAPRTKPTLTADQVKALAQDHGFDVCGLADARAPWEAGARLQAFVDAGHHGSMDWMETTLARRSHPTAMWAGARSAIMLGVNYGPDTDPMEALTKPDKAVLSVYAGGDDYHDVIKKKLKAMAGELHRLTGAEVKVFVDTAPLMEKPLAALAGLGWQGKHTNLVSKDYGSWLFLGAILTDLPLAPDQPSLDHCGRCTACLDACPTEAFPAPYQLDARRCISYLTIEHDGPIPRAFRKPMGNRIYGCDDCLAVCPWNKFAQTGKEVRLALRDTLRDLSLSDLAFLDDAAFRTLFAKNPIKRIGVARFLRNVAIGLGNSGQASHVPAARHLSQHENPLVRGAGVWALQQLLPAGDFSALAKTSMAQEENASVRAEWGQTQ

SEQ ID NO: 75511 - protein, 419 aa, Poribacteria bacterium
  misc_feature (1)..(419): tr|A0A496B8K0|A0A496B8K0_9BACT Epoxyqueuosine reductase OS=Candidatus Poribacteria bacterium OX=2026781 GN=que G PE=3 SV=1
MTGNPAQITLTQQIQRRAHELGFALVGITPAERSQTLQRYRAWLGNGYAGEMDYLERHLPLKEDPRRLLAEAKSVISLAMNYYTLDPPELLAADPGRGQISRYAWGDDYHEVIRERLRQLVEFIRQRFAETEPDCRICVDTAPILEREYAQKARLGWIGKNTNLINWRSGSWYFLAEVLVNVRLESTAEPQWPVGGGSFPSSGDSRRVTFAGDRPPRYETMPFSSTVARGSCGTCTRCIEACPTDAIVAPNVLDSRLCISYLTIELKDSIPAELRPKMGNLIFGCDICQEVCPWNSKATPTTESAFYPREGNLAPALLSLVNMTQAEFSSRFKGSPIKRAKRRGFLRNVLVAIGNWGARKALPALEIALSDGEPLVRSHAAWAVGQIGGETAAKLLQTRLVVEEEPEVIAEIQGALARL

SEQ ID NO: 75512 - protein, 399 aa, Poribacteria bacterium
  misc_feature (1)..(399): tr|A0A2E8DU49|A0A2E8DU49_9BACT Epoxyqueuosine reductase OS=Candidatus Poribacteria bacterium OX=2026781 GN=que G PE=3 SV=1
MYTILNEMTKINQLELKKTQLNQWIRKQAEKMGFDLVGIVPADPPKLIDRYREWLNLGYAGEMEYLHRHFPLKQDPKNLLPEVKSVISLGLNYYTVEPDAVRKLDPTRGQISRYAWGEDYHDVIRKRLKRLVKKIEKRLKRETKSRVFVDSGPILERDYAQTAGLGWIGKNTNLINWQKGSWYFLAEILISLDLGVDVLPARGSCGSCTLCIEACPTDAIVAPNQVDARSCISYLTVELKEAIPMDLRPGLGNLIFGCDICQEVCPWNTKSQPTSVKEFQPRKGNLLPKLADLIGITQNEFSQKFKGSPIKRTKRRGLLRNVVVAMGNSKDPSMVEPLQSAILDVEPLVRQHAAWALGQIATPLAKTILKKKLQNEKNIEVIIEIESALQIIESENIKD

SEQ ID NO: 75513 - protein, 405 aa, Promineofilum breve
  misc_feature (1)..(405): tr|A0A160T1Q2|A0A160T1Q2_9CHLR Epoxyqueuosine reductase OS=Candidatus Promineofilum breve OX=1806508 GN=queG P E=4 SV=2
MILFRKGEASIAHGRDIIFIMESSPESLTAALKEQTRALGFNRAGVIPAGPARRLDAYLRWVAAGQHGEMGYMARPDRLARRHDPGLILPGVRSVVVVGLDYHTADLPPDVAADPSRGRISNYAWGVDYHEIMTPRLEALADWLRRQPGAGDVSSRVYVDTGAILERDHGETAGLGFTGKNTLLINPRRGSWFFLGVLLTTQVLAYDPPPAERPPLPGCGRCTRCLSACPTAAFPAPYVLDARRCISYLTIELKSWIPLELRPLLGNWVYGCDVCQAVCPFNRFARPTGEPAFYPVALDAAAPPLLELLALDEESFARRFTDSPIRRIKRDRLVRNACVAAGNWGSLAAVPPLVALLADGSPLVRGHAAWALRRIGGEPAHAALAAALASEDSEAVRREIKGEDF

SEQ ID NO: 75514 - protein, 372 aa, Propionivibrio aalborgensis
  misc_feature (1)..(372): tr|A0A1A8XRM5|A0A1A8XRM5_9RHOO Epoxyqueuosine reductase OS=Candidatus Propionivibrio aalborgensis OX=1860101 G N=yjeS PE=3 SV=1
MQELNSDTRTLTASAWNGFDFVALVKKIKNWGKELGFSELGIAGADVSATTPKLLRWLELGRHGEMNYMAKHAALRAQPETLVPGTLSVVTARLPYLPAAAECEQVLGNRELAYISRYALGRDYHKTIRNRLQKLANRIHGEISQSEQESSFAYRVFSDSAPVMEVEFARQSGIAWRGKHSLALTRSGSWHFLGEIYTTLPLPPDELISEHCGTCIRCLEACPTAAIVAPYEVDARRCISYLTIELAGPIPVELRPLIGNRIYGCDDCQLCCPWNEFAQLGDPDFAVRNGLDATSLATLFSWNEQAFMTRLEGSPIRRIGHTRWLRNIAVALGNAANTAEASAALSTRLEHPSALVREHVRWALAQIHSDSS

SEQ ID NO: 75515 - protein, 363 aa, Puniceispirillum sp.
  misc_feature (1)..(363): tr|A0A2D4UMT6|A0A2D4UMT6_9PROT tRNA epoxyqueuosine(34) reductase QueG OS=Candidatus Puniceispirillum sp. OX=20 26719 GN=queG PE=4 SV=1
MIEAAANEGFLLAGIGPADIGPVNRAGLVAFLDDAFEGDMGWLRDTAAKRQQPQAMWPDAKTAIVLGMNYGPDHDPMDNLAAKSAGNISVYARGRDYHDLVKGKLKQLAGQFAAQTGHAVKVFVDTAPLMEKPMAQTAGIGWQGKHTNLVSRKAGSWLFLGVILTDAILPYDTPETDHCGGCRRCLDICPTNAFPAPYRLDARRCISYLTIEHKGVIDRSFRHAIGNRIFGCDDCLAICPWNKFASRAKEQKLAAKVGTDLPSLADLLKLDDTDFRQFFAGTPVRRAGYERFLRNVLIAAGNSGDAGLIPLIMPFLDHSSTLLRAMAIWALRQLADDDIWQGLRGAYLPDEHDQSVRREWQDN

SEQ ID NO: 75516 - protein, 383 aa, Puniceispirillum sp.
  misc_feature (1)..(383): tr|A0A1Z8UV25|A0A1Z8UV25_9PROT Epoxyqueuosine reductase OS=Candidatus Puniceispirillum sp. TMED52 OX=1986639 G N=queG PE=3 SV=1
MIAPVRTELIHDLATSHGFSVVGIASAEADAELAERLDAFLDAGHHGDMQWMKDTRDRRISPVAMWSDAKSAIVLGMNYAPDHDPMENLTSRSHGNISVYARGRDYHDVIKGKLKQCAAQIAKGLDIEVKVFVDTAPLMEKPLAARSGLGWQGKHTNLVSREYGSWLFIGVILTNAELAPHQPAEDHCGSCTRCLDICPTDAFPAPYQLDARRCISYLTIEYAGIIPPEFRRPMGNRIFGCDDCLAVCPWNRFARTASEQKLQARAELTMPMLADLLALNEAAFRKQFAASPVKRTGYQRFIRNVLIACGNSGNARLTPAVKRHLDSADMVIRASAIWALSQIMPADDFAALASQCRPSEDHQDVAAEWDSGISICNAPANNI

SEQ ID NO: 75517 - protein, 299 aa, Raymondbacteria bacterium
  misc_feature (1)..(299): tr|A0A1F7F3D9|A0A1F7F3D9_9BACT tRNA epoxyqueuosine(34) reductase QueG OS=Candidatus Raymondbacteria bacterium RIFOXYD12_FULL_49_13 OX=1817890 GN=A2519_16970 PE=4 SV= 1
MNQKIREAALGAGIPLIGFCTPQIDTRTKNAFQNWLETGMHADMAYLHKTRNTRRVIEEFLPGQKSVIICGFPYPAVESKHVVSYALINDYHALLHEKLETFCLYLTKAFSGIKTKVFIDTLPVLEKVYASKAGLGCIGKNTLLLSKKYGSRLFLGGIMTDLEIEHDGPEKWDPCGSCRKCIDACPTRALDAYVLDARKCISYHTIENKGEIPEDITEKMGEMVYGCGICEKVCPWNNKNTVVPGWDVYEDLANADVETLKILAGESFKKHFGKTPVYHSGKRVFLRNIVIAVANKARQ

SEQ ID NO: 75518 - protein, 385 aa, Regiella insecticola
  misc_feature (1)..(385): tr|G2GYU3|G2GYU3_9ENTR Epoxyqueuosine reductase OS=Cand idatus Regiella insecticola 5.15 OX=1005043 GN=queG PE= 3 SV=1
MTDQLDLNQLAKNIKQWGQALGFQQVGICDTDLSLEEPRLQAWLDKQYHGEMAWMARYGMLRARPHELLPGTLRVISVRMNYLPAEASFARTLNNSELGYISRYALGRDYHKLLRQRLKKLGDKIQMYCSECSEGSDTHFRPFVDSAPIMERSLAVKAGLGWVGKHSLVLNRDAGSWFFLGELLIDLPLPVDKPLPEQCGRCVACMTICPTKAIVAPYVIDARRCISYLTIELKGAIPEEFRPLMGNRIYGCDDCQLICPWNRFSPITDEKAFNPRAQLHTPKLLDLFAWDEETFLQMTEGSAIRRIGHLRWLRNISVALGNAAYQSSVVLALEKRRGLDPMLDEHIQWAIDQQLARRSAQAVKVQSAQTSRLIRTVEKGLPRDA

SEQ ID NO: 75519 - protein, 339 aa, Rhodobacter lobularis
  misc_feature (1)..(339): tr|A0A0J9EA99|A0A0J9EA99_9RHOB Epoxyqueuosine reductase OS=Candidatus Rhodobacter lobularis OX=1675527 GN=queG PE=3 SV=1
MARALQEGFSKCRVTVPDAVPDAAARLAQFVEKGRHGQMGWMAERMHWRGDPAALWPEARSVIMLAEAYTPDHDPLEVLGQRDRAAISVYAQNRDYHDIVKKRLKRLGRWLIEQSPCEIKVFVDTAPVMEKPLAEAAGLGWQGKHTNLLARDLGSWFFLGAIFTTLELAPDPPEGEHCGSCRACLDICPTEAFPAPFQLDARRCISYLTIEHKGRVDEALRAKMGNRIYGCDDCLAVCPWNKFAQAAHETRYAAREDLRAPRLAELVQLDDAGFRAKFSGSPIKRIGRDRFVRNVLYAIGNSGEAALRAAALPLADDPDPAVADAARWAAMRLAQWSSG

SEQ ID NO: 75520 - protein, 335 aa, Rokubacteria bacterium
  misc_feature (1)..(335): tr|A0A2V2STP3|A0A2V2STP3_9BACT tRNA epoxyqueuosine(34) reductase QueG OS=Candidatus Rokubacteria bacterium OX= 2053607 GN=queG PE=4 SV=1
MTAAELDRLAQELGIDVVGATPAVPYEETERHILERRAQGLFADMRFTMAQPEVSCHPERLLPDARTVVSAALCYYAPGPQPGPGQGRLPRYTWYDAYAELREKLDVLGSRIGGAYRVLVDANQHVDREGAARSGVGFYGKNTMLITRRFGSWVVLGTLVTTASIETTKPLELDCGECRLCVEACPTGALDEPGVLDSTKCLSYWTQSSDPIPEPFREELGHQVYGCDICQDVCPWNRGVERRRSQSRPPEGSEPVVSLVDWLQEDAESLVSRYERLYVPRKEARFLRRNALVALGNAAGEEPVELAERYLDDPDPLLQEHAAWAVRRARRRLRP

SEQ ID NO: 75521 - protein, 346 aa, Rokubacteria bacterium
  misc_feature (1)..(346): tr|A0A1F7QGR6|A0A1F7QGR6_9BACT tRNA epoxyqueuosine(34) reductase QueG OS=Candidatus Rokubacteria bacterium RIF CSPLOWO2_12_FULL_73_47 OX=1802111 GN=A3G44_11100 PE=4 S V=1
MTLLARALREAVRARALELGFDAVALGPAGPPEHGAAFERWLDAGYAGTMRYLERGRAERLDPERLLPGCRSVVAVAQSHNHPDADPSWRPVARYARGRDYHDLMRPRLRELAGFIREAAGPPVRCRAAVDTSAVLERDLAARAGLGWIGKNTNLLSPALGSYVVLGVVLTTAALEPDARQPDRCGTCTACLDACPTGAFAGPYVLDARRCLSYLTIEHRGEVPAELCGSVADWVFGCDVCQEVCPWNRKAAPAREPALAPRGAFPPLEALLDVDRDAFRARFGASALTRAKRAGLLRNAALALGNRGDARAVPALRRALDDADPVVRGAAGWALERLAARPAAAP

SEQ ID NO: 75522 - protein, 373 aa, Schekmanbacteria bacterium
  misc_feature (1)..(373): tr|A0A3M1RYY6|A0A3M1RYY6_9BACT 4Fe-4S ferredoxin-type d omain-containing protein OS=Candidatus Schekmanbacteria bacterium OX=2419984 GN=D6734_03175 PE=4 SV=1
MTLKNEFVDYVKNEVGIPLVGVVAPEDYPSEDYERIAAVQRIFAKATPLSGGIDTVFQPKDFLPEAKSVIITGSPAYIEKVYTYEQCKRDLLGCAEATHVNTNYLQNNGERNAKIIDFLKDRGYQCFSLTAGGFPLKLMASKCGVGFYGKNAIIQHPKYGAWISLSGYITDADLEPDSPLDMDCGKCDLCMKACPTNALSTPYVCDMTKCIDFHLGHNKHFIPYEIRENCGNLLGEGCTICRDVCPKNKNLTPLEDFEVSMELMHPKMLDVLKISDEDWERGFAMTLMGFFLMDKKYLIRNAAIGLGNFQDERAVEPLGEILNAGPNKARGYAAWALGRIRGRKSRDLLNSALNNEEDEDIRDEIKFALEMLG

SEQ ID NO: 75523 - protein, 375 aa, Schekmanbacteria bacterium
  misc_feature (1)..(375): tr|A0A1F7SEK5|A0A1F7SEK5_9BACT 4Fe-4S ferredoxin-type d omain-containing protein OS=Candidatus Schekmanbacteria bacterium RIFCSPLOWO2_12_FULL_38_15 OX=1817883 GN=A3G3 1_06955 PE=4 SV=1
MNNSLKKELKEFALEKLGVDEVGIASADNYSNEDCERIRIMREVFAKSTPIAGGDANIYQPEDFLSGAKSVIVTGTNSYFGKGSDMEKAKRRLLGYVEESHVDSDFLGKSAKRSSEIEDFLKKRGYQCSSLAAGGFPIKLKASECGVGRYGKNAVIQNNKLGAWISLSAFITDAEMEPDEPLKDGCGECTLCIEACPTGALEKPYFCDVRKCIDFNFGHNKGYLPKEIRDAGGNLLGEGCRICRDVCPYNRNLKPVEHGNIPDDIISPELTSILSISDEQWENKYAPTLFGFFLVEKKYLQRNAAIALGNFSDERATASLLDALENGEDVVREYSSWALGKIKGAGSKTGLEKALKKEQDAGVKKEIKDSLESMS

SEQ ID NO: 75524 - protein, 365 aa, Sulfotelmatobacter kueseliae
  misc_feature (1)..(365): tr|A0A2U3KLT0|A0A2U3KLT0_9BACT 4Fe-4S ferredoxin, iron- sulfur binding protein OS=Candidatus Sulfotelmatobacter kueseliae OX=2042962 GN=SBA1_310024 PE=4 SV=1
MASQISDVKAIVQRAAEQCGFDVCGIAPAADLPELQHFSAWIAAGRAGEMAYMSSRDERGELKRASLSRAAPWARSVVVCAINYNTGHPYSTQMQDPNRGWISRYAWSREDYHDAVLRRLKRVEEVLQNDLWSGGRPRPSDLTTRCYADTGPIVERVFAKYAGVGWIGKNTCIINQKKGSWLFLGVILTSLELEPDLPAPDRCGTCTRCIAACPTDAIIAPYQLDSNKCISYLTIEKRGSIPEDLRAGMGRHIFGCDICQDVCPWNRKAPVSTAPEFEPRPGFVNPALAWLAEMSADEFRAVFRGSPVRRAKRTGLRRNAAIAMGNSGNPEFLPLLEKLADDEEQSVAESARWARARLLERDEAG

SEQ ID NO: 75525 - protein, 303 aa, Sulfotelmatobacter sp.
  misc_feature (1)..(303): tr|A0A2N9MYQ4|A0A2N9MYQ4_9BACT Epoxyqueuosine reductase OS=Candidatus Sulfotelmatobacter sp. SbA7 OX=2043160 G N=SBA7_1430001 PE=4 SV=1
MIVCAINYNTAHPYSTQVQTQTDDASRGWISRYAWSGEDYHDAVLRRLKQVEDELRGLLAATGNWQFRSYVDTGPLIERVYAKYAGIGWIGKNTCIINQKLGSWLFLGVILTSLGITNNDVTGDLPAPDRCGTCTRCIVACPTQAITAPGKLDARLCISYLTIEKRGEIPVELREGMGRHVFGCDICQDVCPWNRKAPATSAAEFEPREGLVNPALDWLAEMRPEEFREVFRGSPIRRAKLSGLRRNAAMAMGNSGDKRFMPTLTTLCEDPDLVVAEHARWALGRLELCCRQRKGLDPSSGGL

SEQ ID NO: 75526 - protein, 183 aa, Sulfotelmatomonas gaucii
  misc_feature (1)..(183): tr|A0A2N9LA52|A0A2N9LA52_9BACT Epoxyqueuosine reductase OS=Candidatus Sulfotelmatomonas gaucii OX=2043161 GN=S BA5_250075 PE=4 SV=1
MAVLLTSLEVSESAGPAFVPDRCGSCTRCIEACPTDALIAPYQMDARRCISYLTIEHKGPIDEAMMPGMGRQVFGCDICQDVCPWNSPRRTPIVADADLEPRPELMNPALDWLGSLDEQSFEREFNGSPVRRAGFNGLRRNVAIAMGNSGLARFGPRLEEWAAAADEGLRAAARWALGRLRNG

SEQ ID NO: 75527 - protein, 374 aa, Sumerlaea chitinovorans
  misc_feature (1)..(374): tr|A0A2Z4Y5H7|A0A2Z4Y5H7_9BACT Epoxyqueuosine (OQ) redu ctase QueG OS=Candidatus Sumerlaea chitinovorans OX=225 0252 GN=BRCON_1185 PE=4 SV=1
MISRDEGRASYGTPASWIPIRLGKTSMGANHDIHWPTWKAELVRVAQQAGFFAVRVANVTLGQEICDHYARWIANSYHGEMTYMEHTAQLRLNVQRWLPWAQSVLVFAADYYPREPQAACRPESTAETVRISKYAVGEDYHHVLRRRLEIICEWLGTHFPEAQWQICIDSSPLLERAYAVAAGIGFWGRNTMVITPRHGSYYFLGCLVTSVALPPDPPVWGTCGSCTRCMDACPTQAFVAPYVLNARRCISYLSIEKRTPLSPTERRLLGEWVFGCDICQDVCPYNKRPPVTPFPEFREGRIVREWEPTSTFISPRSNREFTRRLAHSPILRPGRRRILERVEAVVENLRRRTKLSQDAPASNQLRSDDSSAGE

SEQ ID NO: 75528 - protein, 342 aa, Sumerlaeota bacterium
  misc_feature (1)..(342): tr|A0A353GL22|A0A353GL22_9BACT tRNA epoxyqueuosine(34) reductase QueG OS=Candidatus Sumerlaeota bacterium OX=2 107588 GN=queG PE=4 SV=1
MKRALRNVAKSLGIPVLGVAVAQPLTEDMAYIRAACDEGCHAAMEWLPRSLDVRADPQRVLPGAQSVVMVAWPVAEKKKYQAGRSHPTDLPNTSPLPEGRIARYAAGRDYHIVLQGKLNELAAPLRAVGAAVRVFVDAAPMLERGYAQKAGLGFVGKNNCLIHPVFGSWFLLGGLLTTLKLPEDAPLPNGCGECRRCLDACPGRALIRPYCLDARKCLSYWTVENRGAWPEDVRANVGDRLFGCDACQEACPYNWESTSPRYPLADVLAIVSNREFEGKFKDTAFLRLGRRGLLRNALVVAAHLKRGDLIPRIRALAENPQEHEVVRETACWALQTLETASL

SEQ ID NO: 75529 - protein, 441 aa, Symbiobacter mobilis
  misc_feature (1)..(441): tr|U5N791|U5N791_9BURK Epoxyqueuosine reductase OS=Cand idatus Symbiobacter mobilis CR OX=946483 GN=queG PE=3 S V=1
MTVAVTVQVAKRLLEVPLACTVAMSPLQRSALVSNLKGWGRELGFSRTGVAGVDLSGARQGLSAWLAAGFHGDMAYMARHGLARCEPQTLLPGARSVVLARMDYLDVNATPGWPEAARERLRQPLQASIALYALGRDYHKVVRSRLEQLGRRVVAECAECARSAHCTPCLECAERNPVRYPVRYRVVCDSAPIQEAELAVRSGLGWRGRNTLIVDRDGGSMFVLGALLLDIALPCEEPVAPRCGSCHACIAACPTQALVAPYRLDARRCLAYLSIEHPGPIPVALRSAMGNRIYGCDDCQLACPWNKFARPTTVPDFAVRPWLAGRTLLELWEWDEATFLRNTEGSPIRRIGHERWLRNLAVALGNALRGVQGASTQGELVQGASVSGIPVAARWDALRQALASRAEHPSALVREHVAWALEGGTAIWGNAAALPACVRPG

SEQ ID NO: 75530 - protein, 311 aa, Synechococcus spongiarum
  misc_feature (1)..(311): tr|A0A171DEG1|A0A171DEG1_9SYNE Epoxyqueuosine reductase OS=Candidatus Synechococcus spongiarum OX=431041 GN=qu eG PE=3 SV=1
MNAPLLATQLKEKALAMGFVVAGIGRVDQPAAVPARTAALERWLRAGHQASLGWMADPRRRHINSLLPGVRSLLAVGLNYWTGQQQRPGVLSIARYGWGRDYHRTIDRRLRAIGRWLSRQQPHCRWRACVDSAPLMDKAWAEAAGIGWIGKHSNLIHPRHGSWLLLGHLLTTLELPADVPQAPLCGRCRRCLQVCPTGAIPEPFVVDSRACIAFHTIENRNPALPPEVAKGLRGWIAGCDLCQQVCPWNRTVTPTADPERQPADWMLTASPEHLLSWDDDTWDKKLRGSALRRIKPWMWRRNVHTAVNGQP

SEQ ID NO: 75531 - protein, 314 aa, Synechococcus spongiarum
  misc_feature (1)..(314): tr|A0A0G2HK69|A0A0G2HK69_9SYNE Epoxyqueuosine reductase OS=Candidatus Synechococcus spongiarum SP3 OX=1604020 GN=queG PE=3 SV=1
MIAANALLLANQLKEKALAMGFVVAGIARVDQPAALAARTAALERWLQAGHQASLGWMADPRRRHVNSLLPGVRSLLAVGMNYWTDRQQRPGVLSIARYGWGRDYHRTIDRRLRSLGHWLSQHHPDCRWRVCVDSAPLMDKAWAEAAGIGWIGKHSNLIHPRHGSWLLLGHLLTTLELPADDPQMPLCGRCRRCLEVCPTGAIPEPFVVDSRACIAFHTIENRNPALPAHVAKGLGGWIAGCDLCQQVCPWNRTATPTADPERQPADWMLTAKAEQLLGWDDATWDEKLRGSALRRIKPWMWRRNIHTAVTGQP

SEQ ID NO: 75532 - protein, 413 aa, Tectomicrobia bacterium
  misc_feature (1)..(413): tr|A0A1F7SWD6|A0A1F7SWD6_9BACT tRNA epoxyqueuosine(34) reductase QueG OS=Candidatus Tectomicrobia bacterium RI FCSPLOWO2_02_FULL_70_19 OX=1802342 GN=A3I72_10685 PE=4 SV=1
MDLPRPVAEHSPAELARAAKDLARRHGFDLAGIAPPELEEAYDRYREWLGLGYEGEMAYLRRRPEVRSDLRRVWPETRSALVVAIRYRSEEALPSPALLPGKIASYAHGGDYHKFLKKRLLRLLRDLKELDPGMDGRSYVDTGPILERNLAVRAGLGWQGKNSLLLHRALGSYFFLGALLLNRPLPADAPFAEEHCGTCARCIEACPTGAIVAPGVVDARRCISYLTIELRGPMPRELRPLVGAHFFGCDICQEVCPWNADTPPASEPRFAPRTGVRSPDLLDLLEMDEEAFAKRFRGTPVMRSRYDGFLRNVAVAAGNTGGGEAVAPLMRALRHREPLARGHAAWALGRIGRRLGGDAIRPGLEGRLASEPHPWVREEIELALGELPAFRLPALQETASGHEKGNGTPHSSR

SEQ ID NO: 75533 - protein, 413 aa, Tectomicrobia bacterium; identical to SEQ ID NO: 75532
  misc_feature (1)..(413): tr|A0A1F7TS21|A0A1F7TS21_9BACT tRNA epoxyqueuosine(34) reductase QueG OS=Candidatus Tectomicrobia bacterium RI FCSPLOWO2_12_FULL_69_37 OX=1802343 GN=A3J27_11470 PE=4 SV=1

SEQ ID NO: 75534 - protein, 359 aa, Tenderia electrophaga
  misc_feature (1)..(359): tr|A0A0S2TDE9|A0A0S2TDE9_9GAMM Epoxyqueuosine reductase OS=Candidatus Tenderia electrophaga OX=1748243 GN=queG PE=3 SV=1
MTEKHTLTQPHEAVDYPALARAIKEQGRALGFQQLGVSDIDLSEASQHLRAWLQANFHGEMGYMARHQALRDDPRQLVPGTVRVISVRMDYLPPSGDAEAVMNNPELGFVSRYALGRDYHKVMRKRLQRLADWITARVGEFGYRVFVDSAPVLEKALAQKAGLGWIGKHTNLLSRTAGSWFFLGEIYTDLPLPTDDSPEEHCGSCRACIDICPTRAIVAPYQLDARLCISYLTIELHGSIPVELRALLGNRIYGCDDCQLVCPWNRFAQLSGEDDFLPRHGLDAPYLIELFAWSEQTFNERLQGSPIRRIGHERWLRNIAVALGNGAKSEAVIDALKGRLEHPSEMVREHVQWALDQLR

SEQ ID NO: 75535 - protein, 344 aa, Terasakiella magnetica
  misc_feature (1)..(344): tr|A0A1C3RJN8|A0A1C3RJN8_9RHIZ Epoxyqueuosine reductase OS=Candidatus Terasakiella magnetica OX=1867952 GN=que G PE=3 SV=1
MEDVKQTIRTLALEMGFDDIGFCVAQTSKQHKDDLKEFNARELYGTMEWMQTTQERRADPKVLWPEAKSIIVLGMNYGPKNDPLALIDNPEKGVISCYAYNRDYHDTVKKRLKRLAREMVERWDGELKVFVDTAPVMEKPLAAQTQLGWQGKHTCVVSRTYGSWLFLGEIYTTLELEPDAPHKDHCGNCSSCLDICPTDAFLGESQIDGRKCISYLTIEHDGMIEPELALKMGNRIYGCDDCLAICPWTKFTQTTNEKDFKPRVEFLAPRLGDLIELDDPAFREFFRASPVKRIKHHRFIRNVIIAIVNSKRNDLFKKVEKWVDDDHHVIAQTAKWALSILEKG

SEQ ID NO: 75536 - protein, 335 aa, Thermochlorobacter aerophilum
  misc_feature (1)..(335): tr|A0A395M0R0|A0A395M0R0_9BACT Epoxyqueuosine reductase OS=Candidatus Thermochlorobacter aerophilum OX=1868324 GN=queG PE=3 SV=1
MTIVRKIKEYAYALGFSAIGISKAEELTEEARRLEAWLKAGMHGEMRYMEENFDKRIDPRKLMPECRTVISVIANYFTPTHNSDKKQRKDCNSTEGESEKAKGKISIYAIRADYHAVMKKKLYQLFDYITQLVGEVNGRAFVDSAPMLDKAWAARAGLGWIGKHTNLINRSIGSYFFIGNLLLDCELEPDKPLPKNYCGTCTACIDLCPTKAIVAPYQVDARRCISYLTIELKREFTDEEKSMLGEWLFGCDICQEVCPWTRFSKVTELAEFAPIEALQSLSEREILEMTKSTFKRLFGETPVWRTGLRRLKRNAKAVQENLSSAKISESERQAD

SEQ ID NO: 75537 - protein, 313 aa, Thermochlorobacteriaceae bacterium
  misc_feature (1)..(313): tr|A0A081SE37|A0A081SE37_9BACT Epoxyqueuosine reductase OS=Candidatus Thermochlorobacteriaceae bacterium GBChl B OX=1519464 GN=queG PE=3 SV=1
MTATEKIKAQALSLGFSAVGIAKAERLNKEADLLERWLSNGMHGEMRYMEDHFEKRVNPAALVPNAKSILSVIANYFTPEKFGQVEKGKARISAYAQSEDYHVVLKRKLNELFEFVLQTVGEVNGRAFVDSAPMLDKAWAERAGLGWIGKHTNLITRKHGSYFFIGSLVLDCELDCDTPYAHNYCGRCTACIDLCPTHAIVAPYQVDARKCISYLTIELKREFSEEEQAMLGEWLFGCDVCQEVCPWNRFAQPTTIKELAPTQELNSITESEILEMTKSAFAKVFSETPLFRTGLRRLKRNALAVGKNRVKKN

SEQ ID NO: 75538 - protein, 385 aa, Thermofonsia Clade
  misc_feature (1)..(385): tr|A0A2M8PDN0|A0A2M8PDN0_9CHLR tRNA epoxyqueuosine(34) reductase QueG OS=Candidatus Thermofonsia Clade 1 bacte rium OX=2364210 GN=queG PE=4 SV=1
MEAAFESVRLKERAQQLGFSMLGVTRALPSPRLEAYLRWIAAGYHGTMAYMARADRVARRRDLNVILPNVRSLIVVGLAYHTLNVPAAVLRDPTRGRIAAYAWGLDYHEVIAARLEALAAWLRAESGGMAYRVYVDTGAILERSHAQQAGLGFIGKNTVLIDPKRGSYFLLGELLTDLAFDRYDEPHRETMCGTCVRCQSACPTAAFPQPYVLDARRCISYLTIEYKGYVPRGLRPLLGNWIMGCDICMDVCPFTRFATPTPEPAFQLRDIERAAPRLARLLSLSAAEFAAFFAGSPILRLKHERLLRNACIAAGNSGDASLLPHLDALLESASPLVRAHAAWAVARLAGRAAREALQAALARETDAECATEIETTLADLDAGSL

SEQ ID NO: 75539 - protein, 356 aa, Thermofonsia Clade
  misc_feature (1)..(356): tr|A0A2M8QG24|A0A2M8QG24_9CHLR tRNA epoxyqueuosine(34) reductase QueG OS=Candidatus Thermofonsia Clade 3 bacte rium OX=2364212 GN=CUN48_02095 PE=4 SV=1
MGFDLVGFAPAGPTPGAARFLAWLRAGYHAEMAYMARAPERRLDPRHLMPNVRTIVVVGLSYETLAVPMEVLQDPARGRIARYAWGADYHDVITPVLRAFGDWLARESRAYVDTGPILERAWAARCGLGFIGKNTCLIHPKRGSYLFLGAVLLSEEIEEADHEHSAAAPPLNTAGAPHRSTGEDAPFSRCGRCARCLVACPTNALPTPGVLDASRCISYLTIELKGSIPLALRPQMGNWVFGCDLCQDVCPYVRRFSRPSDSPLAKAFRPPDPERIAPRLLDLLSMDRTAFHARFKGTAIMRTKRRGLLRNACVAAGNWGSDEALPVLRRLLNDEEPLVREHAVWAIARIQQSAYT

SEQ ID NO: 75540 - protein, 542 aa, Thermokryptus mobilis
  misc_feature (1)..(542): tr|A0A0S4MQA8|A0A0S4MQA8_9BACT Epoxyqueuosine reductase OS=Candidatus Thermokryptus mobilis OX=1643428 GN=queG PE=3 SV=1
MMDRIELTREIKRKAIEIGFSKVGIAKAQQLENEAIKLSQWLERGYEADMKWMRESFEKRINPALVLPGAKSIISVALNYFKNLPQAQKEEGKISIYALGIDYHIVLKSKLEKLRQFILKLVPEANAKVYVDTGPVMEKVWATKAGIGWIGKNSNLITREFGSWVFLGEIITDIELEYDEPMSDFCGKCTRCIIACPTEAIVEPYVVDSNKCISYWTIEYKGDEFPDDLGRRFKNLIFGCDICQEVCPWNLKFQKETEVEEFKPFSYNLNPKLSELSKLTEKQFKSNYKLSPIKRAKFHGFIRNIKNAIKNMVLMKISELDFDCAIFDLDGVIADTFQFHFKSWRKICEEFGRDLSVDEFRTIIFGRRGEESAKILFDGKIKDEEIKKIGARVNEIFRDIARGKLKSVDGAIEVVKILKENGIKVALATSAPDENVELIFEELNLYGLFDIVITSKDVQRGKPAPDIFILPAKRLNCRAERCIVFEDSIAGLISAKNAGMVAIGVETTLRKDELSNYADFSIKNFFELIEILKQRTLKNAGD

SEQ ID NO: 75541 - protein, 360 aa, Thiodiazotropha endoloripes
  misc_feature (1)..(360): tr|A0A1E2UUU4|A0A1E2UUU4_9GAMM Epoxyqueuosine reductase OS=Candidatus Thiodiazotropha endoloripes OX=1818881 G N=queG PE=3 SV=1
MSETLNADELLKLSLQIKQWGEELGFNAVGITDTDLSEAESRLQQWLASDCHGEMDYMARHGSKRSRPAELEPGTVRVISVRMDYLPEPMQDLQQLLEDPQKAFISRYALGRDYHKLLRNRLKKLQQKIQHSIPDSNNRLYVDSAPVLEKPLAEKAGLGWIGKHTNLINKRSGSWFFLGEIYTSIPLPIDQPAEDHCGRCQACLEICPTRAITAPYQLDARRCISYLTIELKGAIPEPFRAAMGNRIYGCDDCQQVCPWNRFAQVTGEQDFLARHHLDTSGLISLFDWDEATYLQKTEGSAIRRIGYQRWQRNLAVALGNAPTSDAVAEALLRRLEQASPMVKEHILWALDRQRNQPATA

SEQ ID NO: 75542 - protein, 361 aa, Thiodictyon syntrophicum
  misc_feature (1)..(361): tr|A0A2K8UHT6|A0A2K8UHT6_9GAMM Epoxyqueuosine reductase OS=Candidatus Thiodictyon syntrophicum OX=1166950 GN=q ueG PE=3 SV=1
MTEATRDSPDGAALAQAIKTWGQELGFQQLGIAATDLSVAAAHLAEWLRAGYHGEMHYMARHGTRRSRPAELVPGTRSVIMARMDYLPQTRTAMAAALRDPTGALISRYALGRDYHRLLRRRLQRLAERITAAIGPFGHRAFVDSAPVLEKPLAQHAGLGWIGKHTNLIDRRAGSWFFLGALYTDLALPPDTQARDHCGRCQACLRACPTGAIVAPYRLDARRCISYLTIEHPGPIPEPLRPLLGNHIYGCDDCQLVCPWNRFARLTAEPAFLPRHGLAAATLVELFAWDEATFLARTQGSALRRIGHERWLRNLAVALGNAPPGPAVTAALAARADHASPLVREHVGWARRHRPDDPQRF

SEQ ID NO: 75543 - protein, 383 aa, Thioglobus sp.
  misc_feature (1)..(383): tr|A0A520MMI2|A0A520MMI2_9GAMM Epoxyqueuosine reductase OS=Candidatus Thioglobus sp. OX=2026721 GN=queG PE=3 S V=1
MTELNTNHLAELARNINEWAQELGFNGVGISDSGLEDAGDQLNAWLAKGWHGEMSFMSRNTEKRIKPELLIPEVKRIISVRLNYWPEQSTDPGELIKQQDQAYIARYALGRDYHRLMRRRLQQLANRISDEIGPFHYRAFVDSAPVMEKPLASAAGLGWIGKHTNLIDPHSGSWFFLGELYTDLPLPTTRPAKDHCGSCTRCIDACPTGALDTPYQLDARQCIAYLTIEHKSSIPEPLRALIGNRIFGCDDCQLVCPHNRLTQKGDAEFSPRHGLDTATLLDLFAWSPEEFNRCTAGSPIRRLGYERWMRNLSVAIGNSTPTEKKISILQSKFKKISAMVDEHIVWAINRLRSRLAGEQGITDQGPANKTLSSDVVAVKRHPN

SEQ ID NO: 75544 - protein, 362 aa, Thioglobus sp.
  misc_feature (1)..(362): tr|A0A2A5WXF9|A0A2A5WXF9_9GAMM Epoxyqueuosine reductase OS=Candidatus Thioglobus sp. MED-G25 OX=1986229 GN=que G PE=3 SV=1
MTSRTFSSKELTSLKVQMKLWAGELGFSMIGIADTDLSQAETRLIEWLADGRHGDMHYMAKHGNRRTQPAAIQPGTVRVVSVRMDYLPDSATPPTTILQDSTKGYVSRYALGRDYHRLIRRRLQKLADLMSEAVGPFRYRAFVDSGPVMEKPLAVKAGLGWLGKHTNLIDKESGSFFFLGELYTDLPLPLDKEQTDHCGDCNRCMTACPTGAIDKAYQLDARRCIAYLTIELKGSIPEDLRPLIGNRIFGCDDCQLVCPWTRFSKSVPTQDFQPRHSLDNATLTGLFSWSESEFNTRLEGSPIRRIGYQRWLRNIAVALGNSRRTTEVLAVLERKKEEATPMVREHIEWAIARLNDHCSESD

SEQ ID NO: 75545 - protein, 368 aa, Tokpelaia hoelldoblerii
  misc_feature (1)..(368): tr|A0A1U9JV22|A0A1U9JV22_9RHIZ Epoxyqueuosine reductase OS=Candidatus Tokpelaia hoelldoblerii OX=1902579 GN=qu eG PE=4 SV=1
MRAFLQEEARNNGFDLIGITRPNAIPAARAHLQRALAAGYLGTMDWMEETFERRVAPDVLWPDVRSVIMLAMNYGPGTDPRALQDHPGRGAISVYARHRDYHDLIKGRLKQIASRFAARTGEEVKVFVDTAPVMEKPLAAAAGLGWQGKHTNLVSRTHGSWLFLGSVFTTADLGADAPENDHCGSCRACLDSCPTHAFPAPYQLDARRCISYLTIELKEQIPPGFRKAIGNRIYGCDDCLAACPWNKFAQVTHEIKLQTREELKAPALSMLLGLDDRAFRHFFSGSPVKRIGRDRFIRNALLAAGNSNDANLVPHIEKHMTDPSPLVRGMAVWALHQLLPPAAFETLRKRFASDETDDTVKAEWETAT

SEQ ID NO: 75546 - protein, 111 aa, Tokpelaia sp.
  misc_feature (1)..(111): tr|A0A367ZZ51|A0A367ZZ51_9RHIZ Epoxyqueuosine reductase OS=Candidatus Tokpelaia sp. JSC189 OX=2079010 GN=queG PE=4 SV=1
MNWIEDTVERRSRPDILWPEARSIIMLAMNYGPDSDPCTLQTLPSQGTISVYARHRDYHDLIKGRLKQIASRFSARTGNPVKVFVDTSSCDGKTAGRRRRPRLAGQAYQPF

SEQ ID NO: 75547 - protein, 313 aa, Vecturithrix granuli
  misc_feature (1)..(313): tr|A0A081C566|A0A081C566_9BACT Iron-sulfur cluster-bind ing protein OS=Candidatus Vecturithrix granuli OX=14999 67 GN=U27_06706 PE=4 SV=1
MSHKSLFKKIFQTLEQQGYQGRMISVEHLAELQTEIEQRYYQGEMAREVYDEEPCKKFEFTNPAALPEARSLIIAAAPQPPVEATFHVNGQPFPALIPPTYFFYTDASIHQLLDSVLGPEGYHLVKARLPLKLLAVRSGLAQYGRNNITYIPGMGSFHRPVAFYTDLPCETDSWGAAAFMPRCSTCQVCCKICPTGAITPDRFLIHAERCLTLHNESDRDFPEWIDPAWHNCIIGCLECQSSCPANKDVAARTDHKAQFSEEETALLLQGTPQEQLLPETQSKIKDLEIVEFGYFHLLPRNLRVLFQQQKILA

SEQ ID NO: 75548 - protein, 336 aa, Vecturithrix granuli
  misc_feature (1)..(336): tr|A0A081CAX7|A0A081CAX7_9BACT Uncharacterized protein OS=Candidatus Vecturithrix granuli OX=1499967 GN=U27_02 561 PE=4 SV=1
MNSDRIKAHALSLGFHLAGIAPAIRFTEADTYRAWLAMGYAGEMSYLVHNVEKRLDCRVLFPPARSVIVCGLSYHSSISAAAPVTSPERGWISRYAWGDDYHAVVKHKLLALLEFLRHETSATIEAKVCVDTVPLLERLHGYYAGLGWIGKNGALINQRYGSWFFLGEILLNLDLEYDSPAVEHCGNCTLCLDACPTVALVAPRTLDARRCLSYLSIEFKGAIPKELHSAFGKTVFGCDRCQEVCPWNQRAEAPGQPEFLPREGLYQPDLRWLSSLSADDFRKIFNNSPIMRTNLQGILRNTAIAISNTQICQPPLPLIKASVSCAANAAAIIRKA

SEQ ID NO: 75549 - protein, 303 aa, Capsulimonas corticalis
  misc_feature (1)..(303): tr|A0A402CXH4|A0A402CXH4_9BACT tRNA epoxyqueuosine(34) reductase QueG OS=Capsulimonas corticalis OX=2219043 GN =CCAX7_31780 PE=4 SV=1
MYLHRQEPKRGDLSEVLPGVRSVVSLAWNYSPENGRPSAPPQTEYLTGAVARYARFDDYHDLIWARLQSLLDSILAERPDAHGKLYCDTGPVTERDLAMRAGLGWIGKHTNLISRKLGNWFFLAELLLDIDLPPDEPEVPHCGSCTRCIPACPTGAIVAPYTLDARRCISYLTIELKGSIPEELRPLIGTRIYGCDECLAVCPWNKFAQRSSEPAVRPRADLTAPDLLALLALDDAGFKEKFRSSPIKRAKRRGLLRNVCVALGNIGDIRAIPALTTAMENDPEPLVREHAAWALERIAEANP

SEQ ID NO: 75550 - protein, 224 aa, Carboxydocella sporoproducens
  misc_feature (1)..(224): tr|A0A1T4L9E1|A0A1T4L9E1_9FIRM Uncharacterized protein OS=Carboxydocella sporoproducens DSM 16521 OX=1121270 G N=SAMN02745885_00092 PE=4 SV=1
MARVAWGQDYHRVMREMLERVLQRMGLTGQIQVDSGPWPEKELAVKAGLGWIGRNTLFYHWQAGSFVNLGVALLPFPADGGKNEIEKKPGSRCGQCRRCLEACPGGALTEQGLVVSRCLSAVSQRRGDITEAEARLLPPRLYGCDDCQKVCPYNREQVKKMGDWGWIDVDEVLSLSNRQFKESWGKTAAGWRGAGVIRRNARLITISQNGQKNMVYWNKKDNGG

SEQ ID NO: 75551 - protein, 224 aa, Carboxydocella thermautotrophica; identical to SEQ ID NO: 75550
  misc_feature (1)..(224): tr|A0A2R4MYL5|A0A2R4MYL5_9FIRM Uncharacterized protein OS=Carboxydocella thermautotrophica OX=178899 GN=CFE_07 01 PE=4 SV=1

SEQ ID NO: 75552 - protein, 309 aa, Carboxylicivirga sp.
  misc_feature (1)..(309): tr|A0A553G4X3|A0A553G4X3_9BACT Epoxyqueuosine reductase OS=Carboxylicivirga sp. M1479 OX=2594476 GN=queG PE=3 SV=1
MSIINLAYQQQIKEKAFDLGFSDIGFSVVDHLADDELKLQQWLSNGHQAGMNYMNNHFDKRVNPGLLVEGAKSVISVLLNYAPKELQQDENAPKIARYAYGKDYHFVIKDKLQQLYNFIKEEIYTSLEGRVFTDSAPVLDRAWAKKAGLGWVGKNTNLIHKKLGSYFFIGELISNLEVQPAEEIKEACGGCQRCIDACPTGALVAPYKLDSNKCISYLTIEHREAIPEEFEGQFENWAFGCDICQEACPWNWKARPTKEMEFAPHPDFLSLSKEEWNGLSEERFVEVFRKSALKRTKFAGLRRNLKFLE

SEQ ID NO: 75553 - protein, 389 aa, Carnobacterium alterfunditum
  misc_feature (1)..(389): tr|A0A1N6HA05|A0A1N6HA05_9LACT Epoxyqueuosine reductase OS=Carnobacterium alterfunditum OX=28230 GN=SAMN058784 43_1713 PE=4 SV=1
MVGEATSLKEKIIEESKRIGIDKIGFTTADPFDELEDKLRKQQELGHHSGFEHKVIEERIYPKLIFENPRSIISIALAYPTKIDDPPPRVKGERRGEFARASWGIDYHDILRDKMNRLIEYIRHEAGETITYKPMVDTGELIDVAVAQRAGIGFIGRNGLLITEEFGSYVYLGEIITNLDFPADRIVPFGCGDCTRCVDACPTGALLGDGQINAIQCLSYQTQTKGMMEEKFRRKMGHVIYGCDICQVVCPYNKGKNAHFHPEMEPEPESIMPKLKPLLTISNRDFKEQFGHMSGSWRGKKPLQRNAIIALGNYRDKSALPDLMRCIEEDVRPIIRGTAAWSIAKIVSARDKMIIDFLKEALAKETDKEAYHEIDQAIEVIQHKREKKS

SEQ ID NO: 75554 - protein, 382 aa, Carnobacterium divergens
  misc_feature (1)..(382): tr|A0A2R7ZZS0|A0A2R7ZZS0_CARDV Epoxyqueuosine reductase OS=Carnobacterium divergens OX=2748 GN=queG PE=4 SV=1
MSTLQTSLKEKIILESKRIGIDKIGFTSAAPFTELEEKLEKQQEKGHHSGFEHSNIKERIYPELIFEEPRSIISIALAYPTKMVEAPEKVKGERRGQFARASWGTDYHDILREKMDRLIAYIKEEAEEVSFKPMVDTGELIDVAVAQRAGLGFIGKNGLLITEEFGSYVYLGEIITNISFPVDEPVPNGCGDCTRCIVGCPTTALLGDGRMNAKRCLSYQTQTKGMMPLEYRKKMGHVIYGCDICQMVCPYNKGKNFHFHEEMEPVPEDVAPLLKPLLTISNREFKERFGVMAGSWRGKKPIQRNAIIALANYRDKSAVPDLLKCVAEDPRPVIRGTAAWAIGEIGIQTEELIEFLEEAFTKETDEEAKAELTAAIEKLTTN

SEQ ID NO: 75555 - protein, 390 aa, Carnobacterium divergens
  misc_feature (1)..(390): tr|A0A0R2I388|A0A0R2I388_CARDV Epoxyqueuosine reductase OS=Carnobacterium divergens DSM 20623 OX=1449336 GN=qu eG PE=3 SV=1
MDKELISVCALEITLKEKIILESKRIGIDKIGFTSADPFTELEEKLEKQQEKGHHSGFEHSNIKERIYPELIFEEPRSIISIALAYPTKMAEAPEKVKGERRGQFARASWGTDYHDILREKMDQLIAYIKEEAADVSFKPMVDTGELIDVAVAQRAGLGFIGKNGLLITEEFGSYVYLGEIITNISFSVDKPVPNGCGDCTRCIVGCPTTALLGDGRMNAKRCLSYQTQTKGMMPLEYRKKMGHVIYGCDICQMVCPYNKGKNFHFHEQMEPVPEDVAPLLKPLLTISNREFKERFGVMAGSWRGKKPIQRNAIIALANYRDKSAVPDLLKCVAEDPRPVIRGTAAWAIGEIGIKTEELITFMKDAFEKETDEEAKLELKKAIERLTIAD

SEQ ID NO: 75556 - protein, 389 aa, Carnobacterium iners
  misc_feature (1)..(389): tr|A0A1X7NJ08|A0A1X7NJ08_9LACT Epoxyqueuosine reductase OS=Carnobacterium iners OX=1073423 GN=SAMN04488700_204 3 PE=4 SV=1
MIVLQADLKEKIIEESQRLGINKIGFTTAEPFLDLENKLIAQQEKGHHSGFEHKNIQERIYPELIFESPRSIISIALAYPTKIEHPPERVKGERRGEFARASWGTDYHIILREKMDQLIEYIRKEAGDSVTYKPMVDTGELIDVAVAKRAGLGFIGRNGLLITEEFGSYVYLGEIITNLDFPIDAEIPFGCGDCTRCVDACPTGALLGDGRMNAKQCLSYQTQTKGMMPEEFRRRMGHVIYGCDICQVVCPYNKGKNTGFHPAMEPDPESAMPKLKPLLTISNREFKESFGYMSGSWRGKKPIQRNAIIALGNYRDKSALPDLLHCLEKDPRPVIRGTAAWSIAKIVFHRDEMIMEFLKEVLEKETDKEAQDEMNKAIASIHMKKEKKK

SEQ ID NO: 75557 - protein, 388 aa, Carnobacterium inhibens
  misc_feature (1)..(388): tr|U5SDC2|U5SDC2_9LACT Iron-sulfur cluster-binding prot ein OS=Carnobacterium inhibens subsp. gilichinskyi OX=1 266845 GN=Q783_06225 PE=4 SV=1
MVGEATSLKEKIIEESKRIGIDKIGFTTADPFSDLEEKLKQQKELGHHSGFEHKVIEERIYPEMIFQNPRSIISIALAYPTKIENPPPRVKGERRGEFSRASWGTDYHDILRDKMNQLIEYIRAEAGETVTYKPMVDTGELVDVAVAQRAGLGFIGRNGLLITEEFGSYVYLAEIITNLDFKSDIPVPFGCGECTRCIDACPTGALLGDGRMNAQLCLSYQTQTKGMMDEQFRRKMGHVIYGCDICQVVCPYNKEKNFHFHPEMEPEPESVMPKLKPLLTISNREFKENFGHMSGSWRGKKPLQRNAIIALGNYRDKSALPDLLRCIEEDSRPVIRGTAAWSLAKIVSVRDEMVIEFLEEALAKEEDKEAYHEINQAIETIKNKKERK

SEQ ID NO: 75558 - protein, 386 aa, Carnobacterium maltaromaticum
  misc_feature (1)..(386): tr|A0A2N5JGU6|A0A2N5JGU6_CARML tRNA epoxyqueuosine(34) reductase QueG OS=Carnobacterium maltaromaticum OX=2751 GN=queG PE=4 SV=1
MSGTSLSLKERIIQESQRIGIDKIGFASAEPFSDLEKKLEEQQEKGHHSGFEHPVIKERIYPELIFDEPRSIISIALAYPTKMKEPPERVKGQRRGQFARASWGTDYHDILREKLARLIEFIKEEAKEEVLFKPMVDTGELIDVAVAQRAGLGFIGKNGLLITEEFGSYVYLGEIITNLEFEFDEAVANGCGDCTRCITGCPTTALLGDGRMNAKKCLSFQTQTKGMMPVEYRKKMGHVIYGCDICQMVCPYNKGKNFHFHEAMEPVPEDVAPLLQPLLSISNKEFKQRFGVMAGSWRGKKPIQRNAIIALANYRDKTALPALLRCIEEDPRPVIRGTAAWAIGQIGAKQDVTVIEFLRTAYQKEEDEEARVEFKQALQTLEEKSS

SEQ ID NO: 75559 - protein, 386 aa, Carnobacterium maltaromaticum
  misc_feature (1)..(386): tr|K8E359|K8E359_CARML Putative iron-sulfur cluster-bin ding protein OS=Carnobacterium maltaromaticum LMA28 OX= 1234679 GN=aa23 PE=4 SV=2
MSGTSLSLKERIIQESQRIGIDKIGFASAEPFSNLEKKLEEQQEKGHHSGFEHPVIKERIYPELIFDEPRSIISIALAYPTKMNEPPERVKGQRRGQFARASWGTDYHDILREKLARLIEFIKQEAKEEVLFKPMVDTGELIDVAVAQRAGLGFIGKNGLLITEEFGSYVYLGEIITNLEFEFDEAVANGCGDCTRCITGCPTTALLGDGRMNAKKCLSFQTQTKGMMPVEYRKKMGHVIYGCDICQMVCPYNKGKNFHFHEEMEPVPEDVAPLLQPLLSISNKEFKQRFGVMAGSWRGKKPIQRNAIIALANYRDKTALPALLRCIEEDPRPVIRGTAAWAIGQIVAKQDVTVIEFLRTAYQKEEDEEARVEFKQALQTLEEKSS

SEQ ID NO: 75560 - protein, 389 aa, Carnobacterium sp.
  misc_feature (1)..(389): tr|F4BRW4|F4BRW4_CARS1 Putative iron-sulfur containing oxidoreductase subunit OS=Carnobacterium sp. (strain 17 -4) OX=208596 GN=yhbA PE=4 SV=1
MVGEATSLKEKIIEESKRIGIDKIGFTTADPFNELEEKLEKQQELGHHSGFEHKVIKERIYPELIFENPRSIISIALAYPTKMDAPPPRVKGERRGEFARASWGTDYHDVLRDKMDQLIAYIRREAGEVATYKPMVDTGELIDVAVAQRAGLGFIGRNGLLITEEFGSYVYLAEIITNLDFSVDTPVPFGCGDCTRCVDACPTGALLGDGRINAKQCLSYQTQTKGMMEEPFRRKMGHVIYGCDICQIVCPYNKGKNAHFHPEMEPDPESVMPKLKPLLTISNRNFKEQFGHMSGSWRGKKPLQRNAIIALGNYRDKSALPDLLRCIDEDVRPVIRGTAAWSIAKIVSARDELVIEFLEETLTKEEDKEAYYEIQQAIETIKSKREKKR

SEQ ID NO: 75561 - protein, 389 aa, Carnobacterium sp.
  misc_feature (1)..(389): tr|A0A0U3P124|A0A0U3P124_9LACT Epoxyqueuosine reductase QueG OS=Carnobacterium sp. CP1 OX=1564681 GN=NY10_714 PE=4 SV=1
MAAMQTALKEKIIEESKRIGINKIGFTTAEPFSDLESKLEAQQAKGHHSGFEHKVIKERIYPELIFESPRSIISIALAYPTKIENPPPRVKGERRGEFARASWGMDYHDILREKMNQLIDYIRQEAGDTVTYKPMVDTGELVDVAVAQRAGLGFIGRNGLLITEEFGSYVYLGEIITNLDFPSDETVPFGCGDCTRCIDACPTGALLGDGRMNAKQCLSYQTQTKGMMPEEFRRSMGHVIYGCDICQIVCPYNKGKHANVHPEMEPEPESVMPKLKPMLSISNREFKEQFGHMAGSWRGKKPLQRNSIIALGNYRDKSALPDLLRCVERDPRPVIRGTAAWSIAKIVSYQDDMVIEFLEEALEKETDKEAFFEIKQAVVAIKDKRTKRN

SEQ ID NO: 75562 - protein, 389 aa, Carnobacterium viridans
  misc_feature (1)..(389): tr|A0A1H0Y9J5|A0A1H0Y9J5_9LACT Epoxyqueuosine reductase OS=Carnobacterium viridans OX=174587 GN=SAMN04487752_0 798 PE=4 SV=1
MVEEATSLKEKIIEESKRIGIDKIGFTTADPFDDLEEKLEKQQELGHHSGFEHKVIKERIYPELIFKSPRSIISIALAYPTKMDAPPPRVKGERRGEFARASWGTDYHDILRDKMNQLIAYIRREAGETVTYKPMVDTGELVDVVVAQRAGLGFIGRNGLLITEEFGSYVYLAEIITNLDFSSDTLVPFGCGDCTRCVDACPTGALLGDGRINAKQCLSYQTQTKGMMEEQFRRKMGHVIYGCDICQIVCPYNKGKNVHFHPEMEPDPESVMPKLKPLLTISNRDFKEQFGHMSGSWRGKKPLQRNAIIALGNYRDKSALPDLFRCIEEDIRPVIRGTAAWSIAKIVSARDELVIEFLEEALTKEEDKEAYYEIQQAIETIKSKKEEKR

SEQ ID NO: 75563 - protein, 376 aa, Caryophanon latum
  misc_feature (1)..(376): tr|A0A1C0YFX8|A0A1C0YFX8_9BACL tRNA epoxyqueuosine(34) reductase QueG OS=Caryophanon latum OX=33977 GN=A6K76_1 4970 PE=4 SV=1
MTITQLQQDFIAYAASIGVDKIGFTTAAPFMELKNRLRRQQELNFQSGFEESDVELRTEPTKLLPQAESIVSIALAYPSRMDNAPIGKKGERRGIFCRASWGVDYHVAVRERLTKLEAWLQERVPNVQIRSMVDTGELVDRAVAERAGIGWSAKNCSVITPEFGSYVYLGELITNIPFAPSTPIEEECGDCRLCIDVCPTGALIEGGQLDSKRCIAFLTQTKTMLPDEFRTKIGNRLYGCDTCQTVCPKNKRKHNDWHEEFTPDPELAKPLLEPLLHISNKEFKAKFGHVSGSWRGKKPIQRNAILALAHFKEEAAMPALVELLKKDERPVIRGTAAWAIGKIGADGAEEVLLQAKEKEADEQVVAEIEKGLQLLR

SEQ ID NO: 75564 - protein, 378 aa, Caryophanon tenue
  misc_feature (1)..(378): tr|A0A1C0YB10|A0A1C0YB10_9BACL tRNA epoxyqueuosine(34) reductase QueG OS=Caryophanon tenue OX=33978 GN=A6M13_1 5480 PE=4 SV=1
MRVHIASLQRELIAYAKSIGVDKIGFTTAAPFMELKNRLRRQQELNYQSGFEESDVELRTEPTLLLDRAESIISIALAYPSRMENAPLGKKGARRGVFCRASWGVDYHVAVRERLQKIEAWLQERVPTVAIRSMVDTGELVDRAVAERAGIGWSAKNCSVITPEFGSYVYLGELITNIPFVPDTPIEDECGDCRLCIDVCPTGALIEGGQLDSKRCIAFLTQTKTMLPDEFRTKIGNRLYGCDTCQTVCPKNKGKLNWIHEEFTPDPELAKPLLQPFLHMSNKEFKTTFGHVSGSWRGKKPIQRNAILALAHFREEAAVPELIELLHKDTRPVIRGTAAWAIGKIGTPEAEEVLLLARSKENDEEVLAEIDKGLQFLR

SEQ ID NO: 75565 - protein, 359 aa, Castellaniella defragrans
  misc_feature (1)..(359): tr|W8X8G3|W8X8G3_CASDE Epoxyqueuosine reductase OS=Cast ellaniella defragrans 65Phen OX=1437824 GN=queG PE=3 SV =1
MNGNNQWSRQIRAWARELGFSDIGVSGVDLSSAEPHLLQWLARGYHGDLHYMERHGLKRARPAELVPGTVSVITARMPYLPRDTAPDWQARECARLADPGEGVVSLYARGRDYHKVVRARLQKLCDRIEALVGPFGYRVFSDSAPVLEKELASRSGLGWRGKHSMVLSRDAGSMFFLGEIFVDFALEPTDPVSAHCGTCTACIDVCPTGAIVAPGVVDARRCISYLTIENHGPIPEELRPLMGNHIYGCDDCQTICPWNKYAQTSTLPDFDERAPLVGRRLVELFAWDEETFLKRTEGGPIRRIDHERWLRNIAVALGNALREADAAQARELRAALLGRADHESALVREHVAWALAQRA

SEQ ID NO: 75566 - protein, 317 aa, Catalinimonas alkaloidigena
  misc_feature (1)..(317): tr|A0A1G9MWX3|A0A1G9MWX3_9BACT Epoxyqueuosine reductase OS=Catalinimonas alkaloidigena OX=1075417 GN=queG PE=3 SV=1
MMEPFVRRRHTMLIKERAHALGFAACGVSTADFLEEEAPRLEHWLRQQQHGQMAYMANHFDKRLDPRKLVDDAKSVVSLLFNYFPKEELPTDGTYKIARYAYGTDYHFVIKDKLRALMAYIEEEIGEVHGRVFVDSAPVMDKAWAKRSGLGWVGKNSNLLNRRMGSYFFIAELILDLDLVPDQGIRDYCGTCTRCLDACPTGAIVEPYVVDGSRCISYFTIELKDQIPEAVRGQFDDWIFGCDICQEVCPWNRFAQPTTEPAFAPHPALSEMKKSDWEELTEEVFREIFRRSPVKRTKFEGLKRNINFAKNAKGFPE

SEQ ID NO: 75567 - protein, 385 aa, Catenovulum agarivorans
  misc_feature (1)..(385): tr|W7QIF9|W7QIF9_9ALTE Epoxyqueuosine reductase OS=Cate novulum agarivorans DS-2 OX=1328313 GN=queG PE=3 SV=1
MFMPLSNQQLEQLAQNIKLWATELGFSYVGISDLDLTKHEQPLLDWLDKNYHGEMAYMQNHGLLRARPSELHPGSVRSISIGMDYLPQSAKFAKTLKDKHKGYISRYSLGRDYHKLIRNKLKQLGQKIEQQTELNTGFRPFVDSAPILERPLAEKAGIGWTGKHSLILNQTGGSWFFLGELLINLPLPTDNPVEEKCGNCVACMTICPTQAIVAPYEVDARRCISYLTIEKKGPIPQEFRHAIGNRIYGCDDCQLVCPWNRYASLTAEDDFQARHNLDSSDLLDLWSWQEQDFLTKLQGSAIRRIGYEYWLRNLAVALGNAPASEAIIQQLQQKLGTISELVDEHIHWAVEQQQQKITDTNLNTGLDKKTQRLVRVVEKGLARDA

SEQ ID NO: 75568 - protein, 384 aa, Catenovulum maritimum
  misc_feature (1)..(384): tr|A0A0J8GNP5|A0A0J8GNP5_9ALTE Epoxyqueuosine reductase OS=Catenovulum maritimum OX=1513271 GN=queG PE=3 SV=1
MTTQTALNSEQLAQLSIDIKKWGKELGFQHVGISSTELLNQDEAYQKWIKNNYHGDMDYMNRNIDLRLNPAQLHPNTASIISVRLDYLPENAGFSTSLNDPNKAYISRYAIGRDYHKVLRNKLKQLGQKIELETELNIGFRPFVDSAPVLERPIAEQAGLGWTGKHTLIIHKDAGSWFFLGELFINLPLVEDQPVQEECGNCVACITICPTAAIVEPYVVDARKCISYLTIELQGSIPVEYREAIGNRIYGCDDCQLVCPWNRYADLSQEKDFEQRHGLLSQDLLALWQWDEETFLTKTQGSPIRRIGYQRWLRNLAIGIGNSSFNPANIAALESKLVQADEIAAEHINWAIAQQQLKQSNENPVNKKTARLIRVIEKGLPRDA

SEQ ID NO: 75569 - protein, 380 aa, Catenovulum sp.
  misc_feature (1)..(380): tr|A0A2S0VY53|A0A2S0VY53_9ALTE Epoxyqueuosine reductase OS=Catenovulum sp. CCB-QB4 OX=2172099 GN=queG PE=3 SV= 1
MTLTAEQLVHIKSQIKAMAQTLGFQALGVSDIDLSIEEPRLQAWLDNNYHGEMDYMARHGMMRARPAELQPGTLRVISVRMDYLPEEAYFAQDLKEPNTAFISRYALGRDYHKLIRNRLKRLGQQISEKLEQELGFRPFVDSAPILERPLAAKAGLGWVGKHSLLLDEKAGSWFFLGELLVDLPLPVDEPVQEQCGSCVACMTMCPTQAIVAPYVVDGRRCISYLTIELQEAIPEEFRPLIGNRIYGCDDCQLVCPWNRYAELSCEQDFQKRGNVASQDLLTLWAWDEDTFLKNTEGSAIRRIGHQRWLRNIAVALGNAPYSAAIVSALTSKRVEVSELVVEHIDWALAQQAEKQKQQVNLDKKTQRLIRIVEKGLPRDA

SEQ ID NO: 75570 - protein, 360 aa, Caulobacter flavus
  misc_feature (1)..(360): tr|A0A2N5D613|A0A2N5D613_9CAUL Epoxyqueuosine reductase OS=Caulobacter flavus OX=1679497 GN=queG PE=3 SV=1
MTTSTSDLTPKDRFLAIRDEIRREALALGFDACGFASAADAWPNGEWLRQFVAEGLHGAMGWMEETLERRSHPTAMWTNARSAVVLGVNYGPDIDPLTQLEHRDRAAISVYAQGDDYHDVVKKRLKQLAGWMHRRWGEEVKVFVDTAPLMEKPLAQRAGLGWQGKHTNLVSRQFGSWLFLGSVLTTLDLPPDPEEFDRCGSCRACLDICPTNAFPAPHRLDARRCISYLTIELAGPIPDEFRPLLGNRIYGCDDCLAACPWNKFASLSAEAKFHARETLKTPALADLAALDDPSFRALFSKSPIKRIGRDRFVRNVLYAIGNSGDPGLLAVVQPLRADADETVRDAADWAASRLAGAQAS

SEQ ID NO: 75571 - protein, 378 aa, Caulobacter henricii
  misc_feature (1)..(378): tr|A0A0P0P3W3|A0A0P0P3W3_9CAUL Epoxyqueuosine reductase OS=Caulobacter henricii OX=69395 GN=queG PE=3 SV=1
MTTSTSSPPNLAFRDEIRAEALRLGFDACGFADAATAWPHGEQLAQFVAEGFHGEMGWMEETLERRSHPTAMWTDARSAVVLGLNYGPEHDPLTALDHKDRAAISVYAQGDDYHEVVKKRLKLLAGWMHRRFGEEVKVFVDTAPLMEKPLAQRAGLGWQGKHTNLVSRPFGSWLFLGSVLTTLGLPPDPPEVDHCGSCRACLDICPTGAFPAPYRLDARRCISYLTIELAGPIPPEFRPALGNRIYGCDDCLAACPWNKFAQVAGEARFHAREALKGPSLADLAGLDDPSFRALFSKNPIKRIGRDRFVRNVLYAIGNSGDATLMTAVEPLLQDPVPLVRGAAVWAARRLDPGRAAAAGARELETDQAVLDEWARPLA

SEQ ID NO: 75572 - protein, 354 aa, Caulobacter mirabilis
  misc_feature (1)..(354): tr|A0A2D2B3M3|A0A2D2B3M3_9CAUL Epoxyqueuosine reductase OS=Caulobacter mirabilis OX=69666 GN=queG PE=3 SV=1
MTILISDDTNDRIRQRARSLGFDVVGFASAADAWPAGERLRQFVAEGLHGQMGWLEETLDRRAHPTGMWAEGRSAVMLGMNYGPDADPLERLKERSTGIISAYAQGDDYHDLIKGKLKNLAGWMKARFGGEVKVFVDTAPLMEKPLAQRAGLGWQGKHTNLVSRELGSWLFLGSVLISVDLEHDSPEIDRCGSCRACLDICPTKAFLGPYRLDARRCISYLTIEHDGPIPEDLRPALGNRIYGCDDCLAVCPWNKFAETSRQAQFQARQALRAPKLSELAALDDEGFRFVFRRSAVQRIGRDRFIRNVLYAVGNSGDPALLPTAERLLDDPDPVVRDAAHWAVSRLKGAPPAAA

SEQ ID NO: 75573 - protein, 360 aa, Caulobacter radicis
  misc_feature (1)..(360): tr|A0A2T9K149|A0A2T9K149_9CAUL Epoxyqueuosine reductase OS=Caulobacter radicis OX=2172650 GN=queG PE=3 SV=1
MTTSTSDLTPQDRLLAIRDEIRREALALGFDACGFASAADAWPNGEWLRQFVAEGLHGAMGWMEETLERRSHPTAMWTEAKSAVVLGVNYGPDIDPLTQLEHRDRAAISVYAQGDDYHDVVKKRLKQLAGWMHRRWGNDVKVFVDTAPLMEKPLAQRAGLGWQGKHTNLVSRQFGSWLFLGSVLTTLDLPADEAEFDRCGSCRACLDICPTNAFPAPHRLDARRCISYLTIELAGPIPDEFRPLLGNRIYGCDDCLAACPWNKFASLSAEAKFHARETLKTPSLAQLAVLDDPSFRALFSKSPIKRIGRDRFVRNVLYAIGNSGDRALMAVVEPLRSDPDETVRDAADWAAARLAPAQAS

SEQ ID NO: 75574 - protein, 360 aa, Caulobacter radicis
  misc_feature (1)..(360): tr|A0A2T9J1T5|A0A2T9J1T5_9CAUL Epoxyqueuosine reductase OS=Caulobacter radicis OX=2172650 GN=queG PE=3 SV=1
MTTSTSDLTPQDRFLAIRDEIRREALALGFDACGFASAADAWPNGEWLRQFVAEGLHGAMGWMEETLERRSHPTAMWTDAKSAVVLGVNYGPDIDPLTQLEHRDRAAISVYAQGDDYHDVVKKRLKQLAGWMHRRWGNDVKVFVDTAPLMEKPLAQRAGLGWQGKHTNLVSRQFGSWLFLGSVLTTLDLPPDEAEFDRCGSCRACLDICPTGAFPAPHRLDARRCISYLTIELSGPIPDEFRPMLGNRIYGCDDCLAACPWNKFASLSAEAKFHARETLKTPPLAELAVLDDPSFRALFSKSPIKRIGRDRFVRNVLYAIGNSGDAALMTVVEPLRSDPDETVRDAADWAAARLASAQVS

SEQ ID NO: 75575 - protein, 395 aa, Caulobacter rhizosphaerae
  misc_feature (1)..(395): tr|A0A561NAH1|A0A561NAH1_9CAUL Epoxyqueuosine reductase OS=Caulobacter rhizosphaerae OX=2010972 GN=queG PE=3 S V=1
MTISTSDPPNQALRDEIRAEALRLGFDACGFASASDAWPNGGWLRDFVAEGFHGAMGWMEETLDRRSHPTAMWTDAKTAVVLGVNYGPEHDPLLALQDPSRPAISVYAQGDDYHEVIKKRLKALARWMHGRFGGEVKVFVDTAPLMEKPLAQRAGLGWQGKHTNLVSRQFGSWLFLGSVLTTLDLPADPPERDHCGSCQACLDICPTNAFPGPYRLDARRCISYLTIELSGPIPVEFREALSNRIYGCDDCLAACPWNKFASLSSEMAFHARETLKGPSLADLAGLDDPAFRALFSKSPVKRIGRDRFVRNVLYAIGNSGDVGLMAAVEPLLADPSPVVRGAAAWAAGRLLDATAFARLAGTVAEEDPAVRAEWENGSTRGSPGTPSAGSVASPR

SEQ ID NO: 75576 - protein, 372 aa, Caulobacter segnis
  misc_feature (1)..(372): tr|A0A2W5WNK4|A0A2W5WNK4_9CAUL Epoxyqueuosine reductase OS=Caulobacter segnis OX=88688 GN=queG PE=3 SV=1
MTTSTSELTPQAIKDEIRAEALALGFSTCGFADASAAWPNGQWLREFVEADRHGAMGWMEETLDRRSHPTAMWTEAKSAVVLGVNYGPDIDPLEQLARTDRAAISVYAQGDDYHDVIKKRLKVLAGWMHRRFGQDVKVFVDTAPLMEKPLAQRAGLGWQGKHTNLVSRDFGSWLFLGSVLTTLDLPPDTPETDHCGRCSACLDICPTKAFPAPRQLDARRCISYLTIELAGPIPVEFRPALGNRIYGCDDCLAVCPWNKFASLSSEAKLLAREALRQPSLAELALLDDAQFRALFSKNPIKRIGRDRFIRNVLYAIGNSGDAELMAIVEPLLSDPAPIVRGAAVWAARRLLGDAAATFRRREDDEAVLAEWL

SEQ ID NO: 75577 - protein, 382 aa, Caulobacter segnis
  misc_feature (1)..(382): tr|D5VPW4|D5VPW4_CAUST Epoxyqueuosine reductase OS=Caul obacter segnis (strain ATCC 21756 / DSM 7131 / JCM 7823 / NBRC 15250 / LMG 17158 / TK0059) OX=509190 GN=queG P E=3 SV=1
MTTSTSELSPDAIKDEIRAEALALGFSTCGFADAAAAWPNGEWLREFVEADRHGAMGWMEETLERRSHPTAMWTEAKSAVVLGVNYGPDIDPLEQLAQTDRAAISVYAQGDDYHDVIKKRLKVLAGWMHRRFGQDVKVFVDTAPLMEKPLAQRAGLGWQGKHTNLVSREFGSWLFLGSVLTTLNLPPDPPETDHCGRCSACLDICPTNAFPAPRQLDARRCISYLTIELSGPIPAEFRPALGNRIYGCDDCLAVCPWNKFASLSSEAKLQAREALRQPSLAELARLDDAEFRALFSKNPIKRIGRDRFVRNVLYAIGNSGDTSLVAVVEPLLTDPAPVVRGAAVWAARRLLGDAAAALRNAEVDPEVLAEWAILPLAGEVSP

SEQ ID NO: 75578 - protein, 374 aa, Caulobacter sp.
  misc_feature (1)..(374): tr|B0T5B8|B0T5B8_CAUSK Epoxyqueuosine reductase OS=Caul obacter sp. (strain K31) OX=366602 GN=queG PE=3 SV=1
MFSDSCHPNEALRDEIRAEALRLGFDACGFASASDTWPNGGWLREFVAEGFHGAMGWMEETLDRRAHPTAMWRDAATAVVLGVNYGPEHDPLIALEDPSRAAISVYAQGDDYHEVIKKRLKALARWMHGRFGGEVKVFVDTAPLMEKPLAQRAGLGWQGKHTNLVSRPFGSWLFLGSVLTTLDLPADPPERDHCGSCSACLDVCPTKAFPAPYRLDARRCISYLTIELSGPIPVEFRAALGNRIYGCDDCLAVCPWNKFAQLSSEAAFHARETLKGPSLAELAALDDPSFRALFSKSPVKRIGRDRFVRNVLYAIGNGGDAALMAVIEPLLADPSPMVRGAAVWAAGRLAPERLPGLRAARVEEDPAVLAEWGG

SEQ ID NO: 75579 - protein, 395 aa, Caulobacter sp.
  misc_feature (1)..(395): tr|A0A2G5RGK7|A0A2G5RGK7_9CAUL Epoxyqueuosine reductase OS=Caulobacter sp. X OX=2048901 GN=queG PE=3 SV=1
MTTSTSELTPLESLLAIKDEIRAEALALGFSTCGFADAAAAWPNGEWLREFVEADRHGAMGWMEETLDRRSHPTAMWTEAKSAVVLGVNYGPDIDPLEQLARTDRAAISVYAQGDDYHDVIKKRLKVLAGWMHRRFGRDVKVFVDTAPLMEKPLAQRAGLGWQGKHTNLVSRDFGSWLFLGSVLTTLDLPPDAPETDHCGRCSACLDVCPTNAFPAPRQLDARRCISYLTIELAGPIPAEFRPALGNRIYGCDDCLAVCPWNKFASLSNEAKLQAREALKQPSLADLARLDDAEFRTLFSKNPIKRIGRDRFVRNVLYAIGNSGDASLMAVVEPLLADPAPVVRGAAVWAARRLLGDAAAALKQDEDDAEVLAEWEILPPAGEVAPQATEGEETG

SEQ ID NO: 75580 - protein, 372 aa, Caulobacter vibrioides
  misc_feature (1)..(372): tr|A0A258DDJ7|A0A258DDJ7_CAUVI Epoxyqueuosine reductase OS=Caulobacter vibrioides OX=155892 GN=queG PE=3 SV=1
MTTSISELTPDRIKDEIRAEALKLGFSACGFASATDAWPNGEWLREFVQAERHGAMGWMEETLERRSHPTAMWTDAKSAVVLGVNYGPDIDPLEQLADPARAAISVYAQGDDYHDVIKKRLKVLAGWMHRRFGEEVKVFVDTAPLLEKPLAQRAGLGWQGKHTNLVSRQFGSWLFLGSVLTTLDLPADAAEVDHCGSCRACLDVCPTNAFPAPRQLDARRCISYLTIELAGPIPSEFRSALGNRIYGCDDCLAVCPWNKFASLSNEAKLVAREALRQPSLAELAALDDAAFRALFAKNPIKRIGRDRFVRNVLYAIGNSGDVGLVAVVEPLLADPAPVVRGAAVWAARRLLGDAAAALTGREDDESVLAEWD

SEQ ID NO: 75581 - protein, 372 aa, Caulobacter vibrioides
  misc_feature (1)..(372): tr|R0EBA4|R0EBA4_CAUVI Epoxyqueuosine reductase OS=Caul obacter vibrioides OR37 OX=1292034 GN=queG PE=3 SV=1
MTTSTSERSQAAIKDEIRAEALALGFSACGFADAAAAWPNGEWLREFVEADRHGAMGWMEETLERRAHPTAMWTEAKSAVVLGVNYGPDIDPLEQLVRADRAAISVYAQGDDYHDVIKKRLKVLAGWMHRRFGQEVKVFVDTAPLMEKPLAQRAGLGWQGKHTNLVSRPFGSWLFLGSVLTTLDLPPDPAEVDHCGRCNACLDICPTQAFPAPRQLDARRCISYLTIELSGPIPAEFRSALGNRIYGCDDCLAVCPWNKFASLSSEAKLRARSALRQPALAELAGLDDAAFRALFSKNPIKRIGRDRFVRNVLYAIGNSGEAALMAVVEPLLSDPAPVVRGAAVWAARRLIGDRALSLKGAEDHPEVLAEWN

SEQ ID NO: 75582 - protein, 358 aa, Caulobacter zeae
  misc_feature (1)..(358): tr|A0A2N5CYI7|A0A2N5CYI7_9CAUL Epoxyqueuosine reductase OS=Caulobacter zeae OX=2055137 GN=queG PE=3 SV=1
MTTSTSDLTPQDRLLAIRDEIRREALALGFDACGFASAADAWPNGEWLRQFVAEGLHGAMGWMEETLERRSHPTAMWTDARSAVVLGVNYGPDIDPLTQLEQRDRAAISVYAQGDDYHDVVKKRLKQLAGWMHRRWGNEVKVFVDTAPLMEKPLAQRAGLGWQGKHTNLVSRQFGSWLFLGSVLTTLDLPADTAEHDRCGSCRACLDICPTNAFPAPHRLDARRCISYLTIELAGPIPDEFRALLGNRIYGCDDCLAACPWNKFASLSAEAKFHARETLKTPSLAELAGLDDPSFRALFSKSPIKRIGRDRFVRNVLYAIGNSGDRGLMAVVEPLRGDPDDTVRDAADWAASRLAQAS

SEQ ID NO: 75583 - protein, 363 aa, Caulobacteraceae bacterium
  misc_feature (1)..(363): tr|A0A4Q3S855|A0A4Q3S855_9CAUL tRNA epoxyqueuosine(34) reductase QueG OS=Caulobacteraceae bacterium OX=1978230 GN=queG PE=4 SV=1
MTPDDIRKRARALGFDACGFASAADAWSAGARLAQFVEDGRHGQMDWMAETLQRRAHPTGMWPQARSAVVVGMTYGPERNPLEGLARRSNGLVSAYARGDDYHGLIKGRLKNLGGWIKAKFGGEVKVFTDTAPLMEKPLAERAGLGWQGKHTNLVSRELGSWLFLGSVLTSVELPADAAGEDACGSCRACLDICPTNAFPAPYQLDARRCISYLTIEHEGPVDPALRPALGNRIYGCDDCLAVCPWNKFAVEAREMGLRARPELEEPSLAELARLDDAGFRRLFRKSAVTRIGRDRLVRNVLYAAGNSGDAALVPDVEALLGDADPAVRGAAVWALRRLAPERAAALRGSVAERDPDVLAEWG

SEQ ID NO: 75584 - protein, 378 aa, Caulobacteraceae bacterium
  misc_feature (1)..(378): tr|A0A1B1AG65|A0A1B1AG65_9CAUL Epoxyqueuosine reductase OS=Caulobacteraceae bacterium OTSz_A_272 OX=1759059 GN =ATE48_06240 PE=4 SV=1
MTTSDNPRSIRGKIQSQAQSLGFDAIGVASVREPWPAGARLHEFLADGRHGDMDWLGQRREGVNPREHPQALWADARCAILVGQSYASADDAIALLQLKQKGLVSAYAARRDYHDVVKGKLKQLAQWLARDTGADVKVFVDTAPLMEKPLAQRAGLGWQGKHTNLVSREHGSWLFLGAILSAADIEADAPEEDHCGSCRACLDVCPTNAFPAPYQLDARRCLAYLTIEHKGQIPLEFRQAVANRIFGCDDCLAVCPWNKFAQTSREARLEMRDDLRIAPLSELAALDDAAFRTRFAGTPVKRTGRDRFVRNVVCAIGNSDDVSLAPVAERLIGDSSPLVRGMAVWAARRLLDAEAFERLKSVQAPREGDRSVAKEWDA

SEQ ID NO: 75585 - protein, 377 aa, Caulobacterales bacterium
  misc_feature (1)..(377): tr|A0A258CGA4|A0A258CGA4_9PROT Epoxyqueuosine reductase OS=Caulobacterales bacterium 32-67-6 OX=1970502 GN=que G PE=3 SV=1
MTISISETPEDLIRRQALALGFDDCRLARADQPWIAGARLAEFVAEGRHGEMAWLETTLERRSHPQAMWEGARSAVMLGVNYGPDHDPRDILAHPDRGAISVYAQGSDYHDLIKKRLKQLASWMAQTFGSEVKVFVDTAPLLEKPLAQASGLGWQGKHTNLVSRQFGSWLFIGSVLTSLELEPDPPGEDACGSCRACQDVCPTAAFPAPYQLDARRCISYLTIELSGPIPAEFRPALGNRIYGCDDCLAVCPWNKFAQDAREQQLQAREVLKAPRLEDLAALDDAAFRALFTKSAVKRLGRDRFVRNVLYAIGNSGDAGLVEVARERLADEAPVVRGAAVWALSQLAAPDVFAAERALALPAEMDEGVGAEWGQTPA

SEQ ID NO: 75586 - protein, 371 aa, Caulobacterales bacterium
  misc_feature (1)..(371): tr|A0A1F8INX3|A0A1F8INX3_9PROT Epoxyqueuosine reductase OS=Caulobacterales bacterium RIFOXYB1_FULL_67_16 OX=17 97588 GN=queG PE=3 SV=1
MSDRLKTFIRQRAAELGFDVCRFASAADAWPAGERLRRFVDEGRHGDMEWMETTLDRRRHPTAMWDEAKTAIVLGMNYGPDDNPLDQLADRSAAYISVYARGDDYHEVIKGRLKQLAGQIAARNGADIKVFVDTAPLMEKPLAQRAGLGWQGKHTNLLSRTHGNWLFLGTILTAAEIEPDAAETEHCGRCTACLDACPTNAFPAPFQLDARRCLSYLTIEFAGPWPVEFRTLTGSRIYGCDDCLAVCPWNKFAQEAREIRLQPRPAFNSPRLADLLALDDAAFRALFTKSPVKRIGRDRFLRNVLYAVGNSDDPALIAPTQALLSDPAPLVRGAAVWALSRLMAPAEFTALAQATAETDVQVLREWQGLRA

SEQ ID NO: 75587 - protein, 311 aa, Cecembia calidifontis
  misc_feature (1)..(311): tr|A0A4Q7P6P0|A0A4Q7P6P0_9BACT Epoxyqueuosine reductase OS=Cecembia calidifontis OX=1187080 GN=queG PE=3 SV=1
MRNTTDLYAQIIKTQAKSLGFDFCGIAKAEFLEEEAPKLEAWLHENYHGKMAYMANHFDKRLDPTKLVDGAKTVVSLIYNYFPEKKLPEKEEDFKIAKYAYGQDYHHVIKDKLKRLLEILRDEIGEFGGRAFVDSAPVMERQWAQKTGIGWLGKNSLLLNRQMGSFFFLAELIIDLEVTADPPMVKDYCGTCTRCIDACPTDAIVQPGVVDGSKCISYFTIELKEEIPQDVKGKFENWVFGCDICQDVCPWNRFSKPHQEPKFDPHPDMMNFNRKDWEEITEATFNKVFSKSAVKRAKFSGFLRNLRFLQQ

SEQ ID NO: 75588 - protein, 313 aa, Cecembia lonarensis
  misc_feature (1)..(313): tr|K1LJ22|K1LJ22_9BACT Epoxyqueuosine reductase OS=Cece mbia lonarensis LW9 OX=1225176 GN=queG PE=3 SV=1
MNTEKADKYANIIKTQAKSLGFDFCGIAKADFLEEEAPKLEAWLNQNYHGKMGYLANHFDKRLDPRLLVDGAKTVVSLIYNHFPVKEIPSGPEDLKLAKYAYGEDYHFVIKDKLKTFLQHLREEIGEIDGRAFVDSAPVMERQWAQKAGLGWQGKNSLLLNRTMGSFFFLAELIIDLEVSPDPPMVKDYCGTCTRCIDACPTDAIVQAGVVDGSKCISYFTIELKEEIPQEVKGKFENWVFGCDICQDVCPWNRFSKPHQEQRFLPHPDLAAFTRKDWEEITLETFQKVFKNSPLKRAKFDGLKRNIDFLVKK

SEQ ID NO: 75589 - protein, 311 aa, Cecembia rubra
  misc_feature (1)..(311): tr|A0A2P8E4C7|A0A2P8E4C7_9BACT Epoxyqueuosine reductase OS=Cecembia rubra OX=1485585 GN=queG PE=3 SV=1
MNNKADQFAQIIKTQAKSLGFDFCGIAKAEFLEEEAPKLEAWLNKNYQGKMSYMANHFDKRLDPTKLVDGAKTVISLIYNYFPEKRLPEDSDDFKIAKYAYGQDYHYVIKEKLKILLENLKSEIGDFGGRAFVDSAPVMERQWAQRSGLGWLGKNSLLLNRQMGSFFFLAELIIDLEVTSDPPMVKDYCGTCTRCLDACPTDAIVQPGLVDGSRCISYFTIELKEEIPQEVKGKFENWVFGCDICQDVCPWNRFSQAHKEPKFDPHPELRDFNQKDWNEITEETFNKVFSKSAIKRTKFGGLLRNLRFIQQ

SEQ ID NO: 75590 - protein, 379 aa, Cedecea davisae
  misc_feature (1)..(379): tr|S3K624|S3K624_9ENTR Epoxyqueuosine reductase OS=Cede cea davisae DSM 4568 OX=566551 GN=queG PE=3 SV=1
MSQPLDYNQLAQNIKLWGEELGFQQVGITDTDLSASEPELQAWLDKQYHGEMDWMARHGMMRARPHELVPGTLRVISVRMNYLPANAAFASTLKNPQLGYVSRYALGRDYHKVLRNRLKKLGEMIQTHCSTLNFRPFVDSAPLLERPLAEKAGLGWTGKHSLILNREAGSFFFLGELLVDIPLPIDKPVEEACGRCVACMTICPTGAIVEPYTVDARRCISYLTIELEGAIPEEFRSLIGNRIYGCDDCQLICPWNRYSQLSDEDDFSPRRALHAPQLTELFAWSEQHFLRVTEGSAIRRIGHLRWSRNIAVALGNAPWDEANLAALEQRKGEHPLLDEHIEWAIAQQIARRSEQAVEVQLPKKQRLVRVIEKGLVRDA

SEQ ID NO: 75591 - protein, 379 aa, Cedecea lapagei
  misc_feature (1)..(379): tr|A0A2N0CNJ9|A0A2N0CNJ9_9ENTR Epoxyqueuosine reductase OS=Cedecea lapagei OX=158823 GN=queG PE=3 SV=1
MSQPLDLNQLAQNIKQWGAELGFQKVGITDTDLSASEPKLQAWLDKQYHGEMEWMARHGMMRARPHELLPGTLRVISVRMNYLPANAAFARTLKDPSLGYVSRYALGRDYHKLLRNRLKKLGETIQQHCGSLNFRPFVDSAPILERPIAEKAGLGWTGKHSLILSRDAGSFFFLGELLIDLPLPVDSPVEEGCGRCVACMTICPTGAIVEPYTVDARRCISYLTIELEGAIPEEFRPLIGNRIYGCDDCQLICPWNRYSQLTDEDDFSPRKALHAPKLTELFAWDESYFLRITEGSAIRRIGHLRWLRNIAVALGNAPWDEANIQALEKRRGEHPLLDEHIEWAIAQQIEKRNACVVEVQLPQKKRLVRVIEKGLVRDA

SEQ ID NO: 75592 - protein, 379 aa, Cedecea lapagei
  misc_feature (1)..(379): tr|A0A3S4IGV7|A0A3S4IGV7_9ENTR Epoxyqueuosine reductase OS=Cedecea lapagei OX=158823 GN=queG PE=3 SV=1
MSQPLDYNQLAQNIKQWGKDLGFQQVGITDTDLTASEPKLQEWLDKQYHGEMDWMARHGMMRARPHELQPGTLRVISVRMNYLPANAAFASTLKNPQLGYVSRYALGRDYHKVLRNRLKKLGEMIQSHCSTLNFRPFVDSAPLLERPLAEKAGLGWTGKHSLILNREAGSFFFLGELLVDIPLPIDSPVEEGCGRCVACMTICPTQAIVEPYTVDARRCISYLTIELEGAIPEAFRPLIGNRIYGCDDCQLICPWNRYSQLSEEDDFSPRKALHSPPLTDLFAWSEQHFLRVTEGSAIRRIGHLRWLRNIAVALGNAPWDEANLAALEMRKGEHPLLDEHIEWAIAQQLARRSEQAVEVQLPQKQRLVRVIEKGLPRDA

SEQ ID NO: 75593 - protein, 320 aa, Cedecea neteri
  misc_feature (1)..(320): tr|A0A2X2T0H9|A0A2X2T0H9_9ENTR Epoxyqueuosine reductase OS=Cedecea neteri OX=158822 GN=queG PE=4 SV=1
MMRARPHELVPGTLRVISVRMNYLPTNAAFASTLKNPQLGYVSRYALGRDYHKVLRNRLKKLGEMIQAHCSTLNFRPFVDSAPLLERPLAEKAGLGWTGKHSLILNREAGSFFFLGELLVDIPLPIDSPVEEGCGRCVACMTICPTNAIVEPYTVDARRCISYLTIELEGAIPEEFRPLIGNRIYGCDDCQLICPWNRYSQLSEEDDFSPRKALHSPPLTELFAWSEQYFLRVTEGSAIRRIGHLRWLRNIAVALGNAPWDEANLTVLEQRKGEHPLLDEHIEWAIAQQLARRSEQAVEVQLPKKQRLVRVIEKGLPRDA

SEQ ID NO: 75594 - protein, 379 aa, Cedecea neteri
  misc_feature (1)..(379): tr|A0A089Q3D1|A0A089Q3D1_9ENTR Epoxyqueuosine reductase OS=Cedecea neteri OX=158822 GN=queG PE=3 SV=1
MSQPLDYNQLAQNIKQWGKDLGFQQVGITDTDLTASEPQLQDWLDKQYHGEMDWMARHGMMRARPHELMPGTLRVISVRMNYLPTNAAFASTLKNPQLGYVSRYALGRDYHKVLRNRLKKLGEMIQSHCSTLNFRPFVDSAPLLERPLAEKAGLGWTGKHSLILNREAGSFFFLGELLVDIPLPIDAPVEEGCGRCVACMTICPTNAIVEPYTVDARRCISYLTIELEGAIPEEFRPLIGNRIYGCDDCQLICPWNRYSQLSEEDDFSPRKALHSPPLTELFAWTEQHFLRVTEGSAIRRIGHLRWLRNIAVALGNAPWNEANLTALEQRKGEHPLLDEHIEWAIAQQLARRSEQAVEVQLPKKQRLVRVIEKGLPRDA

SEQ ID NO: 75595 - protein, 379 aa, Cedecea sp.
  misc_feature (1)..(379): tr|A0A1X7L9T1|A0A1X7L9T1_9ENTR Epoxyqueuosine reductase OS=Cedecea sp. NFIX57 OX=1566286 GN=queG PE=3 SV=1
MSQPLDYNQLAQNIKQWGKDLGFQQVGITDTDLTASEPQLQEWLDKQYHGEMDWMARHGMMRARPHELVPGTLRVISVRMNYLPTNAAFASTLKNPQLGYVSRYALGRDYHKVLRNRLKKLGEMIQSHCSTLNFRPFVDSAPLLERPLAEKAGLGWTGKHSLILNREAGSFFFLGELLVDIPLPIDSPVEEGCGRCVACMTICPTNAIVEPYTVDARRCISYLTIELEGAIPEEFRPLIGNRIYGCDDCQLICPWNRYSQLSEEDDFSPRKALHSPPLTELFAWSEQHFLRVTEGSAIRRIGHLRWLRNIAVALGNAPWNEANLAALEQRQGEHPLLDEHIEWAIAQQLARRSEQAVEVQLPKKQRLVRVIEKGLPRDA

SEQ ID NO: 75596 - protein, 346 aa, Celeribacter baekdonensis
  misc_feature (1)..(346): tr|A0A1G7L4P3|A0A1G7L4P3_9RHOB Epoxyqueuosine reductase OS=Celeribacter baekdonensis OX=875171 GN=queG PE=3 SV =1
MAGLDKETVRARALEEGFSKVGFARPDLPDAMDRLKAFVDAGHHGQMGWMEERMAWRGDPTALWPEAKSVIMLAEVYTPDDDPMEAVKRPESGAISVYARNRDYHDMVKKRLKRLGRWLIEQAGEGTEIKVFVDTAPVMEKPLAAKAGLGWQGKHTNLLARDLGSWFFLGAIFTTHDFDPDPAEKDHCGSCRACLDACPTQAFPAPFQLDARRCISYLTIEHHGPVDLELREKMGNRIYGCDDCLAACPWNKFAATAKELRYAARDDLIAPPLRDLALLDDAAFRAKFSGSPIKRIGRDRFVRNVLYAIGNSGAADLEPIARALCEDADATVRDAAQWAVARLGSA

SEQ ID NO: 75597 - protein, 346 aa, Celeribacter baekdonensis
  misc_feature (1)..(346): tr|K2JH10|K2JH10_9RHOB Epoxyqueuosine reductase OS=Cele ribacter baekdonensis B30 OX=1208323 GN=queG PE=3 SV=1
MAGLDKETVRARALDEGFSKVGFARPDLPDAMDRLKAFVDAGHHGQMGWMEERMAWRGDPTALWPEAKSVIMLAEVYTPDDDPMVAINRPESGAISVYARNRDYHDMVKKRLKRLGRWLIEQAGEGTEIKVFVDTAPVMEKPLAAKAGLGWQGKHTNLLARDLGSWFFLGAIFTTHNFDPDPAEKDHCGSCRACLDACPTQAFPAPFQLDARRCISYLTIEHHGPVDLELREKMGNRIYGCDDCLAACPWNKFAATAKELRYAARDDLIAPPLRDLALLDDATFRAKFSGSPIKRIGRDRFVRNVLYAIGNSGAADLEPIARLLCEDADATVRDAAQWAVARLGCA

SEQ ID NO: 75598 - protein, 346 aa, Celeribacter ethanolicus
  misc_feature (1)..(346): tr|A0A291GDP6|A0A291GDP6_9RHOB Epoxyqueuosine reductase OS=Celeribacter ethanolicus OX=1758178 GN=queG PE=3 SV =1
MAGLDKEIVRARALEEGFSKVSFGRPEIPGAMEHLQSFVAEGRHGQMGWMEDRMHWRGDPAALWPDARSVIMLAEAYTPDDDPMEAINRPESGTISVYARNRDYHDIVKKRLKRLGRWLIEQAGEGTEIKVFVDTAPVMEKPLAAQAGLGWQGKHTNLLSRDLGNWFFIGAIFTTHDFDPDPAEKPHCGSCRACLDACPTGAFPAPYQIDARRCISYLTIEHHGPVEEELRARMGNRIYGCDDCLAACPWNKFAVEAKEVRFAARADLISPPLAELALLEDAAFREKFSGSPIKRIGRDRFVRNVLYAIGNSGSPGLRDVAAGLCEDADPTVRDAARWAVARLTEE

SEQ ID NO: 75599 - protein, 346 aa, Celeribacter halophilus
  misc_feature (1)..(346): tr|A0A1I3WMJ8|A0A1I3WMJ8_9RHOB Epoxyqueuosine reductase OS=Celeribacter halophilus OX=576117 GN=queG PE=3 SV=1
MAGLDKETVRARALEEGFSKASFGRPDIPEAMERLKAFVAEGRHGQMGWMAERMHWRGDPSALWPEAKSVIMLAEAYTPEEDPMEAVNRPESGAISVYARNRDYHDIVKKRLKRLGRWLIEQAGTETEIKVFVDTAPVMEKPLAAKAGLGWQGKHTNLLSRDLGNWFFLGAIFTTVDFDPDPPENERCGSCRACLDACPTEAFPAPYQIDARRCVSYLTIEHHGPVDEELRGKLGNRIYGCDDCLAVCPWNKFAVAAKEIRFSARDDLISPPLEALAQLDDAAFRAKFSGSPIKRIGRDRFVRNVLYAIGNSGSPELRAVAEKLCEDADATVRDAAQWAVARLTNS

SEQ ID NO: 75600 - protein, 351 aa, Celeribacter indicus
  misc_feature (1)..(351): tr|A0A0B5DN12|A0A0B5DN12_9RHOB Epoxyqueuosine reductase OS=Celeribacter indicus OX=1208324 GN=queG PE=3 SV=1
MKGAAVTLPDKETVRAKALEEGFSKVGFGRPDLPGAMERLRAFVAEGRHGQMGWMEERMGWRGDPSALWPEARSVIMLAEVYTPEEDPMAALERPESGAISVYARNRDYHDMVKKRLKRVGRWLLEQAGEGEEIKVFVDTAPVMEKPLAARAGLGWQGKHTNLLSRELGSWFFLGAIFTTLDFDPDPAENEHCGSCRACLDACPTAAFPAPFQLDARRCISYLTIEHRGPVDEDLRALMGNRIYGCDDCLAACPWNKFAQVAKETRYAARADLLDPPLAELAGLDDAAFRAKFSGSPIKRIGRDRFVRNVLYAIGNSGSPALAEVARGLCEDADPVVRDAARWAVARLSDS

SEQ ID NO: 75601 - protein, 373 aa, Celeribacter manganoxidans
  misc_feature (1)..(373): tr|A0A291LVG5|A0A291LVG5_9RHOB Epoxyqueuosine reductase OS=Celeribacter manganoxidans OX=1411902 GN=queG PE=3 SV=1
MPRSSRDRPSATSSPTKSPASRRPGTTPISTSDLKDAIAAQAQAEGFSAMGVCRPDALPHLPERLRHFLDEGRHGQMAWMAERSHWRENPAALWPEARSVIMLAESYTPDEDPLAVLDHPDAAAISVYARGKDYHDLVKKRLKRLARWLIAEAGGEVKVFVDTAPVPEKPLAEAAGLGWQGKHTNLVSRDLGNWVFLGAVFTTLELPLDEPGRDSCGSCRRCLDACPTDAFPAPYQLDARRCISYLTIEHKGPVDEALRPALGNRIYGCDDCLAVCPWNKFAVEASDIRYAARAGTIAPPLAELAVLDDAGFRERFSGSPIKRIGRDRFVRNVLYAVGNSGLPQLRPVAQSLTDDPDPAVADAARWAVDRLPG

SEQ ID NO: 75602 - protein, 338 aa, Celeribacter marinus
  misc_feature (1)..(338): tr|A0A0N9ZZJ9|A0A0N9ZZJ9_9RHOB Iron-sulfur cluster-bind ing protein OS=Celeribacter marinus OX=1397108 GN=IMCC1 2053_1845 PE=4 SV=1
MRAKALEEGFSKVGFARPDLPEAMERLRAFIAAGHHGQMGWMEERMAWRGDPTALWPEAKSVIMLAEAYTPDDDPMEAVNRPESGAISVYARNRDYHDIVKKRLKRVGRWLIEQAGEDTEIKVFVDTAPVMEKPLAAKAGLGWQGKHTNLLGRDIGSWFFLGAIFTTVDFDPDPAEIERCGSCRACLDACPTDAFPAPYQLDARRCISYLTIEHHGPVDEELRARMGNRIYGCDDCLAACPWNKFAVDAKELRYAARDDLRAPPLAELVQLDDAAFREKFSGSPIKRVGRDRFVRNVLYAIGNSGDPQFVPHATALTRDPDATVADAARWAVGRLAKT

SEQ ID NO: 75603 - protein, 338 aa, Celeribacter neptunius
  misc_feature (1)..(338): tr|A0A1I3S950|A0A1I3S950_9RHOB Epoxyqueuosine reductase OS=Celeribacter neptunius OX=588602 GN=SAMN04487991_23 82 PE=4 SV=1
MRARALEEGFSKAAFGRPILPGAMARLESFVEMDRHGQMGWMAERMNWRGDPAALWPEAKSVIMLAESYTPDEDPMAVISRPESGAISVYARNRDYHDIVKKRLKRLGRWLIEQAGEGTEIKVFVDTAPVMEKPLAMQAGLGWQGKHTNLLSRDLGSWFFLGAIFTTHEFDPDPAENEHCGSCRACLDACPTDAFPAPFQIDARRCISYLTIEHHGPVEPELRSKLGNRIYGCDDCLAACPWNKFAVAAQELRYAARDDLRDPSLRELAALDDAAFRAKFSGSPIKRIGRDRFVRNVLYAIGNSGSSDLRDVAVSLCEDADAVVRDAAEWAVARLSRE

SEQ ID NO: 75604 - protein, 346 aa, Celeribacter persicus
  misc_feature (1)..(346): tr|A0A2T5HEZ1|A0A2T5HEZ1_9RHOB Epoxyqueuosine reductase OS=Celeribacter persicus OX=1651082 GN=queG PE=3 SV=1
MAGLHKETVRARALEEGFSKASFGRPEIPGAMEHLQNFVAEGRHGQMGWMAERMNWRGDPAALWPEAKSVIMLAEAYTPDDDPMEAINRPESGAISVYARNRDYHDIVKKRLKRLGRWLIEQAGEGTEIKVFVDTAPVMEKPLAAQSGLGWQGKHTNLLSRDLGNWFFLGAIFTTHDFDPDPAEKEHCGSCRACLDACPTDAFPAPFQLDARRCISYLTIEHHGPVDEELRARMGNRIYGCDDCLAACPWNKFAVTAKEMRFAAREDLISPPLDELALLDDAGFREKFSGSPIKRIGRDRFVRNVLYAIGNSGAPALRDVAAALCEDADPVVRDAARWAVARLTGE

SEQ ID NO: 75605 - protein, 377 aa, Celerinatantimonas diazotrophica
  misc_feature (1)..(377): tr|A0A4R1K1S3|A0A4R1K1S3_9GAMM Epoxyqueuosine reductase OS=Celerinatantimonas diazotrophica OX=412034 GN=queG PE=3 SV=1
MAENSKIDFNQLALDIKQWGKQLGFAQVGITDTDVSEHIQSYRDWLSRGYHGQMSFMQRNQQLREDPAQLHPGTLRIISVRMNYLINDAGFASTLKDPNRAYISRYALGRDYHKVLRKRLKKLAEKIKTVCEQLDYRPFVDSAPIMERPIAEKSGLGWTGKHSLLIHPDEGSWFFLGELLINLPLPTDSAIEPQCGSCVACMTLCPTGAITEPYQVDARRCISYLTIENPGPIAEELRPLMGNRIYGCDDCQLVCPYNHESQLGEENDFLPRHELDKTTLLSLFAWDETTFLSKTEGSPIRRIGHERWQRNIAVALGNAPASIAIIQALEDARPQASELVKEHIDWALNQHHKQLSTVTRQTKRLIRIVEKGLTRDA

SEQ ID NO: 75606 - protein, 306 aa, Cellulophaga algicola
  misc_feature (1)..(306): sp|E6X4P3|QUEG_CELAD Epoxyqueuosine reductase OS=Cellul ophaga algicola (strain DSM 14237 / IC166 / ACAM 630) O X=688270 GN=queG PE=3 SV=1
MNTKEKHSDLIKAEAIRLGFLSCGISKANFLEEEAPRLEKWLKNNMNGEMQYMENHFDKRLDPRLLVDDAKSVISLTLNYYPEEQQADGTYKISKYAYGHDYHHVIKGKLKQLQEFISEEIGEVGGRAFVDSAPVLDKAWAAKSGLGWIGKHSNLLTQKTGSFYFIAELIVDLDLTYDHPVTDHCGTCTACIDACPTQAIVQPYVVDGSKCISYFTIELKNEIPQEFQGKFDDWAFGCDVCQDVCPWNRFSKPHSEPLFNPHPDLLSLTKKDWEEITDDVFKKVFQKSAVKRTKYAGLKRNIDFLK

SEQ ID NO: 75607 - protein, 306 aa, Cellulophaga baltica
  misc_feature (1)..(306): tr|A0A1G7CZL6|A0A1G7CZL6_9FLAO Epoxyqueuosine reductase OS=Cellulophaga baltica OX=76594 GN=queG PE=3 SV=1
MSIKEKHSDLIKAEALRLGFLSCGISKADFLAEEAPRLEKWLRNNANGEMQYMENHFDKRLDPRLLVDDAKSVISLTLNYYPEEQQTSDTFKISKYAYGQDYHHVIKGKLKQLQEFISEEIGEVGGRAFVDSAPVLDKAWAAKSGLGWIGKHSNLLTQKTGSFYFIAELIVDLDLTYDHPVTDHCGTCTACIDACPTQAIVQPYVVDGSKCISYFTIELKNEIPQEFQGKFDDWAFGCDVCQDVCPWNRFSKPHQEPLFNPHPDLLSLTKKDWEEITEDVFRKVFQKSAVKRTKFSGLKRNIDFLK

SEQ ID NO: 75608 - protein, 306 aa, Cellulophaga baltica
  misc_feature (1)..(306): tr|A0A0A7K583|A0A0A7K583_9FLAO Epoxyqueuosine reductase OS=Cellulophaga baltica 18 OX=1348584 GN=queG PE=3 SV= 1
MSIKEKHSDLIKAEALRLGFLSCGISKADFLAEEAPRLEKWLKNNGNGEMQYMENHFDKRLDPRLLVDDAKSVISLTLNYYPEEQQTSDTFKISKYAYGQDYHHVIKGKLKQLQEFISEEIGEVGGRAFVDSAPVLDKAWAAKSGLGWIGKHSNLLTQKTGSFYFIAELIVDLDLTYDHPVTDHCGTCTACIDACPTQAIVQPYVVDGSKCISYFTIELKNEIPQEFQGKFDDWAFGCDVCQDVCPWNRFSKPHQEPLFNPHPDLLSLTKKDWEEITEDVFRKVFQKSAVKRTKFSGLKRNIDFLK

SEQ ID NO: 75609 - protein, 309 aa, Cellulophaga fucicola
  misc_feature (1)..(309): tr|A0A1K1PDW4|A0A1K1PDW4_9FLAO Epoxyqueuosine reductase OS=Cellulophaga fucicola OX=76595 GN=queG PE=3 SV=1
MLPIVNKEKVTALIKEEAKRLGFISCGVSKAEFLEEEAPRLENWLNKNMNGEMSYMENHFDKRLDPTKLVEGSKSVISLLLNYYPEETQGDDVLKISKYAYGQDYHHIIKSKLRELQEFMTDTIGEVGGRAFVDSAPVLDKAWAAKSGLGWIGKNSNLITQRVGSFYFIAELIVDIDLVYDTAVTDHCGTCTACIDACPTQAIVDPYVVDGSKCISYFTIELKNEIPVEVKDKFDDWVFGCDVCQDVCPWNKFSKPHQEPLFNPHPDLLSMTKKDWEEITEDVFRKVFQKSAVKRTKFSGLQRNIEFLK

SEQ ID NO: 75610 - protein, 310 aa, Cellulophaga lytica
  misc_feature (1)..(310): tr|F0RCK0|F0RCK0_CELLC Epoxyqueuosine reductase OS=Cell ulophaga lytica (strain ATCC 23178 / DSM 7489 / JCM 851 6 / NBRC 14961 / NCIMB 1423 / VKM B-1433 / Cy l20) OX=8 67900 GN=queG PE=3 SV=1
MKLPLVNKEKTTALIKDEAKRLGFISCGVSKAEFLEEEAPRLEKWLTKNMNGQMAYMENHFDKRLDPTKLVEGSKSVISLLLNYYPEDTQNNDALKISKYAYGQDYHHVIKSKLRELQEFITNNIGEVEGRAFVDSAPVLDKAWAAKSGLGWIGKNSNLITQKVGSFYFIAELIVDIELAYDSAVTDHCGTCTACIDACPTQAIVDPYVVDGSKCISYFTIELKNEIPAEVRGKFDDWIFGCDVCQDVCPWNRFSKPHNEPLFNPHPDLLSMTKKDWQEITEDVFRKVFKKSAVKRTKFSGLQRNIDFLD

SEQ ID NO: 75611 - protein, 310 aa, Cellulophaga sp.
  misc_feature (1)..(310): tr|A0A559N333|A0A559N333_9FLAO Epoxyqueuosine reductase OS=Cellulophaga sp. RHA_52 OX=1250036 GN=queG PE=3 SV= 1
MKLPLVNKEKTTALIKDEAKRLGFMSCGVSKAEFLKEEAPRLEKWLTKNMNGQMAYMENHFDKRLDPTKLVEGSKSVISLLLNYYPEDTQNNDALKISKYAYGQDYHHVIKSKLRELQEFITNNIGEVEGRAFVDSAPVLDKAWAAKSGLGWIGKNSNLITQKVGSFYFIAELIVDIELAYDSAVTDHCGTCTACIDACPTQAIVDPYVVDGSKCISYFTIELKNEIPAEVRGKFDDWIFGCDVCQDVCPWNRFSKPHNEPLFNPHPDLLSMTKKDWQEITEDVFRKVFKKSAVKRTKFSGLQRNIDFLD

SEQ ID NO: 75612 - protein, 306 aa, Cellulophaga tyrosinoxydans
  misc_feature (1)..(306): tr|A0A1W1YED1|A0A1W1YED1_9FLAO Epoxyqueuosine reductase OS=Cellulophaga tyrosinoxydans OX=504486 GN=queG PE=3 SV=1
MTLKEKNTFLIKNEAKRLGFMSCGISKADFLEKEAPRLERWLNNNMNGEMHYMENHFDKRLDPRLLVPGAKSVISLLLNYYPEEKQIDTTYKISKYAYGQDYHHVIKGKLKMLQEFISQEIGEVDGRAFVDSAPVLDKAWAAKSGLGWIGKHSNLLTQQAGSFYFIAELIVDLDLEYDNPVTDHCGTCTACIDSCPTQAITEPYVVDGSKCISYFTIELKKEIPTEFQGKFDDWAFGCDVCQDVCPWNRFSKSHNEPLFNPHPELLSMTKKDWEEITDEVFKKVFQKSAVKRTKFEGLKRNINFLK

SEQ ID NO: 75613 - protein, 329 aa, Cellulosilyticum lentocellum
  misc_feature (1)..(329): tr|F2JJA1|F2JJA1_CELLD 4Fe-4S ferredoxin-type domain-co ntaining protein OS=Cellulosilyticum lentocellum (strai n ATCC 49066 / DSM 5427 / NCIMB 11756 / RHM5) OX=642492 GN=Clole_2693 PE=4 SV=1
MMLKKRIEDFCKSIGLDTIGFIPCRRFDELEVFYRERQKLGLQNEFEEQNIEKRLNPNLYMKEGKTIISIAFPYYHREIKDEVANGFSIYTKRLDYHRVVKKYLNEISEYIETLGGKALGFVDSNALPERYIAYLAGLGFIGRNNMLITKKYGSYVFLGELMTDLKIECEDQRSQDELIKYAECGACKACLKECPTKSINMSRSNPNICLSYITQKKELSDQEIKLLKGNIFGCDFCQLKCPYNEEVATNVLEEFQTLVHMNEPANVYAGMDNSYFKEKMSPTSCGWRGKNVIRRNAIIHMDHAGLPIEQYKGDSPYINNYIERLTQNK

SEQ ID NO: 75614 - protein, 328 aa, Cellulosilyticum sp.
  misc_feature (1)..(328): tr|A0A5B9YHZ7|A0A5B9YHZ7_9FIRM tRNA epoxyqueuosine(34) reductase QueG OS=Cellulosilyticum sp. WCF-2 OX=2497860 GN=queG PE=4 SV=1
MLKKKIEDFCKSIGLDTIGFIPCRRFDELEVFYRERQKLGLQNEFEEQNIEKRLNPNLYMEEGKTIISIAFPYYHREIKDEVANGFSIYTKRLDYHRVVKKYLNEISEYIETLGGKALGFVDSNALPERYIAYLAGLGFIGRNNMLITKKYGSYVFLGELMTDLKIECEDQRSQDELIKYAECGACKACLKECPTKSINMSRSNPNICLSYITQKKELSDQEIKLLKGNIFGCDFCQLKCPYNEEVATNVLEEFQTLVHMNEPANVYAGMDNSYFKEKMSPTSCGWRGKNVIRRNAIIHMDHAGLSIEQYKGDSPYINSYIERLTQNK

SEQ ID NO: 75615 - protein, 395 aa, Cellvibrio japonicus
  misc_feature (1)..(395): tr|B3PDD5|B3PDD5_CELJU Epoxyqueuosine reductase OS=Cell vibrio japonicus (strain Ueda107) OX=498211 GN=queG PE= 3 SV=1
MFFNHFYPCGGSLAQYPSDFTIPIHSMSDLDLHQLAADIKHWGRELGFQQLGITDIDLGEAEVRLKEWLAKGYHGSMEWLAAHGNKRSRPAELLPGTLRVISVRMDYLPGDTRQIQILKDPTKAYISRYTLGRDYHKLIRKRLGQLAERIERALPDDYPLKGQNRAFVDSAPVMERPLAEKAGLGWTGKHTLIINSSAGSWFFLGEIFTFLPLPIDKPEQHNQCGDCTACLKVCPTDAFPRPYELDARRCISYLTIENTGVIPEEFREPIGNRIFGCDDCQAICPWNKYAHFTGETDFLPRHGLADSDLVDLFLWSEEEFLTRTEGSAIRRVGYEGWLRNIAVGLGNAPSDLRIIEALTHKRETASSLVREHIDWALAQQAQPQRRRKRKIQRDN

SEQ ID NO: 75616 - protein, 369 aa, Cellvibrio mixtus
  misc_feature (1)..(369): tr|A0A266QAV4|A0A266QAV4_9GAMM Epoxyqueuosine reductase OS=Cellvibrio mixtus OX=39650 GN=queG PE=3 SV=1
MPSSPDLNQLADDIKRWGRELGFQQVGITDIDLQQAEVKLQEWLAKGYHGSMEWLAAHGNKRSRPAELLPGTVRVISVRMDYLPGDTQQIKILKDPTKAYISRYTLGRDYHKLIRKRLSILAQQIDDALPADYEFKGQNRAFVDSAPVMERPLAEKAGLGWTGKHTLIINSGAGSWFFLGEIFTFVPLPVDTPAQPNQCGECTACLKVCPTDAFPRPYELDARRCISYLTIENKGAIPEEFREPIGNRIFGCDDCQAICPWNKYAHFTHETDFLPRHGLADSDLVDLFNWTEEEFLARTEGSAIRRVGYDGWLRNIAVGLGNAPSDERIVAALTAKKESCSELVQEHITWALAQQANPQRRRTRKIKRS

SEQ ID NO: 75617 - protein, 128 aa, Cellvibrio sp.
  misc_feature (1)..(128): tr|A0A3D4PXQ6|A0A3D4PXQ6_9GAMM tRNA epoxyqueuosine(34) reductase QueG (Fragment) OS=Cellvibrio sp. OX=1965322 GN=DIW64_03570 PE=4 SV=1
GNRIFGCDDCQAICPWNKYAQFTGETDFLPRHGLADSDLVDLFNWTEEEFLARTEGSAIRRVGYEGWLRNLAVGLGNAPSDERIIQALSDKKNQASPLVNEHIDWALTQQTKPNRRRKRKIQRAPVIE

SEQ ID NO: 75618 - protein, 372 aa, Cellvibrio sp.
  misc_feature (1)..(372): tr|A0A4R7BKF0|A0A4R7BKF0_9GAMM Epoxyqueuosine reductase OS=Cellvibrio sp. YR554 OX=2135765 GN=queG PE=3 SV=1
MPNLDLHQLAADIKLWGRELGFQQVGITDIDLGDAEVRLQEWLAKGYHGSMKWLTAHGNKRSRPAELLPGTVRVISVRMDYLPGDTAQIKILKDPTKAYISRYTLGRDYHKLIRKRLSVLAQQIDDALPADYEFKGQNRAFVDSAPVMERPLAEKAGLGWTGKHTLIINSGAGSWFFLGEIFTFVPLPVDEPQQPNQCGECTACLKVCPTDAFPRPYELDARRCISYLTIENEGAIPEEFREPIGNRIFGCDDCQAICPWNKYAQFTNETDFLPRHGLADSDLVDLFNWTEDEFLTRTEGSAIRRVGYEGWLRNIAVGLGNAPSDERIIQALNARKTRASPMVAEHIDWALIQQANPNRRRKRKIQQIRPSN

SEQ ID NO: 75619 - protein, 400 aa, Cellvibrionaceae bacterium
  misc_feature (1)..(400): tr|A0A2E2XHA4|A0A2E2XHA4_9GAMM Epoxyqueuosine reductase OS=Cellvibrionaceae bacterium OX=2026723 GN=queG PE=3 SV=1
  misc_feature (62)..(64): Xaa can be any naturally occurring amino acid
  misc_feature (66)..(66): Xaa can be any naturally occurring amino acid
  misc_feature (86)..(86): Xaa can be any naturally occurring amino acid
  misc_feature (215)..(215): Xaa can be any naturally occurring amino acid
  misc_feature (261)..(261): Xaa can be any naturally occurring amino acid
  misc_feature (263)..(263): Xaa can be any naturally occurring amino acid
  misc_feature (296)..(296): Xaa can be any naturally occurring amino acid
  misc_feature (300)..(302): Xaa can be any naturally occurring amino acid
  misc_feature (306)..(306): Xaa can be any naturally occurring amino acid
MPTLSSPYSDAFLQQLALDIKQWGRELGFQQVGITDTDLQREEERLKVWLDKGYQGEMAWLXXXGXKRSRPDELLEGTQRVICARXDYLPADTDPIRILKQEDKAYVSRYALGRDYHKLIRKRLSTLAKRIEQTLIDQYPEQAEAIQQRAFVDSAPVMERPLAAKAGLGWVGKHTLIIHPEAGSWFFLGEVYTSVPLPVDNQPQTDRCGDCEACXKVCPTDAFTRAYELDARRCISYLTIENKGSIPEEFRQPMGNRVFGXDXCQSICPWNKYASHSDIDDFSPRHALDQSKLADXFLWXXXTFLXNTEGSAIRRIGHERWLRNLAVGLGNAPYSDDVIHSLKCRLDHPSALVQEHVQWALEQQTQRQHNPKQRRRRKIKGPRSLGLDSRSRPDSANQTK

SEQ ID NO: 75620 - protein, 374 aa, Cellvibrionaceae bacterium
  misc_feature (1)..(374): tr|A0A545T5X9|A0A545T5X9_9GAMM Epoxyqueuosine reductase OS=Cellvibrionaceae bacterium R142 OX=2591008 GN=queG PE=3 SV=1
MSKHRDDDLTELASNIKIWARELGFQQVGICDTDLSREKPRLAEWLRRGYHGTMEWLENRADMRTDPGRLHPGTLRVISARMDYLPGDTRQIEILKSPAKAYLSRYALGRDYHKLIRKRLRLLAVRIEQAAGRTLHQRPFVDSAPVLERPLAAKAGLGWVGKHTLVINRQAGSWFFLGEILTDLPLPVDDDPQENLCGDCNACLKVCPTDAFPEPYVLDARRCISYLTIENQGAIPEAFREPMGNRVFGCDDCQAICPWNKFARPTAEPDFQPRHQLDNRDLLELFNWSEATFLQRTAGSAIRRTGYAGWLRNLAVGLGNAPSDSAIIAALERRRDEVSPMVREHIDWALAQQRNPGRRRRRKVKNNDKTASRP

SEQ ID NO: 75621 - protein, 348 aa, Cellvibrionales bacterium
  misc_feature (1)..(348): tr|A0A5C7PUI2|A0A5C7PUI2_9GAMM Epoxyqueuosine reductase OS=Cellvibrionales bacterium OX=2026722 GN=queG PE=3 S V=1
MDDENLLTQLQHWARELDFQQIGVSDIDVGQHAQYLQRWLQNGYHADMHWMQQHAALREHPEQLHTGALRVISVRMDYLSDQDSNLIAKVNADGGAYIARYALGRDYHKWMRKRLALLAQKIETQFPHKHRAVVDSAPVLERAFAQKSGLGWIGKNTMLINSQAGSYFFLGEILTDLPLPLTAPQETTHCGTCTACLDLCPTQAFVAPQQLNASRCISYLTIELRGSIPLELRKKIGNRIFGCDDCQAVCPWNKFAQRTEQEVFQPKHNLDDAQLTALFAWSEEEYLEKTAGSALRRIGYEGWLRNSAVALGNARTTSEIIFALNSRREHESVLVREHVAWALEQHAH

SEQ ID NO: 75622 - protein, 387 aa, Cellvibrionales bacterium
  misc_feature (1)..(387): tr|A0A1Z8Z9X6|A0A1Z8Z9X6_9GAMM Epoxyqueuosine reductase OS=Cellvibrionales bacterium TMED79 OX=1986768 GN=queG PE=3 SV=1
  misc_feature (22)..(22): Xaa can be any naturally occurring amino acid
  misc_feature (30)..(30): Xaa can be any naturally occurring amino acid
  misc_feature (54)..(54): Xaa can be any naturally occurring amino acid
  misc_feature (84)..(84): Xaa can be any naturally occurring amino acid
  misc_feature (116)..(116): Xaa can be any naturally occurring amino acid
  misc_feature (121)..(121): Xaa can be any naturally occurring amino acid
  misc_feature (135)..(135): Xaa can be any naturally occurring amino acid
  misc_feature (199)..(199): Xaa can be any naturally occurring amino acid
  misc_feature (212)..(212): Xaa can be any naturally occurring amino acid
  misc_feature (216)..(216): Xaa can be any naturally occurring amino acid
  misc_feature (228)..(228): Xaa can be any naturally occurring amino acid
  misc_feature (244)..(244): Xaa can be any naturally occurring amino acid
  misc_feature (246)..(246): Xaa can be any naturally occurring amino acid
  misc_feature (250)..(250): Xaa can be any naturally occurring amino acid
  misc_feature (278)..(278): Xaa can be any naturally occurring amino acid
  misc_feature (308)..(308): Xaa can be any naturally occurring amino acid
  misc_feature (348)..(348): Xaa can be any naturally occurring amino acid
  misc_feature (356)..(357): Xaa can be any naturally occurring amino acid
  misc_feature (367)..(368): Xaa can be any naturally occurring amino acid
  misc_feature (372)..(372): Xaa can be any naturally occurring amino acid
  misc_feature (374)..(374): Xaa can be any naturally occurring amino acid
  misc_feature (387)..(387): Xaa can be any naturally occurring amino acid
MREVYLAAPLICHNVSVNTANXKEIIATIXGWASELGFQDIGFTGVDLGEHEGXLQKWLDAGYEGTMSWMARHGTKRSRPNELXPGTCTVISCRMDYLPEAADSWQVIASSERGFXSRYAXGRDYHKLIRSRLAXLAERIRTELASGEFRAFVDSAPVLERAIAEQAGMGWIAKNTMLINESAGSWFFLGEIYTDIALXHSEPKREKHCGTXTACXDTCPTGAFVAPXVLDARRCISYLTIEHXGXIDPXLRAKMGNRIYGCDDCQLVCPWNKFASLXKESDFEPRGDLANPDLASLFMWTEEEFEQXLQGSPIRRIGHERWLRNIAIALGNADSTSSVIGALKSREXDPSELVRXXVAWALTQHAXXDDSXQXMAVQFDPASDQSX

SEQ ID NO: 75623 - protein, 408 aa, Cephaloticoccus capnophilus
  misc_feature (1)..(408): tr|A0A139SP27|A0A139SP27_9BACT Epoxyqueuosine reductase OS=Cephaloticoccus capnophilus OX=1548208 GN=AXK12_034 30 PE=4 SV=1
MTELAAAPIATVEQQERLRARLGELGFDDVRFAALHKLHGKPLREWLEAGMHGEMAWMERSVDKRLDPSQVLSGARSIIMLGVNYWPGRELRQPGPQWARYALWEDYHDTIKAALVEAGRAIEEVFGVGGGDYRYYVDTGPVIERGWAAKAGLGFVGKNAMLISRTHGNWLFLASVLTRVALRPDPPVRKQASNFADVGLLCGKCTRCLDACPTAAFAAPGVVDARRCISYQTIENKGIIPRELRAGIGSRVYGCDTCLEVCPWNRFAERGRQLLLAARHDLPELGLGELLAMTPERFSQVFRRTPIKRLKLRGLLRNACVVAGNQSQAGLSGERLLVARQENERVVAHLLRLAQHELAMIRVHAVWALYRLLGVEAASAALAEIRSAETDAAVLEEYAWWAAASAAG

SEQ ID NO: 75624 - protein, 406 aa, Cephaloticoccus primus
  misc_feature (1)..(406): tr|A0A139STD5|A0A139STD5_9BACT Epoxyqueuosine reductase OS=Cephaloticoccus primus OX=1548207 GN=AXK11_00510 PE =4 SV=1
MSAARAAVSTSPAVEPQEQLRARLRELGFDEVRFAALHKLDGRPLREWLAAGMHGDMAWMERSVDKRLDPTQVLAGARSIIMLGVNYWPGGELRQRGPQWARYALWEDYHDTIKVALAEAGRAVEATFGVGSGDYRYYVDTGPVIERGWAAKAGLGFVGKNAMLISRTHGNWLFLASILTTVALRPDPPVRQQASDFADVGLLCGKCTRCLDACPTAAFAAPGVVDARRCVSYQTIENKGIIPRELRAGIGRRIYGCDTCLKVCPWNRFAQAGRALLLAARHDLPEISLEELLALTPERFAEVFRRTPIKRLKLRGLLRNACVVAGNLAAELPEAERRALIPPLLALAQHELPLLRVHAVWALHRLLGVNAAAALLAPARTAETDADVLEEYTWWATAPQGVSLVD

SEQ ID NO: 75625 - protein, 378 aa, Cerasibacillus quisquiliarum
  misc_feature (1)..(378): tr|A0A511UVV1|A0A511UVV1_9BACI Epoxyqueuosine reductase OS=Cerasibacillus quisquiliarum OX=227865 GN=queG PE=3 SV=1
MDISILKKEVIQYSKQIGIDKIGFTTADVFTELKERLRRQQELGYQSGFEKGTIEERTEPRRLVPEAQSIIAIAVAYPSRMKNAPRGTKENRRGIFCRASWGVDYHVVLRERLEKLANYIKEKVPDAVTKSMVDTGELSDRAVAERAGIGFSGKNCSIITPEFGSYVYLGELITNIPFTPDKPIEDSCGDCRKCLDACPTGALVQGGQLNAQRCIAFLTQTKTFLPDEFRDKIGNRLYGCDTCQQVCPRNRHVDFHHQTEFEPDPEVAKPLLKPLLKISNRTFREKFGSMSGSWRGKKPIQRNAILALAHFKDKTAVKDLIEVMREDVRPEIRGTAAWTLGKIGTEEAFAAIEEAIAYETDERVIYEMEKGLQFRRND

SEQ ID NO: 75626 - protein, 342 aa, Cereibacter changlensis
  misc_feature (1)..(342): tr|A0A2W7RF70|A0A2W7RF70_9RHOB Epoxyqueuosine reductase OS=Cereibacter changlensis OX=402884 GN=LX76_00590 PE= 4 SV=1
MKGLPVKERLIARALEEGFSKVGICAPDAAPETAGRLRAFLEAGRHGQMGWMAEREHWRGDAAALWPEARSVIMLAEVYTPEADPRAVLAERDRAAVSVYAQGKDYHDLVKKRLKRLGRWLVAETGAEIKVFVDTAPVMEKPLAQAAGLGWQGKHTNLLSRDLGNWFFLGAIFTTLDLPKDAAEPEHCGSCTACLEACPTRAFPAPFQLDARRCISYLTIEHHGPVEPELRALMGNRIYGCDDCLAACPWNKFAVAAREIGYAARVGAPPLAELAELDDAGFRARFAGSPIKRIGRDRFLRNVLYAIGNSGDPALLPAARARLGDADPVVAEAAEWAVARLS

SEQ ID NO: 75627 - protein, 342 aa, Cereibacter changlensis; identical to SEQ ID NO: 75626
  misc_feature (1)..(342): tr|A0A2T4K0L8|A0A2T4K0L8_9RHOB tRNA epoxyqueuosine(34) reductase QueG OS=Cereibacter changlensis JA139 OX=1188 249 GN=queG PE=4 SV=1

SEQ ID NO: 75628 - protein, 313 aa, Cesiribacter andamanensis
  misc_feature (1)..(313): tr|M7N5U5|M7N5U5_9BACT Epoxyqueuosine reductase OS=Cesi ribacter andamanensis AMV16 OX=1279009 GN=queG PE=3 SV= 1
MAMTPTQVRTHTQLLKQKALELGFSFCGVAKAAYLEAEAPRLEAWLKANMHGQMGYMANHFDLRLDPRKLVPGAKSVVVLGYSYFPKEDLTERTGYKIAKYAYGQDYHHVIKARLRELMDWLQQEVGAVEGRAFVDSAPLLERQWAQRAGLGWLGKNSLLLTKQMGSFFFLSELVLDLALEPDVPLAKDFCGSCTRCLDACPTDAIVQPGVVDGSRCISYFTIELKEEIPQEVAGKFEDWIFGCDICQDVCPWNRFSRPHQEPLFDPHPDLQHMQKKEWEEISEEVFSKLFRKSAVKRTKLEGLRRNISFVKK

SEQ ID NO: 75629 - protein, 317 aa, Chamaesiphon minutus
  misc_feature (1)..(317): tr|K9UH96|K9UH96_CHAP6 Epoxyqueuosine reductase OS=Cham aesiphon minutus (strain ATCC 27169 / PCC 6605) OX=1173 020 GN=queG PE=3 SV=1
MNDLTQQVEDRAREIGFHAVGIAAIDPNTTQAAATHLQEWLSLGYQADMAWMSDPRRQDIYRLMPSAQTVIALALNYYTPHQRPDGPTYAKIARYAWGRDYHKVLEKKLKQLTNWLIDSIDNVEARYYVDTGPIQDKFWAQAAGIGWIGKNGNVINRQHGSWIFLGEIVTNIPLIPSDPHTQHCGTCTRCISACPTGAITQPFVVDANRCIAYHTIENRAETLPPEIANNLQGWVAGCDICQDVCPWNQKFAQPTDVADFQPYPRNLDRTLTELGSLTDESWDRSFRASALRRIKPAMWRRNAIANLHNWGSQSNVN

SEQ ID NO: 75630 - protein, 317 aa, Chamaesiphon polymorphus
  misc_feature (1)..(317): tr|A0A2T1GGR5|A0A2T1GGR5_9CYAN Epoxyqueuosine reductase OS=Chamaesiphon polymorphus CCALA 037 OX=2107692 GN=qu eG PE=3 SV=1
MNDLTRQVEDRAREIGFHAVGIAAIDPNTTQAAATHLQEWLSLGYQADMAWMSDPRRQDIYRLMPSATTVIALALNYYTPHQRPNSPTHAKIARYAWGRDYHKVLEKKLKQLTNWLLESFDNVEARYYVDTGPIQDKFWAQAAGIGWIGKNGNVINRKYGSWIFLGEIVTNIPLIPSDPHSQHCGTCTRCISACPTGAITQPFVVDANRCIAYHTIENRAETLPPEIANNLQGWVAGCDICQDVCPWNQKFARPTDVADFQPYPRNLAHTLTELGSLTDESWDRSFRASALRRIKPAMWRRNAIANLHNWGSQSNVN

SEQ ID NO: 75631 - protein, 379 aa, Chania multitudinisentens
  misc_feature (1)..(379): tr|W0LAI7|W0LAI7_9GAMM Epoxyqueuosine reductase OS=Chan ia multitudinisentens RB-25 OX=1441930 GN=queG PE=3 SV= 1
MTHPLDLNQLAQHIKQWGQSLGFQQVGICDTDLSAEEPKLQAWLDKQYHGEMAWMARHGMLRARPHELLPGTLRVISVRMNYLPAKAAFASTLQNAQLGYVSRYALGRDYHKLLRQRLKKLGDRIQAYCGELNFRPFVDSAPVMERALAAKAGIGWVGKHSLILNREAGSWFFLGELLIDLPLPVDQPQEEQCGRCVACMTTCPTGAIVAPYTVDARRCISYLTIELEGVIPEEFRALMGNRIYGCDDCQLICPWNRFSQLTDEEDFSPRAVLHAPQLIDLFRWNEEKFLRITEGSAIRRIGHLRWLRNIAVALGNAPYQDQIVIALRARQGEDAMLDEHIVWALEQQRARREALGIEVQTAQKKRLIRAVEKGLPRDA

SEQ ID NO: 75632 - protein, 383 aa, Chelativorans sp.
  misc_feature (1)..(383): tr|Q11CA8|Q11CA8_CHESB Epoxyqueuosine reductase OS=Chel ativorans sp. (strain BNC1) OX=266779 GN=queG PE=3 SV=1
MRVARAEPERLRAYIEREAHAAGFDVVAFTTPEAAPAAPARLAEFLSEGRHGTMDWMAETAMRRARPRTLWPEVRSIIMLGMNYGPEGDPLPILKRKDRAAISVYARNRDYHEVIKGRLKQIAGKLAGKAGADVKVFVDTAPVMEKPLAAAAGLGWQGKHTNLVSRQLGSWLFLGSIFTTAEIAPDLPEIDHCGSCRACLDICPTDAFPAPYQLDARRCISYLTIEHKGPIPREFREKMGNRIYGCDDCLAVCPWNKFAKAASESKLKAREDLKAPALADFLEFDDPSFRAFFSGSPIKRIGRDRFIRNVLIAAGNSAEEKLIPACERLLGDGSPLVRGAAIWALSRLMASGKFDALRRRMRPLEPHPQVQAEWDYAAVEVPA

SEQ ID NO: 75633 - protein, 422 aa, Chelatococcus asaccharovorans
  misc_feature (1)..(422): tr|A0A2V3TT00|A0A2V3TT00_9RHIZ Epoxyqueuosine reductase OS=Chelatococcus asaccharovorans OX=28210 GN=queG PE=3 SV=1
MRERSAARPAMSLRDALVDRARQMGFDDVRITSPDAIPHAPEHLAAWLEAGYAGSMTWMGETPERRSDPRALWSEVRSVVMLGMNYAPSSDPLASLAMRDRATISVYARNRDYHDVIKGKLKQVAGFLASAGGADVKVFVDTAPVMEKPLAEAAGLGWQGKHSVLVSRQFGSWLFLGAIFTTAELPFDAPGTPLCGSCRRCLTICPTAAFPAPYQLDARRCISYLTIEHKGPIDRALRPLMGNRVFGCDDCLAVCPWNKFAEAGREAKIVAGADYRAPALTELAQLDDAAFRLRFAGSPVKRTGRDRFMRNVLIAIGNSGDPAMVPVAGEKLTEDNPLVRGAAVWALSRLLPAATFAALAPRYMMGEPDESVMAEWNAGLEEGLAENLAESLDQERQVPAPREIRQSAVCVTRPSEKAGKRP

SEQ ID NO: 75634 - protein, 334 aa, Chelatococcus sambhunathii
  misc_feature (1)..(334): tr|A0A0K6HHK3|A0A0K6HHK3_9RHIZ Epoxyqueuosine reductase OS=Chelatococcus sambhunathii OX=363953 GN=Ga0061061_1 1321 PE=4 SV=1
MAWMADRADERADPARLWPQVRSILLLGMNYGPAEDPLANLARPERATISVYARNRDYHDIIKGKLKQVASLLASVGGADVKVFVDTAPVMEKPLAEAAGLGWQGKHTVLVSRTFGNWLFLGAIFTTAELPPDAPEKDHCGSCRRCLDICPTAAFPAPYVLDARRCISYLTIEHRGPIPRDLRALMGNRVFGCDDCLAVCPWNKFAREAREARLAARPDLTAPSLAALAGLDEAAFRQLFAGSPIKRTGRERFIRNVLVAIGNSGLPALAESALRLLDEPSALIRGTAVWALSRLLPADDFVALAALRMDGEEDMTVRDEWRLALAGSAAEGLT

SEQ ID NO: 75635 - protein, 413 aa, Chelatococcus sp.
  misc_feature (1)..(413): tr|A0A2W7A4D9|A0A2W7A4D9_9RHIZ Epoxyqueuosine reductase OS=Chelatococcus sp. OX=1953771 GN=queG PE=3 SV=1
MVCEDQVEAELQAAAGGPDAGHGAERALRRSGLLSGAKLKAAVAERAGAEGFAVIRVAPADAIPEAPERLAAWLAAGHHGGMAWMTERMAERADPRRLWDEVRSVVMLGMNYAGESDPLAALAHPDRAAISLYARRRDYHDVIKGKLKSVAGLLAARGGADVKVFVDTAPVMEKPLAQAAGLGWQGKHTVLVSREHGSWLLLGAIYTTAELPADAPERDHCGSCRRCLDICPTDAFPAPYRLDARRCIAYLTIEHAGHIEAALRPGIGNRVFGCDDCLAVCPWNKFAASAREARLALRDELADLPLAHLATLDDAAFRRLFAGTPVKRTGRDRFLRNVLIAIGNSGRPDLAASARDCLDDASPLVRAMAVWALGRLAPDEARRRSGPALRHEPDLQVCAEWRALDTTPEGCAA

SEQ ID NO: 75636 - protein, 380 aa, Chelatococcus sp.
  misc_feature (1)..(380): tr|A0A0K2DHV4|A0A0K2DHV4_9RHIZ Epoxyqueuosine reductase OS=Chelatococcus sp. CO-6 OX=1702325 GN=queG PE=3 SV=1
MTGEALRRAVAARAAAEGFDVLKVTHPAAVPQLPERLGAWLAEGRQGSMAWMADRADERADPARLWPEVRSIILLGMNYGPAEDPLANLARPERATISVYARNRDYHDIIKGKLKQVASLLASAGGADVKVFVDTAPVMEKPLAEAAGLGWQGKHTVLVSRTFGSWLFLGAIFTTAELPADAPEEDHCGSCRRCLDICPTAAFPAPYVLDARRCISYLTIEHKGPIPRDLRPLMGNRVFGCDDCLAVCPWNKFAREAREARLAARPELTAPSLAALARLDDAAFRQLFAGSPVKRAGRERFIRNVLVAIGNSGLPELAESAFPLLDDPSALIRGTAVWALSRVLPAEDFTALAATRMDGEEDMGVREEWRLALGESAGEG

SEQ ID NO: 75637 - protein, 313 aa, Chishuiella changwenlii
  misc_feature (1)..(313): tr|A0A1M6USC2|A0A1M6USC2_9FLAO Epoxyqueuosine reductase OS=Chishuiella changwenlii OX=1434701 GN=queG PE=3 SV= 1
MLLETAEHIKVKWTQQIKDKAEMLGFVSCGVAKADFLEEEAPRLESWLNNNYHGEMSYMANNFDMRLDPRLLVEDAKSVISLAYNYYQNLDRNPDAYKVAMYAQGEDYHFVVKEKVRELLEYIQEEIGEVSGRAFADSAPILEHAWAKKAGIGWVGKNSLTLSKQKGSFFFLAELIIDLDLEYDHPIETDHCGKCTRCIDACPTEAILPNKTVNGSQCISYFTIELKDQIPTELKGKFDDWIFGCDICQEVCPWNRFSLPTKESRFVGNEKINQFSKNDWKEITEDVFKEIFKKSPVKRTKYDGLKRNINFMN

SEQ ID NO: 75638 - protein, 365 aa, Chitinimonas sp.
  misc_feature (1)..(365): tr|A0A2G3K9N7|A0A2G3K9N7_9BURK Epoxyqueuosine reductase OS=Chitinimonas sp. BJB300 OX=1559339 GN=queG PE=3 SV= 1
MHDVNVSKPGVERDWAALASDIKRWATALGFDAAMIGDADLGAKTEQDLQAWLAAGNHGEMDYMAAHGSKRARPAELVPGTRRVISLRMNYRPPAAKSSEAVLVNGEAAFISRYALGRDYHKVLRSRIKKLAERIITAAGDFGYRAFVDSAPVMEVAAAERAGLGWRGKHTLLLTREHGSFFFLGELFTDLPLPIDPPLAQEHCGRCTRCIDICPTQAIVAPYQVDARRCVSYLTIELKGAIPTELRPLIGNRVYGCDDCQLTCPWNRFAVDSKESDFAVRNGLDDVSLVELFAWREQDFLNKLAGTAIYRIGYERWLRNIAVGLGNAPTSPAVVNALRSRQDDASELVREHVAWALARHLDAPT

SEQ ID NO: 75639 - protein, 368 aa, Chitinimonas sp.
  misc_feature (1)..(368): tr|A0A516SDK8|A0A516SDK8_9MICO Epoxyqueuosine reductase OS=Chitinimonas sp. R3-44 OX=2594795 GN=queG PE=3 SV=1
MHEVTQSDAERDWAALAADIKRWAAELGFDAAVIGDADLGPAAEQNLQAWLAAGNHGEMDYMAAHGTKRARPAELVPGTRRLISLRMNYRPPKARDSEAVLADGEAAFVSRYALGRDYHKVLRNRLQKLAERIEKAVGTFGYRPFVDSAPVMEVEAAVRAGLGWRGKHSLLLNREHGSFFFLGELFTDLPLPLDPPLPQEHCGRCTKCIDICPTQAIVAPYRVDARRCVSYLTIELKGAIPVEFRPLIGNRVYGCDDCQLVCPWNRFAVDATESDFAVRNGLDDVSLAEVFGWTEAEFMQKLAGTAIYRIGYERWLRNIAVGLGNAPGTPAVLAALHARRDDPSDLVREHVAWALAQHAERTRPAPNK

SEQ ID NO: 75640 - protein, 358 aa, Chitinimonas taiwanensis
  misc_feature (1)..(358): tr|A0A1K2HCW3|A0A1K2HCW3_9BURK Epoxyqueuosine reductase OS=Chitinimonas taiwanensis DSM 18899 OX=1121279 GN=qu eG PE=3 SV=1
MERDWTALAGDIKRWAKELGFDAAQIGDADLGAEVEAGLTAWLDAGFHGEMDYMAAHGMKRARPAELVPGTRRVISLRMNYRPPEAKSSEAVLADGEAAFISRYALGRDYHKVLRNRLQKLAERIADCVGPTGYRAFVDSAPVMEVAAAERAGLGWRGKHTLLLTREHGSFFFLGELFTDLPLPIDPPLAQEHCGRCTRCLDVCPTQAIVAPYQVDARRCISYLTIELKGAIPAELRPLLGNRVYGCDDCQLFCPWNRFAVDTSEADFAVRNGLDAASLVELFAWSEQDFLNRLAGTAIYRIGYERWLRNLAVGLGNAPSSPAVLAALASRQADATPLVREHIDWALAQHQQRGASLA

SEQ ID NO: 75641 - protein, 355 aa, Chitiniphilus sp.
  misc_feature (1)..(355): tr|A0A4V5MQ33|A0A4V5MQ33_9NEIS Epoxyqueuosine reductase OS=Chitiniphilus sp. HX-2-15 OX=2571148 GN=queG PE=3 S V=1
MDETLDKQAVVADIKRWAGELGFARAAITGPDLGHAEAGMLAWLEAGYHGEMDYMARHGLKRARPAELVPGTRSIVSVILPYLPPSAAASEAVLADGGKAYVSRYALGRDYHKVLRARLQALADRLAARIGPFGHRVFVDSAPVLEVELAKQAGLGWRGKHTLLIHRDHGSFFFLGELFTDLDLPYDAPLPVEHCGRCTRCLDFCPTKAIVAPYTVDARRCVSYLTIELKGSIPLELRPLIGNRVYGCDDCQLVCPWNRFAAESAETDFQIRNGLDDVTLVELFAWSEADFQRNLAGSAIYRIGHERWLRNLAVGLGNAATTPDVLAALNARRDDGSELVREHVAWALARHGVAA

SEQ ID NO: 75642 - protein, 299 aa, Chitinivibrio alkaliphilus
  misc_feature (1)..(299): tr|U7DA22|U7DA22_9BACT Iron-sulfur cluster binding prot ein OS=Chitinivibrio alkaliphilus ACht1 OX=1313304 GN=C ALK_0050 PE=4 SV=1
MALVTGFSACGFVALRRLSEHDSSLQNWLSSGYHGSMGWMENHFEKRLDPRLLVPGAETGIILLLNYFPQKKYDDTGHVLSKYAYGDDYHGVMKQMLFSLRDQINTVVPAKGRAFVDSAPVLERPWAVEAGLGWIGKNSLLIHPVLGSFCFIGELFLSCTLPPDAPWSGSSCGTCNRCRTACPTQAIVSPGCIDSRRCLSYLTIEHRGEIPPDRSLYSRVFGCDLCQDVCPWNRSCTPTTVPEFIPDSLRQDVYEQDLWKRLTPEDFNRLFSSSPLRRTGYTGLTRNIDRCSSQDEDAS

SEQ ID NO: 75643 - protein, 304 aa, Chitinophaga arvensicola
  misc_feature (1)..(304): tr|A0A1I0RJP9|A0A1I0RJP9_9BACT Epoxyqueuosine reductase OS=Chitinophaga arvensicola OX=29529 GN=queG PE=3 SV=1
MTHTLFIKELAKELGFDHCGIAKAEQLDDDARRLENWLNKGMHGNMQYMENHFDKRIDPRKLVDGAQSVITLLFNYFPSERQRDDAPRISKYAYGNDYHEVIRARLKTMLLRMQERIGPVQGRGFVDSAPVLERAWAKRSGLGWLGKNGNLIHKQAGSFFFIATLITDIPLEYDGPVADFCGSCTRCLDACPTEAIVAPGVVDGSKCISYFTIELKEQLIPDKMKGQFDDWMFGCDTCQDVCPWNRFAKANKEAEFTPVPAILNFSTRDWEEMTEEAFKTIFRHSPLKRSKFAGIRRNINFLKY

SEQ ID NO: 75644 - protein, 308 aa, Chitinophaga barathri
  misc_feature (1)..(308): tr|A0A3N4MI37|A0A3N4MI37_9BACT Epoxyqueuosine reductase OS=Chitinophaga barathri OX=1647451 GN=queG PE=3 SV=1
MRTPEKNTLLIKQKARTLGFDHCGIAKAEQLTEDAYRLEQWLQQGMHGNMQYMENYFDKRIDPRLLVDGAQSVITLLLNYYPVQEQQPEAPKLAKYAYGRDYHDVIREKLNTLLADLRVEIGDIQGRGFVDSAPVLERSWAQRSGLGWIGKNGNLIHKQAGSFFFIATLIVDIPLVYDGPAADYCGSCTRCLDACPTGALVSPTVVDGSRCISYYTIELKDMLIPASMQGKFENWMFGCDICQDVCPWNRFSKPNTEFAPIPEVLNFTTSQWEEMTEEEFKRIFAKSPLKRSKYAGIRRNLKFLGRPE

SEQ ID NO: 75645 - protein, 314 aa, Chitinophaga caeni
  misc_feature (1)..(314): tr|A0A291QW30|A0A291QW30_9BACT Epoxyqueuosine reductase OS=Chitinophaga caeni OX=2029983 GN=queG PE=3 SV=1
MLNIEKNTLFVKEQAKAFGFDHCGIAQAAELTGDAFRLENWLHKGMHGGMKYMENYFDKRIDPRKLVDGAKSVITLLLNYYPSQFQQPGAPKVAKYAYGNDYHEIIKERLNSFLQVLRSKLGDIQGRGFVDSAPVLERSWAQRSGLGWIGKNGNLLHKQAGSFFFIATLIVDVPFLYDAPTGDYCGSCTRCLEACPTGALVSPSVVDGSKCISYFTIELKEQLIPGSMQGKFEDWFFGCDICQDVCPWNRFAKAHRDEAFRPIPEILNFSTSDWEALTEEEFKNIFKKSPLKRSKYAGIRRNLKFIETKNSGKG

SEQ ID NO: 75646 - protein, 310 aa, Chitinophaga costaii
  misc_feature (1)..(310): tr|A0A1C4CCA9|A0A1C4CCA9_9BACT Epoxyqueuosine reductase OS=Chitinophaga costaii OX=1335309 GN=queG PE=3 SV=1
MNHAARHTTFIKQQAAALGFDHCGIAQAVQLEDDARRLERWLQQGMHGGMQYMENYFDLRIDPRKLVPGAQSVITLLLNYYPETLQRPDAPQIAKYAYGADYHEVIRARLNQLLAKMQTEIGHIAGRGFIDSAPVLERSWAQRSGLGWIGKNGNIIHKQAGSFFFIATLIVDIPLQYDGPVANHCGNCTRCLDACPTGALAAPGVVDGSRCISYLTIELKDLLIPESFAGQMQNWAFGCDICQDVCPWNRFARPHQQEAFKPLPVILNLSTREWEDMSEEAFRKLFKHSAIKRSKHRGLQRNLQFLKLKG

SEQ ID NO: 75647 - protein, 308 aa, Chitinophaga cymbidii
  misc_feature (1)..(308): tr|A0A512RQZ3|A0A512RQZ3_9BACT Epoxyqueuosine reductase OS=Chitinophaga cymbidii OX=1096750 GN=queG PE=3 SV=1
MQLLDKNTLLVKEKARALGFDHCGIAKAEQLTEDAYRLEQWLKQGMHGNMQYMENYFDKRIDPRLLVEGAQSVITLLLNYYPAATQVSDAPKVAKYAYGQDYHEVIRARLNSFLAELRAEFGEIQGRGFVDSAPVLERSWAQRSGLGWIGKNGNLIHKQAGSFFFIATLIVDIPLVYDPPTGDYCGSCTRCLDACPTEALVSPTVVDGSRCISYYTIELKDMLIPSGMEGKFDNWMFGCDLCQDVCPWNRFSRPNTVPEFAPIPEVLNFTTSQWEELTEEEFRRIFAKSPLKRSKYAGIRRNLKFLGK

SEQ ID NO: 75648 - protein, 306 aa, Chitinophaga dinghuensis
  misc_feature (1)..(306): tr|A0A327W217|A0A327W217_9BACT Epoxyqueuosine reductase OS=Chitinophaga dinghuensis OX=1539050 GN=queG PE=3 SV =1
MEHTRFIKELARELGFDYCGISEATQLDDDARRLEQWLKKGMHGSMQYMENHFDKRIDPRKLVDGAKSVITLLYNYFPAERQREDAPKVSKYAYGQDYHEVIRARLKEMLARMQERIGQIQGRGFVDSAPVLERSWARRGGLGWIGKNGNIINKQSGSFFFIATLITDIPLEYDGPVGDYCGTCTRCLDACPTGALVAPGVVDGSRCISYFTIELKDQLIPEKMKGSFDNWMFGCDTCQDVCPWNRFAKANNETAFTPIPAILDFTTNDWEEMTEEAFKAIFRHSPLKRSKYAGIRRNLQFLNLGE

SEQ ID NO: 75649 - protein, 306 aa, Chitinophaga eiseniae
  misc_feature (1)..(306): tr|A0A1T4SWE3|A0A1T4SWE3_9BACT Epoxyqueuosine reductase OS=Chitinophaga eiseniae OX=634771 GN=queG PE=3 SV=1
MNNTLYIKQLAAELGFDHCGIARAEQLDDDARRLERWLNKGMHGNMQYMENHFDKRIDPRKLVEGAQSVITLLFNYFPSERQRPDAPQVSKYAYGQDYHEVIRARLKTMLLRMQEHIGPVQGRGFVDSAPVLERSWARRSGLGWIGKNGNLIHKQAGSFFFIATLITDIPLEYDSPVGDYCGTCTRCLDACPTGALVSPGVVDGSRCISYFTIELKEQLIPDKMQGQFDGWMFGCDTCQDVCPWNRFSKAHSEAAFTPVPAILNFSTQDWEDMTEEAFREIFRHSPLKRSKYAGIRRNLQFLNTKP

SEQ ID NO: 75650 - protein, 308 aa, Chitinophaga filiformis
  misc_feature (1)..(308): tr|A0A1G8DBF2|A0A1G8DBF2_CHIFI Epoxyqueuosine reductase OS=Chitinophaga filiformis OX=104663 GN=queG PE=3 SV=1
MNLAAKYTAFIKQHAADLGFDHCGIAKAVQLDDDARRLEQWLHKGMHGSMHYMENHFDKRIDPRKLVDNAQSVITLLLNYYPSQQQQAEAPKISKYAYGQDYHEVIKGKLNTLLARMQEAFGEVSGRGFVDSAPVLERSWAQRSGLGWLGKNGNLIHKQAGSFFFIATLITDLALEYDSPVGDYCGSCTRCLDACPTGALVAPGMVDGSRCISYFTIELKELLIPENMQGQFDNWMFGCDVCQDVCPWNRFSKPNQTVEFTPIPEILNFSTKDWEELTEEEFKKIFRRSPMKRSKYAGIRRNLRFING

SEQ ID NO: 75651 - protein, 307 aa, Chitinophaga flava
  misc_feature (1)..(307): tr|A0A365XZ50|A0A365XZ50_9BACT Epoxyqueuosine reductase OS=Chitinophaga flava OX=2259036 GN=queG PE=3 SV=1
MNHTLYIKQLAAELGFDHCGIARAEQLDDDARRLESWLNKGMHGNMQYMENHFDKRIDPRKLVEGAQSVITLLFNYFPSQQQRPDAPKVSKYAYGQDYHEVIRARLKTMLLRMQEHIGPVQGRGFVDSAPVLERSWARRSGLGWIGKNGNLIHKQAGSFFFIATLITDIPLDYDSPVGDYCGTCTRCLDACPTGALVAPGVVDGSRCISYFTIELKEQLIPNPMKGQFDNWMFGCDTCQDVCPWNRFSKAHSEAAFTPVPAILNFSTRDWEDMTEEAFREIFRHSPLKRSKYAGIRRNLQFLQTPSS

SEQ ID NO: 75652 - protein, 304 aa, Chitinophaga ginsengisegetis
  misc_feature (1)..(304): tr|A0A1T5NA39|A0A1T5NA39_9BACT Epoxyqueuosine reductase OS=Chitinophaga ginsengisegetis OX=393003 GN=queG PE=3 SV=1
MTHTLFIKELAKELGFDHCGIAKAVQLDDDARRLETWLNKGMHGNMQYMEHHFDKRIDPRKLVDGAQSVITLLFNYFPSAQQRTDAPRISKYAYGQDYHEVIRARLKTMLLRMQERIGPVQGRGFVDSAPVLERAWATRSGLGWIGKNGNLIHKQAGSFFFIATLITDIELEYDGPMADYCGSCTRCLDACPTEALVAPGVVDGSKCISYFTIELKEQLIPDKMKGQFDNWMFGCDTCQDVCPWNRFSKANQEAAFTPVPAILNFSTRDWEELTEEAFKDIFRHSPLKRSKFAGIRRNINFLNT

SEQ ID NO: 75653 - protein, 308 aa, Chitinophaga ginsengisoli
  misc_feature (1)..(308): tr|A0A2P8FGJ4|A0A2P8FGJ4_9BACT Epoxyqueuosine reductase OS=Chitinophaga ginsengisoli OX=363837 GN=queG PE=3 SV =1
MELAAKYTAFIKQHAADLGFDHCGIAKAVQLDDDARRLEQWLHKGMHGSMHYMENHFDKRIDPRKLVDNAQSVITLLLNYYPDQQQQPEAPKISKYAYGQDYHEVIKGKLNTLLARMQEAFGAVSGRGFVDSAPVLERSWAQRSGLGWLGKNGNLIHKQAGSFFFIATLITDLALEYDSPVGDYCGSCTRCLDACPTGALVAPGVVDGSRCISYFTIELKELLIPENMQGQFDNWMFGCDVCQDVCPWNRFSKPNQTVEFTPIPEILNFSTKDWEELTEEEFKKIFRRSPMKRSKYAGIRRNLRFING

SEQ ID NO: 75654 - protein, 307 aa, Chitinophaga japonensis
  misc_feature (1)..(307): tr|A0A562T6F5|A0A562T6F5_CHIJA Epoxyqueuosine reductase OS=Chitinophaga japonensis OX=104662 GN=queG PE=3 SV=1
MTPTEKNTIFIKQQAAALGFDHCGIARAVQLDDDARRLEQWLHKGMHGTMRYMENYFDKRIDPRKLVDDAQSVITLLLNYYPEQEQRPDAPRIAKYAYGQDYHEVIRAKLNTLLLRMQETIGAVHGRGFVDSAPVLERSWAQRSGLGWIGKNGNLIHKQAGSFFFIATLITDLPLEYDSPAGDYCGNCTRCLDACPTGALVQPGVVDGSRCISYYTIELKEMLIPDTMQGRFEQWMFGCDTCQDVCPWNRFSKPHSTPEFRPIPEILNFSTREWETLTEDAFREIFRHSPLKRTKFRGIQRNLKFIS

SEQ ID NO: 75655 - protein, 305 aa, Chitinophaga jiangningensis
  misc_feature (1)..(305): tr|A0A1M7KUP1|A0A1M7KUP1_9BACT Epoxyqueuosine reductase OS=Chitinophaga jiangningensis OX=1419482 GN=queG PE=3 SV=1
MEQTRYIKDLARELGFDYCGISAAVQLDDDARRLEQWLKKGMHGSMHYMENHFDKRIDPRKLVDGAKSVITLLYNYFPSERQREDAPKVSKYAYGADYHEVIREKLKTMLARMQERIGAVQGRGFVDSAPVLERSWARRSGLGWMGKNGNIINKQSGSFYFIATLITDIELEYDGPVADYCGTCTRCLDACPTGAIVSPGVVDGSRCISYFTIELKDQLIPEKMQGSFDNWMFGCDTCQDVCPWNRFSKPNTEVAFTPIPAILNFSTSDWEEMTEEAFKTIFRHSPLKRSKYAGIRRNLHFLERK

SEQ ID NO: 75656 - protein, 299 aa, Chitinophaga niabensis
  misc_feature (1)..(299): tr|A0A1N6EZI7|A0A1N6EZI7_9BACT Epoxyqueuosine reductase OS=Chitinophaga niabensis OX=536979 GN=queG PE=3 SV=1
MIKQKARALGFDHCGIAKAEQLTDDAYRLEQWLNKGMHGSMGYMENYFDKRIDPRLLVDGAQSVITLLLNYYPAVSQQPDTPHIAKYAYGKDYHEVIKAKLNEFLFELRAELGDIQGRGFVDSAPVLERSWAQRSGLGWIGKNGNLIHKQAGSFFFIATMIVDIPLVYDSPVGDYCGSCTKCLDACPTQALVSPTVVDGSRCISYYTIELKDMLIPAAMEGQFNNWMFGCDICQDVCPWNRFAKATSEAEFAPIPEILNLTSSQWEELTEEEFKKIFSKSPLKRSKYAGIRRNLKFLGK

SEQ ID NO: 75657 - protein, 304 aa, Chitinophaga niastensis
  misc_feature (1)..(304): tr|A0A2P8HIX5|A0A2P8HIX5_9BACT Epoxyqueuosine reductase OS=Chitinophaga niastensis OX=536980 GN=queG PE=3 SV=1
MTHTLFIKQLASELGFDHCGIAKAVQLDEDARRLETWLNKGMHGNMQYMENHFDKRIDPRKLVDGAQSVITLLFNYFPSAQQREDAPRISKYAYGHDYHEVIRAKLKTLLLRMQEHIGPVQGRGFVDSAPVLERSWAQRSGLGWIGKNGNLIHKQAGSFFFIATLITDIALEYDSPVGDYCGTCTRCLDACPTEALVAPGVVDGSKCISYFTIELKDQLIPDKMKGQFDNWMFGCDTCQDVCPWNRFSKAHQEAEFTPIPAILNFTTKDWEELTEEAFKDIFRHSPLKRSKFAGIRRNINFLSD

SEQ ID NO: 75658 - protein, 309 aa, Chitinophaga parva
  misc_feature (1)..(309): tr|A0A2T7BI71|A0A2T7BI71_9BACT Epoxyqueuosine reductase OS=Chitinophaga parva OX=2169414 GN=queG PE=3 SV=1
MTQQERHTAFIKEQAKALGFDYCGIARAEQLDDDARRLEAWLGKGLHGGMQYMENHFDLRIDPRKLVPGAKSVITFLLNYYPEQQQRPDAPQVAKYAYGADYHEVIRARLNQFLQCLRAEIGEVQGRGFVDSAPVLERSWAQRSGLGWIGKNGNIIHKQAGSFFFIATLIVDLPLAYDGPVTDHCGRCTRCLDACPTGALAAPGLVDGSRCISYFTIELKDALIPEKFQGQFRNWAFGCDICQDVCPWNRFAQPHQQEALQPIPALLNMSTQEWEEMSETTFRELFRQSPIKRSKYKGLQRNLQFLKLK

SEQ ID NO: 75659 - protein, 308 aa, Chitinophaga pinensis
  misc_feature (1)..(308): tr|A0A5C6LQ93|A0A5C6LQ93_9BACT Epoxyqueuosine reductase OS=Chitinophaga pinensis OX=79329 GN=queG PE=3 SV=1
MDLRGKYTDFIKKHAADLGFDHCGIAQAMQLDDDARRLEKWLHKGMHGSMHYMENNFDKRVDPRKLVDNAKSVITLLLNYYPQEQQRTDAPKISKYAYGHDYHEVIKAKLNTLLARMQEEFGAVSGRGFVDSAPVLERSWAQRSGLGWLGKNGNLIHKQAGSFFFIATLITDLELLYDGPVGDFCGSCTRCLDACPTGALVEPGVVDGSRCISYFTIELKELLIPDNMQGQFDNWMFGCDACQDVCPWNRFSKPNKTAEFTPIPEILNLSTKDWEELTEEEFRRIFRRSPMKRSKYAGIRRNLRFING

SEQ ID NO: 75660 - protein, 308 aa, Chitinophaga pinensis
  misc_feature (1)..(308): tr|C7PDW0|C7PDW0_CHIPD Epoxyqueuosine reductase OS=Chit inophaga pinensis (strain ATCC 43595 / DSM 2588 / NCIB 11800 / UQM 2034) OX=485918 GN=queG PE=3 SV=1
MDLRGKYTDFIKKHAADLGFDHCGIAQAMQLDDDARRLEKWLHKGMHGSMHYMENNFDKRVDPRKLVDNAKSVITLLLNYYPREQQRTDTPKISKYAYGHDYHEVIKAKLNTLLARMQEEFGAVSGRGFVDSAPVLERSWAQRSGLGWLGKNGNLIHKQAGSFFFIATLITDLELLYDGPVGDFCGSCTRCLDACPTGALVEPGVVDGSRCISYFTIELKELLIPDNMQGQFDNWMFGCDACQDVCPWNRFSKPNKTVEFTPIPEILNFSTKDWEELTEEEFKRIFRRSPMKRSKYAGIRRNLRFVNG

SEQ ID NO: 75661 - protein, 304 aa, Chitinophaga polysaccharea
  misc_feature (1)..(304): tr|A0A561PTN2|A0A561PTN2_9BACT Epoxyqueuosine reductase OS=Chitinophaga polysaccharea OX=1293035 GN=queG PE=3 SV=1
MTHTLFIKQLAKELGFDHCGIARAEQLDDDARRLESWLNKGMHGNMQYMENHFDKRIDPRKLVEGAQSVITLLFNYFPSAAQRADAPRISKYAYGHDYHEVIRARLKTMLLRMQEHIGPVQGRGFVDSAPVLERAWARRSGLGWIGKNGNLIHKQAGSFFFIATLITDIPLEYDGPVADYCGSCTRCLDACPTEALVAPGVVDGSKCISYFTIELKDQLIPEKMKGQFDDWMFGCDTCQDVCPWNRFSKAHQEAEFNPIPAILNFTTRDWEELTEEAFKTIFRHSPLKRSKFAGIRRNLQFLGH

SEQ ID NO: 75662 - protein, 308 aa, Chitinophaga rupis
  misc_feature (1)..(308): tr|A0A1H8FFH4|A0A1H8FFH4_9BACT Epoxyqueuosine reductase OS=Chitinophaga rupis OX=573321 GN=queG PE=3 SV=1
MLTAIEKNTRFIKQQAVALGFDHCGIARAVQLDADARRLEEWLHKGMHGSMHYMENYFDKRIDPRKLVDDAQSVITLLLNYYPAEQQHPQAPKVAKYAYGKDYHEVIKAKLNTLLLQMQEQIGEVSGRGFVDSAPVLERSWAQRSGLGWIGKNGNLIHKQAGSFFFIATLITNLPLEYDSPVGDYCGSCTRCLDACPTQALVKPGVVDGSRCISYYTIELKDMLIPNEMQGRFQDWMFGCDICQDVCPWNRFSKPNKTVEFVPIPEILNFSTRDWEALSEEAFREIFRYSPLKRAKHKGIQRNLKFIS

SEQ ID NO: 75663 - protein, 308 aa, Chitinophaga sancti
  misc_feature (1)..(308): tr|A0A1K1ND40|A0A1K1ND40_9BACT Epoxyqueuosine reductase OS=Chitinophaga sancti OX=1004 GN=queG PE=3 SV=1
MQSVETHTAYIKAQAADLGFDHCGIARAVQLEDDARRLETWLNKGMHGTMKYMENHFDKRIDPRKLVDNAQSVITLLLNYYPPEQQVPDAPRISKYAYGKDYHEVIKAKLNTLLARMQETIGEVSGRGFVDSAPVLERAWAQRSGLGWLGKNGNLIHKQKGSFFFIATLITDLPLVYDNPVGDYCGSCTKCLDACPTGALVAPGVVDGSRCISYYTIELKELLIPEKMQGQFDNWMFGCDTCQDVCPWNRFSQPNQTLEFTPIPEILNFSSKDWEELTEEEFKRIFKHSPMKRSKFAGIRRNLNFLEK

SEQ ID NO: 75664 - protein, 309 aa, Chitinophaga skermanii
  misc_feature (1)..(309): tr|A0A327QN63|A0A327QN63_9BACT Epoxyqueuosine reductase OS=Chitinophaga skermanii OX=331697 GN=queG PE=3 SV=1
MLLQIEKNTVYIKQRTKELGFDYCGISKAEELTEDAFRLEAWLNKGMHGNMQYMENYFDKRIDPRKLVEGAQSVITLLLNYFPSQVQQPNAPKVAKYAYGKDYHEVIKARLNTLLEDIRKVTGNISGRGFVDSAPVLERSWAKRSGLGWIGKNGNIIHKQAGSFFFIATLIVDIPLLYDGPVADFCGSCTRCLDACPTGAIVSPSVVDGSKCISYFTIELKEQLIPNEMQGKFKDWMFGCDVCQDVCPWNRFAKPHSDVDFTPIPEILNFSTKEWEALTEDEFKNIFRKSPMKRSKYAGIRRNLKFIQT

SEQ ID NO: 75665 - protein, 307 aa, Chitinophaga sp.
  misc_feature (1)..(307): tr|A0A5B2VVN6|A0A5B2VVN6_9BACT Epoxyqueuosine reductase OS=Chitinophaga sp. BN140078 OX=2607653 GN=queG PE=3 S V=1
MTPTEKNTVFIKQQAAALGFDHCGIARATQLDEDARRLEQWLHKGMHGSMHYMENHFDKRIDPRKLVDNAQSVITLLLNYYPEQQQPADAPRIAKYAYGQDYHEVIRAKLNTLLQRIQETIGEVNGRGFVDSAPVLERSWAQRSGLGWIGKNGNLIHKQAGSFFFIATLITDLALEYDSAAGDYCGSCTRCLDACPTGALVEPGVVDGSRCISYYTIELKELLIPDEMQGRFDNWMFGCDTCQDVCPWNRFSKPNSNVEFTPVPAVLNFRTRDWEALTEESFRELFRHSPLKRSKFKGIQRNLKFIG

SEQ ID NO: 75666 - protein, 306 aa, Chitinophaga sp.
  misc_feature (1)..(306): tr|A0A3N4PED4|A0A3N4PED4_9BACT Epoxyqueuosine reductase OS=Chitinophaga sp. ZY74 OX=2488634 GN=queG PE=3 SV=1
MQLLEKNTRLVKEKARALGFDHCGIAKAEELTEDAFRLEQWLNKGMHGNMGYMANYFDKRIDPRKLVEGAQSVITLLLNYYPSATQQPDAPKIAKYAYGADYHEVIRGKLNEFLAELRGFLGDIQGRGFVDSAPVLERSWAQRSGLGWIGKNGNLIHKQAGSFFFIATLIVDVPLLYDAPTGDYCGSCTRCLDACPTGALVSPTVVDGSRCISYYTIELKDALIPGQMEGKFDNWMFGCDICQDVCPWNRFSSPNTTFTPIPEVLDFTTAQWEELTEEEFKRIFRHSPLKRSKYAGIRRNLKFLQG

SEQ ID NO: 75667 - protein, 308 aa, Chitinophaga terrae
  misc_feature (1)..(308): tr|A0A1H3YXE4|A0A1H3YXE4_9BACT Epoxyqueuosine reductase OS=Chitinophaga terrae Kim and Jung 2007 OX=408074 GN= queG PE=3 SV=1
MNATVYIKQLAAQLGFDYCGIAAAVQLDDDARRLESWLNKGMHGNMQYMENHFDKRIDPRKLVDGAKSVITLLFNYYPGERQREDAPQVSKYAYGEDYHEVIRARLKTMLARMQEQFGQVQGRGFVDSAPVLERAWAQRSGLGWIGKNGNLIHKQAGSFFFIATLITDLELEYDGPVADFCGTCRRCLDACPTSAIVAPGVVDGSRCISYFTIELKEQLIPEQMQGKFDNWFFGCDTCQDVCPWNRFSKAHNEAAFTPLPEILNFSTSDWEEMTEETFKEVFRRSPLKRSKYAGIRRNLRFWKMNRGS

SEQ ID NO: 75668 - protein, 315 aa, Chitinophagaceae bacterium
  misc_feature (1)..(315): tr|A0A3C0IQS3|A0A3C0IQS3_9BACT Epoxyqueuosine reductase OS=Chitinophagaceae bacterium OX=1869212 GN=queG PE=3 SV=1
MLKIFPAHIVKANARSLGFEYCGIAQAKELSDDARRLEKWLQQGLHGTMHYMENHFDLRINPTLLVPGAQSVITLLYNYYPEKRQPNNVPQVAKYAYGEDYHRVIRKKVKQLLATLRTTIGDINGRGFVDSAPVLERSWAQISGLGWIGKNGNLIHKQAGSFFFIATLIVDVAFDYDNLTVKDYCGTCTRCIDACPTQAILPNKVVDGSRCISYFTIELKDALIPHDKKEQFNNWMFGCDVCQDVCPWNRFSKPHQEPSFEPIPAILNYSWNDWQMLTEETFNVIFDKSAMKRAKFSGIQRNLKFIAPNNSPISQ

SEQ ID NO: 75669 - protein, 310 aa, Chitinophagaceae bacterium
  misc_feature (1)..(310): tr|A0A3E1NF83|A0A3E1NF83_9BACT Epoxyqueuosine reductase OS=Chitinophagaceae bacterium K23C18032701 OX=2291815 GN=queG PE=3 SV=1
MKNVSFYTSFIKSLSTELGFSYCGIAKARRLDEDARRLENWLNKGMHGKMSYMEKYFDLRVDPTLLVPGAKSVITLLLNYYPQTTQHTDGPKIAKYAYGNDYHEVIREKLNNLLLRLQETVGEVNGRGFVDSAPVLERSWAQQSGAGWIGKNGNIISKQAGSFFFIATLIVDLELEYDDPYAKDFCGSCTRCIDSCPTEAILPGKVVDGSKCISYFTIELKDMLLPDNMQQRFDNWFFGCDVCQDVCPWNRFSKPNTEPAFTPLPEILNFSTREWQEMTEESFRAIFKHSPLKRSKYAGIRRNLKFVKGG

SEQ ID NO: 75670 - protein, 312 aa, Chlamydia sp.
  misc_feature (1)..(312): tr|A0A1M3BEZ5|A0A1M3BEZ5_9CHLA tRNA epoxyqueuosine(34) reductase QueG OS=Chlamydia sp. 32-24 OX=1895742 GN=BGO 10_09240 PE=4 SV=1
MKLTFEDIKKKSLELGFDDVGITDAEISEDDINSYNEWIQNKYQGSLKYMENNLRCFPKDLFPGAKTVLIFITFYKQPPVEKKEYLIASYARGKDYHHLHRKRLKRFIHWLESITQQKNIAKGFSDSTPILEKALAVKAGLGWFGKNTLLIHRRFGTYTLLSGIVTSLDIPFEKTPNLRLPKCGVCQKCLDACPTKAFISPYLLDATKCLSYHTIESKEEIPDFVKQANPGYIFGCDICQEVCPHNVRPPLSLQEHFKEENGVGKTITLEKLIELEANPTKLFGTPLQRRGVTGLRKTYQSLKSEKSFSNSP

SEQ ID NO: 75671 - protein, 310 aa, Chlamydiales bacterium
  misc_feature (1)..(310): tr|A0A1M3CQK3|A0A1M3CQK3_9CHLA tRNA epoxyqueuosine(34) reductase QueG OS=Chlamydiales bacterium 38-26 OX=18957 43 GN=BGO14_04910 PE=4 SV=1
MIVSLEEIKTKAYELGWQDVGVTQASIPEIDTTAYKNWVKEKCHASLAYMEKELRCTPQEFFPGAKSAIIFVSYYKQPKQDFLADKGLIASYARGKDYHLIHRKRLKKFIHWLEERAQKQGIAKGFSDSSPVLEKALAVQAGLGWFGKNTLLIHRRYGTFILLSGVFTSLELPHTILSTHNPRCGSCTKCLDACPTQALTSPYKLDAAKCLSYHLIESKQPIPTDVQEKNPGYIFGCDICQDACPHNIRKSNSTSLEFDPKSGNGIYITSKDLEHLKLHPERLFGTPLQRRGVEGLRYNALTLKWQENGL

SEQ ID NO: 75672 - protein, 347 aa, Chloracidobacterium sp.
  misc_feature (1)..(347): tr|A0A257B8Y8|A0A257B8Y8_9BACT Epoxyqueuosine reductase OS=Chloracidobacterium sp. CP2_5A OX=2012633 GN=queG P E=3 SV=1
MTALPPVAPSDAVAAFTERLKAQALALGFSKVGIARAEPLEAEGRRLEDWLARGYHATMGWMARTAEKRARPERLLPGVKSAVAVALNYDTPLRHADAPGVAKISRYAWGDDYHAVLTEKLAALLDWVRAERPTANGYIAVDAQPAMDKAWAARAGLGWLGKHGNIITREFGSWVFLGELFLDIELAPETDLVPDHCGVCTACLEACPTGAIVEPYVVDARRCISFATIESKSEAPEMDTRGWVFGCDICQDVCPWSRFRQPTAEPRLAPREGMVAPTFEELDALTPEAFKQRFAGTPVLRAKHRGLKRNLAAAQGRIANPPELSVAPPASQELHRDSAASKPSSEP

SEQ ID NO: 75673 - protein, 324 aa, Chloracidobacterium thermophilum
  misc_feature (1)..(324): tr|G2LHC9|G2LHC9_CHLTF Epoxyqueuosine reductase OS=Chlo racidobacterium thermophilum (strain B) OX=981222 GN=qu eG PE=3 SV=1
MPPPADDQPAAVAAFTARLKAQALALGFSKVGIARAEPLADEGMRLHEWLARGYHATMHWMARTADKRTDPAQLLPNVKSVVAVALNYDTPPRHVEAPDIGKISRYAWGDDYHDVMGEKLKALLAWVTAERPEAHGYIAVDAQPAMDKAWAVRAGLGWLGKHSNVITREFGSWVFLGELFLDIDLEPETELVPDHCGTCTACLEACPTQAIVAPYVVDARQCIAFATIESKSETPELPTHGWVFGCDVCQDVCPWSRFRQPTTEARFLPHPDLIAPRLDELAALTPEGFRERFAGTPVLRAKHRGLLRNVEAARAQTTAPEQPD

SEQ ID NO: 75674 - protein, 310 aa, Chlorobaculum limnaeum
  misc_feature (1)..(310): tr|A0A1D8CVP9|A0A1D8CVP9_CHLLM tRNA epoxyqueuosine(34) reductase QueG OS=Chlorobaculum limnaeum OX=274537 GN=B IU88_01540 PE=4 SV=1
MSEKRLTLKEAIRRKALDLGFCAAGFAAAGPLFGAMEEYRQMLAERRHGEMGYLETGLEARANPELLLPGLKTVLSVALPWPAPATAGGISGYAVIPDYHRVLGELLAELLEFIRSISDQPVNARACVDSSPVLEKAWAEAAGIGRTGRNTLLIAPGHGSRVFLGELLLDIELEPDAPLDWNPCGDCSACIDACPTGALAAPGKLDARRCISYLTIELKRDFTDEEAAATDGWLYGCDRCIDACPHNASAEPTAYPGFAPKEDLVNLTATEILELTGSQFRKLFAGTPALRLGLKRLKRNARAVLGKGAR

SEQ ID NO: 75675 - protein, 311 aa, Chlorobaculum parvum
  misc_feature (1)..(311): tr|B3QQA3|B3QQA3_CHLP8 Uncharacterized protein OS=Chlor obaculum parvum (strain NCIB 8327) OX=517417 GN=Cpar_17 14 PE=4 SV=1
MSEKRLTMKETIRQKTLDLGFCAAGFAAANPLSEAMEMYRAMIDEKRHGEMGYLETGIEARANPELLLPGVKTVLSVALPWPAPTKPGAISGYAVISDYHRVVGELLKELLDFIRSICDQPVNGKVCVDSSPVLEKEWAEAAGIGRTGKNTLLIVPGYGSRVFLGELLLDLDLEPDAPLDWDPCEGCAACLDACPTGALTASGKLDARRCISYLTIELKRDFTDEEAAMTEGWLYGCDHCLDACPHNTVAKHKAYPGFETKKELAELTPAHALELTNSQFRKLFAGTPAMRLGLRRLKRNAQAALERTNKQ

SEQ ID NO: 75676 - protein, 310 aa, Chlorobaculum sp.
  misc_feature (1)..(310): tr|A0A4Q1DFJ2|A0A4Q1DFJ2_9CHLB tRNA epoxyqueuosine(34) reductase QueG OS=Chlorobaculum sp. 24CR OX=2508878 GN= queG PE=4 SV=1
MSETRPTIKEAIRQKALDLGFCAAGFAAAGPLAGAIEEYRAMIDEGRHGEMGYLETGLEVRANPELLLAGVKSVLSVALPWPAPAKPGAISGYAVIPDYHRIVGELLNELLDFIRLICDHPVNGRVCVDSLPVLETGWAEAAGIGCTGKNSLVIVPGHGSRIFLGELLLDLELDPDQPLDWNPCGDCTACLDACPTGALAAPGKLDARRCISYLTIELKREFTDEEAAMPEGWLYGCDHCLDACPHNANKVTAFPGFEQKEELATLSAEKALELTNSQFRKLFAETPALRLGLRRLKRNAKAVLGKTNKP

SEQ ID NO: 75677 - protein, 313 aa, Chlorobaculum tepidum
  misc_feature (1)..(313): tr|Q8KFK4|Q8KFK4_CHLTE Iron-sulfur cluster-binding prot ein OS=Chlorobaculum tepidum (strain ATCC 49652 / DSM 1 2025 / NBRC 103806 / TLS) OX=194439 GN=CT0322 PE=4 SV=1
MSEKRLTMKETIRRKALSLGFCAVGFAAADTLNEAMKEYRAMIDEGRHGEMGYLETGLEARANPELLLPGVKSVLSAALPWPAPAKPGAISGYAVIPDYHRVVGELLKELLDFIRSICDHPINGQICVDSSPVLEKEWAEAAGIGRTGKNTLLIVPGYGSRVFLGELLLDLELEPDTPLDWNPCGDCTACLDACPTGALNTPGKLDARRCISYLTIELKRDFTDEEAAMTNGWFYGCDHCLDACPHNANIEATGYPGFEQKKELVNLTPEKALELTHSQFRKRFAGTPALRLGLRRLKRNARAAVANKSQSKS

SEQ ID NO: 75678 - protein, 311 aa, Chlorobaculum thiosulfatiphilum
  misc_feature (1)..(311): tr|A0A5C4S561|A0A5C4S561_CHLTI tRNA epoxyqueuosine(34) reductase QueG OS=Chlorobaculum thiosulfatiphilum OX=11 5852 GN=queG PE=4 SV=1
MPETPSGLKEAIRRKALDLGFCAAGFAAAKPLSGALEEYRQMLAEGRHGEMGYLETGLEARANPELLLPDLKTVLSVALPWPAPATAGGISGYAVIPDYHRVVGELLTALLDFIRSISERPVNARACVDSSPVLEKAWAEAAGIGRAGRNTLLIAPGHGSRVFLGELLLDIELEPDAPLDWNPCGDCTACLDACPTGALAAPGKLDAQRCISYLTIELKRDFTEEEAATTDGWLYGCDRCIDACPHNASAEPTTYPGFEPKDELANLSAAEILALTGSQFRKLFAGTPPLRLGLKRLKRNARAALERTNKQ

SEQ ID NO: 75679 - protein, 331 aa, Chlorobi bacterium
  misc_feature (1)..(331): tr|A0A3M1M0D2|A0A3M1M0D2_9BACT Epoxyqueuosine reductase OS=Chlorobi bacterium OX=2268192 GN=queG PE=3 SV=1
MDARVNSATLTKELKDYCRWLGFDAVGIARADALDDEREHLHTWLSRGYHATMHYMERTCQKRLDPRQILPSARSIVVVAMSYDTPYRHTDQPNRGKISRYGWGDDYHDVLLPKLRAAAAWLANRVPNAESKVYVDTGPVMEKQWARRAGIGWQGKNTNVISRTMGSFFFLGVLLTSVELEVDAPIPDYCGTCTACLDACPTGALVEPYVLDASRCISYWTIETKPDVEFPEPIRRNLDGWLFGCDVCQDVCPWNRFRKETREPAFFPRNTETSLALEQILALTPEEFRLRFRGSPLTRPKLAGLQRNARMLQAAAECSQQSDAHAHDHSR

SEQ ID NO: 75680 - protein, 298 aa, Chlorobi bacterium
  misc_feature (1)..(298): tr|A0A136NZP2|A0A136NZP2_9BACT 3-chloro-4-hydroxyphenyl acetate reductive dehalogenase OS=Chlorobi bacterium OL B7 OX=1619898 GN=cprA PE=4 SV=1
MLELPILSASDSPPAFRWDEWYAGVGGRTIHVPEVQEYLHKIQTEQYPRCEGPVAAVRQEFGSPEEAAAHIKEKATEFGADAVGVCLIEPSDLYRGRSISETHAIALAKRMRWRAFQTVPSREAAIECMRIYYDLGETVIQLAEYIRSIGYGCNVEHPIGDSNLLHIPIALKAGFGELGRHGSVIHPRLGPLFRMGSIATTLPMATDSPIDAGIAAFCDKCRACRIYCPANANTPTTAAPKRGKITWGTIAIRLTPGAVSRTSPSITTARPVCRFASITTRSGRAISTATKPNFSPTW

SEQ ID NO: 75681 - protein, 320 aa, Chlorobium chlorochromatii
  misc_feature (1)..(320): tr|Q3ATZ4|Q3ATZ4_CHLCH Iron-sulfur cluster-binding prot ein OS=Chlorobium chlorochromatii (strain CaD3) OX=3401 77 GN=Cag_0255 PE=4 SV=1
MTTSATHFVRHIRAEAARIGFVAIGFAAPELSPMAMQRYMEMLHDKRHGEMAYLANYTAERANPTLLLSDVKTVISVALSYNHPITYCNGFPKISRYALIDDYHTVMKSKLEELHVAIERIMGEPIAAIAAVDSAPLLEKSWAEQAGIGKVGKNSLLKIPSAGSFVFLGELLIDKEIRVTPLALPNYCGSCNACIEHCPTGALLAPSKLDATKCISYLTIELKRDFTADEAAMIGEWLFGCDICQEVCPYNRQASIVAHSAFTVREELLNVAVDDLLGLTKSSFRKLFYGTPVFRIGLRRLKRNARAVEENVRRRGKNDG

SEQ ID NO: 75682 - protein, 317 aa, Chlorobium ferrooxidans
  misc_feature (1)..(317): tr|Q0YUN3|Q0YUN3_9CHLB 4Fe-4S ferredoxin, iron-sulfur b inding OS=Chlorobium ferrooxidans DSM 13031 OX=377431 G N=CferDRAFT_2006 PE=4 SV=1
MSDSGTNLCRELRKEAARLGFSAIGFSTPQPQQLAVERFAAMIREKRHGEMHYMEQGIENRSEPAMLLPGLKTVISAAISYNNHVEYREGQPKISRYALIADYHTVVRRKLEQLLEKLQTLTTEPVNALITVDSSPVFEKTWAEHAGIGKPGKNTLLIVPSSGSQVFLGELLIDIEIIESKPPLQNLCGSCNLCIEQCPTGALTGPGKIDASRCISYLTGELKRAFSEEEQVMVGEWLFGCDLCMDVCPHNRQSSIKANDSFALRQELTDVTTEQIMNLTRSGFRKLFQGTPVFRIGLRRLRRNAKAVAENIKQKRR

SEQ ID NO: 75683 - protein, 335 aa, Chlorobium limicola
  misc_feature (1)..(335): tr|B3EEH9|B3EEH9_CHLL2 4Fe-4S ferredoxin-type domain-co ntaining protein OS=Chlorobium limicola (strain DSM 245 / NBRC 103803 / 6330) OX=290315 GN=Clim_1748 PE=4 SV=1
MRLPDENPAIAIRREAQRIGIASIGFSPLQPQEKAIARISGMIEEKRHGEMRYLETGISERADPSQLLPGVKTIISAALCYNRPEYHAPAPGTARISRYAVIDDYHRVVRSKLEELLSFIRTICDQPVQAVIAVDSSPVLEKAWAESAGIGKTGKNTLLNTTASGSYVFLGELLIDREIHDPAQELPNRCGACRNCIESCPTGALLEPGKLDARRCISYLTIELKREFTPEESRMVGTWLFGCDLCQESCPGNRSRKPAPEGLFTLKKELLDITPEDILNLTGSGFRKLFLGTPIYRIGLKRLKRNARAVLDNLSSSSSVQAPQKGNSSSANDEQ

SEQ ID NO: 75684 - protein, 314 aa, Chlorobium phaeobacteroides
  misc_feature (1)..(314): tr|B3ELV2|B3ELV2_CHLPB Uncharacterized protein OS=Chlor obium phaeobacteroides (strain BS1) OX=331678 GN=Cphamn 1_1876 PE=4 SV=1
MDKENTVQAILRKAEECGFCAAGFSSITPCSEESTRLREMIRENRHGEMLYMQKNIASRDNPENLLPGAKTVFSAAMPYHFPLETHAESGRLSRYAMVRDYHRVLSEKLEEVLECIRENHSGEVNGKVCVDGIPVFEKSWAEKAGLGRKGKNTMLIVPDKGSLVFLGEILLDIELPFTPEHLPDPCGECNSCINSCPTGAIIEKGKIDARKCISYLTVELKREFTPEESGMTGEWMFGCDICQEVCPHNQKSLKKKTAAGFEPQKELLTITPEEILSLTKSGFKKLFASTPVYRTGLKRLKRNARAVLENLKEC

SEQ ID NO: 75685 - protein, 320 aa, Chlorobium phaeobacteroides
  misc_feature (1)..(320): tr|A1BE86|A1BE86_CHLPD 4Fe-4S ferredoxin-type domain-co ntaining protein OS=Chlorobium phaeobacteroides (strain DSM 266) OX=290317 GN=Cpha266_0658 PE=4 SV=1
MAEQTDSIIRAIKKEASRLGFCAIGFSSLKPQNLAVERLNNMIDEGRHGEMDYLANRIKERADPSLLLSGTKTIISAAMNYYRSTTPRRPDLPRISNYALIEDYHIVLKDRLGQLLAKIQQLYPEPLNGLITIDSAPVFEKSWAEQAGIGASANNTLLIIPAAGSYVFIGEILIDKPFESDMKPLANLCGSCRKCIESCPTGALVSPGKIDARRCISYLTVELKREFTAEESLMAGSWLFGCDCCQESCPYNRERRGPPEGVFHPKEQLENLTCEEILNLSGSGFKKLFFGTPVYRIGLRRLKRNARAVQENMNRTEIKP

SEQ ID NO: 75686 - protein, 321 aa, Chlorobium phaeovibrioides
  misc_feature (1)..(321): tr|A0A5C2QL38|A0A5C2QL38_CHLPH tRNA epoxyqueuosine(34) reductase QueG OS=Chlorobium phaeovibrioides OX=1094 GN =queG PE=4 SV=1
MTTRPENPAREIRRAALKLGFAAVGFSSPTPRQQAAERYKEMIAERRHGEMDYLERGLTGRLDPHLLLEGVQTIVSLAISYHTPPRPEGATSGIARYARIADYHQVVRERAEALLLDIEHILGKRPRSYIAVDSAPVMEKEYAEKGSIGRTGKNTLLIVPSAGSYVFLAELLIDEAITEERPPLPNPCGSCTICIDACPTGALLTPGKLDATRCISYLTVELKREFTAEEAAMTGSMLFGCDACQEHCPHNQRPLIAADPAFAAKKELLQLQPEEILKLSRSQFKALFRGTPIWRIGLKRLKRNARAVLKNQNQKTSVLFG

SEQ ID NO: 75687 - protein, 315 aa, Chlorobium phaeovibrioides
  misc_feature (1)..(315): tr|A4SDE8|A4SDE8_CHLPM 4Fe-4S ferredoxin-type domain-co ntaining protein OS=Chlorobium phaeovibrioides (strain DSM 265 / 1930) OX=290318 GN=Cvib_0485 PE=4 SV=1
MTTRPENPAREIRRAALKLGFAAVGFSSPTPRQQAAERYKEMIAERRHGEMDYLERGLTGRLDPHLLLEGVQTIVSLAISYHTTPSPEGTTSGIARYARIADYHQVVRERAEALLLDIEHILGKRPASYIAVDSAPVMEKEYAEKGGIGRTGKNTLLIVPSAGSYVFLAELLIDEAITEERPPLPNPCGSCTICIDACPTGALLTPGKLDATRCISYLTVELKREFTAEEAAMTGSMLFGCDACQEHCPHNQRPLIAADPAFAPKTELLQLQPEQILKLSHSQFKALFRGTPIERIGLKRLKRNARTALKNQNQN

SEQ ID NO: 75688 - protein, 321 aa, Chlorobium sp.
  misc_feature (1)..(321): tr|A0A533U317|A0A533U317_CHLSQ tRNA epoxyqueuosine(34) reductase QueG OS=Chlorobium sp. OX=1095 GN=queG PE=4 S V=1
MADSSPDLARQIRKEAARLGFAATGFSAPLPQSLSMQRLTTMIQEKRHGEMNYMEKRMVERADPSVLLPGLRTIISTAISYNYPLQYQDGFPKISKYALIDDYHTIVREKLEKLLSTIKILLGEPLEALIAVDSSPLFEKNWAEDAGIGKTGKNTLLKVPSAGSYLFLGEILLNREIRSPGITLPNFCGSCSNCLEHCPTGAFVEPGKIDASKCISYLTVELKREFTAEEATKIGDRIFGCDICQEVCPYNQQASIPAHESFRVRTELLNISTEQILNLTRSGFRELFYGTPVFRIGLRRLKRNARAVAENLKRSGKIPSV

SEQ ID NO: 75689 - protein, 317 aa, Chlorobium sp.
  misc_feature (1)..(317): tr|A0A4R0QJL4|A0A4R0QJL4_9CHLB tRNA epoxyqueuosine(34) reductase QueG OS=Chlorobium sp. N1 OX=2491138 GN=queG PE=4 SV=1
MNTPEPSPSLARAIRREARRLGFSAAGFSAPPPGGRATERFRAMLREERHGEMAYLETGLEARERPELLLPELKTVVSLAMSYHQDPPGWNRRISRYALTADYHAVLRRKAEELLEAIGELAGSRPNACITVDSAPVLEKEWGERSALGRTGKNTLLIVPSAGSYVFLAELLLDMEIPEERPPLPNPCGSCRICLDACPTGALLEPGKLDARRCISYLTGELKREFTTEEASMIGGRLFGCDACQERCPHNQRPLIKADPAFEPREELLGLEPERILGMGRSEFRRLFAGTPILRIGLRRLRRNARAVLANEGKPID

SEQ ID NO: 75690 - protein, 376 aa, Chloroflexi bacterium
  misc_feature (1)..(376): tr|A0A2E0S2B2|A0A2E0S2B2_9CHLR tRNA epoxyqueuosine(34) reductase QueG OS=Chloroflexi bacterium OX=2026724 GN=q ueG PE=4 SV=1
MVKLERQIKNLGLKSGFDLVGITSAEKFVRDEQVSIARVKSGLMDGLSWYTEDRVKKANDPGMLLEDARSIISLAVSYNTRENKNKNKITGKIARYAWGEDYHDVIKQRLRCFVEELKLLAGEDVKTRIFVDDGPMNDRAAAERAGVGWFGKNTNILTQNFGSWVFLSQVITDIELAPDLPLNKTCGSCVICIEQCPTGAIVAPYVIDNTKCISFLTIELRDSIPRDLRHLMGDWIFGCDICQDVCPVNRKAVISLDPKFTKLHEFSAMDLIPLLDLSQLEFNKIFKDSAIKRAKLSGFQRNVCVALGNIGDPVAVPALRKVIQTDYPDLVRSHAAWALGRIGGKSAMEILNSHANSEKSPEVLEEIQEAICSGAS

SEQ ID NO: 75691 - protein, 225 aa, Chloroflexi bacterium
  misc_feature (1)..(225): tr|A0A1F8TMJ0|A0A1F8TMJ0_9CHLR tRNA epoxyqueuosine(34) reductase QueG (Fragment) OS=Chloroflexi bacterium RIFO XYC12_FULL_59_14 OX=1797674 GN=A3K45_01650 PE=4 SV=1
PVPNRAYTDTGPLLERDLAQRAGLGWIGKNTCLIHPRAGSYFLLAEILLGLELDPDSPIVTDHCGTCTRCLDACPTDCILPDRTLDARRCISYLTIENKADIPADLRPLIGDWIFGCDICQTACPWNRFAAPEGDASFHPRAGAAATDLVHTLALTPESFRRRFARTPLQRAKRRGLLRNAAVALGNLGDERALPALEKALDDPEPMVREHARWAMERIKTKPLP

SEQ ID NO: 75692 - protein, 316 aa, Chlorogloea sp.
  misc_feature (1)..(316): tr|A0A2T1EKD7|A0A2T1EKD7_9CHRO Epoxyqueuosine reductase OS=Chlorogloea sp. CCALA 695 OX=2107693 GN=queG PE=3 S V=1
MTASPILTSTQIKDKALEIGFHKVGIAKVDNTDVEVQHLQEWLNRGYQADMAWMNDPKRQDIRALMPEVQSIICVALNYYTPHQRPNSPQYAKISRYGWGRDYHKVMAKKLKALNNWLQTYPDVRSRYVSDTAPIQDKVWAQKAGIGWIAKNGNVIAREYGSWLFLGEILTNLDLTPDIAHTEHCGSCTRCIDACPTGAIAAPFVVDANRCIAYHTIENREEKLPEAISAHLQGWVSGCDICQDVCPWNQRFAKETDIVEFQPYAENVAPKLTDLAEISDEEWDRRFTASALRRIKPEMLRRNARANLSSATPKND

SEQ ID NO: 75693 - protein, 317 aa, Chlorogloeopsis fritschii
  misc_feature (1)..(317): tr|A0A433NNI4|A0A433NNI4_CHLFR Epoxyqueuosine reductase OS=Chlorogloeopsis fritschii PCC 6912 OX=211165 GN=que G PE=3 SV=1
MNQFLGTSSNEVKQKALELGFHKVGIAAVNEDDTEKQRLQAWIALGYHADMEWMTSPKRQDLKLVMSEARSLICVALNYYTPHERPEGKEYGKISRYAWGRDYHKVMHKKLKAFSAWLQGLGEDIQARYYADTGPIQDKAWAQRAGIGWIAKNGNVITREYGSWVFLGEVLTNLELNPDTPHTEHCGTCTRCIEACPTGAITQPFVVDANRCIAYHTIENRHEKLPETVTPHLQGWVAGCDICQDVCPWNQRFARITDVTEFQPYPGNIAPKLVELAQISDREWDKRFPASALRRIKPEMLRRNARANLDAFYLVQE

SEQ ID NO: 75694 - protein, 310 aa, Chloroherpeton thalassium
  misc_feature (1)..(310): tr|B3QWB9|B3QWB9_CHLT3 4Fe-4S ferredoxin-type domain-co ntaining protein OS=Chloroherpeton thalassium (strain A TCC 35110 / GB-78) OX=517418 GN=Ctha_0763 PE=4 SV=1
MAKKIGFDAIGIVPVAALGSEARAFEQWLQQDFHGDMRYMKNHFEKRVSPDLLFPGAKTVISCAVNYFHRDKKASQNGKISIYAQSLDYHFVVKQMLNELLEELQKIIGQVQGQAIVDTAPFMDKVWAVRAGIGWRGKHTNLINRKIGSYFFIGSLLLDAAIPSNDSAQRNFCGSCTACIDSCPTKAIVAPYQIDARKCIAYLNIESKPDFNEAEKKMLGEWLFGCDICQQVCPWNRFVQETKNSLLQPKKDLANLQTQDFLQLTKSSFKTLFNDTVIFRTGLRRMKRNATAVSENIKTRNFGSAEDSAT

SEQ ID NO: 75695 - protein, 310 aa, Chondrocystis sp.
  misc_feature (1)..(310): tr|A0A1Z4RNW8|A0A1Z4RNW8_9CHRO Epoxyqueuosine reductase OS=Chondrocystis sp. NIES-4102 OX=2005460 GN=queG PE=3 SV=1
MSINSFQVKTAAQDIGFHLVGIARIDNHQDQAVDYLKNWLALGYQADMNWMSSPKREDIRACMPEVRSLIAVALNYYTPHQHSNQPGIAKISRYGWGRDYHKVMGSKLKALSNWLRSQDPTIETRYYVDTAPIQDKVWSQRAGLGWIAKNGNMITRKYGSWVFLGEVLTNLELTPDAPHTSHCGTCTRCLESCPTNAIVKPYVVDANRCIAYHTIENRQPELPQEIANNLSGWVAGCDICQDVCPWNQRFAQETNIEDFQPYPENIQPQLTDLANLSPTAWDQRFRASALRRIKPNMWRRNAQANLNSEN

SEQ ID NO: 75696 - protein, 361 aa, Chondromyces apiculatus
  misc_feature (1)..(361): tr|A0A017T9I4|A0A017T9I4_9DELT Epoxyqueuosine (OQ) redu ctase QueG OS=Chondromyces apiculatus DSM 436 OX=119203 4 GN=CAP_3422 PE=4 SV=1
MQPELDRQVREQALALGFDVVGVARADEPLDADHDRYRAFIDQGMHGEMDYLARYVEERRRLDTSAILEGARSVICVGRRYARPSTDEGADPPVARSIARYARGRDYHNHLKKQLRKLAQFIEALAEGVRARALCDIEPVLERAWAARSGIGFVGKNGLVITPGQGSYQMLGEVVTTLDLVADVPLRERCGSCTRCLDACPTQAFDAPFVLDPRRCIAYLTIEHRSTPPAALQERVGEHVFGCDVCQEVCPFNRTAPPAPARTTPFHPLSRWEGRTLDDLVTLDQAAFDTLTEGSPVRRARRAGLARNAAIVAANRLARGAHGEEAEAAARALDAALQHDDASVREVAARGAERLGKARAT

SEQ ID NO: 75697 - protein, 362 aa, Chondromyces crocatus
  misc_feature (1)..(362): tr|A0A0K1EG37|A0A0K1EG37_CHOCO 4Fe-4S ferredoxin OS=Cho ndromyces crocatus OX=52 GN=CMC5_039820 PE=4 SV=1
MQPELDRRVKAEALALGFDVVGVARADEPLETEHTRYREFIDQGMHGEMTYLARYVEERRRLDTTAILEGARSVICVGRRYARPRSDESEDPSLAQGVARYARGRDYHNHLKKKLRQLAKFVASLAEGARARALCDIEPVLERAWAARSGIGFVGKNGLVITPGQGSYQMLGEVVTTLDLLPDEPIRERCGSCTRCLDACPTQAFVAPFVLDPRRCVAYLTIEQRTAPEPALREGMGEHLFGCDVCQEVCPFNRTAPPPPARTAPFHPLARWEGRALDELTTLDQASFEALTEGSPVRRARREGLARSATIVAANRLARGACSDDETETARRALHAALQHDDPSVREVARWGLEHARKAPTE

SEQ ID NO: 75698 - protein, 376 aa, Chromatiaceae bacterium
  misc_feature (1)..(376): tr|A0A3D4S2F0|A0A3D4S2F0_9GAMM Epoxyqueuosine reductase OS=Chromatiaceae bacterium OX=2049432 GN=queG PE=3 SV= 1
MTRASASPSVTSSHAKAPRQQLDASQLAALGHSIKRWGEELGFQQVGIADCDLSQSAERLQHWLAAERQGDMTYMARYRDKRTCPGELVPGTQRIISVRMDYLPQPQETLMETLDDPTRAFVSRYAVGRDYHKVLRQRLKRLARRIEDSIGPFGHRLFVDSAPVLEKPLAQKAGLGWIGKHTNLLNQRAGSWFFLGELYCDLPLPVDRPAEDHCGRCKACIDACPTDAITAPYQLDARLCISYLTIEHPGSIPEPLRARLGNRIYGCDDCQLACPWNRFARPTSETDFLPRQGLDSATLLRLFSWDEQEFLRRTEGSVIRRIGHLRWLRNIAVALGNGPPSAGVYAALHARADDQRPLVREHVHWAIRALETRDLG

SEQ ID NO: 75699 - protein, 117 aa, Chromatiales bacterium
  misc_feature (1)..(117): tr|A0A520WWV1|A0A520WWV1_9GAMM DUF1730 domain-containin g protein (Fragment) OS=Chromatiales bacterium OX=20267 25 GN=EX272_15145 PE=4 SV=1
MAMLKQEIVDWSHELGFQQAGVSDIDLAVAEGRLRLWLDDRFHGSMHYMERHGSKRSRPEELVPGTVRVISVRMDYLADDQDVAVDLLDHASRAYISRYALGRDYHKVMRGRLRALA

SEQ ID NO: 75700 - protein, 343 aa, Chromatiales bacterium
  misc_feature (1)..(343): tr|A0A1S9CYY6|A0A1S9CYY6_9GAMM Epoxyqueuosine reductase OS=Chromatiales bacterium USCg_Taylor OX=1934255 GN=qu eG PE=3 SV=1
MDYARLATEIKAWGRDLGFQQIGIAGVELGDDEHRLRDWLAAGYHGEMRYMARHGTKRSRPDELVPGTLRVISARLDYLPPGAASAQAVLDNPRLGYVARYALGRDYHRVLRQRLRRLAGRISARAGPCGYRVFSDSAPVLEKALARNGGLGWIGKHTNLINRQAGSWFFLGEIYTDLPLPADPPHAANHCGRCSACIEICPTQAILGPYRLDARRCISYLTIELRGPIPEPLRPLIGNRIFGCDDCQLVCPWNRFARLSREGDFKPRHGLDAPDLIALFNWNEEAFLKNTEGSAALGNGPASPEAAAALEQRRAHPSELVREHVAWALTRRAAEARRAGSKH

SEQ ID NO: 75701 - protein, 369 aa, Chromatium okenii
  misc_feature (1)..(369): tr|A0A2S7XMS7|A0A2S7XMS7_9GAMM Epoxyqueuosine reductase OS=Chromatium okenii OX=61644 GN=queG PE=3 SV=1
MNHLDKTNPSLTQNQLTQLTAQIKIWGEQLGFQQLGITDIDLAVAETRLLNWLAAGHHGTMDYMARHGTRRSRPAELVPGTLRVISARMNYWHEPPATSAQIQVDPIQAFISRYALGRDYHCVLRKRLQRLANQIAAIINPFGYRVFVDSAPVLEKPLAEKAGLGWIGKHTNLIHPRAGSWFFLGEIYTDLALPIDTPMRDHCGNCHACLDCCPTHAIIAPYQLDARRCISYLTIEYRGSIPIELRSLLGNRIYGCDDCQRVCPWNRFAIQTVEPDFMTRNHLNATTLIELFAWNETTFLQRTEGSAIRRIGYAQWLRNLAVALGNAHHSPQCITALHSRINYPDSLVREHIEWGLNQQHALEITNGII

SEQ ID NO: 75702 - protein, 353 aa, Chromatocurvus halotolerans
  misc_feature (1)..(353): tr|A0A4R2KKY3|A0A4R2KKY3_9GAMM Epoxyqueuosine reductase OS=Chromatocurvus halotolerans OX=1132028 GN=queG PE=3 SV=1
MVAAQSAALAGRIREWARELGFQQLGISDIDLSAHEAYLQKWLDAGYHGEMQWMASHGSKRSRPQELVPGTCRVLSVRMDYLPGGTDPEQVLASTDRAYISRYTLGRDYHKLLRKRLATLARRISDEAGGGAYRAFVDSAPVLERALAERAGLGWIAKNTMLINERVGSWFFLGEIYTDLPLPTDDARTEKHCGSCRACLDVCPTDAFTGPFQLDARRCISYLTIEHKGSIDPALRPLMGNRIFGCDDCQLVCPWNKFAQHTDEADFQPRHGLDDIDLVSLFLWDEATYEARTEGSALRRIGHERWLRNIAVALGNAPGNPSILNALERRRGHPSGLVREHVEWAIARHSSGS

SEQ ID NO: 75703 - protein, 360 aa, Chromatocurvus sp.
  misc_feature (1)..(360): tr|A0A2N5Y0B4|A0A2N5Y0B4_9GAMM Epoxyqueuosine reductase OS=Chromatocurvus sp. F02 OX=1905677 GN=queG PE=3 SV=1
MLPILTSRTEHDLRQQLEQWARDLGFSQVGVSDIQLAEHEAYLQKWLDAGYHGSMDYMARHGQKRARPAELVPDTCRVITLRMDYLPADTQPLEILNSPEKAYISRYALGRDYHKLIRKRLARLAQKLEHRAGGGEYRAFVDSAPVLERALAERAGMGWIAKNAMLINDKAGSWFFLGEIYTNLPLAADPPKQTKHCGSCRACLDICPTNAFVGPFELDARKCISYLTIEHKGSIDPALRPLMGNRIFGCDDCQLVCPWNKFAQITAEPDFQPRHQLADSDLVDLFQWDEATFLSRTEGSAIRRIGHQRWLRNIAVALGNAVTSPQVIAALESRSDHASELVREHVEWALQQHARPSSTA

SEQ ID NO: 75704 - protein, 360 aa, Chromobacterium amazonense
  misc_feature (1)..(360): tr|A0A2S9X1E4|A0A2S9X1E4_9NEIS Epoxyqueuosine reductase OS=Chromobacterium amazonense OX=1382803 GN=queG PE=3 SV=1
MTENPPQKPDYPELSRQIKAWAREAGFADARITRAALPPEAERELEAWLAAGYHGEMDYMARHGALRVRPAELVPGTLSVISLRMNYWPEAKPAEQVLADPSLAYLSRYALGRDYHKVLRNRLQKLAERIEGAIGAFGYRVFTDSAPLAEVALAAQAGLGWRGKHTLLLTKKQGSLFFLGEILTDLPLPPDEAEDGHCGRCTRCLDVCPTGAIVEPYKVDARRCISYLTIELKGAIPHELRPLIGNRVYGCDDCQLFCPWNRFGALSEESDFAVRHGLDRASLVELFDWSAEAFRERMAGSPIYRIGYHKWLSNLAVGLGNAPTSPEVIAALRRRLDFPDELVAEPVRWALARHGVSSGD

SEQ ID NO: 75705 - protein, 358 aa, Chromobacterium haemolyticum
  misc_feature (1)..(358): tr|A0A2T5P1W8|A0A2T5P1W8_9NEIS Epoxyqueuosine reductase OS=Chromobacterium haemolyticum OX=394935 GN=queG PE=3 SV=1
MTENSLQKTDYPELARQIKAWARELGFADARIGRAGLPPEAEQKLNAWLAAGYHGEMDYMARHGSLRVKPADLVPGTLSVISLRMHYWPQARASAEVLADGGKAYLSRYALGRDYHKVLRNRLQALAERIKREIGDFGYRVFTDSAPVAEVALAAQAGLGWRGKHTLLLTKNEGSLFFLGEVFTDLPLPEDEAEDGHCGRCTRCIDVCPTAAIVAPYTVDARRCISYLTIELKRAIPEEMRPLIGNRVYGCDDCQLFCPWNRFAVDSRETDFAVRHGLDDVSLLELFAWSEAEFKEKMAGSPIYRIGYLKWLSNLAVGLGNAPTTPEVVAGLRARLDFPDEMVAEPVRWALGRHGVIV

SEQ ID NO: 75706 - protein, 358 aa, Chromobacterium haemolyticum
  misc_feature (1)..(358): tr|A0A1W0D6S6|A0A1W0D6S6_9NEIS Epoxyqueuosine reductase OS=Chromobacterium haemolyticum OX=394935 GN=queG PE=3 SV=1
MTENSLQKTDYPELARQIKAWACELGFADARIGRAGLPPEAEQKLNAWLAAGYHGEMDYMARHGSLRVKPADLVPGTLSVISLRMHYWPQARASAEVLADGGKAYLSRYALGRDYHKVLRNRLQALADRIKREIGDFGYRVFTDSAPVAEVALAAQAGLGWRGKHTLLLTKNEGSLFFLGEVFTDLPLPEDEAEDGHCGRCTRCIDVCPTAAIVAPYTVDARRCISYLTIELKRAIPEEMRPLIGNRVYGCDDCQLFCPWNRFAVDTRETDFAVRHGLDDVSLLELFAWSEAEFKEKMAGSPIYRIGYLKWLSNLAVGLGNAPTTPEVVAGLRARLDFPDEMVAEPVRWALGRHGVIV

SEQ ID NO: 75707 - protein, 358 aa, Chromobacterium sp.
  misc_feature (1)..(358): tr|A0A5C1DIG2|A0A5C1DIG2_9NEIS Epoxyqueuosine reductase OS=Chromobacterium sp. 257-1 OX=2605945 GN=queG PE=3 S V=1
MTENSPQKPDYPELSRQIKAWAREAGFADARITQAELPPEAEARLNDWLAAGYHGEMDYMARHGALRVKPAELVPGTVSVISLRMNYWPASTSAEQVLADPSRAYLSRYALGRDYHKVLRNRLQKLAERIEAAVGAFGYRVFTDSAPLAEVALASQAGLGWRGKHTLLLTKKQGSLFFLGEILTDLPLPPDAPEDGHCGRCTRCLDVCPTGAIVEPYTVDARRCISYLTIELKGAIPHELRPLIGNRVYGCDDCQLFCPWNRFGALTEEADFAVRHGLDAASLVELFDWSAEAFRERMAGSPIYRIGYAKWLSNLAVGLGNAPSSPEVLAALRRRQDYPDELVAEPVRWALARHGVSA

SEQ ID NO: 75708 - protein, 358 aa, Chromobacterium sp.
  misc_feature (1)..(358): tr|A0A2T5NMA4|A0A2T5NMA4_9NEIS Epoxyqueuosine reductase OS=Chromobacterium sp. Panama OX=2161826 GN=queG PE=3 SV=1
MTENSLQKPDYPELARQIKAWARELGFADARIGRAGLPPEAEQKLNAWLAAGHHGEMDYMARHGALRVKPADLVPGTLSVISLRMHYWPQARASAEVLADGGKAYLSRYALGRDYHKVLRNRLQALADRIKREIGEFGYRVFTDSAPVAEVALAAQAGLGWRGKHTLLLTKNEGSLFFLGEVFTDLPLPEDEAEDGHCGRCTRCIDVCPTAAIVAPYTVDARRCISYLTIELKRAIPEEMRPLIGNRVYGCDDCQLFCPWNRFAVDTRETDFAVRHGLDDVSLLELFAWSEAEFKEKMAGSPIYRIGYLKWLSNLAVGLGNAPTAPEVVAGLRARLDFPDEMVAEPVRWALGRHGVIV

SEQ ID NO: 75709 - protein, 358 aa, Chromobacterium sphagni
  misc_feature (1)..(358): tr|A0A1S1X0Y1|A0A1S1X0Y1_9NEIS Epoxyqueuosine reductase OS=Chromobacterium sphagni OX=1903179 GN=queG PE=3 SV= 1
MTENSPQKPDYPELSRQIKAWAVEAGFAAARITRASLPDEAEQRLQAWLAAGFHGEMDYMARHGSLRLRPAELVPGTLSVISLRMNYWPAARAAEQVLADPSRAYLSRYALGRDYHKVLRNRLQKLAERIQQHIGSFGFRVFTDSAPLAEVALASQAGLGWRGKHTLLLTKNQGSLFFLGEILTDLPLPADDAEDGHCGRCRKCLDVCPTGAIVEPYSVDARRCISYLTIELKGVIPQALRPLIGNRVYGCDDCQLFCPWNRFAVETAETDFAVRHGLDDASLVELFDWSADDFRERMAGSPIYRIGYHKWLSNLAVGLGNAPTSPEVIAALRRRLDFPDELVAEPVRWALSRHGESC

SEQ ID NO: 75710 - protein, 358 aa, Chromobacterium vaccinii
  misc_feature (1)..(358): tr|A0A2L2B4U4|A0A2L2B4U4_9NEIS Epoxyqueuosine reductase OS=Chromobacterium vaccinii OX=1108595 GN=queG PE=3 SV =1
MTENPPQKPDYPELSRQIKAWAREAGFADARVTRAALPPEAEQRLEAWLTAGHHGEMDYMARHGAMRVRPAELVPGTLSVISLRMNYWPGGESAEQVLADPSRAYLSRYALGRDYHKVLRNRLQKLAERIEGAVGSFGYRVFTDSAPLAEVALASQAGLGWRGKHTLLLTKRQGSLFFLGEILTDLPLPPDEAEDGHCGRCTRCLDVCPTGAIIEPYTVDARRCISYLTIELKGPIPEPLRPLIGNRVYGCDDCQLFCPWNRFGALTAEADFAVRHGLDGASLVELFDWSADEFRERMAGSPIYRIGYHKWLSNLAVGLGNAPTTPEVVAALRRRLDFPDELVAEPVRWALARHGQSC

SEQ ID NO: 75711 - protein, 358 aa, Chromobacterium vaccinii
  misc_feature (1)..(358): tr|A0A1D9LG76|A0A1D9LG76_9NEIS Epoxyqueuosine reductase OS=Chromobacterium vaccinii OX=1108595 GN=queG PE=3 SV =1
MTENPPQKPDYPELSRQIKAWAREAGFADARVTRAALPPEAEQRLEAWLAAGHHGEMDYMARHGAMRVRPAELVPGTLSVISLRMNYWPGGEPAEQVLADPSRAYLSRYALGRDYHKVLRNRLQKLAERIEGAVGSFGHRVFTDSAPLAEVALASQAGLGWRGKHTLLLTKRQGSLFFLGEILTDLPLPPDEAEDGHCGRCTRCLDVCPTGAIIEPYTVDARRCISYLTIELKGAIPEPLRPLIGNRVYGCDDCQLFCPWNRFGALTAEADFAVRHGLDGASLVELFDWSEDEFRERMAGSPIYRIGYHKWLSNLAVGLGNAPTTPEVVAALRRRLDFPDELVAEPVRWALARHGQSC

SEQ ID NO: 75712 - protein, 358 aa, Chromobacterium violaceum
  misc_feature (1)..(358): tr|A0A202BBV1|A0A202BBV1_CHRVL Epoxyqueuosine reductase OS=Chromobacterium violaceum OX=536 GN=queG PE=3 SV=1
MTENPPQKPDYPELSRQIKAWAREAGFADARVTRAALPPEAEQRLEAWLAAGHHGEMDYMARHGALRVRPAELVPGTLSVISLRMNYWPGSEPAEQVLADPSRAYLSRYALGRDYHKVLRNRLQKLAERIEGAVGSFGYRVFTDSAPLAEVALASQAGLGWRGKHTLLLTKRQGSLFFLGEILTDLPLPPDEAEDGHCGRCTRCLDVCPTGAIVEPYTVDARRCISYLTIELKGAIPEPLRPLIGNRVYGCDDCQLFCPWNRFGALTAEADFAVRHGLDCASLVELFDWSADEFRERMAGSPIYRIGYHKWLSNLAVGLGNAPTTPEVVAALRRRLDFPDELVAEPVRWALARHGQSC

SEQ ID NO: 75713 - protein, 358 aa, Chromobacterium violaceum
  misc_feature (1)..(358): tr|Q7NRG1|Q7NRG1_CHRVO Epoxyqueuosine reductase OS=Chro mobacterium violaceum (strain ATCC 12472 / DSM 30191 / JCM 1249 / NBRC 12614 / NCIMB 9131 / NCTC 9757) OX=2433 65 GN=queG PE=3 SV=1
MTENPPQKPDYPELSRQIKAWAREAGFADARVTRAALPPEAEQRLEAWLAAGHHGEMDYMARHGALRVRPAELVPGTLSVISLRMNYWPGSEPAERVLADPSRAYLSRYALGRDYHKVLRNRLQKLAERIEGAVGSFGYRVFTDSAPLAEVALASQAGLGWRGKHTLLLTKRQGSLFFLGEILTDLPLPPDEAEDGHCGRCTRCLDVCPTGAIVEPYTVDARRCISYLTIELKGAIPEPLRPLIGNRVYGCDDCQLFCPWNRFGALTAEADFAVRHGLDCASLVELFDWSADEFRERMAGSPIYRIGYHKWLSNLAVGLGNSPTTPEVVAALRRRLDFPDELVAEPVRWALARHGQSC

SEQ ID NO: 75714 - protein, 366 aa, Chromohalobacter canadensis
  misc_feature (1)..(366): tr|A0A285VJ85|A0A285VJ85_9GAMM Epoxyqueuosine reductase OS=Chromohalobacter canadensis OX=141389 GN=queG PE=3 SV=1
MSSSSPIDYAALADRIHTWGRELGFQQVGITDTDLEAHERYLERWLAAGYHGEMHFMAKHGHKRTRPEELIPGTLRVISVRMDYLPPEVETTKVLGQPERAYVSRYALGRDYHKLIRKRLATLAKRIEDEVGAYGYRAFVDSAPVMERALAQKAGLGWFGKNAMLLNPQAGSLFFLGELYTDLPLPVDAPFESEHCGKCSNCQTACPTGAIVDDKVIDSRRCISYLTIELAGSIPEEYRKAMGNRVYGCDDCQLVCPFTRFTRASQEEDFAPRHDLDRASLIRLFAWSEEEFLMRTEGSAIRRIGYERWLRNLAIGLGNAPWSERVEGALRARLAYPSDLVREHVRWGLEQQRHKREQLITSHVSA

SEQ ID NO: 75715 - protein, 366 aa, Chromohalobacter japonicus; identical to SEQ ID NO: 75714
  misc_feature (1)..(366): tr|A0A1Q8TH51|A0A1Q8TH51_9GAMM Epoxyqueuosine reductase OS=Chromohalobacter japonicus OX=223900 GN=queG PE=3 S V=1

SEQ ID NO: 75716 - protein, 366 aa, Chromohalobacter marismortui
  misc_feature (1)..(366): tr|A0A4R7NVJ2|A0A4R7NVJ2_9GAMM Epoxyqueuosine reductase OS=Chromohalobacter marismortui OX=42055 GN=queG PE=3 SV=1
MSSSSPIDHAALADRIHTWGRELGFQQVGITDTDLAAHERYLERWLAAGYHGEMHFMAKHGHKRTRPEELIPGTLRVISVRMDYLPPEVETTKVLGQPERAYVSRYALGRDYHKLIRKRLATLAKRIEDEVGAYGYRAFVDSAPVMERALAQKAGLGWFGKNAMLLNPQAGSLFFLGELYTDLPLPVDAPFESEHCGKCSRCQTACPTGAIVDDKVIDSRRCISYLTIELAGSIPEEYRKAMGNRVYGCDDCQLVCPFTRFTRASQEEDFAPRHDLDRASLIRLFAWSEEEFLMRTEGSAIRRIGYERWLRNLAIGLGNAPWSERVEGALRARLAYPSDLVREHVRWGLEQQRHKREQLIVSHVDA

SEQ ID NO: 75717 - protein, 374 aa, Chromohalobacter salexigens
  misc_feature (1)..(374): tr|A0A4Q0HL75|A0A4Q0HL75_CHRSL Epoxyqueuosine reductase OS=Chromohalobacter salexigens OX=158080 GN=queG PE=3 SV=1
MSSSAPTDYAALADRIHTWGRELGFQQVGITDTDLAAHERYLERWLAAGYHGEMHFMAKHGSKRTRPEELVPGTLRVVSVRMDYLPPEVETTKVLGQPERAYISRYALGRDYHKLIRKRLATLAKRIEDEVGAYGYRAFVDSAPVMERALAQKAGLGWFGKNAMLLNPQAGSLFFLGELYTDLPLPVDAPFDSEHCGKCSRCQTACPTGAIVDDKVIDSRRCISYLTIELAGSIPEEYREAMGNRVYGCDDCQLVCPFTRFTRVSREDDFAPRHDLDRASLVRLFAWSEEEFLARTEGSAIRRIGYERWLRNLAIGLGNAPWSDQVESALRARLAYPSDLVREHVRWGLEQQRRKRERRIASDVDAPAAPERSA

SEQ ID NO: 75718 - protein, 374 aa, Chromohalobacter salexigens
  misc_feature (1)..(374): tr|Q1QY32|Q1QY32_CHRSD Epoxyqueuosine reductase OS=Chro mohalobacter salexigens (strain DSM 3043 / ATCC BAA-138 / NCIMB 13768) OX=290398 GN=queG PE=3 SV=1
MSSSAPIDYAALADRIHTWGRELGFQQVGITDTDLAAHERYLERWLAAGYHGEMHFMAKHGSKRTRPEELVPGTLRVVSVRMDYLPPEVETTKVLGQPERAYISRYALGRDYHKLIRKRLATLAKRIEDEVGAYGYRAFVDSAPVMERALAQKAGLGWFGKNAMLLNPQAGSLFFLGELYTDLPLPVDAPFDSEHCGKCSRCQTACPTGAIVDDKVIDSRRCISYLTIELAGSIPEEYREAMGNRVYGCDDCQLVCPFTRFTRVSREDDFAPRHDLDRASLVRLFAWSEEEFLARTEGSAIRRIGYERWLRNLAIGLGNAPWSDQVESALRARLAYPSDLVREHVRWGLEQQRRKRERRIASDVDAPAAPERSA

SEQ ID NO: 75719 - protein, 314 aa, Chroococcales cyanobacterium
  misc_feature (1)..(314): tr|A0A2G7GIU6|A0A2G7GIU6_9CHRO Epoxyqueuosine reductase OS=Chroococcales cyanobacterium IPPAS B-1203 OX=204945 4 GN=queG PE=3 SV=1
MDTSWIKQKALELGFHRVGIASVDDDATESQRLQAWLALGYQADMAWMANPKRQNIQLVMPDVRSLICVALNYYTPHQRPLDPKYAKLSRYGWGRDYHKVLHKKLKLLSHWLEAQIQGIQVRYYADTGPVQDKVWAQKAGIGWIAKNGNVITREYGSWVFLGEILTNLNLTPDRPHTEHCGNCTRCIDACPTGAITQPFVVDANRCIAYHTIENRSEKLPEAVASQLNGWVAGCDICQDVCPWNQRFAKETDVAEFQPYPWNIAPTLAELAEISDTEWNKQFPASALRRIKPEMLRRNAKANLQGTARMSTSQQ

SEQ ID NO: 75720 - protein, 315 aa, Chroococcales cyanobacterium
  misc_feature (1)..(315): tr|A0A3N5IKL6|A0A3N5IKL6_9CHRO Epoxyqueuosine reductase OS=Chroococcales cyanobacterium metabat2.561 OX=248578 5 GN=queG PE=3 SV=1
MVTETQIKEKALELGFHGVGIASVDSQDSAVSHLKSWLERGYHADMDWMTNPKRQNIKTLWPEVRSLICLALNYYTPQQHSQEQNHGKISRYAWGRDYHKVLSKKLKALSQWLESQGEQIQTRYYVDTGPVQDKVWAQRAGIGWIAKNGNLITRNYGSWVFLGEILTNLPLEPDRPHSAHCGTCSRCLSACPTQAIVSPSVVDANRCIAYHTIENRAVTLPTEIAKNLQGWVAGCDICQDVCPWNQRFAQVTDVEDFQPRPENLSPRLEELANLTIEEWDRRFISSALRRIKPQQWRRNAQANLAHSPNPVQDDN

SEQ ID NO: 75721 - protein, 319 aa, Chroococcidiopsis cubana
  misc_feature (1)..(319): tr|A0A433W0V1|A0A433W0V1_9CYAN Epoxyqueuosine reductase OS=Chroococcidiopsis cubana SAG 39.79 OX=388085 GN=que G PE=3 SV=1
MTNLTSDQIKQKALELGFHKVGIAAVEAVGTAERQRLQAWLQLGYQADMAWMANPKREDIRLVMPEVRSLICVALNYYTPHQHSTDPTNAKISRYGWGRDYHKVLYKKLKALSQWLRSQAADIQTRFYADTGPIQDKAWAQQAGIGWIAKNGNVITREYGSWVFLGEVLTDLVLTPDRPHTQHCGNCTRCIEACPTQAITQPFVVDANRCIAYHTIENRAEKLPEAIASRLDGWVAGCDICQDVCPWNQRFARTTDINEFHPYAHNLAPKLTELATIEDGEWDRRFTGSALRRVKPEMLRRNARANLESSATIVYSDSL

SEQ ID NO: 75722 - protein, 316 aa, Chroococcidiopsis sp.
  misc_feature (1)..(316): tr|A0A2S6VGN3|A0A2S6VGN3_9CYAN Epoxyqueuosine reductase OS=Chroococcidiopsis sp. TS-821 OX=1378066 GN=queG PE= 3 SV=1
MSIDTTRIKQKALELGFHRVGIAAVEDGMTNSQHLQAWLALGYQADMAWMANPKRQDIKLVMPDVRSLICVALNYYTPHQRPQEAKYAKISRYGWGRDYHKVLHKKLKSLSTWLEAQAEGIKARYYADTGPVQDKVWAQKAGIGWIAKNGNVITREYGSWVFLGEVLTNLSLTPDQPHTQHCGTCTRCLEACPTGAIAQPFVVDANRCIAYHTIENRSEKLPDAVAAQLHGWVAGCDICQDVCPWNQRFAKETDVAEFQPYSWNIAPTLAELAEISDAEWNKRFPASALRRIKPEMLRRNAKANLQGAANMSTSQQ

SEQ ID NO: 75723 - protein, 345 aa, Chroococcidiopsis thermalis
  misc_feature (1)..(345): tr|K9U246|K9U246_CHRTP Epoxyqueuosine reductase OS=Chro ococcidiopsis thermalis (strain PCC 7203) OX=251229 GN= queG PE=3 SV=1
MKQLSVISRELRELREQELSTNNHQPMTNLTSDQIKQKALELGFHKVGIAAVEAVGTAERQRLQAWLQLGYQADMAWMANPKREDIRLVMPEVRSLICVALNYYTPHQHSTDPTNAKISRYGWGRDYHKVLHKKLKALSQWLRSQAADIQTRFYADTGPIQDKAWAQQAGIGWIAKNGNVITREYGSWVFLGEVLTDLVLTPDRPHTQHCGNCTRCIEACPTQAITQPFVVDANRCIAYHTIENRAEKLPEAIASRLDGWVAGCDICQDVCPWNQRFARTTDINEFHPYAHNLAPKLTELATIEDGEWDRRFTGSALRRVKPEMLRRNARANLESSATIVYSDSL

SEQ ID NO: 75724 - protein, 316 aa, Chroogloeocystis siderophila
  misc_feature (1)..(316): tr|A0A1U7HV15|A0A1U7HV15_9CHRO Epoxyqueuosine reductase OS=Chroogloeocystis siderophila 5.2 s.c.1 OX=247279 GN =queG PE=3 SV=1
MSIDTTQIKQKALELGFHQVGIAAVDQGVTEPQYLQAWLALGYQADMAWMANPKRQDIKLVMPDVRSLICVAINYYTPHQRPQEAKYAKISRYGWGRDYHKVLHKKLKLFSTWLEAQAEGIKARYYADTGPVQDKVWAQQAGIGWIAKNGNVITRKYGSWVFLGEVLTNLSLIPDQPHTEHCGTCTRCLDACPTDAIAQPFIVDANRCIAYHTIENRSEELPDAVAAQLHGWVAGCDICQDVCPWNQRFAKETDVVEFQPYPWNISPTLAELAEISDAEWDKRFPASALRRIKPEMLRRNAKANLQGAAIMSTSQQ

SEQ ID NO: 75725 - protein, 315 aa, Chryseobacterium angstadtii
  misc_feature (1)..(315): tr|A0A0J7I304|A0A0J7I304_9FLAO Epoxyqueuosine reductase OS=Chryseobacterium angstadtii OX=558151 GN=queG PE=3 SV=1
MLNSGAEKNSQLIKSKAERFGFQSCGISKAEFLEEDAPNLEKWLKNNFHGEMKYMENHFDKRLDPRLLVEGSKSVISLSYNYFPEEKISALENYKISKYAYAEDYHEVVKEILREMVAELQEEIGEFGFRVFVDSAPVLERSWARKSGIGWVGKNANLITKQNGSFYFLAEIICDLELIPDHATTDHCGTCRKCIDACPTDAIVSEKIIDGSRCISYATIELKNEIPDHFKNRMEDWMFGCDICQDVCPWNRFSAPNLQSRFAPNESLKNFKKEEWREITQEIFSEIFRKSPVKRTKFAGLKRNIEFLERSSDVD

SEQ ID NO: 75726 - protein, 318 aa, Chryseobacterium antarcticum
  misc_feature (1)..(318): tr|A0A3S4WQT4|A0A3S4WQT4_9FLAO Epoxyqueuosine reductase OS=Chryseobacterium antarcticum OX=266748 GN=queG PE=3 SV=1
MQSMLQSPEFNSNLIKAKAKKFGFQNCGISRADFLEEDARPFESWLKHNYQGEMSYMENYFDKRLDPRRLVEGSKSVISLSYNYFPEKNLANLGNLKISKYAYGEDYHEIIKEILREMVAELKDEIGDIECRVFTDSAPILERSWARKSGIGWVGKNANLITKQTGSFYFLAEIICDLELVEDYETTDHCGSCRKCIDACPTDAIVADRVIDGSKCISYATIELKNEIPAHFKGKMEDWMFGCDICQDVCPWNRFSKPHQQEKFKPNSLLQNLEKSDWQELSQELFSEIFRKSPVKRTKFAGLKRNIEFLTDSKTSNF

SEQ ID NO: 75727 - protein, 310 aa, Chryseobacterium aquaticum
  misc_feature (1)..(310): tr|A0A0Q3SHT3|A0A0Q3SHT3_9FLAO Epoxyqueuosine reductase OS=Chryseobacterium aquaticum OX=452084 GN=queG PE=3 S V=1
MNSTAEKYTQLIKTKAKSFGFQNCGVSKAGFLEEDAPHLEKWLKNNFHGEMKYMENHFDKRLDPRLLVEGSKSVISLSYNYFPEEKISTLENFKISKYAYAEDYHEVIKEILRDMVSELQQEIGDFSFRVFVDSAPVLERSWAKKSGIGWVGKNANLITKQSGSFYFLAEIICDLELISDSETTDHCGTCRKCIDACPTDAIVSDKIIDGSKCISYATIELKEEIPDYFKNKMEDWMFGCDICQDVCPWNRFSAPNLQSRFKPNEFLKNFKKREWKELTQEIFSEIFRKSPVKRTKFAGLKRNIEFLDKS

SEQ ID NO: 75728 - protein, 312 aa, Chryseobacterium aquifrigidense
  misc_feature (1)..(312): tr|A0A543EFX2|A0A543EFX2_9FLAO Epoxyqueuosine reductase OS=Chryseobacterium aquifrigidense OX=558021 GN=queG P E=3 SV=1
MNAGAEKYSELIKSKAKSFGFQSCGISRADFLEEDAPHLEKWLKNNYNGEMKYMENHFDKRLDPRLLVEGSKSVISLSYNYFPEEKISVLENFKISKYAYAEDYHEVIKEILREMVAELQEEIGEFGFRVFVDSAPVMERAWAKKSGIGWVGKNANLITKQSGSFYFLAEIICDLELIPDHATTDHCGSCRKCIDACPTDAIVSEKIIDGSRCISYATIELKNEIPDYFKDKMEDWMFGCDICQDVCPWNRFSAPNKQSRFQPNEALKNFKKGEWKELTQEIFSEIFRKSPVKRTKFAGLKRNIEFLQKSSD

SEQ ID NO: 75729 - protein, 308 aa, Chryseobacterium arachidiradicis
  misc_feature (1)..(308): tr|A0A420DAP6|A0A420DAP6_9FLAO Epoxyqueuosine reductase OS=Chryseobacterium arachidiradicis OX=1617282 GN=queG PE=3 SV=1
MSSKEKYSNLIKSKALAFGFQSCGISKADFLEEEAPHLEQWLRNNFHGEMKYMENYFDKRLDPRLLVEGSKSVISLSYNYFPGEVQTNQDYKLAKYAYGEDYHEVIKEKLRKLVAELQQEIGEFSFRIFVDSAPVLEKAWAKKSGIGWVGKNSNLITKKNGSFYFLAEIICDLDLIEDYPVTDHCGSCTKCIDACPTQAIISDKIIDGSKCISYATIELKDQIPDFFRNKMEDWVFGCDICQDVCPWNRFSAPTLEEKFKPNSEIKNFTKQEWKDITQEVFSSVFRKSAVKRTKFAGLKRNLDFLSEE

SEQ ID NO: 75730 - protein, 312 aa, Chryseobacterium arachidis
  misc_feature (1)..(312): tr|A0A1M5JUN9|A0A1M5JUN9_9FLAO Epoxyqueuosine reductase OS=Chryseobacterium arachidis OX=1416778 GN=queG PE=3 SV=1
MNSNAEKYSQLIKSKAKSFGFQSCGISKADFLEEDAKPLEAWLKNNFHGEMKYMENYFDKRLDPRLLVEGSKSVISLSYNYFPEEKISTIENFKISKYAYAEDYHEVIKDILREMVAELQEEIGEFGFRVFVDSAPVLERSWARKSGIGWVGKNANLITKQNGSFYFLAEIICDLELIADHETTNHCGTCRKCIDACPTNAIISEKLVDGSKCISYATIELKDAIPDYFKDKMDDWMFGCDVCQDVCPWNRFSAPNLQSKFSPNEALKNFKKGEWRELTQELFSEIFRKSPVKRTKFAGLKRNIEFLEKSSE

SEQ ID NO: 75731 - protein, 312 aa, Chryseobacterium arthrosphaerae
  misc_feature (1)..(312): tr|A0A1B8ZMV6|A0A1B8ZMV6_9FLAO Epoxyqueuosine reductase OS=Chryseobacterium arthrosphaerae OX=651561 GN=queG P E=3 SV=1
MNAGAEKYTQLIKSKAKSFGFQSCGVSKADFLEEDAPHLEKWLKNNFNGEMKYMENHFDKRLDPRLLVEGSRSVISLSYNYFPEEKIPILENYKISKYAYAEDYHEVIKEILREMVAELQEEIGEFGFRVFVDSAPVLERSWARKSGIGWVGKNANLITRQNGSFYFLAEIICDLELIPDHATTDHCGTCRKCIDACPTDAIVSEKIIDGSRCISYATIELKNEIPDHFKGKMEDWMFGCDICQDVCPWNRFSAPHKQSRFKPNEALKNFTKGEWKDLTQEIFSEIFRKSPVKRTKFTGLKRNIEFLNNSSD

SEQ ID NO: 75732 - protein, 312 aa, Chryseobacterium artocarpi
  misc_feature (1)..(312): tr|A0A1B8ZXZ6|A0A1B8ZXZ6_9FLAO Epoxyqueuosine reductase OS=Chryseobacterium artocarpi OX=1414727 GN=queG PE=3 SV=1
MNAGAEKYSQLIKSKAKSFGFQSCGISKADFLEEDAAHLEKWLKNNFNGEMKYMENHFDKRLDPRLLVEGSKSVISLSYNYFPEEKISILENFKISKYAYAEDYHEVIKEILREMVAELQEEIGEFGFRVFVDSAPILERSWARKSGIGWVGKNANLITKQNGSFYFLAEIICDLELIPDHETTDHCGTCRKCIDACPTDAIVSEKIIDGSRCISYATIELKNEIPDSFKDKMEDWMFGCDICQDVCPWNRFSAPHQQSRFKPNEALKNFKKGEWKDLTQEIFSEIFKKSPVKRTKFAGLKRNIEFLQKSSD

SEQ ID NO: 75733 - protein, 314 aa, Chryseobacterium balustinum
  misc_feature (1)..(314): tr|A0A3G6TM77|A0A3G6TM77_9FLAO Epoxyqueuosine reductase OS=Chryseobacterium balustinum OX=246 GN=queG PE=3 SV= 1
MNSTAEKYSQLIKSKAKSFGFQNCGISKADFLEEDAHHLEKWLKNNFHGEMKYMENHFDKRLDPRLLVEGSKSVISLSYNYFPEEKISALENFKISKYAYAEDYHEVVKEILRDMVSELQKEIGDFEFRVFVDSAPVLERSWAKKSGIGWVGKNANLITKQSGSFYFLAEIICDLDLISDHETTDHCGSCRKCIDACPTDAIVSEKIVDGSRCISYATIELKTEIPDYFKDKMEDWMFGCDICQDVCPWNRFSAPNIQAKFKPNEALKNFKKGEWKELTQEIFSEIFRKSPVKRTKFAGLKRNIEFLNQSSKEL

SEQ ID NO: 75734 - protein, 312 aa, Chryseobacterium bernardetii
  misc_feature (1)..(312): tr|A0A3G6TH43|A0A3G6TH43_9FLAO Epoxyqueuosine reductase OS=Chryseobacterium bernardetii OX=1241978 GN=queG PE= 3 SV=1
MNAGAEKYSELIKSKAKSFGFQNCGISKADFLEEDAPHLEKWLKNNFNGEMKYMENHFDKRLDPRLLVEGSKSVISLSYNYFPEEKISVLENFKISKYAYAEDYHEVIKEILREMVAELQEEIGEFGFRVFVDSAPVLERSWARKSGIGWVGKNANLITKQNGSFYFLAEIICDLELIVDHETTDHCGTCRKCIDACPTDAIVSEKIIDGSRCISYATIELKNEIPDHFKNKMEDWMFGCDICQDVCPWNRFAAPHKQSRFKPNEALKNFKKGEWKELTQEIFSEIFRKSPVKRTKFAGLKRNIEFLDRSSD

SEQ ID NO: 75735 - protein, 307 aa, Chryseobacterium bovis
  misc_feature (1)..(307): tr|A0A1U7PXP6|A0A1U7PXP6_9FLAO Epoxyqueuosine reductase OS=Chryseobacterium bovis DSM 19482 OX=1121284 GN=queG PE=3 SV=1
MNLQEKYSRLIKSKASAFGFQSCGISKADFLAEEAPRLEKWLRNGFHGKMGYMENHFDKRLDPRLLVEGARSVISLSYNYFPEKEQNPGNYKIAKYAYGEDYHDVIKEKLRHLVSELQDEVGEFGFRVFVDSAPVLEKAWARKSGIGWVGKNSNLITKQHGSFYFLAEIICDLDLSEDSPVTDHCGSCTRCIDACPTQAIVSDKIIDGSRCISYATIELKDQIPDSFKDKMEDWMFGCDICQNVCPWNRFSAPTLEEKFRPKPAIIDFTKQDWKEITQEIFSSVFKGSAVKRTKFAGLKRNLDFLSE

SEQ ID NO: 75736 - protein, 314 aa, Chryseobacterium carnipullorum
  misc_feature (1)..(314): tr|A0A3G6M969|A0A3G6M969_9FLAO Epoxyqueuosine reductase OS=Chryseobacterium carnipullorum OX=1124835 GN=queG P E=3 SV=1
MNSSAEKYSQLIKSKAERFGFQSCGISKAEFLEEDAPNLEKWLKNNFHGEMKYMENHFDKRLDPRLLVEGSRSVISLSYNYFPKEKISALENYKISKYAYAEDYHEVVKEILREMVSELQDEIGAFGFRVFVDSAPVMERSWARKSGIGWVGKNANLITRQNGSFYFLAEIICDLELVPDHATTDHCGTCRKCIDACPTDAIVSEKIIDGSRCISYATIELKNEIPDHFKDKMEDWMFGCDICQDVCPWNRFAAPNKQSRFAPNESLKNFKKEEWKEITQEIFSEIFRKSPVKRTKFAGLKRNIEFLEGSSGKI

SEQ ID NO: 75737 - protein, 317 aa, Chryseobacterium carnipullorum
  misc_feature (1)..(317): tr|A0A1M7LCB6|A0A1M7LCB6_9FLAO Epoxyqueuosine reductase OS=Chryseobacterium carnipullorum OX=1124835 GN=queG P E=3 SV=1
MKILNSSAEKYSQLIKSKAERFGFQSCGISKAEFLEEDAPNLEKWLKNNFHGEMKYMENHFDKRLDPRLLVEGSRSVISLSYNYFPKEKISALENYKISKYAYAEDYHEVVKEILREMVSELQDEIGAFGFRVFVDSAPVMERSWARKSGIGWVGKNANLITRQNGSFYFLAEIICDLELVPDHATTDHCGTCRKCIDACPTDAIVSEKIIDGSRCISYATIELKNEIPDHFKDKMEDWMFGCDICQDVCPWNRFAAPNKQSRFAPNESLKNFKKEEWKEITQEIFSEIFRKSPVKRTKFAGLKRNIEFLEGSSGKI

SEQ ID NO: 75738 - protein, 319 aa, Chryseobacterium carnis
  misc_feature (1)..(319): tr|A0A3G8XFU7|A0A3G8XFU7_9FLAO Epoxyqueuosine reductase OS=Chryseobacterium carnis OX=1241979 GN=queG PE=3 SV= 1
MLQNAENYANLIKTKAKKFGFQNCGISRAGFLEEDAKPLERYLQNNFHGEMSYMANYFDKRLDPTLLVEGAKSVISLSYNYFPEEKIAGIEDLKISKYAYGQDYHEIIKEILKEMVAELQDEIGDFTCRVFTDSAPILERSWGRKSGIGWVGKNANLITKQTGSFYFLAEIICDLELKEDFATTDHCGSCRKCIDACPTEAIVGDRVIDGSKCISYATIELKNEIPDHFKGKMEDWIFGCDICQDVCPWNRFSKPHQQEKFKPNPLLKSMNKHEWTDLTQEVFSEIFKKSPVKRTKFAGLKRNIDFINQGIKNDTDLIL

SEQ ID NO: 75739 - protein, 311 aa, Chryseobacterium chaponense
  misc_feature (1)..(311): tr|A0A1N7K4L5|A0A1N7K4L5_9FLAO Epoxyqueuosine reductase OS=Chryseobacterium chaponense OX=713588 GN=queG PE=3 SV=1
MKSTTEKYSTLIKAKAKKFGFQNCGISKAGFLESDAAALEKWLKNDYHGKMSYMENHFDKRLDPTVLVEGSRSVISLSYNYFPDEKLPSLNAFKISKYAYGEDYHVIIKEILQEMVAELKEEIGDFECRVFTDSAPILERSWARKSGIGWVGKNANLITKQSGSFYFLAEIICDLELIEDHETTDHCGTCTKCIEACPTNAIISDKIIDGSKCISYATIELKNEIPESFTNKMEDWMFGCDICQDVCPWNRFSSPHLQERFKPNALLKTYQKEDWKELTQELFSEIFRKSPVKRTKFAGLERNIAFLSNKE

SEQ ID NO: 75740 - protein, 312 aa, Chryseobacterium contaminans
  misc_feature (1)..(312): tr|A0A1M7BAY9|A0A1M7BAY9_9FLAO Epoxyqueuosine reductase OS=Chryseobacterium contaminans OX=1423959 GN=queG PE= 3 SV=1
MNAGAEKYSELIKSKAKSFGFQSCGISKADFLEEDAPHLEKWLKNNFNGEMKYMENHFDKRLDPRLLVEGSKSVISLSYNYFPEEKISVLENFKISKYAYAEDYHEVIKEILREMVAELQEEIGEFGFRVFVDSAPVLERSWARKSGIGWVGKNANLITKQNGSFYFLAEIICDLELIADHETTDHCGTCRKCIDACPTDAIVSEKIIDGSKCISYATIELKNEIPDHFKNKMEDWMFGCDICQDVCPWNRFSAPNKQSRFQPNEALKNFKKGEWKELTQEIFSEIFRKSPVKRTKFAGLKRNIEFLERSSD

SEQ ID NO: 75741 - protein, 312 aa, Chryseobacterium culicis
  misc_feature (1)..(312): tr|A0A1H6HNK7|A0A1H6HNK7_9FLAO Epoxyqueuosine reductase OS=Chryseobacterium culicis OX=680127 GN=queG PE=3 SV= 1
MRSDAEKYSQLIKSKAKSFGFQNCGISKADFLEEEAPRLEKWLKNNYNGEMKYMENHFDKRLDPRLLVEGSKSVISLSYNYFPEEKISILENYKISKYAYAEDYHEVIKEILREMVAELQEEIGEFGFRVFVDSAPVLERAWAKKSGIGWVGKNANLITKQSGSFYFLAEIICDLELIPDHATTDHCGSCRKCIDACPTDAIVSEKIIDGSRCISYATIELKDEIPAYFKNKMEDWMFGCDICQDVCPWNRFSAPNKQSRFQPNEALKNFKKGEWKELTQEIFSEIFRKSPVKRTKFAGLKRNIEFLQQSSD

SEQ ID NO: 75742 - protein, 312 aa, Chryseobacterium culicis
  misc_feature (1)..(312): tr|A0A2S9CMQ5|A0A2S9CMQ5_9FLAO Epoxyqueuosine reductase OS=Chryseobacterium culicis OX=680127 GN=queG PE=3 SV= 1
MNAAAEKYSQLIKSKAKSFGFQNCGISKADFLEEEAPRLEKWLKNNFNGEMKYMENHFDKRLDPRLLVEGSKSVISLSYNYFPEEKISILENYKISKYAYAEDYHEVIKEILREMVAELQEEIGEFGFRVFVDSAPVLERAWAKKSGIGWVGKNANLITKQSGSFYFLAEIICDLELIPDHATTDHCGSCRKCIDACPTDAIVSEKIIDGSRCISYATIELKDEIPSHFKDKMEDWMFGCDICQDVCPWNRFSAPNKQSRFQPNEALKNFKKGEWKEITQEIFSEIFRKSPVKRTKFAGLKRNIEFLQKSSD

SEQ ID NO: 75743 - protein, 313 aa, Chryseobacterium daecheongense
  misc_feature (1)..(313): tr|A0A3N0W129|A0A3N0W129_9FLAO Epoxyqueuosine reductase OS=Chryseobacterium daecheongense OX=192389 GN=queG PE =3 SV=1
MNSIAATYSQLIKSKAKKFGFQDCGISKADFLEEDAQHLESWLKNNFHGEMKYMENYFDKRLDPRLLVEGSQSVISLSYNYFPKEKISTLENYKISKYAYAEDYHEVIKEILCEMVAELQEEIGDFGFRVFVDSAPVLERSWARKSGIGWVGKNANLITKQSGSFYFLAEIICDLELIPDHETTDHCGTCRKCIEACPTDAIVSDKIIDGSKCISYATIELKNEIPEHFKNKMEDWMFGCDICQDVCPWNRFSSPNLQSRFTPNAFLKNFKKGEWKELTQELFSEIFKKSPVKRTKFAGLKRNIEFLEQSSGQ

SEQ ID NO: 75744 - protein, 313 aa, Chryseobacterium defluvii
  misc_feature (1)..(313): tr|A0A495SCD1|A0A495SCD1_9FLAO Epoxyqueuosine reductase OS=Chryseobacterium defluvii OX=160396 GN=queG PE=3 SV =1
MNSNAGKYSQLIKSKAIKFGFQDCGISKADFLEEDAHHLETWLKNNFHGEMKYMENYFDKRLDPRLLVEGSRSVISLSYNYFPKEKIPTLENFKISKYAYAEDYHEVIKEILREMVAELQDEIGDFGFRVFVDSAPVLERSWARKSGIGWVGKNANLITKQSGSFYFLAEIICDLELIPDHETTDHCGTCTKCMDACPTEAIISDKIIDGSKCISYATIELKNEIPEYFRNKMEDWMFGCDICQDVCPWNRFSSPNLQSRFTPNEALKNFKKGEWKELTQELFSEIFRKSPVKRTKFAGLKRNIEFLERFSGK

SEQ ID NO: 75745 - protein, 317 aa, Chryseobacterium elymi
  misc_feature (1)..(317): tr|A0A3D9DFI3|A0A3D9DFI3_9FLAO Epoxyqueuosine reductase OS=Chryseobacterium elymi OX=395936 GN=queG PE=3 SV=1
MEILNGSAEKYSQLIKSKAEHFGFQSCGISKAGFLEEDAPNLEKWLQNNFHGEMKYMENHFDKRLDPRLLVEGSKSVISLSYNYFPKEEISALENYKISKYAYAEDYHEVVKEILREMVSELQQEIGEFGFRVFVDSAPILERSWARKSGIGWVGKNANLITKQNGSFYFLAEIICDLELVPDHATTDHCGTCRKCIDACPTDAIVSEKIIDGSRCISYATIELKNEIPDHFKDKMEDWMFGCDICQDVCPWNRFSSPNLQSRFAPNESLKNFKKEEWREITQEIFSEIFRKSPVKRTKFAGLKRNIEFLERSSDKL

SEQ ID NO: 75746 - protein, 314 aa, Chryseobacterium flavum
  misc_feature (1)..(314): tr|A0A3D9CGG2|A0A3D9CGG2_9FLAO Epoxyqueuosine reductase OS=Chryseobacterium flavum OX=415851 GN=queG PE=3 SV=1
MSTGAEKYTQLIKSKAKSFGFQSCGISKADFLEEDALHLEKWLKNNFHGEMKYMENHFDKRLDPRLLVEGSKSVISLSYNYFPKEKISVLENYKISKYAYAEDYHEVIKEILREMVAELQDEIGEFGFRVFVDSAPVLERSWARKSGIGWVGKNANLITRQNGSFYFLAEIICDLELVPDHETTDHCGTCRKCIDACPTDAIVSEKIIDGSRCISYATIELKSEIPDYFKDKMEDWMFGCDICQDVCPWNRFSAPNKQSRFQPNEALKNFKKGEWKELTQEIFSEIFRKSPVKRTKFTGLKRNIEFLEKSSGQI

SEQ ID NO: 75747 - protein, 318 aa, Chryseobacterium formosense
  misc_feature (1)..(318): tr|A0A085Z793|A0A085Z793_9FLAO Epoxyqueuosine reductase OS=Chryseobacterium formosense OX=236814 GN=queG PE=3 SV=1
MNSTAEKYSQLIKSKAKSFGFQNCGISKADFLEEDARHLEKWLKNNYHGEMKYMENHFDKRLDPRLLVEGSKSVISLSYNYFPEEKISALENYKISKYAYAEDYHEVVKEILRELVAELQTEIGEFNFRVFVDSAPVMERSWAKKSGIGWVGKNANLITKQSGSFYFLAEIICDLDLVSDHETTDHCGSCRKCIDACPTDAIVSEKIVDGSKCISYATIELKNEIPDYFKDRMEDWMFGCDICQDVCPWNRFSAPNLQNKFKPNDSLKNFKKGEWKELTQEMFSEIFRKSPVKRTKFAGLKRNIEFLNRSSDKNSEIL

SEQ ID NO: 75748 - protein, 310 aa, Chryseobacterium frigidisoli
  misc_feature (1)..(310): tr|A0A1I3IS98|A0A1I3IS98_9FLAO Epoxyqueuosine reductase OS=Chryseobacterium frigidisoli OX=1125876 GN=queG PE= 3 SV=1
MLQNQQKYSDLIKQKALKFGFQSCGISKAEFLEDDAKPLENWLKNNYHGEMQYMENYFDKRLDPTLLVEGSKSVISLSYNYFPEEKIDSLDNFKISKYAYAEDYHEIIKDILKDLVTVLQEEIGAFHCRIFVDSAPVLERSWARKSGIGWVGKNANLITKQNGSFYFLAEIICDLDLIADHETIDHCGTCRKCIDACPTDAIISDKIIDGNKCISYATIELKNEIPESFKGKMEDWMFGCDICQDVCPWNRFSKPNLQEKFQPNSYLKDFKKENWQELSQDLFFEIFRKSPVKRTKFAGLERNIKFLMEK

SEQ ID NO: 75749 - protein, 314 aa, Chryseobacterium gallinarum
  misc_feature (1)..(314): tr|A0A0G3M659|A0A0G3M659_9FLAO Epoxyqueuosine reductase OS=Chryseobacterium gallinarum OX=1324352 GN=queG PE=3 SV=1
MNPTAEKYSLLIKSKAKSFGFQNCGISKADFLEEDAPRLEQWLKNNFNGEMKYMENHFDKRLDPRLLVEGSKSVISLSYNYFPEEKLPVLENYKISKYAYAEDYHEVIKEILREMVAELQDEIGEFGFRVFVDSAPVLERSWARKSGIGWVGKNANLITKQNGSFYFLAEIICDLELIPDHETTDHCGTCRKCIDACPTDAIVSEKIIDGSRCISYATIELKNDIPGYFKDKMEDWMFGCDICQDVCPWNRFSAPHQQSRFKPNEALKNFKKGEWKELTQEIFSEIFRKSPVKRTKFAGLKRNIEFLEQSSIKS

SEQ ID NO: 75750 - protein, 314 aa, Chryseobacterium gambrini
  misc_feature (1)..(314): tr|A0A1N7QKL6|A0A1N7QKL6_9FLAO Epoxyqueuosine reductase OS=Chryseobacterium gambrini OX=373672 GN=queG PE=3 SV =1
MTSNAEKYTQLIKSKAKSFGFQNCGISKADFLEEDAKPLENWLKNNFHGEMKYMENHFDKRLDPRLLVEGSRSVISLSYNYFPEEKISTLENFKISKYAYAEDYHEVIKDILRSMVAELQEEIGEFGFRVFVDSAPVLERSWARKSGIGWVGKNANLITRQSGSFYFLAEIICDLELVADHPVTDHCGTCRKCIDACPTNAIVSEKLIDGSKCISYATIELKDSIPDYFQDKMDDWMFGCDVCQDVCPWNRFSLPHQQTKFKPNQALKNFKKGEWKELTQELFSEIFRKSPVKRTKFAGLKRNIEFLEKSSEKK

SEQ ID NO: 75751 - protein, 314 aa, Chryseobacterium geocarposphaerae
  misc_feature (1)..(314): tr|A0A2M9BXM3|A0A2M9BXM3_9FLAO Epoxyqueuosine reductase OS=Chryseobacterium geocarposphaerae OX=1416776 GN=que G PE=3 SV=1
MNSTAEKYSQLIKTKAKSFGFQNCGISKADFLEEDAPNLEKWLKNNFHGEMKYMENHFDKRLDPRLLVEGSKSVISLSYNYFPEEKISALENFKISKYAYAEDYHEVIKEILREMVTELQEEIGEFGFRVFVDSAPVLERSWARKSGIGWVGKNANLITKQSGSFYFLAEIICDLELIPDHPVTDHCGSCRKCIDACPTNAIISEKIIDGSKCISYATIELKNEIPDYFKDKMDDWMFGCDVCQDVCPWNRFSAPHQQTKFKPNEALKNFKKGEWKELTQELFSEIFRKSPVKRTKFAGLKRNIEFLDQSEEKK

SEQ ID NO: 75752 - protein, 314 aa, Chryseobacterium glaciei
  misc_feature (1)..(314): tr|A0A172XRH1|A0A172XRH1_9FLAO Epoxyqueuosine reductase OS=Chryseobacterium glaciei OX=1685010 GN=queG PE=3 SV =1
MNSNAEKYSQLIKSKAKRFGFQSYGISKADFLEEDARNLENWLKNNFHGEMKYMENYFDKRLDPRLLVEGSKSVISLSYNYFPKEKISTLENYKISKYAYAEDYHEVVKEILREMVDELREEIGDFDCRVFVDSAPVLERSWARKSGIGWVGKNANLITKQNGSFYFLAEIICDLELIPDHETTDHCGTCRKCIDACPTDAIVSEKLIDGNKCISYATIELKNEIPDSFKDKMEDWMFGCDICQDVCPWNRFSAPNLQTRFAPNEALRNFKKVEWKELTQELFSEIFRKSPVKRTKFAGLKRNIEFLEKTSDKK

SEQ ID NO: 75753 - protein, 315 aa, Chryseobacterium gleum
  misc_feature (1)..(315): tr|A0A4U8WS22|A0A4U8WS22_9FLAO Epoxyqueuosine reductase OS=Chryseobacterium gleum OX=250 GN=queG PE=3 SV=1
MNSKAEQYSQLIKTKARSFGFQNCGISKADFLEEDAKHLENWLKSNYHGEMKYMENHFDKRLDPRLLVEGSRSVISLSYNYFPEEKIPSLDNFKISKYAYAEDYHEVIKDVLREMVTEFQEEIGEFSYRVFVDSAPVMERSWAKKSGIGWVGKNANLITKQSGSFYFLAEIICDLELIADHETTDHCGTCRKCIDACPTDAIVSDKIVDGSKCISYATIELKNEIPDHFKNKMEDWMFGCDICQDVCPWNRFSVPNFQDKFKPNHQLRNFRKGEWKELTQDLFSEIFRKSPVKRTKFSGLKRNIDFLAQSEDRKP

SEQ ID NO: 75754 - protein, 312 aa, Chryseobacterium gleum
  misc_feature (1)..(312): tr|A0A448BB18|A0A448BB18_9FLAO Epoxyqueuosine reductase OS=Chryseobacterium gleum OX=250 GN=queG PE=3 SV=1
MNAGAEKYSQLIKSKAKSFGFQSCGISKADFLEEDAPHLEKWLKNNYNGEMKYMENHFDKRLDPRLLVEGSRSVISLSYNYFPEEKISILENYKISKYAYAEDYHEVIKEILREMVAELQKEIGEFGFRVFVDSAPVLERSWARKSGIGWVGKNANLITKQNGSFYFLAEIICDLELIPDHATTDHCGTCRKCIDACPTDAIVSEKIIDGSRCISYATIELKSEIPDYFKDKMEDWMFGCDICQDVCPWNRFSAPNKQSRFQPNEALKNFKKGEWKELTQEIFSEIFRKSPVKRTKFAGLKRNIEFLQKSSD

SEQ ID NO: 75755 - protein, 310 aa, Chryseobacterium greenlandense
  misc_feature (1)..(310): tr|A0A117KAY7|A0A117KAY7_9FLAO Epoxyqueuosine reductase OS=Chryseobacterium greenlandense OX=345663 GN=queG PE =3 SV=1
MNSTAEKYTQLIKTKAKSFGFQNCGVSKADFLEEDAPHLEKWLKNNFHGEMKYMENHFDKRLDPRLLVEGSKSVISLSYNYFPEEKISTLENFKISKYAYAEDYHEVIKEILRDMVAELQQEIGDFSFRVFVDSAPVLERSWAKKSGIGWVGKNANLITKQSGSFYFLAEIICDLELIADSETTDHCGTCRKCIDACPTDAIVSDKIIDGSKCISYATIELKEEIPDYFKNKMEDWMFGCDICQDVCPWNRFSAPNLQSRFKPNEFLKNFKKREWKELTQEIFSEIFRKSPVKRTKFAGLKRNIEFLYKS

SEQ ID NO: 75756 - protein, 314 aa, Chryseobacterium hagamense
  misc_feature (1)..(314): tr|A0A511YR44|A0A511YR44_9FLAO Epoxyqueuosine reductase OS=Chryseobacterium hagamense OX=395935 GN=queG PE=3 S V=1
MSSTAERYSQLIKAKAKSFGFQGCGISKAEFLEEEARPLENWLKNSFHGEMKYMENYFDKRLDPRLLVEGSKSVISLSYNYFPEEKISTLENFKISKYAYAEDYHEVIKDILRDMVAELQEEIGEFGFRVFVDSAPVLERSWARKSGIGWVGKNANLITRQSGSFYFLAEIICDLELVADHPVTDHCGTCRKCIDACPTGAIVSEKLVDGSKCISYATIELKDSIPDYFKDKMDDWMFGCDVCQDVCPWNRFSAPHQQSKFKPNESLKNFKKGEWRELTQELFSEIFRKSPVKRTKFAGLKRNIEFLEQSSDKE

SEQ ID NO: 75757 - protein, 308 aa, Chryseobacterium haifense
  misc_feature (1)..(308): tr|A0A3N0X1G1|A0A3N0X1G1_9FLAO Epoxyqueuosine reductase OS=Chryseobacterium haifense OX=421525 GN=queG PE=3 SV =1
MNYAEKYSQLVKTKAKKFGFQSCGISKAGFLEEDAKPLENWLNNNYHGEMAYMENYFDKRLDPTLLVEGSKSVISLSYNYFPKDKISSIDNFKISKYAYGQDYHEIIKETLNEMVAELKEEIGDFHCRVFVDSAPVLERSWAKKSGIGWVGKNANLITKQSGSFYFLAEIMIDLELQEDSPTTDHCGTCTKCIEACPTDAIVSEKIIDGSKCISYATIELKNEIPETFKNKMEDWMFGCDICQDVCPWNRFSAPHHQEKFKPNHFLENAKKEDWKELSQEIFSEIFRKSPVKRTKFAGLKRNIEFLGK

SEQ ID NO: 75758 - protein, 308 aa, Chryseobacterium haifense
  misc_feature (1)..(308): tr|A0A246B7G0|A0A246B7G0_9FLAO Epoxyqueuosine reductase OS=Chryseobacterium haifense DSM 19056 OX=1450526 GN=q ueG PE=3 SV=1
MNYAEKYSQLVKTKAKKFGFQSCGISKAGFLEEDAKPLENWLNNNYHGEMAYMENYFDKRLDPTLLVEGCKSVISLSYNYFPKDKISSIDNFKISKYAYGQDYHEIIKETLNEMVAELKEEIGDFHCRVFVDSAPVLERSWAKKSGIGWVGKNANLITKQSGSFYFLAEIMIDLELQEDSPTTDHCGTCTKCIEACPTDAIVSEKIIDGSKCISYATIELKNEIPETFKNKMEDWMFGCDICQDVCPWNRFSAPHHQEKFKPNHFLENAKKEDWKELSQEIFSEIFRKSPVKRTKFAGLKRNIEFLGK

SEQ ID NO: 75759 - protein, 307 aa, Chryseobacterium halperniae
  misc_feature (1)..(307): tr|A0A085B929|A0A085B929_9FLAO Epoxyqueuosine reductase OS=Chryseobacterium halperniae OX=421072 GN=queG PE=3 SV=1
MDNKEKYSELIKSKALAFGFQSCGISKADFLEEEAPRLEKWLKNNFHGEMRYMENHFDKRLDPRLLVEGSKSVISLSYNYFPEELQNNPDFKLAKYAYGEDYHDVIKDKLRTLVAELQDEIGEFAFRVFVDSAPVLEKAWAKKSGIGWVGKNSNLITKKNGSFYFLAEIICDLELIQDFEVTDHCGSCTKCIDACPTKAIVSDKIIDGSKCISYATIELKDHIPDFFKDKMEDWMFGCDICQDVCPWNRFSAPTLEEKFRPNSEIKNFTKQEWKDITQEIFSSVFKKSAVKRTKFSGLKRNLDFLSE

SEQ ID NO: 75760 - protein, 307 aa, Chryseobacterium hispanicum
  misc_feature (1)..(307): tr|A0A3D9D0L1|A0A3D9D0L1_9FLAO Epoxyqueuosine reductase OS=Chryseobacterium hispanicum OX=358687 GN=queG PE=3 SV=1
MNPKERHTQLIKTKASAFGFQSCGISKADFLEEEASHLEKWLKNNHHGEMKYMENYFDKRLDPRLLVEGSKSVISLSYNYFPEEKLQNENFKIAKYAYGEDYHEVIKEKLRTLVAELQEEIGEFSFRVFVDSAPVLEKAWAKKSGIGWVGKNSNLITKKYGSFYFLAEIICDLDLVEDSPVTDHCGSCTKCIDACPTQAIISDRIIDGSKCISYATIELKDQIPDFFKDKMDDWMFGCDVCQDVCPWNRFSAPTLEEKFQPNSQLKNFTKQEWKDITQEVFSSVFRKSAVKRTKFAGLKRNLDFLSE

SEQ ID NO: 75761 - protein, 307 aa, Chryseobacterium hominis
  misc_feature (1)..(307): tr|A0A1H6KNA1|A0A1H6KNA1_9FLAO Epoxyqueuosine reductase OS=Chryseobacterium hominis OX=420404 GN=queG PE=3 SV= 1
MNPKERHTQLIKTKASAFGFQSCGISKATFLEEEANHLERWLKKNYHGEMRYMENHFDKRLDPRLLVDGSKSVISLSYNYFPDKIIEADSFKLSKYAYGEDYHNVIKDKLRNLVAELQEEIGDFSFRVFVDSAPVLEKAWARKSGIGWVGKNANLITKKYGSFYFLAEIICDLELTEDFPVTDHCGSCRKCIESCPTQAIISDKIIDGTKCISYATIELKDQIPDYFKDKMDDWMFGCDVCQDVCPWNRFSAPTLEEKFQPNSQLQSFTKQDWKDITQEIFSEVFKKSAVKRTKFAGLKRNLDFLSE

SEQ ID NO: 75762 - protein, 307 aa, Chryseobacterium hominis
  misc_feature (1)..(307): tr|A0A3N0XC71|A0A3N0XC71_9FLAO Epoxyqueuosine reductase OS=Chryseobacterium hominis OX=420404 GN=queG PE=3 SV= 1
MNPKERYTQLIKTKASAFGFQSCGISKATFLEEEANNLERWLKKNYHGEMRYMENHFDKRLDPRLLVDGSKSVISLSYNYFPDKIIEADSFKLSKYAYGEDYHNVIKDKLRNLVAELQEEIGEFSFRVFVDSAPVLEKAWARKSGIGWVGKNANLITKKNGSFYFLAEIICDLELTEDFPVTDHCGSCRKCIESCPTQAIISDKIIDGTKCISYATIELKEQIPDYFKDKMDDWMFGCDVCQDVCPWNRFSAPTLEEKFQPNSQLQNFTKQDWKDITQEIFSEVFKKSAVKRTKFAGLKRNLDFLSD

SEQ ID NO: 75763 - protein, 309 aa, Chryseobacterium humi
  misc_feature (1)..(309): tr|A0A1H5ZUU8|A0A1H5ZUU8_9FLAO Epoxyqueuosine reductase OS=Chryseobacterium humi OX=493375 GN=queG PE=3 SV=1
MPQNQQKYSDLIKEKARKYGFESCGISKAEFLEEDAPNLENWLKNNFQGEMAYMENYFDKRLNPTLLVEGSKSVISLSYNYFPSEKIETLDNFKISKYAYAEDYHDIIKGILKDLVNELKHEIGDFHFRIFVDSAPVLERAWARKSGIGWVGKNANLITKEKGSFYFLAEIICDLELIADHETTDHCGTCRKCIDACPTDAIISDKIIDGSKCISYATIELKNEIPTHFKDKMEDWMFGCDICQDVCPWNRFARPSHQEKFQPNSFLKNYRKQDWQELSQDLFSEIFRKSPVKRTKFAGLQRNIRFLSQ

SEQ ID NO: 75764 - protein, 307 aa, Chryseobacterium hungaricum
  misc_feature (1)..(307): tr|A0A1G7U7J5|A0A1G7U7J5_9FLAO Epoxyqueuosine reductase OS=Chryseobacterium hungaricum OX=454006 GN=queG PE=3 SV=1
MNPKERHTQLIKTKASAFGFQSCGISKADFLEEEASHLENWLRNNHHGEMKYMENHFDKRLDPRLLVEGSRSVISLSYNYFPEEKLQNDNFKLAKYAYGEDYHDVIKEKLRTLVAELQEEIGEFSCRVFVDSAPVLEKAWAKKSGIGWVGKNSNLITKKYGSFYFLAEIICDLDLVEDSPVTDHCGSCTKCIDACPTQAIISDKIIDGSKCISYATIELKDQIPDFFKDKMDDWMFGCDVCQDVCPWNRFSTPTLEEKFQPNSQLKNFTKQEWKDITQEVFSSVFKKSAVKRTKFAGLKRNLDFLSE

SEQ ID NO: 75765 - protein, 312 aa, Chryseobacterium indologenes
  misc_feature (1)..(312): tr|A0A411DU70|A0A411DU70_9FLAO Epoxyqueuosine reductase OS=Chryseobacterium indologenes OX=253 GN=queG PE=3 SV =1
MNADAEKYSQLIKSRAKSFGFQSCGISKADFLEEEAPHLEKWLKNNYNGEMKYMENHFDKRLDPRLLVEGSKSVISLSYNYFPEEKISTLENFKISKYAYAEDYHEVIKEILREMVAELQEEIGEFGFRVFVDSAPVLERAWAKKSGIGWVGKNANLITKQSGSFYFLAEIICDLELIPDHATTDHCGSCRKCIDACPTDAIVSEKIIDGSRCISYATIELKNEIPDYFKDKMEDWMFGCDICQDVCPWNRFSAPNKQSRFQPNEALKNFKKGEWKELTQEIFSEIFRKSPVKRTKFAGLKRNIEFLQKTSD

SEQ ID NO: 75766 - protein, 312 aa, Chryseobacterium indologenes
  misc_feature (1)..(312): tr|A0A1Z3VY13|A0A1Z3VY13_9FLAO Epoxyqueuosine reductase OS=Chryseobacterium indologenes OX=253 GN=queG PE=3 SV =1
MNAGAEKYSQLIKSKAKSFGFQSCGISKADFLEEDARPLEKWLKNNFNGEMKYMENHFDKRLDPRLLVEGSKSVISLSYNYFPEEKLSVLENFKISKYAYAEDYHEVIKEILREMVAELQEEIGEFGFRVFVDSAPVMERSWARKSGIGWVGKNANLITRQNGSFYFLAEIICDLELIADHATTDHCGTCRKCIDACPTGAIVSEKIVDGSRCISYATIELKDEIPDHFKNKMEDWMFGCDICQDVCPWNRFAAPHKQSRFTPNEALRNFKKGEWKELTQEIFSEIFRKSPVKRTKFAGLKRNIEFLQRSSD

SEQ ID NO: 75767 - protein, 314 aa, Chryseobacterium indoltheticum
  misc_feature (1)..(314): tr|A0A381FA31|A0A381FA31_9FLAO Epoxyqueuosine reductase OS=Chryseobacterium indoltheticum OX=254 GN=queG PE=3 SV=1
MNSTAEKYSQLIKSKAKSFGFQNCGISKADFLEEDARHLEKWLKNNFHGEMKYMENHFDKRLDPRLLVEGSKSVISLSYNYFPEEKISVLENFKISKYAYAEDYHEVVKEILRDLVAELQEEIGDFEFRVFVDSAPVLERSWAKKSGIGWVGKNANLITKQSGSFYFLAEIICDLDLIPDHETTDHCGSCRKCIDACPTDAIVSEKIVDGSKCISYATIELKTEIPDYFKDKMEDWMFGCDICQDVCPWNRFSAPNLQAKFKPNEALKSFKKGEWKELTQEIFSEIFRKSPVKRTKFAGLKRNIEFLNQSSEKL

SEQ ID NO: 75768 - protein, 314 aa, Chryseobacterium indoltheticum
  misc_feature (1)..(314): tr|A0A381FHS9|A0A381FHS9_9FLAO Epoxyqueuosine reductase OS=Chryseobacterium indoltheticum OX=254 GN=queG PE=3 SV=1
MNSTAEKYSQLIKSKAKSFGFQNCGISKADFLEEDARHLEKWLKNNFHGEMKYMENHFDKRLDPRLLVEGSKSVISLSYNYFPEEKISALENFKISKYAYAEDYHEVVKEILRDLVAELQEEIGNFGFRVFVDSAPVLERSWAKKSGIGWVGKNANLITKQSGSFYFLAEIICDLDLIPDNETTDHCGSCRKCIDACPTDAIVSEKIVDGSKCISYATIELKTEIPDYFKDKMEDWMFGCDICQDVCPWNRFSAPNLQAKFKPNEALKNFKKGEWKELTQEIFSEIFRKSPVKRTKFAGLKRNIEFLNQSSEKL

SEQ ID NO: 75769 - protein, 314 aa, Chryseobacterium jejuense
  misc_feature (1)..(314): tr|A0A2X2X160|A0A2X2X160_9FLAO Epoxyqueuosine reductase OS=Chryseobacterium jejuense OX=445960 GN=queG PE=3 SV =1
MNAGAEKYSELIKSKAKSFGFQSCGISKADFLEEDAAHLEKWLKNNFNGEMKYMENHFDKRLDPRLLVEGSKSVISLSYNYFPEEKISILENFKISKYAYAEDYHEVIKEILREMVAELQEEIGEFGFRVFVDSAPVMERSWARKSGIGWVGKNANLITKQNGSFYFLAEIICDLELIADHETTDHCGTCRKCIDACPTDAIISEKIIDGSKCISYATIELKNEIPDHFKNKMEDWMFGCDICQDVCPWNRFSAPNKQSRFKPNEALKNFKKGEWKELTQEIFSDIFKKSPVKRTKFAGLKRNIEFLERSSDSF

SEQ ID NO: 75770 - protein, 309 aa, Chryseobacterium jeonii
  misc_feature (1)..(309): tr|A0A0C1FL41|A0A0C1FL41_9FLAO Epoxyqueuosine reductase OS=Chryseobacterium jeonii OX=266749 GN=queG PE=3 SV=1
MNSNAEKYSIIIKAKAKKFGFQDCGISKAGFLENDAVALENWLKNDYHGKMSYMENHFDKRLDPTLLVEGSKYVISLSYNYFPEEKLPTINTFKISKYAYGEDYHEIIKEIMQEMVAELKDEIGDFQCRVFTDSAPILERSWARKSGIGWVGKNANLITKQSGSFYFLAEIICDLDLQEDHATTDHCGTCTKCIEACPTDAIVSDKIIDGSKCISYATIELKDEIPAGFTDKMEDWMFGCDICQDVCPWNRFSSPHQQEKFKPNSILKNYKKEDWKELTQELFSEIFRISPLKRTKFAGLERNIEFLSK

SEQ ID NO: 75771 - protein, 314 aa, Chryseobacterium joostei
  misc_feature (1)..(314): tr|A0A1N7IC78|A0A1N7IC78_9FLAO Epoxyqueuosine reductase OS=Chryseobacterium joostei OX=112234 GN=queG PE=3 SV= 1
MNAGAEKYSQLIKSKAKSFGFQSCGISKADFLEEDAPHLERWLKNNFNGEMKYMENHFDKRLDPRLLVEGSKSVISLSYNYFPEEKISILENFKISKYAYAEDYHEVIKEILRDMVAELQEEIGEFGFRVFVDSAPIMERSWARKSGIGWVGKNANLITKQNGSFYFLAEIICDLELIPDHETTDHCGTCRKCIDACPTDAIVSEKIIDGSRCISYATIELKNEIPDHFKDKMEDWMFGCDICQDVCPWNRFSAPNQQSRFKPNEALKNFKKGEWKELTQEIFSEIFKKSPVKRTKFTGLKRNIEFLQKSSDPV

SEQ ID NO: 75772 - protein, 309 aa, Chryseobacterium koreense
  misc_feature (1)..(309): tr|A0A0J7LP66|A0A0J7LP66_9FLAO Epoxyqueuosine reductase OS=Chryseobacterium koreense CCUG 49689 OX=1304281 GN= queG PE=3 SV=1
MSQNRKKYSDIIKLKAKKFGFQSCGISKAGFLEEDAKPLEDWLQNNFHGEMQYMEKNFDKRLDPTILVEGSRSVISLSYNYYPEEKIDSLGNFKISKYAYGQDYHEIIKEILREMVSELRAEIGDFDCRVFTDSAPILERSWGRKSGIGWVGKNANLITKQQGSFYFLAEIICDLDIEEDSPTSDHCGTCTKCIDACPTDAIVADRIIDGSKCISYATIELKNEIPDSFKNNMEDWMFGCDICQDVCPWNRFSAPTLEEKFRPNQFLKTYTKSDWKEITQELFSEIFRKSPVKRTKFAGLKRNMDFLSQ

SEQ ID NO: 75773 - protein, 316 aa, Chryseobacterium kwangjuense
  misc_feature (1)..(316): tr|A0A135W2T1|A0A135W2T1_9FLAO Epoxyqueuosine reductase OS=Chryseobacterium kwangjuense OX=267125 GN=queG PE=3 SV=1
MLNSGAEKHTQLIKSKAERFGFQSCGISKAEFLEEDAPNLEKWLKNNFHGEMKYMENHFDKRLDPRLLVEGSRSVISLSYNYFPEEKISALENYKISKYAYAEDYHEVVKEILREMVAELQHEIGEFGFRVFVDSAPVLERSWARKSGIGWVGKNANLITKQNGSFYFLAEIICDLELVPDHATTDHCGTCRKCIDACPTDAIVSEKIIDGSRCISYATIELKNEIPDHFKGRMEDWMFGCDICQDVCPWNRFSAPNRQTKFVPNESLKNFKKGEWKEITQEIFSEIFRKSPVKRTKFAGLKRNIEFLEHSSDTNL

SEQ ID NO: 75774 - protein, 311 aa, Chryseobacterium lactis
  misc_feature (1)..(311): tr|A0A3G6RMM5|A0A3G6RMM5_9FLAO Epoxyqueuosine reductase OS=Chryseobacterium lactis OX=1241981 GN=queG PE=3 SV= 1
MSSVEKYSQLIKSKAKSFGFQSCGISKADFLEEDARHLEKWLKNNFNGEMKYMENHFDKRLDPRLLVEGSKSVISLSYNYFPEEKISILENFKISKYAYAEDYHEVIKEILREMVAELQEEIGEFGFRVFVDSAPVLERSWARKSGIGWIGKNANLITKQNGSFYFLAEIICDLELIADHETTDHCGTCRKCIDACPTDAIVSEKIIDGSRCISYATIELKSEIPDYFKDKMEDWMFGCDICQDVCPWNRFSAPHQQSRFKPNEALKNFTKGEWKELTQEIFSEIFKKSPVKRTKFAGLKRNIEFLQKPSD

SEQ ID NO: 75775 - protein, 317 aa, Chryseobacterium lathyri
  misc_feature (1)..(317): tr|A0A511Y575|A0A511Y575_9FLAO Epoxyqueuosine reductase OS=Chryseobacterium lathyri OX=395933 GN=queG PE=3 SV= 1
MEILNGDAEKYSQLIKSKAQHFGFQSCGISKAGFLEEDAPNLEKWLKNNFHGEMKYMENHFDKRLDPRLLVEGSKSVISLSYNYFPKEEISALENYKISKYAYAEDYHEVVKEILREMVSELQQEIGEFGFRVFVDSAPVLERSWARKSGIGWVGKNANLITKQNGSFYFLAEIICDLELIPDHATTDHCGTCRKCIDACPTDAIVSEKIIDGSRCISYATIELKNEIPDHFKDKMEDWMFGCDICQDVCPWNRFSSPNLQSRFAPNESLKNFKKEEWREITQEIFSEIFRKSPVKRTKFAGLKRNIEFLERSSDKL

SEQ ID NO: 75776 - protein, 314 aa, Chryseobacterium limigenitum
  misc_feature (1)..(314): tr|A0A1K2IW50|A0A1K2IW50_9FLAO Epoxyqueuosine reductase OS=Chryseobacterium limigenitum OX=1612149 GN=queG PE= 3 SV=1
MNSNAEKYSQLIKSKAERFGFQSCGISKADFLEEDARNLEKWLKNNFHGEMKYMENYFDKRLDPRLLVEGSKSVISLSYNYFPKEKISTLENYKISKYAYAEDYHEVVKEILREMVDELREEIGDFDCRVFVDSAPVLERSWARKSGIGWVGKNANLITKQNGSFYFLAEIICDLELIPDHETTDHCGTCRKCIDACPTEAIVSEKLIDGSKCISYATIELKNEIPDSFKDKMEDWMFGCDICQDVCPWNRFSVPNLQSRFAPNEALKNFKKGDWKELTQELFSEIFRKSPVKRTKFAGLKRNIEFLEKTSDKK

SEQ ID NO: 75777 - protein, 317 aa, Chryseobacterium luteum
  misc_feature (1)..(317): tr|A0A085ZTC8|A0A085ZTC8_9FLAO Epoxyqueuosine reductase OS=Chryseobacterium luteum OX=421531 GN=queG PE=3 SV=1
MEILNAGAEKYSQLIKSKAEQFGFQSCGISKAGFLEEDAPNLEKWLKNNFHGEMKYMENHFDKRLDPRLLVEGSKSVISLSYNYFPKEKISALENYKISKYAYAEDYHEVVKEILREMVSELQQEIGEFGFRVFVDSAPVLERSWARKSGIGWVGKNANLITKQNGSFYFLAEIICDLELIPDHATTDHCGTCRKCIDACPTDAIVSDKIIDGSRCISYATIELKSEIPDHFQDRMEDWMFGCDICQDVCPWNRFSSPNLQSRFAPNESLKNFKKEEWKEITQEIFSEIFRKSPVKRTKFAGLKRNIEFLERSLDKL

SEQ ID NO: 75778 - protein, 307 aa, Chryseobacterium molle
  misc_feature (1)..(307): tr|A0A1M6N6V1|A0A1M6N6V1_9FLAO Epoxyqueuosine reductase OS=Chryseobacterium molle OX=216903 GN=queG PE=3 SV=1
MNNQEKYSSLIKSKALTFGFQSCGISKAGFLEEEAPRLEKWLKQNYNGEMRYMENHFDKRLDPRLLVEGSKSVISLSYNYFPEELQNNQDFKLSKYAYGEDYHDVIKDKLKLMIAELQEQIGAFSFRVFVDSAPVLEKAWARKSGIGWVGKNSNLITKKNGSFYFLAEIICDLDLIEDFPVTDHCGSCRKCIDACPTQAIVSDKIVDGSKCISYATIELKDQIPDFFKDKMEDWMFGCDICQDVCPWNRFSAPTLEEKFKPNAEIKNFTKQEWKDITQEVFSSVFRKSAVKRTKFSGLKRNLDFLSE

SEQ ID NO: 75779 - protein, 314 aa, Chryseobacterium mucoviscidosis
  misc_feature (1)..(314): tr|A0A202C1H1|A0A202C1H1_9FLAO Epoxyqueuosine reductase OS=Chryseobacterium mucoviscidosis OX=1945581 GN=queG PE=3 SV=1
MTSNAEKYTQLIKSKAKSFGFQNCGISKADFLEEEAKPLENWLKNNFHGEMKYMENHFDKRLDPRLLVEGSKSVISLSYNYFPEEKISTLENFKISKYAYAEDYHEVIKDIMRSMVAELQEEIGEFGFRVFVDSAPVLERSWARKSGIGWVGKNANLITRQSGSFYFLAEIICDLELVADYPVTDHCGTCRKCIDACPTNAIVSEKLIDGSKCISYATIELKDSIPDYFQDKMDDWMFGCDVCQDVCPWNRFSSPHKQTKFKPNESLKNFKKGEWKELTQELFSEIFRKSPVKRAKFAGLKRNIEFLEKSSQNK

SEQ ID NO: 75780 - protein, 312 aa, Chryseobacterium nakagawai
  misc_feature (1)..(312): tr|A0A3S4TJ79|A0A3S4TJ79_9FLAO Epoxyqueuosine reductase OS=Chryseobacterium nakagawai OX=1241982 GN=queG PE=3 SV=1
MNAGAEKYSELIKTKAKRFGFQGCGISKADFLEEDAGHLEKWLKNNCNGEMKYMENHFDKRLDPRLLVEGSKSVISLSYNYFPEEKISMLENFKISKYAYAEDYHEVIKEILREMVAELQEEIGEFGFRVFVDSAPVLERSWARKSGIGWVGKNANLITKQNGSFYFLAEIICDLELIADHETTDHCGTCRKCIDACPTDAIVSEKIIDGSKCISYATIELKNDIPDHFKNKMEDWMFGCDICQDVCPWNRFAAPHQQSRFKPNEALKNFKKGEWKEITQEIFSEIFKKSPVKRTKFAGLKRNIEFLERSSD

SEQ ID NO: 75781 - protein, 312 aa, Chryseobacterium nakagawai
  misc_feature (1)..(312): tr|A0A3N2F2C3|A0A3N2F2C3_9FLAO Epoxyqueuosine reductase OS=Chryseobacterium nakagawai OX=1241982 GN=queG PE=3 SV=1
MNAGAEKYTQLIKSKAKSFGFQSCGISKADFLEEDAGHLEKWLKNNFNGEMKYMENHFDKRLDPRLLVEGSKSVISLSYNYFPEEKISILENFKISKYAYAEDYHEVIKEILREMVAELQEEIGEFGFRVFVDSAPVLERSWARKSGIGWVGKNANLITKQNGSFYFLAEIICDLELIPDHETTDHCGTCRKCIDACPTDAIVSEKIIDGSKCISYATIELKNEIPDHFKGKMEDWMFGCDICQDVCPWNRFSAPHQQSRFKPNEALKNFKKGEWKELTQEIFSEIFRKSPVKRTKFAGLQRNIEFLKRSSD

SEQ ID NO: 75782 - protein, 308 aa, Chryseobacterium nematophagum
  misc_feature (1)..(308): tr|A0A3M7LBA0|A0A3M7LBA0_9FLAO Epoxyqueuosine reductase OS=Chryseobacterium nematophagum OX=2305228 GN=queG PE =3 SV=1
MDSKAEKYTQLIKAKAQRFGFQSCGISKADFLEEDARPLEKWLKNNFHGEMKYMENHFDKRLDPRLLVEGSQSVISLSYNYFPKNEISTLDNFKISKYAYAEDYHEVIKEILREMVTELQNEIGEFGFRVFVDSAPVLERSWARKSGIGWVGKNANLITKQSGSFYFLAEIICDLPLVSDHETTDHCGTCRKCIDACPTDAIVSDKVIDGSKCISYATIELKNEIPDSFKNKMEDWMFGCDICQDVCPWNRFSTPNLQNRFTPNDSLKNFRKSEWKELTQELFSEIFRKSPVKRTKFAGLKRNIKFLS

SEQ ID NO: 75783 - protein, 308 aa, Chryseobacterium nematophagum
  misc_feature (1)..(308): tr|A0A3M7TJC7|A0A3M7TJC7_9FLAO Epoxyqueuosine reductase OS=Chryseobacterium nematophagum OX=2305228 GN=queG PE =3 SV=1
MDSKAEKYTQLIKTKAQRFGFQSCGISKADFLEEDARPLEKWLKNNFHGEMKYMENHFDKRLDPRLLVEGSQSVISLSYNYFPKNVISTLENFKISKYAYAEDYHEVIKEILREMVTELQNEIGEFGFRVFVDSAPVLERSWARKSGIGWVGKNANLITKQSGSFYFLAEIICDLPLVSDHETTDHCGTCRKCIDACPTDAIVSDKVIDGSKCISYATIELKNEIPDSFKNKMEDWMFGCDICQDVCPWNRFSTPHLQNRFTPNDSLKNFRKSEWKELTQELFSEIFRKSPVKRTKFAGLKRNIKFLS

SEQ ID NO: 75784 - protein, 317 aa, Chryseobacterium oleae
  misc_feature (1)..(317): tr|A0A1I4XEA9|A0A1I4XEA9_9FLAO Epoxyqueuosine reductase OS=Chryseobacterium oleae OX=491207 GN=queG PE=3 SV=1
MKILNSSAEKHAQLIKSKAERFGFQSCGISKADFLEEDAPNLEKWLKNNYHGEMKYMENNFDKRLDPRLLVEGSKSVISLSYNYFPKEKISALENYKISKYAYAEDYHEVVKEILREMVAELQEEIGEFGFRVFVDSAPILERSWAKKSGIGWVGKNANLITKQNGSFYFLAEIICDLELAADHATTDHCGTCRKCIDACPTDAIVSEKIVDGSRCISYATIELKNEIPDHFKNKMEDWMFGCDICQDVCPWNRFSAPNLQSRFEPNESLKNFKKEEWKEITQEIFSEIFRKSPVKRTKFAGLKRNIEFLERSSDKL

SEQ ID NO: 75785 - protein, 312 aa, Chryseobacterium oncorhynchi
  misc_feature (1)..(312): tr|A0A316WZ55|A0A316WZ55_9FLAO Epoxyqueuosine reductase OS=Chryseobacterium oncorhynchi OX=741074 GN=queG PE=3 SV=1
MNAGAEKYSQLIKSKAKSFGFQSCGISKADFLEEDAPHLEKWLKNNFNGEMKYMENHFDKRLDPRLLVEGSKSVISLSYNYFPEEKISILENFKISKYAYAEDYHEVIKEILREMVAELQEEIGEFGFRVFVDSAPIMERSWAKKSGIGWVGKNANLITKQNGSFYFLAEIICDLELIPDHETTDHCGTCRKCIDACPTDAIVSEKIIDGSRCISYATIELKNEIPDHFKDKMEDWMFGCDICQDVCPWNRFSAPNQQSRFKPNEALKNFKKGEWKELTQEIFSEVFKKSPVKRTKFSGLKRNIEFLQKSSD

SEQ ID NO: 75786 - protein, 317 aa, Chryseobacterium oranimense
  misc_feature (1)..(317): tr|A0A1M5UG10|A0A1M5UG10_9FLAO Epoxyqueuosine reductase OS=Chryseobacterium oranimense OX=421058 GN=queG PE=3 SV=1
MEILNAGAEKYSLLIKSKAEKFGFQSCGISKAEFLEEDAPNLEKWLKNNFHGEMKYMENHFDKRLDPRLLVEGSKSVISLSYNYFPKEKISELENYKISKYAYAEDYHEVVKEILREMVSELQQEIGEFGFRVFVDSAPVLERSWARKSGIGWVGKNANLITKQNGSFYFLAEIICDLELIPDHATTDHCGTCRKCIDACPTDAIVSEKIIDGSRCISYATIELKNEIPDHFKNKMEDWMFGCDICQDVCPWNRFSSPNLQSRFTPNHALKNFKKGEWKEITQEIFSEIFRKSPVKRTKFAGLKRNIEFLERSAEKD

SEQ ID NO: 75787 - protein, 314 aa, Chryseobacterium piperi
  misc_feature (1)..(314): tr|A0A086BJA6|A0A086BJA6_9FLAO Epoxyqueuosine reductase OS=Chryseobacterium piperi OX=558152 GN=queG PE=3 SV=1
MNSNAEKYSDLIKSKAKSFGFQSCGISKADFLEEDARNLELWLKNNFHGEMKYMENHFDKRLDPRLLVEGSKSVISLSYNYFPKEKISVLENYKISKYAYAEDYHEVIKEILREMVAELQEEIGDFGFRVFVDSAPVLERSWARKSGIGWVGKNANLITKQNGSFYFLAEIICDLELVADYETTNHCGTCRKCIDACPTEAIVSDKIIDGSKCISYATIELKSEIPDYFKDRMEDWMFGCDICQDVCPWNRFSAPNLQSRFSPNEPLKNFKKGEWKELTQELFSEIFRKSPVKRTKFAGLKRNIEFLEQSSDKN

SEQ ID NO: 75788 - protein, 312 aa, Chryseobacterium piscicola
  misc_feature (1)..(312): tr|A0A1N7L9D0|A0A1N7L9D0_9FLAO Epoxyqueuosine reductase OS=Chryseobacterium piscicola OX=551459 GN=queG PE=3 S V=1
MTSNAEKYSQLIKIKAKSFGFQQCGISRAEFLEEDARPLENWLKNNYHGEMKYMENHFDKRLDPRLLVEGSKSVISLSYNYFPEEKISTLDNFKISKYAYSEDYHEVIKEILRDMILELQEQIGEFSFRVFVDSAPVLERSWAKKSGIGWVGKNANLITKQSGSFYFLAEIICDLDLETDYQTKDHCGTCRKCIEACPTKAIITEKIIDGSKCISYATIELKNEIPDYFKDKMDDWMFGCDVCQDVCPWNRFAVPHNQSKFKPNDFLKNLKKEEWKEITQELFSEIFKKSPVKRTKFAGLKRNIEFLDKNSI

SEQ ID NO: 75789 - protein, 314 aa, Chryseobacterium piscium
  misc_feature (1)..(314): tr|A0A3D9BTC9|A0A3D9BTC9_9FLAO Epoxyqueuosine reductase OS=Chryseobacterium piscium OX=333702 GN=queG PE=3 SV= 1
MNSTAEKYSQLIKSKAKSFGFQNCGISKADFLEEDARHLEKWLKNNFHGEMKYMENHFDKRLDPRLLVEGSKSVISLSYNYFPEEKISALENFKISKYAYAEDYHEVVKEILRDMVFELQKEIGDFGFRVFVDSAPVLERSWAKKSGIGWVGKNANLITKQSGSFYFLAEIICDLDLISDHETTDHCGSCRKCIDACPTDAIVSEKIVDGSRCISYATIELKTEIPDYFKDKMEDWMFGCDICQDVCPWNRFSAPNLQAKFKPNEALKNFKKGEWKELTQEIFSEIFRKSPVKRTKFAGLKRNIEFLNQSSEEL

SEQ ID NO: 75790 - protein, 314 aa, Chryseobacterium polytrichastri
  misc_feature (1)..(314): tr|A0A1M7DXE9|A0A1M7DXE9_9FLAO Epoxyqueuosine reductase OS=Chryseobacterium polytrichastri OX=1302687 GN=queG PE=3 SV=1
MNSNAEKYSQLIKSKAERFGFQSCGISKADFLEEDARNLEKWLKNNFHGEMKYMENYFDKRLDPRLLVEGSKSVISLSYNYFPKEKISTLENYKISKYAYAEDYHEVVKEILREMVEELREEIGDFDCRVFVDSAPVLERSWARKSGIGWVGKNANLITKQNGSFYFLAEIICDLELIQDHETTDHCGTCRKCIDACPTDAIVSEKLIDGSKCISYATIELKNEIPDSFKDKMEDWMFGCDICQDVCPWNRFSAPNLQTKFAPNEALKNFKKGEWKELTQELFSEIFRKSPVKRTKFAGLKRNIEFLEQPLDKF

SEQ ID NO: 75791 - protein, 312 aa, Chryseobacterium rhizoplanae
  misc_feature (1)..(312): tr|A0A521EGK2|A0A521EGK2_9FLAO Epoxyqueuosine reductase OS=Chryseobacterium rhizoplanae OX=1609531 GN=queG PE= 3 SV=1
MNAGAEKYSQLIKSKAKSFGFQSCGISKADFLEEDAPHLEKWLKNNYNGEMKYMENHFDKRLDPRLLVEGSKSVISLSYNYFPEEKISILENYKISKYAYAEDYHEVIKEILREMVAELQEEIGEFGFRVFVDSAPIMERSWARKSGIGWVGKNANLITKQSGSFYFLAEIICDLELIPDHATTDHCGSCRKCIDACPTDAIVSEKIIDGSRCISYATIELKNEIPDYFKDKMEDWMFGCDICQDVCPWNRFSAPNKQSRFQPNEALKNFKKGEWKELTQEIFSEIFRKSPVKRTKFAGLKRNIEFLQKSSD

SEQ ID NO: 75792 - protein, 314 aa, Chryseobacterium rhizosphaerae
  misc_feature (1)..(314): tr|A0A3D9DCG9|A0A3D9DCG9_9FLAO Epoxyqueuosine reductase OS=Chryseobacterium rhizosphaerae OX=395937 GN=queG PE =3 SV=1
MNAGAEKYSQLIKTKAKSFGFQNCGISKADFLEEDAAHLEKWLKNNFNGEMKYMENHFDKRLDPRLLVEGSKSVISLSYNYFPEEKISVLENYKISKYAYAEDYHEVIKEILRELVAELQEEIGEFGFRVFVDSAPVMERSWARKSGIGWVGKNANLITRQNGSFYFLAEIICDLELISDHETTDHCGTCRKCIDACPTDAIVSEKIIDGSRCISYATIELKNEIPDYFQDKMENWMFGCDICQDVCPWNRFSAPNKQSRFTPNEALKNFKKGEWKELTQEIFSEIFKKSPVKRTKFAGLKRNIEFLERSSDLF

SEQ ID NO: 75793 - protein, 314 aa, Chryseobacterium scophthalmum
  misc_feature (1)..(314): tr|A0A1N6FTT6|A0A1N6FTT6_9FLAO Epoxyqueuosine reductase OS=Chryseobacterium scophthalmum OX=59733 GN=queG PE=3 SV=1
MNSTAEKYSQLIKSKAKSFGFQNCGISKADFLEEDARHLEKWLKNNFHGEMKYMENHFDKRLDPRLLVEGSKSVISLSYNYFPEEKISALENFKISKYAYAEDYHEVVKEILRDMISELREEIGDFGFRVFVDSAPVLERSWAKKSGIGWVGKNANLITKQSGSFYFLAEIICDLDLIPDHETTDHCGSCRKCIDACPTDAIVSEKIVDGSKCISYATIELKTEIPDYFKDKMEDWMFGCDICQDVCPWNRFSAPNLQAKFKPNDALKNFKKGEWKELTQEIFSEIFRRSPVKRTKFAGLKRNIEFLNQSSKEL

SEQ ID NO: 75794 - protein, 312 aa, Chryseobacterium sediminis
  misc_feature (1)..(312): tr|A0A5B2U2V7|A0A5B2U2V7_9FLAO Epoxyqueuosine reductase OS=Chryseobacterium sediminis OX=1679494 GN=queG PE=3 SV=1
MNAGAEKYSQLIKSKAKSFGFQSCGISKADFLEEDAPRLEKWLKNNYNGEMKYMENHFDKRLDPRLLVEGSKSVISLSYNYFPEEKISILENYKISKYAYAEDYHEVIKEILREMVAELQEEIGEFGFRVFVDSAPIMERSWARKSGIGWVGKNANLITKQNGSFYFLAEIICDLELIADHATTDHCGSCRKCIDACPTDAIVSEKIIDGSRCISYATIELKNEIPDYFKDKMEDWMFGCDICQDVCPWNRFSAPNKQSRFKPNEALKNFKKGEWKEITQEIFSEIFRKSPVKRTKFAGLKRNIEFLQKSSD

SEQ ID NO: 75795 - protein, 316 aa, Chryseobacterium shandongense
  misc_feature (1)..(316): tr|A0A3G6MVS1|A0A3G6MVS1_9FLAO Epoxyqueuosine reductase OS=Chryseobacterium shandongense OX=1493872 GN=queG PE =3 SV=1
MNSNAEKYSQLIKARAKSFGFQSCGISKADFLEEDAKPLEEWLKNNFHGEMKYMENHFDKRLDPRLLVEGSKSVISLSYNYFPEEKIPTLDNFKISKYAYAEDYHEVIKEILRDIVSGLQEEIGEFAFRIFVDSAPVLERSWARKSGIGWVGKNANLITKQNGSFYFLAEIICDLELTPDYPTTDHCGTCRKCIDACPTNAIISDKLIDGSKCISYATIELKNEIPDYFKDKMDDWMFGCDVCQDVCPWNRFSAPTQQRKFAPNEALKNFKKGEWKELTQELFSEIFRKSPVKRTKFTGLKRNIEFLENTGKWLDF

SEQ ID NO: 75796 - protein, 316 aa, Chryseobacterium shandongense
  misc_feature (1)..(316): tr|A0A3G6R0A7|A0A3G6R0A7_9FLAO Epoxyqueuosine reductase OS=Chryseobacterium shandongense OX=1493872 GN=queG PE =3 SV=1
MNSNAEKYSQLIKARAKSFGFQSCGISKADFLEEDAKPLEEWLKNNFHGEMKYMENHFDKRLDPRLLVEGSKSVISLSYNYFPEEKIPTLDNFKISKYAYAEDYHEVIKEILRDMVSGLQEEIGEFAFRVFVDSAPVLERSWARKSGIGWVGKNANLITKQNGSFYFLAEIICDLELTPDYPTTDHCGTCRKCIDACPTNAIISDKLIDGSKCISYATIELKNEIPDYFKDKMDDWMFGCDVCQDVCPWNRFSAPTQQRKFAPNEALKNFKKGEWKELTQELFSEIFRKSPVKRTKFTGLKRNIEFLENTGKWLDF

SEQ ID NO: 75797 - protein, 317 aa, Chryseobacterium shigense
  misc_feature (1)..(317): tr|A0A1N7I7E4|A0A1N7I7E4_9FLAO Epoxyqueuosine reductase OS=Chryseobacterium shigense OX=297244 GN=queG PE=3 SV =1
MKILNSGAEKYSQLIKTKAERFGFQSCGISKAEFLEEDAPNLEKWLKNNFHGEMKYMENHFDKRLDPRLLVEGSKSVISLSYNYFPKEKISALENYKISKYAYAEDYHEVVKEILREMVSELQDEIGAFGFRVFVDSAPVMERSWARKSGIGWVGKNANLITRQNGSFYFLAEIICDLELVPDHATTDHCGTCRKCIDACPTDAIVSEKIIDGSRCISYATIELKNEIPEHFKDKMEDWMFGCDICQDVCPWNRFSAPNKQNRFAPNESLKNFKKEEWKEITQEIFSEIFRKSPVKRTKFAGLKRNIEFLEGSSDKI

SEQ ID NO: 75798 - protein, 317 aa, Chryseobacterium shigense; identical to SEQ ID NO: 75737
  misc_feature (1)..(317): tr|A0A376E7U9|A0A376E7U9_9FLAO Epoxyqueuosine reductase OS=Chryseobacterium shigense OX=297244 GN=queG PE=3 SV =1

SEQ ID NO: 75799 - protein, 314 aa, Chryseobacterium soldanellicola
  misc_feature (1)..(314): tr|A0A1H0Y4X4|A0A1H0Y4X4_9FLAO Epoxyqueuosine reductase OS=Chryseobacterium soldanellicola OX=311333 GN=queG P E=3 SV=1
MNSSAEKYSQLIKSKAKSFGFQSCGISKADFLEEDARHLEEWLKNNFHGEMKYMENHFDKRLDPRLLVEGSKSVISLSYNYFPKEKISSFENFKISKYAYAEDYHEVIKEILREMVADLQEEIGEFGFRVFVDSAPVLERSWAKKSGIGWVGKNANLITKQNGSFYFLAEIICDLELISDHETTDHCGTCRKCIDACPTDAIVSDKIIDGSKCISYATIELKNEIPDYFKDKMEDWMFGCDICQDVCPWNRFSAPNLQSRFSPNEALRNFKKGEWKELTQELFSEIFKKSPVKRTKFAGLKRNIEFLQQPSDKI

SEQ ID NO: 75800 - protein, 314 aa, Chryseobacterium soli
  misc_feature (1)..(314): tr|A0A086A8K0|A0A086A8K0_9FLAO Epoxyqueuosine reductase OS=Chryseobacterium soli OX=445961 GN=queG PE=3 SV=1
MNSNAEKYARLIKSKADRFGFQSCGISKADFLEEDARNLEKWLQNNFHGEMKYMENHFDKRLDPRLLVEGSRSVISLSYNYFPKEKISTLENYKISKYAYAEDYHEVVKEILRDMVLELQEEIGEFGFRVFVDSAPVLERSWARKSGIGWVGKNANLITKQSGSFYFLAEIICDLELAADHETTDHCGTCRKCIDACPTDAIVSEKIVDGSKCISYATIELKSEIPDSFKGKMEDWMFGCDICQDVCPWNRFSAPNIQSRFMPNEHLKNFKKGEWKELTQELFSEIFRKSPVKRTKFAGLKRNIEFLKSSSDPL

SEQ ID NO: 75801 - protein, 322 aa, Chryseobacterium solincola
  misc_feature (1)..(322): tr|A0A0C1CRW3|A0A0C1CRW3_9FLAO Epoxyqueuosine reductase OS=Chryseobacterium solincola OX=510955 GN=queG PE=3 S V=1
MPQSAEIYATLIKSKAEKFGFQSCGISRADFLADDAKPFENYLKNNYHGEMSYMENYFDKRLDPRLLVEGSKSVISLSYNYFPEEDLTKFGQLKISKYAYGQDYHEIIKNILREMVAELQEEIGDFECRVFTDSAPILERSWARKSGIGWVGKNANLITKQTGSFYFLAEIICDLELEIDAPTTDHCGSCRKCIDACPTEAIVSERIIDGSKCISYATIELKNEIPESFQGKMEDWMFGCDICQDVCPWNRFSKPHQQELFKPNQLLHKFEKSDWQELSQDLFSEIFKKSPVKRAKFSGLKRNIDFITQDSDVVDFKANLKL

SEQ ID NO: 75802 - protein, 307 aa, Chryseobacterium sp.
  misc_feature (1)..(307): tr|A0A357BB73|A0A357BB73_9FLAO Epoxyqueuosine reductase OS=Chryseobacterium sp. OX=1871047 GN=queG PE=3 SV=1
MNLQEKYSRLIKSKALAFGFQSCGISKADFLEKEAPRLEKWLRNGFHGKMGYMENHFDKRLDPRLLVEGARSVISLSYNYFPEKKQNPGNYKIAKYAYGEDYHDVIKEKLRHLVSELQNEVGEFGFRVFVDSAPVLEKAWAKKSGIGWVGKNSNLITKQHGSFYFLAEIICDLDLSEDSPVTDHCGSCTRCIDACPTQAIVSDKIIDGSRCISYATIELKDQIPDSFKDKMEDWMFGCDICQDVCPWNRFSAPTLEEKFRPKPAIMDFTKQDWKEITQEIFSSIFKGSAVKRTKFAGLKRNLDFLSE

SEQ ID NO: 75803 - protein, 314 aa, Chryseobacterium sp.; identical to SEQ ID NO: 75792
  misc_feature (1)..(314): tr|A0A1W2B5U9|A0A1W2B5U9_9FLAO Epoxyqueuosine reductase OS=Chryseobacterium sp. YR221 OX=1500293 GN=queG PE=3 SV=1

SEQ ID NO: 75804 - protein, 314 aa, Chryseobacterium taeanense
  misc_feature (1)..(314): tr|A0A1G8IQW0|A0A1G8IQW0_9FLAO Epoxyqueuosine reductase OS=Chryseobacterium taeanense OX=311334 GN=queG PE=3 S V=1
MNSNAEKYSQLIKARAQSFGFQSCGISKAGFLEEEARPLEAWLKNNFHGEMKYMENHFDKRLDPRLLVEGSKSVISLSYNYFPDEQISTLDNFKISKYAYAEDYHEVIKEILRDMVSGLQEEIGEFAFRVFVDSAPVLERSWARKSGIGWVGKNANLITKQNGSFYFLAEIICDLELIPDHETTDHCGTCRKCIDACPTNAIVSEKLIDGSKCISYATIELKDSIPDYFKDKMDDWMFGCDVCQDVCPWNRFSAPHHQTKFRPNESLKNFKKGEWKELTQELFSEVFRKSPVKRTKFAGLKRNIEFLEKKSDKL

SEQ ID NO: 75805 - protein, 316 aa, Chryseobacterium taichungense
  misc_feature (1)..(316): tr|A0A1H7YDK9|A0A1H7YDK9_9FLAO Epoxyqueuosine reductase OS=Chryseobacterium taichungense OX=295069 GN=queG PE= 3 SV=1
MNSNAEKYSQLIKARAKSFGFQSCGISKADFLEEDARPLEEWLKNNFHGEMKYMENHFDKRLDPRLLVEGSKSVISLSYNYFPEEKISTLDNFKISKYAYAEDYHEVIKDILREMVAGLQEDIGAFGFRVFVDSAPVLERSWARKSGIGWVGKNANLITKQNGSFYFLAEIICDLELIPDHETTDHCGTCRKCIDACPTNAIVSEKLIDGSKCISYATIELKNDIPDYFKDKMDDWMFGCDVCQDVCPWNRFSAPTHQKKFSPNQALKNFKKGEWKELTQELFSEIFRKSPVKRTKFAGLKRNIEFLERSSDKLNF

SEQ ID NO: 75806 - protein, 315 aa, Chryseobacterium taihuense
  misc_feature (1)..(315): tr|A0A1G9LDB0|A0A1G9LDB0_9FLAO Epoxyqueuosine reductase OS=Chryseobacterium taihuense OX=1141221 GN=queG PE=3 SV=1
MNSKAEKYSQLIKTKASSFGFQNCGISKADFLEEDAKHLENWLKRNYHGEMKYMENHFDKRLDPRLLVEGSRSVISLSYNYFPEEKIPSLDNFKISKYAYAEDYHEVIKDVLREMVTELQQEIGEFSYRVFVDSAPVMERSWAKKSGIGWVGKNANLITKQSGSFYFLAEIICDLELIADHETTDHCGTCRKCIDACPTDAIVSDKIVDGSKCISYATIELKNEIPDHFKNKMEDWMFGCDICQDVCPWNRFSVPNLQDKFKPNHQLRNFRKGEWKELTQDLFSEIFRKSPVKRTKFSGLKRNIDFLAQSEDRKP

SEQ ID NO: 75807 - protein, 314 aa, Chryseobacterium taiwanense
  misc_feature (1)..(314): tr|A0A0B4E3U4|A0A0B4E3U4_9FLAO Epoxyqueuosine reductase OS=Chryseobacterium taiwanense OX=363331 GN=queG PE=3 SV=1
MNSNAEKYSQLIKAKAKSFGFQNCGISKADFLEEDAPNLEKWLKNNFHGEMKYMENHFDKRLDPRLLVEGSKSVISLSYNYFPEEKISALENFKISKYAYAEDYHEVIKEILRDMVAELHDEIGEFGFRVFVDSAPVLERSWAKKAGIGWVGKNANLITKQSGSFYFLAEIICDLELVPDHPVTDHCGSCRKCIDACPTNAIISEKIIDGSKCISYATIELKNEIPDYFKDKMDDWMFGCDVCQDVCPWNRFSAPNAQTKFQPNEALKNFKKGEWKELTQELFSEIFRKSPVKRTKYAGLKRNIEFLDKSSEKK

SEQ ID NO: 75808 - protein, 316 aa, Chryseobacterium takakiae
  misc_feature (1)..(316): tr|A0A1M4ZHA8|A0A1M4ZHA8_9FLAO Epoxyqueuosine reductase OS=Chryseobacterium takakiae OX=1302685 GN=queG PE=3 S V=1
MNSNAEKYSQLIKAKAKSFGFQSCGISKADFLEEDAKPLEEWLKSNFHGEMKYMENHFDKRLDPRLLVEGSKSVISLSYNYFPEEKIPTLDNFKISKYAYAEDYHEVIKDILREMVSGLQQEIGEFAFRVFVDSAPVLERSWARKSGIGWVGKNANLITKQNGSFYFLAEIICDLELVPDHATTDHCGTCRKCIDACPTNAIVSDKLIDGTKCISYATIELKNEIPDYFKDKMDDWMFGCDVCQDVCPWNRFSAPTQQKKFAPNEALKNFKKDEWKELTQELFSEIFRKSPVKRTKFAGLKRNIEFLEKNNKSADL

SEQ ID NO: 75809 - protein, 315 aa, Chryseobacterium taklimakanense
  misc_feature (1)..(315): tr|A0A3G8WWE4|A0A3G8WWE4_9FLAO Epoxyqueuosine reductase OS=Chryseobacterium taklimakanense OX=536441 GN=queG P E=3 SV=1
MLPNREKYSALIKSRAKKFGFQSCGISKSGFLEEDAQPLEDYLAQGYHGEMQYMENYFDKRLDTTKLVEGSKSVISLSYNYFPEEEISTLDNYKISKYAYAEDYHEIIKEILREMITELQEEIGDFHFGIFVDSAPVLERSWARKSGIGWVGKNANLITKQKGSFFFLAEIICDLELEPDSPVTDHCGRCTSCIDACPTNAIVGDKIIDGSKCISYATIELKNEIPESFKNKMEDWMFGCDICQDVCPWNRFSVPHNQPKFLPNHLLRTYRKDDWKELTQELFSEIFRKSPVKRTKFAGLKRNIEFLGDRPDPEV

SEQ ID NO: 75810 - protein, 325 aa, Chryseobacterium taklimakanense
  misc_feature (1)..(325): tr|A0A239XUY0|A0A239XUY0_9FLAO Epoxyqueuosine reductase OS=Chryseobacterium taklimakanense OX=536441 GN=queG P E=3 SV=1
MNCLIFALSLMLPNREKYSALIKSRAKKFGFQSCGISKSGFLEEDAQPLEDYLGQGYHGEMQYMENYFDKRLDTTKLVEGSKSVISLSYNYFPEEEISTLDNYKISKYAYAEDYHEIIREILREMVAELQEEIGDFHFRIFVDSAPVLERSWARKSGIGWVGKNANLITKQKGSFFFLAEIICDLELEPDSPVTDHCGRCTSCIDACPTNAIVGDRIIDGSKCISYATIELKNEIPESFKNKMEDWMFGCDICQDVCPWNRFSVAHNQPKFLPNHILRTYRKADWKELTQELFSEIFRKSPVKRTKFAGLKRNIEFLGDRPDPEV

SEQ ID NO: 75811 - protein, 333 aa, Chryseobacterium treverense
  misc_feature (1)..(333): tr|A0A1I3JSY0|A0A1I3JSY0_9FLAO Epoxyqueuosine reductase OS=Chryseobacterium treverense OX=631455 GN=queG PE=3 SV=1
MLPQSAEIYATLIKSKAEKFGFQSCGISRADFLADDAKPLENYLKNNYHGEMSYMENYFDKRLDPRLLVEGSKSVISLSYNYFPEEDLTKFGQLKISKYAYGQDYHEIIKNILREMVAELQEEIGDFECRIFTDSAPILERSWARKSGIGWVGKNANLITKQTGSFYFLAEIICDLELEIDAPTTDHCGSCRKCIDACPTDAIVSERIIDGSKCISYATIELKNEIPESFKGKMQDWMFGCDICQDVCPWNRFSKPHHQELFKPNQLLHKFEKSDWQELSQDLFSEIFKKSPVKRTKFSGLKRNIDFLTKQPETFNFKEKVNPEKISAPQNMD

SEQ ID NO: 75812 - protein, 315 aa, Chryseobacterium ureilyticum
  misc_feature (1)..(315): tr|A0A1N7PCG9|A0A1N7PCG9_9FLAO Epoxyqueuosine reductase OS=Chryseobacterium ureilyticum OX=373668 GN=queG PE=3 SV=1
MKLINAGAEKYSQLIKSKAKSFGFQSCGISKADFLEEDAAHLEKWLKNNFNGEMKYMENHFDKRLDPRLLVEGSKSVISLSYNYFPEEKISILENFKISKYAYAEDYHEVIKEILREMVAELQEEIGEFGFRVFVDSAPILERSWARKSGIGWVGKNANLITKQNGSFYFLAEIICDLELVPDHETTDHCGTCRKCIDACPTDAIVSEKIIDGSRCISYATIELKNEIPDSFKDKMEDWMFGCDICQDVCPWNRFSAPHQQSRFKPNEALKNFKKGEWKEITQEIFSEIFRKSPVKRTKFAGLKRNIEFLQKSSD

SEQ ID NO: 75813 - protein, 312 aa, Chryseobacterium viscerum
  misc_feature (1)..(312): tr|A0A316WF45|A0A316WF45_9FLAO Epoxyqueuosine reductase OS=Chryseobacterium viscerum OX=1037377 GN=queG PE=3 S V=1
MNAGAEKYSQLIKSKAKSFGFQSCGISKTDFLEEDAPHLEKWLKNNYNGEMKYMENHFDKRLDPRLLVEGSKSVISLSYNYFPEEKISILENYKISKYAYAEDYHEVIKEILREMVAELQEEIGEFGFRVFVDSAPVMERSWARKSGLGWVGKNANLITRQNGSFYFLAEIICDLELIPDHATTDHCGTCRKCIDACPTDAIVSEKIIDGSRCISYATIELKEEIPDYFKDKMEDWMFGCDICQDVCPWNRFSAPNKQSRFKPNESLKNFKKGEWKELTQEIFSEIFRKSPVKRTKFAGLKRNIEFLQRSSD

SEQ ID NO: 75814 - protein, 314 aa, Chryseobacterium wanjuense
  misc_feature (1)..(314): tr|A0A1I0S069|A0A1I0S069_9FLAO Epoxyqueuosine reductase OS=Chryseobacterium wanjuense OX=356305 GN=queG PE=3 S V=1
MNSNAEKYSQLIKSKAKSFGFQSCGISKADFLEDDARHLETWLKNNFHGEMKYMENHFDKRLDPRLLVEGSKSVISLSYNYFPKEKISALENFKISKYAYAEDYHEVIKEILREMIAELQEEIGAFGFRVFVDSAPVMERSWAKKSGIGWVGKNANLITKQNGSFYFLAEIICDLELIPDHETTDHCGTCRKCIDACPTDAIVSDKIIDGSKCISYATIELKNEIPDYFKDKMDDWMFGCDVCQDVCPWNRFSVPNLQSRFAPNEALKNFKKGEWKELTQELFSEIFRKSPVKRTKFAGLKRNIEFLGGSSDKN

SEQ ID NO: 75815 - protein, 311 aa, Chryseobacterium xixisoli
  misc_feature (1)..(311): tr|A0A4R8IEG2|A0A4R8IEG2_9FLAO Epoxyqueuosine reductase OS=Chryseobacterium xixisoli OX=1476462 GN=queG PE=3 S V=1
MCCNMSNQEKYSSLIKSKALAFGFQSCGISKADFLEEEAPNLEKWLKNNFNGEMRYMENHFDKRLDPRLLVEGSKSVISLSYNYFPEELQTNTDFKLSKYAYGEDYHEVIKDKLRNLVAELQSEIGEFSFRVFVDSAPVLEKAWAKKSGIGWVGKNSNLITKKNGSFYFLAEIICDLDLIQDSPVTDHCGSCTKCIDACPTQAIISDKIIDGSKCISYATIELKDQIPDFFKDKMEDWMFGCDICQDVCPWNRFSAPTLEEKFRPNSEIKNFTKQEWKDITQEIFSSVFKKSAVKRTKFSGLKRNLDFLSG

SEQ ID NO: 75816 - protein, 307 aa, Chryseobacterium zeae
  misc_feature (1)..(307): tr|A0A1N6EPT6|A0A1N6EPT6_9FLAO Epoxyqueuosine reductase OS=Chryseobacterium zeae OX=1416779 GN=queG PE=3 SV=1
MNNKERYSNLIKSKAMAFGFQSCGISKADFLEEEAPHLEQWLKNNFHGEMKYMENYFDKRLDPRLLVEGSKSVISLSYNYFPEEIQTNKDFKLAKYAYGEDYHDVIKDKLRLMIAELQEEIGEFSFRVFVDSAPVLEKAWAKKSGIGWVGKNSNLITKKNGSFYFLAEIICDLDLIQDYVVTDHCGSCTKCIDACPTQAIVSDKIIDGSKCISYATIELKDQIPDFFKDKMEDWMFGCDICQDVCPWNRFSAPTLEEKFRPNSEIKNFTKQEWKDITKEVFSKVFRKSAVKRTKFVGLKRNLDFLSE

SEQ ID NO: 75817 - protein, 309 aa, Chryseolinea flava
  misc_feature (1)..(309): tr|A0A364Y6K1|A0A364Y6K1_9BACT Epoxyqueuosine reductase OS=Chryseolinea flava OX=2059302 GN=queG PE=3 SV=1
MHLAARTQFIKETAKSLGFSFCGISKAEFLDEEAPLLEQWLRKQYQGKMLYLENHFDKRLDPTLLVPGAKSVVSLLYNYAPEKDIAAEGDFKIAKYAYGEDYHFVIKDKLKHFLHLLEEKIGHVEGRAFVDSAPVMERAWAKRSGLGWIGKNSLLLNRGMGSFFFIAELIIDLELDYDGPIKDYCGTCTACMDACPTDAIPQPYVVDGSKCISYFTIELKEEIPADVKGKFENWIFGCDICQDVCPWNSFAKPHQEQRFQPSSTLREMSPGDWREITEEVFKTLFKNSPIQRTKLTGLKRNIKFVSESG

SEQ ID NO: 75818 - protein, 317 aa, Chryseolinea serpens
  misc_feature (1)..(317): tr|A0A1M5WET2|A0A1M5WET2_9BACT Epoxyqueuosine reductase OS=Chryseolinea serpens OX=947013 GN=queG PE=3 SV=1
MTAHHTAFVKTTAAALGFSFCGISKAEFLKDEAPRLEEWLKRGYQGKMGYLENHFDKRLDPTLLVPGAKSVVSLIYNYAPQKPLEGKSDLKIARYAYGEDYHTVVKDKLKIFLDKIREGVGEVHGRAFVDSAPVMERAWAKRSGLGWIGKNSLLLNRSHGSFFFLAELIIDLELDHDEGMKDYCGTCTACMDACPTDAISEPYVVDGSKCISYFTIELKEEIPASVKGKFDNWIFGCDICQEVCPWNSFAKPHQEQRFNPPPELENMTRQDWREITEDVFKKLFPKSAVQRTKLKGLQRNILFVEDQDARPGDRERE

SEQ ID NO: 75819 - protein, 317 aa, Chryseolinea sp.
  misc_feature (1)..(317): tr|A0A385SMR3|A0A385SMR3_9BACT Epoxyqueuosine reductase OS=Chryseolinea sp. KIS68-18 OX=2321403 GN=queG PE=3 S V=1
MTAHHTAFVKATAASLGFSFCGISKAEFLKDEAPRLEEWLKRGYQGKMGYLENHFDKRLDPTLLVPGAKSVVSLIYNYAPQKPLEGKSDLKIARYAYGEDYHTVVKDKLKIFLDKIQEEIGEVHGRAFVDSAPVMERAWAKRSGLGWIGKNSLLLNRSQGSFFFLAELIIDLELDHDEGMKDYCGTCTACMDACPTDAISEPYVVDGSKCISYFTIELKEEIPASVKGKFDNWIFGCDICQEVCPWNSFAKPHQEQRFNPPPELENMTRQDWREITEDVFKKLFPKSAVQRTKLKGLQRNILFVEDENVRRGDRERE

SEQ ID NO: 75820 - protein, 377 aa, Chryseomicrobium excrementi
  misc_feature (1)..(377): tr|A0A2M9F3V3|A0A2M9F3V3_9BACL tRNA epoxyqueuosine(34) reductase QueG OS=Chryseomicrobium excrementi OX=204134 6 GN=queG PE=4 SV=1
MNVRDFQQQLIHYAHSIGIDKIGFASAAPFPDLKQRLLLQQQLGYASGFEEPDITKRTEPVQLLDGVQTIISIALAYPSKMKDAPQSKRGARRGIFARASWGMDYHTVLREKLAKLEAFILVHAPDAKLKSMVDTGELSDRAVAERAGIGWSAKNCSIITPEFGSYVYLGEMLTNLPFEPSVPMEDECGDCRLCLDICPTGALIEGGQLNAQRCIAFLTQTKTMVPKEFRAKIGNRVYGCDTCQTVCPKNKGKHSAHQQDFTPDPELVKPLLMPLLEHTNRTFKETYGHMSGAWRGKNPIQRNAIIALVHFKERESIPKLISILSEDPRPVMRGTAAWALGELTSTEGTEALRHQLDQEKEGLVIEEIQEALLKGEQ

SEQ ID NO: 75821 - protein, 310 aa, Chrysiogenales bacterium
  misc_feature (1)..(310): tr|A0A524PZ97|A0A524PZ97_9BACT Epoxyqueuosine reductase (Fragment) OS=Chrysiogenales bacterium OX=2528039 GN=E 4G96_06595 PE=4 SV=1
KSIIVLVESYFTAAFPPEMERIFGRCYLDDDRITKDGLSRRIKTFRQFLRDNGIESKVPFNLPHRAAAVRAGLGGTGKNCLFYSRSAARKSSWVFPFTVTVDREFVPDRPSEGMECPEWCRNACVAACPTRALKGNSRVDPRKCISFLSYFGSGLTPRDLREPMGMYVYGCDRCQEVCPRNAPWLAQDLPVNERVAAKAQYFDLPRLLHMDREYFTARIWPHMFYMPPDDIWRWKMNVARVMGNSTDEKYTSDLSRAFRENDDPRVKGMAAWALGKIGGAEAKSLLHGFMKEAGDDTIRDEIGHALTMCG

SEQ ID NO: 75822 - protein, 349 aa, Chthoniobacter flavus
  misc_feature (1)..(349): tr|B4D532|B4D532_9BACT Epoxyqueuosine reductase OS=Chth oniobacter flavus Ellin428 OX=497964 GN=queG PE=3 SV=1
MVDRPVKEELLALTHQLGFDLCRIAVCAAPPHAAEFRAWLAAGRAGEMAWLERNEARRTDPQQVLPGAKSVIVLGMNYWNADGETRKEEGVHGRIARYAWGDDYHDIIEKKLKALDEWLTARGGRQRCYVDTGPVLERDVAAVAGAGWQGKSTMLIHPQLGTWFFLAEILTTLEFEADAPMADHCGKCTRCIAACPTGAITAPRQLDARRCVSYLTIENKGSIPEEFRAAIGDRIYGCDDCLTACPWNRFAHASRESAFAAREYVHGWSLRDFLGLDDDAFRQLFRKSPIKRIKRRGFLRNVCVALGNIGTREDLPALEKAAHDPEPLIAEHAQWAIERIEARVVAQAR

SEQ ID NO: 75823 - protein, 346 aa, Chthoniobacterales bacterium
  misc_feature (1)..(346): tr|A0A2W5ZWY0|A0A2W5ZWY0_9BACT tRNA epoxyqueuosine(34) reductase QueG OS=Chthoniobacterales bacterium OX=22011 54 GN=queG PE=4 SV=1
MEIVDRARVLGFDLCRIATADAPRHGEEFRAWLREGAAGEMDWMARGEEKRCDPQQVLPGARSVIVVALNYWQGEQTASPATGRIARYAWGDDYHEVMLTKLEQLDAFLIEHGGIQKCYVDTGPVLERDHAAEAGIGWHGKSTMLIDPKLGTWFFLAEILTTLALPPDAPQPARCGSCQRCITACPTGAITEPHRLDARRCISYLTIELKGSIPLELRPLIGDRIYGCDDCLDACPWNRFASVSREASFAAGPATTMTLRDYLALDDAKFRELFRRSPIKRIKRRGFLRNVCVALGNVGNHADLSALETAAVDPEPLIAEHATWAIERIHARLSVRSPDEPGHAII

SEQ ID NO: 75824 - protein, 354 aa, Chthoniobacterales bacterium
  misc_feature (1)..(354): tr|A0A2W5YHJ1|A0A2W5YHJ1_9BACT Epoxyqueuosine reductase OS=Chthoniobacterales bacterium OX=2201154 GN=queG PE= 3 SV=1
MSSDLRDQVVVLASEIGFDLCRFTRADAPTHAREFRDWLEQGAAGEMNYLERNAQRRCDPQLVLPGVKTVIVVALNYFQEGRRSQTAATGRIARYAWGEDYHPLIEKKLKKLDEFLRGHGGVQKCYVDTGPMLERDHAAAAGIGWQGKSTMLLNRELGAWFFLAEILTTLEFAPSAPEANRCGTCTRCIAACPTGALTPHRLDARRCISYLTIELKGSIPPELRPLIGDRIYGCDECLDVCPWNRFARASREAAFQMRPEVAAMRLRDYLELDDERFRQLFRNSPIRRTKRRGLLRNVCVALGNVGTADDLPALRKAAAGPEPLIAEHAAWAIEQIESRAVPLPPRRTAATTMV

SEQ ID NO: 75825 - protein, 363 aa, Chthonomonas calidirosea
  misc_feature (1)..(363): tr|S0EY00|S0EY00_CHTCT Epoxyqueuosine reductase OS=Chth onomonas calidirosea (strain DSM 23976 / ICMP 18418 / T 49) OX=1303518 GN=queG PE=3 SV=1
MMQTTTTREEQIKAYAKELGFDLVGIAEAIPSIFQQQYRDWLEKGYAGQMEYLARNLERRLNPQELLPNARSLIVVAMNYYADTEEGPGTPPVRPNHAIFARYARGDDYHDVITKRLYQLLEYIKKRIDPNAAGRVYVDAGPLLEREVAQRAGLGWFGKNTMLINSRRGSYFFLGALVTDLDLEPDRPAQGHCGRCKRCIEACPTGALIAPYQLDARRCISYLTIELKEAIPVELRPALSANGNRIFGCDICQEVCPFNQKFSVPTTEPAFQPREITRNSRLVNLLQLSEPEFREKFRKSPVKRAKRRGLLRNVATALAYSDDPEAEAALQNAAEHDPDPLVREHAAWALDTLRKRKTTSSSP

SEQ ID NO: 75826 - protein, 389 aa, Ciceribacter sp.
  misc_feature (1)..(389): tr|A0A4Q2SZ10|A0A4Q2SZ10_9RHIZ Epoxyqueuosine reductase OS=Ciceribacter sp. F8825 OX=2509717 GN=queG PE=3 SV=1
MSADGAPERPTDDKAVRLRHRLTAFIREEATAQGFELCRVTRPDGIPEAPARLAAYIEAGYHGTMGWMEETRQRRADPKVLWSDVRSIVMFGMNYGPEEDPRSVLGKKDRAAISVYARNRDYHDVMKGRLKEIAGRFAARAGADVKVFVDTAPIMEKPLAAAAGLGWQGKHTNLVSREYGSWLFLGSLFTTAELDVDPPETDHCGSCRACLDACPTAAFPAPYRIDARRCISYLTIEHKGPIDRALRPAFGNRVYGCDDCLAACPWNKFAETAREMKLKARDDLREPEIAHLLSLDDAAFRTLFSGSPVKRIGRNRFIRNLLIAAGNSARPELAEPCRRLLDDDAPEVRGMAVWALSRLIDRDTFEALQLGHRPQEQDPDVQAEWDFGR

SEQ ID NO: 75827 - protein, 353 aa, Citreicella sp.
  misc_feature (1)..(353): tr|A0A355QU10|A0A355QU10_9RHOB Epoxyqueuosine reductase OS=Citreicella sp. OX=1960284 GN=queG PE=3 SV=1
MNEQGQHEDLKARLVEEARAVGFSACRICRPGDVPQVAERLAEFLAAGRHGQMGWMAERTGWRGDPTALWPEARSVIMLAENYGPDHDPRAVLARPERAAVSVYAQNRDYHDVVKKRLKRLGRWLMAAAEAEAPQIKVFVDTAPVMEKPLGQAAGLGWQGKHTNLVSRDLGSWFFLGSIFTTLALPVDGAERDHCGSCRACLDACPTDAFPAPYQLDARRCISYLTIEHAGPVAEDLRPLLGNRIYGCDDCLAACPWNKFAEQAAEIKYHARDDLRAPALADLARLDDAGFRALFSGSPIKRIGRDRFVRNVLYAIGNSGRGDLREVAQGLCADADDTVRDAAHWAVARLAQG

SEQ ID NO: 75828 - protein, 349 aa, Citreicella sp.
  misc_feature (1)..(349): tr|D0DBE6|D0DBE6_9RHOB 4Fe-4S ferredoxin, iron-sulfur c luster binding protein OS=Citreicella sp. SE45 OX=50147 9 GN=CSE45_2946 PE=4 SV=1
MSLKERLVAEAGATGFAASRVCRPGDVPQAAGRLAAFLDAGHHGQMGWMAERTAWRGNPAALWPEARSVIMLAENYGPEGDPLAVLEQRDRAAISVYAQNRDYHDVVKKKLKRLGRWLLAAAEKELGLAAEIKVFVDTAPVMEKPLGQAAGLGWQGKHTNLVSREIGSWFFLGAIFTTLELAPDGAERDHCGSCRACLDICPTGAFPAPYQLDARRCISYLTIEHGGPVDEELRSLLGNRIYGCDDCLAVCPWNKFAHRAGEAKYHAREELLAPELSELAGLDDAGFRALFSGSPIKRIGRDRFVRNVCYAIGNSGDAALRPAAQALCDDPDPALRDAARWAVARLDGV

SEQ ID NO: 75829 - protein, 349 aa, Citreimonas salinaria
  misc_feature (1)..(349): tr|A0A1H3HW28|A0A1H3HW28_9RHOB Epoxyqueuosine reductase OS=Citreimonas salinaria OX=321339 GN=queG PE=3 SV=1
MPIADAADLKQRVFARALEEGFSSARVCAPDAVPQVMERLQAYLDAGYHGQMGWMADRVHWRGDPAALWPEARSVIMLAENYGPDHDPLAVLETPESAAISVYAQNRDYHDVAKKRLKRLGRWLIDEAGGEIKVFVDTAPVPEKALAQAAGLGWQGKHTNVVSRELGSWFFLGCLFTTLDLPKDAAEVDHCGSCRRCLDVCPTDAFPAPYRLDARRCISYLTIEHKGPVDEALRPALGNRIYGCDDCLAVCPWNKFAQASAEAKYHARDDLLAPDLADLAALDDAAFRALFSGSPIKRIGRDRFVRNVCYAIGNSGAARLVPAAQALCDDPDPAVADAARWAVDRLRGD

SEQ ID NO: 75830 - protein, 384 aa, Citrobacter amalonaticus
  misc_feature (1)..(384): tr|A0A2U4DSZ5|A0A2U4DSZ5_CITAM Epoxyqueuosine reductase OS=Citrobacter amalonaticus OX=35703 GN=queG PE=3 SV=1
MVWSVMSEPLDLNQLAQKIKQWGLELGFQQVGITDTDLSESEPKLQAWLDKQYHGEMDWMARHGMMRARPHELLPGTLRVISVRMNYLPAHAAFASTLKNPTQGYISRYALGRDYHKLLRNRLKKLGERIQQHCVSLNFRPFVDSAPILERPLAEKAGLGWTGKHSLILNREAGSFFFLGELLIDLPLPVDAPVEERCGKCVACITTCPTGAIVAPYTVDARRCISYLTIELEGAIPEALRPLMGNRIYGCDDCQLICPWNRYSQLTDEDDFSPRKPLHAPELIELFARNEAWFLKVTEGSAIRRIGHLRWLRNIAVALGNAPWSDAALSALESRRGEHPLLDEHIEWAVAQQIAKRNADVIEVQSPKQRRLVNAIEKGLPRDA

SEQ ID NO: 75831 - protein, 379 aa, Citrobacter amalonaticus
  misc_feature (1)..(379): tr|A0A0F6TZT2|A0A0F6TZT2_CITAM Epoxyqueuosine reductase OS=Citrobacter amalonaticus Y19 OX=1261127 GN=queG PE= 3 SV=1
MSEPLDLNQLAQKIKQWGLELGFQQVGITDTDLSESEPKLQAWLDKQYHGEMDWMARHGMMRARPHELLPGTLRVISVRMNYLPAHAAFASTLKNPALGYISRYALGRDYHKLLRNRLKKLGERIQQHCVTLNFRPFVDSAPILERPLAEKAGLGWTGKHSLILNREAGSFFFLGELLIDLPLPVDAPVAEECGKCVACITTCPTGAIVAPYTVDARRCISYLTIELEGAIPESLRPLMGNRIYGCDDCQLICPWNRYSHLTSEDDFSPRKALHAPELVELFAWSEATFLKMTEGSAIRRIGHLRWLRNIAVALGNAPWNDAALSALESRRGEHSLLDEHIEWAVAQQIAKRNACVIDVQSPKQRRLVNAIEKGLPRDA

SEQ ID NO: 75832 - protein, 379 aa, Citrobacter braakii
  misc_feature (1)..(379): tr|A0A1R0FQQ1|A0A1R0FQQ1_CITBR Epoxyqueuosine reductase OS=Citrobacter braakii OX=57706 GN=queG PE=3 SV=1
MSEPLDLNQLAQNIKQWGLELGFQQVGIADTDLSEAEPKLQAWLDKHYHGEMDWMARHGMMRARPHELLPGTLRVISVRMNYLPANAAFASTLKNPSLGYVSRYALGRDYHKLLRNRLKKLGERIQQHCVSLNFRPFVDSAPILERPLAEKAGLGWTGKHSLILNREAGSFFFLGELLIDLPLPVDNPVEEGCGKCVACMTICPTGAIVEPYTVDARRCISYLTIELEGPIPEEFRPLLGNRIYGCDDCQLICPWNRYSQLTTEDDFNTRKQLHAPELIELFSWSEAWFLKVTEGSAIRRIGHLRWLRNIAVALGNAPWDEAVIHALESRRGEHPLLDEHIEWAVAQQIEKRNACVVEVQLPKKQRLVRVIEKGLPRDA

SEQ ID NO: 75833 - protein, 379 aa, Citrobacter braakii
  misc_feature (1)..(379): tr|A0A1V8NWA5|A0A1V8NWA5_CITBR Epoxyqueuosine reductase OS=Citrobacter braakii OX=57706 GN=queG PE=3 SV=1
MSEPLDLNQLAQNIKQWGLELGFQQVGIADTDLSEAEPKLQAWLDKHYHGEMDWMARHGMMRARPHELLPGTLRVISVRMNYLPANAAFASTLKNPSLGYVSRYALGRDYHKLLRNRLKKLGERIQQHCVSLNFRPFVDSAPILERPLAEKAGLGWTGKHSLILNRAAGSFFFLGELLIDLPLPVDNPVEEGCGKCVACMTICPTGAIVEPYTVDARRCISYLTIELEGAIPEEFRPLLGNRIYGCDDCQLICPWNRYSQLTTEDDFNPRKQLHAPELIELFSWSEAWFLKVTEGSAIRRIGHLRWLRNIAVALGNAPWDEAVIHALESRRGEHPLLDEHIEWAVAQQIEKRNACVVEVQLPKKQRLVRVIEKGLPRDA

SEQ ID NO: 75834 - protein, 379 aa, Citrobacter farmeri
  misc_feature (1)..(379): tr|A0A223JWZ5|A0A223JWZ5_9ENTR Epoxyqueuosine reductase OS=Citrobacter farmeri OX=67824 GN=queG PE=3 SV=1
MSEPLDLNQLAQKIKQWGLELGFQQVGITDTDLSESEPKLQAWLDKQYHGEMDWMARHGMMRARPHELLPGTLRVISVRMNYLPAHAAFASTLKNPTQGYISRYALGRDYHKLLRNRLKKLGEMIQQHCVSLNFRPFVDSAPILERPLAEKAGLGWTGKHSLILNREAGSFFFLGELLIDLPLPVDAPVAEGCGKCVACITTCPTGAIVAPYTVDARRCISYLTIELEGAIPEALRPLMGNRIYGCDDCQLICPWNRYSQLTSEDDFSPRKALHAPELLELFAWNEATFLKITEGSAIRRIGHLRWLRNIAVALGNAPWSDAVLSALESRRGEHPLLDEHIEWAVAQQIAKRNACVVDVQSPKQRRLVNAIEKGLPRDA

SEQ ID NO: 75835 - protein, 379 aa, Citrobacter freundii
  misc_feature (1)..(379): tr|A0A427L9J6|A0A427L9J6_CITFR Epoxyqueuosine reductase OS=Citrobacter freundii OX=546 GN=queG PE=3 SV=1
MSEPLDLNQLAQNIKQWGLELGFQQVGIADTDLSEAEPKLQAWLDKQYHGEMDWMARHGMMRARPHELLPGTLRVISVRMNYLPANAAFASTLKNPSLGYVSRYALGRDYHKLLRNRLKKLGEMIQQHCVSLNFRPFVDSAPILERPLAEKAGLGWTGKHSLILNREAGSFFFLGELLIDLPLPIDQPVEEGCGKCVACMTICPTGAIVEPYTVDARRCISYLTIELEGAIPEEFRPLMGNRIYGCDDCQLICPWNRYSQLTAEDDFNPRKQLHAPELIELFSWSEAWFLKVTEGSAIRRIGHLRWLRNIAVALGNAPWDEAILHALESRRGEHPLLDEHIEWAVAQQIEKRNACVVEVQLPQKQRLVRVIEKGLPRDA

SEQ ID NO: 75836 - protein, 379 aa, Citrobacter freundii
  misc_feature (1)..(379): tr|A0A064DFM0|A0A064DFM0_CITFR Epoxyqueuosine reductase OS=Citrobacter freundii MGH 56 OX=1439318 GN=queG PE=3 SV=1
MSEPLDLNQLAQNIKQWGLELGFQQVGIADTDLSEAEPKLQAWLDKHYHGEMDWMARHGMMRARPHELLPGTLRVISVRMNYLPAKAAFASTLKNPLLGYVSRYALGRDYHKLLRNRLKKLGEMIQQHCVSLNFRPFVDSAPILERPLAEKAGLGWTGKHSLILNREAGSFFFLGELLIDLPLPVDQPVEEGCGKCVACMTICPTGAIVEPYTVDARRCISYLTIELEGAIPEEFRPLMGNRIYGCDDCQLICPWNRYSQLTAEDDFSPRKQLHAPELIELFSWSEAWFLKVTEGSAIRRIGHLRWLRNIAVALGNAPWDDAVIHALESRRGEYTLLDEHIDWAVAQQIEKRNACVVEVQLPKKQRLVRVIEKGLPRDA

SEQ ID NO: 75837 - protein, 379 aa, Citrobacter gillenii
  misc_feature (1)..(379): tr|A0A3E2KW92|A0A3E2KW92_9ENTR Epoxyqueuosine reductase OS=Citrobacter gillenii OX=67828 GN=queG PE=3 SV=1
MSEPLDLNQLAQKIKQWGLELGFQQVGIADTDLSEAEPKLQAWLDKQYHGEMDWMARHGMMRARPHELLPGTLRVISVRMNYLPANAAFASTLKNPSLGYISRYALGRDYHKLLRNRLKKLGELIQQHCVSLNFRPFVDSAPILERPLAEKAGLGWVGKHSLILSREAGSFFFLGELLIDLPLPVDQPVEEACGKCVACMTICPTGAIVEPYTVDARRCISYLTIELEGAIPEEFRPLLGNRIYGCDDCQLICPWNRYSQLTVEDDFSPRKQLHAPELIELFGWSEAWFLKVTEGSAIRRIGHLRWLRNIAVALGNAPWDETVINALENRRGEHPLLDEHIEWAIAQQIEKRNACVVEVQLPKKQRLVRVIEKGLPRDA

SEQ ID NO: 75838 - protein, 199 aa, Citrobacter koseri
  misc_feature (1)..(199): tr|A0A3S4KN03|A0A3S4KN03_CITKO (4Fe-4S)-binding protein OS=Citrobacter koseri OX=545 GN=queG_1 PE=4 SV=1
MPLPIDTPVEEGCGKCVACLTICPTGAIVEPYTVDARRCISYLTIELEGAIPEALRPLMGNRIYGCDDCQLICPWNRYSQLTDEEDFSPRKHLHAPELIELFGWSEAWFLKVTEGSAIRRIGHLRWLRNIAVALGNAPWDNAVITALESRRGEHPLLDEHIEWAIAQQIEKRNACVVEVQLPKKQRLVRVIEKGLPRDA

SEQ ID NO: 75839 - protein, 379 aa, Citrobacter koseri
  misc_feature (1)..(379): tr|A8AMN5|A8AMN5_CITK8 Epoxyqueuosine reductase OS=Citr obacter koseri (strain ATCC BAA-895 / CDC 4225-83 / SGS C4696) OX=290338 GN=queG PE=3 SV=1
MSEPLDLNQLAQNIKQWGLELGFQQVGITDTDLSASEPKLQAWLDKQYHGEMDWMARHGMMRARPHELLPGTLRVISVRMNYLPANAAFASTLKNPSLGYVSRYALGRDYHKLLRNRLKKLGERIQQHCVSLNFRPFVDSAPILERPLAEKAGLGWTGKHSLILNREAGSFFFLGELLIDLPLPIDAPVEEGCGKCVACLTICPTGAIVEPYTVDARRCISYLTIELEGAIPEALRPLMGNRIYGCDDCQLICPWNRYSQLTDEEDFSPRKHLHAPELIELFGWSEAWFLKVTEGSAIRRIGHLRWLRNIAVALGNAPWDNAVITALESRRGEHPLLDEHIEWAIAQQIEKRNACVVEVQLPKKQRLVRVIEKGLPRDA

SEQ ID NO: 75840 - protein, 379 aa, Citrobacter murliniae
  misc_feature (1)..(379): tr|A0A4S3RTY4|A0A4S3RTY4_9ENTR Epoxyqueuosine reductase OS=Citrobacter murliniae OX=67829 GN=queG PE=3 SV=1
MSEPLDLNQLAQNIKQWGLELGFQQVGIADTNLSEAEPKLQAWLDKHYHGEMDWMARHGMMRARPQELLPGTLRVISVRMNYLPANAAFASTLKNPTLGYVSRYALGRDYHKLLRNRLKKLGEMIQQHCVSLNFRPFVDSAPILERPLAEKAGLGWTGKHSLILNREAGSFFFLGELLVDLPLPVDLPAEEGCGKCVACMTICPTGAIVEPYTVDARRCISYLTIELEGAIPQEFRPLLGNRIYGCDDCQLICPWNRYSQLTVEDDFSPRKQLHAPELIELFSWSEAWFLKVTEGSAIRRIGHLRWLRNIAVALGNAPWDGAVINALENRRGEHPLLDEHIEWAIAQQIEKRNACVVEVQLPKKQRLVRVIEKGLPRDA

SEQ ID NO: 75841 - protein, 379 aa, Citrobacter pasteurii
  misc_feature (1)..(379): tr|A0A0A1RWV6|A0A0A1RWV6_9ENTR Epoxyqueuosine reductase OS=Citrobacter pasteurii OX=1563222 GN=queG PE=3 SV=1
MSEPLDLNQLAQNIKQWGLELGFQQVGIADTDLSEAEPKLQAWLDKQYHGEMDWMARHGMMRARPHELLPGTLRVISVRMNYLPANAAFASTLKNPSLGYVSRYALGRDYHKLLRNRLKKLGERIQQHCVSLNFRPFVDSAPILERPLAEKAGLGWTGKHSLILNREAGSFFFLGELLIDLPLPVDKPVEEGCGKCVACMTICPTGAIVEPYTVDARRCISYLTIELEGALPEEFRPLLGNRIYGCDDCQLICPWNRYSQLTTEDDFSPRKQLHAPELIALFSWSEAWFLKVTEGSAIRRIGHLRWLRNIAVALGNAPWDEAVIHALESRRGEHPLLDEHIDWAVAQQIEKRNACVVEVQLPKKQRLVRVIEKGLPRDA

SEQ ID NO: 75842 - protein, 379 aa, Citrobacter portucalensis
  misc_feature (1)..(379): tr|A0A4P7UQK2|A0A4P7UQK2_9ENTR Epoxyqueuosine reductase OS=Citrobacter portucalensis OX=1639133 GN=queG PE=3 S V=1
MSEPLDLNQLAQNIKQWGLELGFQQVGIADTDLSEAEPKLQAWLDKQYHGEMDWMARHGMMRARPHELLPGTLRVISVRMNYLPANAAFASTLKNPSLGYVSRYALGRDYHKLLRNRLKKLGEMIQQHCVSLNFRPFVDSAPILERPLAEKAGLGWTGKHSLILNREAGSFFFLGELLIDLPLPIDQPVEEGCGKCVACMTICPTGAIVEPYTVDARRCISYLTIELEGAIPEEFRPLLGNRIYGCDDCQLICPWNRYSQLTAEDDFNPRKQLHAPELIELFSWSEAWFLKVTEGSAIRRIGHLRWLRNIAVALGNAPWNEAILHALESRRGEHPLLDEHIEWAVAQQIEKRNACVVEVQLPQKQRLVRVIEKGLPRDA

SEQ ID NO: 75843 - protein, 379 aa, Citrobacter portucalensis
  misc_feature (1)..(379): tr|A0A5A9BXI6|A0A5A9BXI6_9ENTR Epoxyqueuosine reductase OS=Citrobacter portucalensis OX=1639133 GN=queG PE=3 S V=1
MSEPLDLNQLAQNIKQWGLELGFQQVGIADTDLSEAEPKLQAWLDKQYHGEMDWMARHGMMRARPHELLPGTLRVISVRMNYLPANAAFASTLKNPSLGYVSRYALGRDYHKLLRNRLKKLGEMIQQHCVSLNFRPFVDSAPILERPLAEKAGLGWTGKHSLILNREAGSFFFLGELLIDLPLPVDQPAEEGCGKCVACMTICPTGAIVEPYTVDARRCISYLTIELEGAIPEEFRPLMGNRIYGCDDCQLICPWNRYSQLTTEDDFNPRKQLHAPELIELFSWSEAWFLKVTEGSAIRRIGHLRWLRNIAVALGNAPWNEAILRALESRRGEHPLLDEHIEWAVAQQIEKRNTCVVEVQLPQKQRLVRVIEKGLPRDA

SEQ ID NO: 75844 - protein, 384 aa, Citrobacter rodentium
  misc_feature (1)..(384): tr|A0A482PMD7|A0A482PMD7_CITRO Epoxyqueuosine reductase OS=Citrobacter rodentium OX=67825 GN=queG PE=3 SV=1
MVWSVMSEPLDLNQLAQNIKQWGLELGFQQVGITDTDLSAAEPALQAWLDKQYHGEMEWMARHGMMRARPHELLPGTLRAISVRMNYLPANAAFASTLKNPALGYVSRYALGRDYHKLLRNRLKKLGEKIQQHCVSLNFRPFVDSAPILERPLAEKAGLGWTGKHSLILNREAGSFFFLGELLIDLPLPVDHPVAEGCGKCVACMTTCPTGAIVAPYTVDARRCISYLTIELEGAIPQALRPLMGNRIYGCDDCQLICPWNRYSQLTDEADFSPRKSLHAPELIALFGWDEATFLKITEGSAIRRIGHLRWLRNIAVALGNAPWNEAILNALESRRGEHPLLDEHIQWAREQQIAKRNAQGVEVQLPKTQRLVRAIEKGLTRDA

SEQ ID NO: 75845 - protein, 379 aa, Citrobacter sp.
  misc_feature (1)..(379): tr|A0A0V9JC62|A0A0V9JC62_9ENTR Epoxyqueuosine reductase OS=Citrobacter sp. 50677481 OX=1736699 GN=queG PE=3 SV =1
MSEPLDLNQLAQKIKQWGLELGFQQVGITDTDLSEAEPKLQAWLDKQYHGEMDWMARHGMMRARPHELLPGTLRVISVRMNYLPARAAFASTLKNPDLGYVSRYALGRDYHKLLRNRLKKLGERIQQHCVSLNFRPFVDSAPILERPLAEKAGLGWTGKHSLILNREAGSFFFLGELLIDLPLPVDHAVEDGCGKCVACMTTCPTGAIVAPYTVDARRCISYLTIELEGAIPEDLRPLMGNRIYGCDDCQLICPWNRYSQLTDEADFSPRQQLHAPALIELFSWDEARFLKITEGSAIRRIGHLRWLRNIAVALGNAPWREDVLCALENRRGEHPLLDEHIQWAIAQQIAKRNASAVEVQLPQQKRLVRAIEKGLPRDA

SEQ ID NO: 75846 - protein, 379 aa, Citrobacter sp.
  misc_feature (1)..(379): tr|A0A318W013|A0A318W013_9ENTR Epoxyqueuosine reductase OS=Citrobacter sp. YR018 OX=2135606 GN=queG PE=3 SV=1
MSQPLDLNQLAQDIKQWGTELGFQHVGITDTDLSASEPKLQAWLDKQYHGEMEWMARHGMMRARPHELLPGTLRVISVRMNYLPANAAFASTLKNPSLGYVSRYALGRDYHKLLRNRLKKLGEKIQAQCASLNFRPFVDSAPILERPIAEKAGLGWTGKHSLILSRDAGSFFFLGELLIDLALPIDKPVEENCGRCVACMTICPTGAIVEPYTVDARRCISYLTIELEGAIPEEFRPLMGNRIYGCDDCQLICPWNRYSQLTDEEDFSPRKALHAPELITLFGWSEAHFLKVTEGSPIRRIGHLRWLRNIAVALGNAPWDEHNIEALESRRGEHPLLDEHIQWAVAQQIDKRNACVVEVQLPQKQRLVRVIEKGLPRDA

SEQ ID NO: 75847 - protein, 379 aa, Citrobacter werkmanii
  misc_feature (1)..(379): tr|A0A4Q4BKA9|A0A4Q4BKA9_9ENTR Epoxyqueuosine reductase OS=Citrobacter werkmanii OX=67827 GN=queG PE=3 SV=1
MSEPLDLNQLAQNIKQWGLELGFQQVGIADTDLSEAEPKLQAWLDQHYHGEMDWMARHGMMRARPHELLPGTLRVISVRMNYLPAKAAFASTLKNPSLGYVSRYALGRDYHKLLRNRLKKLGEMIQQHCVSLNFRPFVDSAPILERPLAEKAGLGWTGKHSLILNREAGSFFFLGELLIDLPLPIDKPVEEGCGKCVACMTICPTGAIVEPYTVDARRCISYLTIELEGAIPEAFRPLLGNRIYGCDDCQLICPWNRYSQLTVEDDFSPRKQLHAPELIELFSWSEAWFLKVTEGSAIRRIGHLRWLRNIAVALGNAPWDEAVINALENRRGEHPLLDEHIAWAVAQQIEKRNACVVEVQLPKKQRLVRVIEKGLPRDA

SEQ ID NO: 75848 - protein, 379 aa, Citrobacter werkmanii
  misc_feature (1)..(379): tr|A0A090U2Z8|A0A090U2Z8_9ENTR Epoxyqueuosine reductase OS=Citrobacter werkmanii NBRC 105721 OX=1114921 GN=que G PE=3 SV=1
MSEPLDLNQLAQNIKQWGLELGFQQVGIADTDLSEAEPKLQAWLDQHYHGEMDWMARHGMMRARPHELLPGTLRVISVRMNYLPAKAAFASTLKNPSLGYVSRYALGRDYHKLLRNRLKKLGEMIQQHCVSLNFRPFVDSAPILERPLAEKAGLGWTGKHSLILNREAGSFFFLGELLVNLPLPVDKPVEEGCGKCVACMTICPTGAIVEPYTVDARRCISYLTIELEGAIPEAFRPLLGNRIYGCDDCQLICPWNRYSQLTVEDDFSPRKQLHAPELIELFSWSEAWFLKVTEGSAIRRIGHLRWLRNIAVALGNAPWDEAVINALENRRGEHPLLDEHIEWAVAQQIEKRNACVVEVQLPKKQRLVRVIEKGLPRDA

SEQ ID NO: 75849 - protein, 379 aa, Citrobacter youngae
  misc_feature (1)..(379): tr|A0A549VI08|A0A549VI08_9ENTR Epoxyqueuosine reductase OS=Citrobacter youngae OX=133448 GN=queG PE=3 SV=1
MSEPLDLNQLAQNIKQWGLELGFQQVGIADTDLSEAEPKLQAWLDKQYHGEMDWMARHGMMRARPHELLPGTLRVISVRMNYLPANAAFASTLKNPSLGYVSRYALGRDYHKLLRNRLKKLGERIQQHCVSLNFRPFVDSAPILERPLAEKAGLGWTGKHSLILNREAGSFFFLGELLIDVPLPVDKPVEEGCGKCVACMTICPTGAIVEPYTVDARRCISYLTIELEGAIPEEFRPLLGNRIYGCDDCQLICPWNRYSQLTTEDDFSPRKQLHAPELIALFSWSEAWFLKVTEGSAIRRIGHLRWLRNIAVALGNAPWDDAVIHVLESRRGEHPLLDEHIDWAVAQQIEKRNACVVEVQLPKKQRLVRVIEKGLPRDA

SEQ ID NO: 75850 - protein, 379 aa, Citrobacter youngae
  misc_feature (1)..(379): tr|D4BFK2|D4BFK2_9ENTR Epoxyqueuosine reductase OS=Citr obacter youngae ATCC 29220 OX=500640 GN=queG PE=3 SV=1
MSEPLDLNQLAQNIKQWGLELGFQQVGIADTDLSEAEPKLQAWLDQHYHGEMDWMARHGMMRARPHELLPGTLRVISVRMNYLPAHAAFASTLKNASLGYVSRYALGRDYHKLLRNRLKKLGEMIQQHCVSLNFRPFVDSAPILERPLAEKAGLGWTGKHSLILNREAGSFFFLGELLVDLPLPVDKPVAEGCGKCVACMTICPTGAIVEPYIVDARRCISYLTIELEGAIPEEFRPLLGNRIYGCDDCQLICPWNRYSQLTAEDDFSPRKQLHAPELIELFSWSEGWFLKVTEGSAIRRIGHLRWLRNIAVALGNAPWDEAVITALESRRGEHPLLDEHIEWAVAQQIEKRKACVIEVQLPQKQRLVRVIEKGLPRDA

SEQ ID NO: 75851 - protein, 365 aa, Citromicrobium sp.
  misc_feature (1)..(365): tr|A0A2E7UCU1|A0A2E7UCU1_9SPHN Epoxyqueuosine reductase OS=Citromicrobium sp. OX=2024827 GN=queG PE=3 SV=1
MSDAGIIDQLQSDLAQRAGELGFASVGFADAGDDPRMAQRLSAWLEAGYHGTMGWMEREPAVRSGPQSMWPEARSVIALGANYAPAHDPLEAAEPADRARISVYAQGEDYHDKLKKALKSLARWLVAEAQARGLGDTRLKLFVDTAPVMEKPLAQRAGLGWQGKHTNLVSMDHGSWLFLGAVYTTIPFAPDGPHEDRCGSCRACQDACPTNAFPQAYRLDARRCISYLTIEHDGPIPHEFREAIGNRIYGCDDCLAVCPWNKFAKSAAANRAFLPRAELARPRLADLLQLDDAGFRRLFSKSPIKRIGRDKFVRNCLIAAGNSGEATLMAQVEPLLDDPDPVVAEAAEWAQRRLSPARSSTSPST

SEQ ID NO: 75852 - protein, 364 aa, Citromicrobium sp.
  misc_feature (1)..(364): tr|A0A2P0B4J6|A0A2P0B4J6_9SPHN Epoxyqueuosine reductase OS=Citromicrobium sp. RCC1897 OX=1812182 GN=queG PE=3 SV=1
MSERSEIDQLQTELVEKARELGFASIGFAEAHDDPRMAERLSAWLEAGHHGSMGWMERDPSVRSGPQGMWPEARSVIALGANYAPADNPLDAAEPEDRARISVYAQGQDYHDVLKKALKALARWLVAETENRGLGETRMKLFVDTAPVMEKPLAQRAGLGWQGKHTNLVSMEHGSWLFLAAIYTTVPFTPDGPHEDRCGSCRACQDACPTDAFPHAYTIDARRCISYLTIEHSGPIPEEFREAMGNRIYGCDDCLSVCPWNKFASSAAANRAFLPRAELVRPALADLLQLDDAGFRALFSKSPIKRIGRDRFVRNCLIAAGNSGEVELLAQVEPLLADPDPVVADTAQWAAERLAPLSSPSPRT

SEQ ID NO: 75853 - protein, 351 aa, Cloacibacillus porcorum
  misc_feature (1)..(351): tr|A0A1B2I4I2|A0A1B2I4I2_9BACT Uncharacterized protein OS=Cloacibacillus porcorum OX=1197717 GN=BED41_07205 PE =4 SV=1
MDKKLLTSKIKRRALELGFAKVGITTADDFPEYEAELHDRPGYRPWINPDRSEDPERSYLIEGVRPRGIMPGAKSIVCAVYDYSRLAYPEELTASVARAYLSRAYVPLPDSICGLRARALHDYLTSLGCRVYDGDKELPQRLCCARAGVTTYGRNNFAYAEDCGSFVILYTYLTEAELEYDAPTVRCDCPSGCRKCVEACPTGALYAPGKLAPQRCLLYSHMRDSAVPADIMEANGTLIHGCDRCQTACPRNIPVMRGAAEKDPFLELLKREFDLEKILFMDDAYYERVVRPIMYNYIRKPEVFRRNAAIAIGNTNDAGYIPALKTAIERGEPIVREAAAWALERIGGGPR

SEQ ID NO: 75854 - protein, 307 aa, Cloacibacterium normanense
  misc_feature (1)..(307): tr|A0A2S7I4V3|A0A2S7I4V3_9FLAO Epoxyqueuosine reductase OS=Cloacibacterium normanense OX=237258 GN=queG PE=3 S V=1
MNYSQLIKQKAEKFGFQSCGISKADFLEEEAPRLETWLNKGYHGEMKYMENHFDKRLNPTLLVDGAKSVISLSYNYFPKVKIDEINNFKISKYAYGEDYHEVIKDILKEMVTELQEEIGEFGFRVFVDSAPVLEKAWARKSGLGWVGKNANLITKKHGSFYFLAEIICDLELEYDLAVTDHCGSCRACIDACPTQAIVSDRIVDGSKCISYATIELKNEIPDYFNGKMDDWMFGCDVCQDVCPWNRFSAPTLQEKFAPNFQKLNFRKNEWKELTQELFSEIFKKSAVKRTKFSGLMRNINLLNDHSL

SEQ ID NO: 75855 - protein, 307 aa, Cloacibacterium normanense
  misc_feature (1)..(307): tr|A0A1E5UGJ2|A0A1E5UGJ2_9FLAO Epoxyqueuosine reductase OS=Cloacibacterium normanense OX=237258 GN=queG PE=3 S V=1
MNYSQLIKQKAEKFGFQSCGISKAEFLEEEAPRLEAWLNKGYHGEMKYMENHFDKRLNPILLVDGAKSVISLSYNYFPKVKIDEINNFKISKYAYGEDYHEVIKDILKEMVTELQEEIGEFGFRVFVDSAPVLEKAWARKSGLGWVGKNANLITKKHGSFYFLAEIICDLELDYDLAVTDHCGSCRACIDACPTQAIVSDRIVDGSKCISYATIELKNEIPDYFNGKMDDWMFGCDVCQDVCPWNRFSAPTLQEKFAPNFQKLNFRKNEWKELTQELFSEIFKKSAVKRTKFSGLMRNINLLKDHSL

SEQ ID NO: 75856 - protein, 337 aa, Clostridia bacterium
  misc_feature (1)..(337): tr|A0A523BYN9|A0A523BYN9_9FIRM tRNA epoxyqueuosine(34) reductase QueG OS=Clostridia bacterium OX=2044939 GN=qu eG PE=4 SV=1
MLSLSGLRRLAQQAGLEVVGATSAAPLVETRALLAARQARGLVTPWVTADLEARCHPESVLLGARSVIMAALPYYHPVGFPAGGPRGRIARCAWGIDYHPVLRERLQLLARLLQRELGRLDFSIQVDNGPLVERALAVRAGLGFVGKNCSLIVPGYGSWVFLGAMVIDVEVEEALPGVPACGQCERCVRACPTGALETPYLVDPGRCLSYITQKGGEVPAEFRGALADRVYGCDTCQEVCRYNLEASGSQVKEFTPAGDSHAPLLAEVISLDRAAFTRRFGTSSLAWRGPNILARNAVIALGNSHHPEAVKLLSRVAQAHPSAMVRSHATQALAGRR

SEQ ID NO: 75857 - protein, 156 aa, Clostridia bacterium
  misc_feature (1)..(156): tr|A0A4R5JLB1|A0A4R5JLB1_9FIRM DUF1730 domain-containin g protein (Fragment) OS=Clostridia bacterium k32 OX=252 8593 GN=EYS13_02725 PE=4 SV=1
MLLQMMPVTGDGNFQGVAFMEKAQLIKEVAREIGFDLCGITTAEPFYELEDFLRLRAKQGWQSEFEHKELEKRINPRLVLPEARSIIALGKTYPPCEQNATPGYGIIARCGRGIDYHVDFRKRMNALVQFLTKDLGVTKAVSMVDTGPLIDRAVAA

SEQ ID NO: 75858 - protein, 280 aa, Clostridiaceae bacterium
  misc_feature (1)..(280): tr|A0A353K0K7|A0A353K0K7_9CLOT tRNA epoxyqueuosine(34) reductase QueG (Fragment) OS=Clostridiaceae bacterium O X=1898204 GN=queG PE=4 SV=1
MSIKEEIISFARDIEIDLIGFCDINFDEGLINFLKEKRELGLLTGFEEENENKRTDIKKIMEDAQTIIAIALPYKTADINTKQIHISKSSIGLDYHIVLKEKLLKLCNFLIEKYGAKAVSFCDNNPLCEREIARKSGIGFIGKNNSLITKKYGSYVFLGEIITNIYIERDKAVENKCGSCTICLNACPSGALLKPWYIDPRKCISFLTQKKEELTDSEKKLLGLNIYGCDTCQDVCPYNKTAEYSKIEEFKPFGWEANINPDFILGLTNSEYKCTFKKAS

SEQ ID NO: 75859 - protein, 350 aa, Clostridiaceae bacterium
  misc_feature (1)..(350): tr|A0A2I0MZB5|A0A2I0MZB5_9CLOT Epoxyqueuosine (OQ) redu ctase QueG OS=Clostridiaceae bacterium JG1575 OX=165874 2 GN=ABB02_01680 PE=4 SV=1
MRKDHEPERNQGNPKNPGEQQKLYSLLNAMGLKVFGVTTKEAVLAHAAYYKERPTDQKTEFEASSGDLAKDLQAVVPDGSKILSIAFPYAHDLNWEESHFSIYARSLDYHEVLTAYLARIAQWITDEGYCAQTFRDSNPLPERLIACLAGVGYVGRNNTLITKDYGSFVFLGEVVTDYPLRPSSVGRLPGDHSLCGSCRACQKACPAGILIDGFTDSSRCLSYVSQKKELAEEEIQKLQGRLFGCDTCLRVCPKNQGRSGTGLPEFQVLEYMAHPDLLELAQLSRATFREKYAITSAGWRGKTVLARNALIALSATGKLPEDLRFSSPVLQREYDKIKKLSKEKTKGRSR

SEQ ID NO: 75860 - protein, 273 aa, Clostridiales bacterium
  misc_feature (1)..(273): tr|A0A354IH75|A0A354IH75_9FIRM DUF1730 domain-containin g protein OS=Clostridiales bacterium OX=1898207 GN=DDX5 1_07100 PE=4 SV=1
MDILPYFSDIPYTGGKGICRLDALELEPTVLHAVQARCAGAVCAAVVLFPYLVRDTGNLSLYARGADYHTVVRDALEPVCAALRRDFPQNTFVPLVDASPLPEVRAAWISGAGMLGKNGLIFDRVYGSFVFIGTVLTDLPADPTPSARETCPDCGACARACPTGALRDGSVDESACLSALTQSKQELSEEQLRQLAGHPLIWGCDTCSLVCPLNRAAQETPNPAFRQARICSLAPEDVEGRTRKQLLRAFPDRAFTWRGPAPLVRGLSLKGQK

SEQ ID NO: 75861 - protein, 347 aa, Clostridiales bacterium
  misc_feature (1)..(347): tr|A0A349GCJ8|A0A349GCJ8_9FIRM Uncharacterized protein OS=Clostridiales bacterium UBA8960 OX=2060927 GN=DCS67_ 11515 PE=4 SV=1
MSCNEVAMIRKTELNKIMNALMIRHWGIFLMDKADKNAPRYFDVENSIFDDVSLEKATVIAIALPYKLELEENRPNFHFGKIEAFAWDFDYHIEVMQRLEALSRMLNLMPETEVRYYVDDSPFNDREVAFHAGLGRIGMNHLLINDALGSQFFIGYLVIKGHLDMDKTCIVQRHELKAELQHPYCKSCNKCVYACPTSVCGNGKSNMLECLSSLTQTKEVIEERFRAMMGDTIYGCSICQKVCPLNKKDIINFVYEPKQSNWIDLFELLRMDRKTFKARYGHMGFAWRSQWVYKRNALIVLGNSGKRAVLDELTRLQEIQEASNLNEYYRWAINKLEISILEESDII

SEQ ID NO: 75862 - protein, 345 aa, Clostridioides difficile
  misc_feature (1)..(345): tr|A0A0N0NSE2|A0A0N0NSE2_CLODI Fe-S oxidoreductase OS=C lostridioides difficile OX=1496 GN=IM33_20145 PE=4 SV=1
MDNYLAEKIKQTALLLGYDKCGIIKITDMQGYAEKLVERIITFPEIKSNFQKFFNFAFLDKKYPWAKSVIICVRHYGKYHIPQHLNNMIAKYYLVDSREDKNSTDYQDSICFENYLTANGIKSVTDRKFGITSLRWAAMKAGLGVIRKNNFFYTEKGSWVYLEGWIIDKELELKEKCDLRHCSENCNLCIQACPTKSLNLPFSMNRSSCVSCITTWDGRDMPNEKYKKQLGNWIYGCDICQDVCPHNKNKWMEKYTFPYLFEIGEMISLEKILDMDYGILCNVIHPKFWYIGKKDIWKWKVNAINAMLNNWDETYYMYIEKATSDKIEMVRDMARYAIKIIDRTF

SEQ ID NO: 75863 - protein, 304 aa, Clostridioides difficile
  misc_feature (1)..(304): tr|D5Q0F2|D5Q0F2_CLODI Putative iron-sulfur cluster-bin ding protein OS=Clostridioides difficile NAP08 OX=52525 9 GN=HMPREF0220_0384 PE=4 SV=1
MNNRELKEFCNLIGLNCVGVAGVDKYDNLENILKDRYKKGYLTGMEEPIIENRINPRNIMEDANSIIVCAFPYYINRQEKNKNSNLSKYCHGKDYHIVVKKFLQQICDYISKKVTDFKYKIFADNGPLVDRYLAYLSGIGYFGINNNIITDEYGSYVFIGYIVNNYKFEEDKPLEKSCFKCGKCVKYCPGNAILGNYDMNPKKCLSYITQKKGDLSQEEKAVLKSGKKVFGCDICQEVCPHNVEIPTTHILEFKENIIDYLDYDEIQNISNKEFKRRYGDRAFSWRGKNIIKRNMEIILDKYND

SEQ ID NO: 75864 - protein, 378 aa, Clostridium aceticum
  misc_feature (1)..(378): tr|A0A0G3WAM4|A0A0G3WAM4_9CLOT 4Fe-4S ferredoxin-type d omain-containing protein OS=Clostridium aceticum OX=840 22 GN=CACET_c09420 PE=4 SV=1
MKLKDQIKDYGKSIGIDLLGFTSANAFEEIRSILEKREALGHLSGFEEKDIELRIDPKKTMTDAKSILVIGLSYYNENIKKSENHETEFSGVLARTAWGKDYHYVLKEKLEEIAAFIQKQDKDFQYKIFVDTGPLVDRQVAYRAGLGWYGYNSLLINEKYGSWFFIGYMLNNIAFEEDKPLTNKNCQGCNLCIKHCPKGAIEGPYGFHAKKCVSNLLQQKEDIDEEDRKILGKNLYGCDICQSVCPHNKKAVLMTEGDFAPQVVSPTPDLIEILYMSNKAFKETYGTTSAGWRGKRTLQRNAIIALANNGDKKAIPHLLPLLEDDRPEIRRYGIWAIFQLDPFTGKEISKEMKKKEQDEKVLNTIEDCLNKIFSSKNQ

SEQ ID NO: 75865 - protein, 343 aa, Clostridium acetobutylicum
  misc_feature (1)..(343): tr|Q97TM1|Q97TM1_CLOAB Uncharacterized Fe-S protein OS= Clostridium acetobutylicum (strain ATCC 824 / DSM 792 / JCM 1419 / LMG 5710 / VKM B-1787) OX=272562 GN=CA_P007 7 PE=4 SV=1
MDTIAESIQKKAYELGYEKCGIIPINLIDEYADKFNERMEKIPKSKMFYKSQERLIKPKEIYPWAKSVVVLTSVYGKYKVPQELNGHIAKAYLFDTRVDKNTKEYQNNRALEEYMQELGLKVETNQKFGVVGMRWAALQAGVGIIRRNNFLYTESGSWVHLEAWVTDRKMELKETNNVKKCPKSCNRCIMSCPTKSLSEPYTMSPTECVSFLTTFGGRNLPEEPLRKKFGDCIYGCDICQDACPMNKGKWKDEEEFPGLAELAPSLTPENILNMDEDFYREKVQPKFFYLSPEDLWKWKIDALCYIGNNYSESYKPLLVNACNNANNKISEMANLICSELSLQ

SEQ ID NO: 75866 - protein, 342 aa, Clostridium acidisoli
  misc_feature (1)..(342): tr|A0A1W1XI18|A0A1W1XI18_9CLOT Epoxyqueuosine reductase QueG (Queuosine biosynthesis) OS=Clostridium acidisoli DSM 12555 OX=1121291 GN=SAMN02745134_01933 PE=4 SV=1
MNTIEQMIQKKAYELGYEKCGIIPINKLSGYKEKLEERIKKVPESAQFYQTQQRLANPLEEYPWAKSVVVMTVPYGKYKIPEVVKDHVAKAYLFDVRIDANTEEYQHNRAMEKYMQDLGLQVVTNQKFGVVGMRWAALQAGLGIIRRNNFLYTQSGSWVHIEAWLIDREIELKETMDVPQCPKGCNRCMSACPTKSLSAPYTMTPTACISFLTTFGGRNLPQQPLSKNFGNCIYGCDICQDVCPMNKGKWKEVEEFPGLAELSSELTPENILNMDEDFYREKVQPKFFYLSPEELWKWKIDVLCYMRNNYKESYKTYIINSSNNENEKIREMADFIRKELNL

SEQ ID NO: 75867 - protein, 326 aa, Clostridium acidisoli
  misc_feature (1)..(326): tr|A0A1W1XIL0|A0A1W1XIL0_9CLOT Epoxyqueuosine reductase OS=Clostridium acidisoli DSM 12555 OX=1121291 GN=SAMN0 2745134_02001 PE=4 SV=1
MNKKNQIIEFCNGLGLLEVGFCSLQVFHELDPFLRKRKESGLQNEFEEDNIEKRINPKLYMEEGKTIISVAFPYLFHKPNKEEIYFSTYTKGKDYHKVIGKYLNEVCKFVNALGGDSKYFVDSNALPERYIAVKSGIGFIGKNNMLINKRYGSYVFLGEIITDLDLQPDNVVKTKCGKCEKCLNACPTKCISKTKCNPNICLSYITQKKNIEDQWFEKFNGRMFGCDTCQKVCPFNEESEFSNLEEFKPFEFMDKLDLDELLNLDKAVFKEKYSLTSSGWRGKNTLQRNALINAFMSDKYINKEEFHINSTYVKEYYHRLLKYNKL

SEQ ID NO: 75868 - protein, 334 aa, Clostridium algidicarnis
  misc_feature (1)..(334): tr|A0A2S6G028|A0A2S6G028_9CLOT Epoxyqueuosine reductase OS=Clostridium algidicarnis DSM 15099 OX=1121295 GN=BD 821_102160 PE=4 SV=1
MKNINELENYIRSLGLDTFGFIPLKSFEELRSFLQYRKINGLENEFEETDIEKRINPHMLMEKGKVIISIAFPYLYNNNFNNDTGFSKYTEGLDYHIVVRSYLDKIVDFLNEKGYEAKAFVDSNVLPERYIAYKAGLGFVGKNNMIITEKYGSFVFLGEIITDMDIEIKYKDKKFSDIEKYESCGSCNICLKECPTKAINHKRRNSNICLSYITQKKQIEDKWFKVLGGRIFGCDSCQKSCPYNTKVKLSNIEGFRPLKFSSNIQTKELIYINNKEFKETLKNTSASWRGKNLIQRNALIRFINFENNKDIDIDSMASPYVKDYAIRLLKIRKL

SEQ ID NO: 75869 - protein, 350 aa, [Clostridium] algidixylanolyticum
  misc_feature (1)..(350): tr|A0A419T369|A0A419T369_9FIRM Fe-S oxidoreductase OS=[ Clostridium] algidixylanolyticum OX=94868 GN=BET01_1910 0 PE=4 SV=1
MSNVNFSDNSMENQIQRKALELGYEKCGIIPVDMMEGYGEKLDERIEKATGSGQFYQGQKRLKNFQEQYPWAKSIIVLTVPYSQYKVPEEISGHIAKAYLFDTRIDEQAEEYQHSQLLENHLKELGLRVETNRKFGVVALRWAAMKAGLGIIRRNNFFYTESGSWIRIEAFLTDQKMELLQQTTLPACPKHCDRCIKACPTTSLCEAYTMNPLSCVSFLTTFGGRDLPNEPMASNFGDWIYGCDICQEVCPMNQGKWKGDKDFPGVMALSPYLTAENILKMDESYYQQNVQPKFFYLSQDELWKWQVDALNFMDNRYQEHFNSSILEACESKYEQVREMADTVCKKHGLT

SEQ ID NO: 75870 - protein, 329 aa, Clostridium amylolyticum
  misc_feature (1)..(329): tr|A0A1M6JE87|A0A1M6JE87_9CLOT Epoxyqueuosine reductase OS=Clostridium amylolyticum OX=1121298 GN=SAMN05444401 _3066 PE=4 SV=1
MDKKQLILDFCKNLKLDKVGFVQCRKFEELRNFFEERKALGTENEFEEKDIEKRIDPNIYLEGGKTIISIAFPYLHKIETRENYAFSVYTRGQDYHRVVKKYLGQICEYIKALGGEAVALTDSNALPERYIAYLSGIGFIGKNNMLITKEYGSYVFLGEIITDLELTPDFPERNHEMLLKHEECGEECTLCFDECPTKSINPVKKNANICMSYITQKKDLEDKWLPLLNGRLFGCDSCQKKCRYNQLIRLSPLEEFKPHKYMEEHNTDEIINMGKKTFKEKYLITSCGWRGKAVLQRNAMIRKVYFEKGSLEGFKSNSEQLNKLKEKLV

SEQ ID NO: 75871 - protein, 327 aa, Clostridium argentinense
  misc_feature (1)..(327): tr|A0A0C1U293|A0A0C1U293_9CLOT Epoxyqueuosine reductase OS=Clostridium argentinense CDC 2741 OX=1418104 GN=que G PE=4 SV=1
MNNKTSIINFCKSLGLTTVGFTTCRVFSELENYYSYRKEKGFQIEFEEDDIEKRINPFLLMEDGKTIISIAFPYLHDENRKVKYFSKYTLGEDYHVVVKRYLQKICGYIESLGGKAIGFVDNNPLPERYIAYLCGIGFVGKNNIFITKEYGSYIFLGEIITDLSLESDNPIKENCEKCELCLNACPTNTLKDQVKDNDFNKCLSYLTQKKHIDEYSFNKFKGKIFGCDICQDICPYNKKAKLSHIEEFKAFDFMKEDELIDIITMNNSSFKEKYQKCSCGWRGKNILIRNSLINYNNRNHEDKDNIIKNINSPYIREYYDKLFKNKT

SEQ ID NO: 75872 - protein, 313 aa, Clostridium autoethanogenum
  misc_feature (1)..(313): tr|A0A3M0SXJ7|A0A3M0SXJ7_9CLOT Epoxyqueuosine reductase OS=Clostridium autoethanogenum OX=84023 GN=D9O40_04225 PE=4 SV=1
MKNYANNFIKKVEEYGFKAQVISFKHMEEIKLGIENMKQTYEDINVNIGKYLNKFDYKVSDDFLKPKSIIVIAVPQPVARVYFTLGLKRYAVIMPPMYLLNSSSEFEKKHKKICEITEIVEKILSYENFKAIKVNIPCKPLAVKSGLGTYGKNNICYINGESSFYWLGVYVSDMPWENDSWGEYTIMDTCKNCDLCLKNCPTGAIAEDRFIVHANKCITLQNEDSGDFKKSLRPEWHNCLIGCMRCQIICPANKKCITSIKNITEFNDWETRKILAKTPLEELPETTYKKLESISFIEDYKLLPRNLKVLIMK

SEQ ID NO: 75873 - protein, 127 aa, Clostridium autoethanogenum
  misc_feature (1)..(127): tr|U5RQV4|U5RQV4_9CLOT Uncharacterized protein OS=Clost ridium autoethanogenum DSM 10061 OX=1341692 GN=CAETHG_0 713 PE=4 SV=1
MDTCKNCDLCLKNCPTGAIAEDRFIVHANKCITLQNEDSGDFKKSLRPEWHNCLIGCMRCQIICPANKKCITSIKNITEFNDWETRKILAKTPLEELPETTYKKLESISFIEDYKLLPRNLKVLIMK

SEQ ID NO: 75874 - protein, 330 aa, Clostridium baratii
  misc_feature (1)..(330): tr|A0A0F3FNA5|A0A0F3FNA5_9CLOT (Fe-S)-binding protein O S=Clostridium baratii OX=1561 GN=UC77_11455 PE=4 SV=1
MDKQEKIIEFCKSINLDLVGFIKCREFSELKEFYSERKELKLENEFEEADILKRINPKTYMEDGKTIISIAFPYNTGEKLCDNGFSIYTKGMDYHNVVHKYLENICEFIKSLGGECVAFTDSNCLPERHIAALAGVGFVGKNNMIITEKYGSYVFLGEIITDLEVYNEDKTTFHNIRGYSKCGECNICFNECPSNSINSFRRNPNICVSYLTQKKELNDKEINLINGRIFGCDSCQMKCPYNENVSFTNLKEFEVKDFMKNDDEDFIININNSLFKETFKITSCGWRGKNTLIRNAMIRKKKFKNKELGNIKSESPYIKEYIKMLSKENS

SEQ ID NO: 75875 - protein, 330 aa, Clostridium baratii
  misc_feature (1)..(330): tr|A0A0A7FVB7|A0A0A7FVB7_9CLOT Epoxyqueuosine reductase OS=Clostridium baratii str. Sullivan OX=1415775 GN=que G PE=4 SV=1
MDKQEKIIEFCKSINLDLVGFIKCREFNELKEFYSERKELKLENEFEEADILKRINPKTYMEDGKTIISIAFPYNTGEKLCDNGFSIYTKGMDYHNAVHKYLENICEFIKSLGGECVAFTDSNCLPERHIAALAGVGFIGKNNMLITEKYGSYVFLGEIITDLEIYNEDKTTFHNIMEYSNCGECNICFNECPSKSINNFKRNPNICVSYLTQKKALNDKEINLINGRIFGCDSCQMKCPYNENVSFTNLKEFEVKDFMKNDNEDFIININNSLFKETFKTTSCGWRGKNTLIRNAMIRKKKFKNKELGNIKSESPYIKEYINILSKENS

SEQ ID NO: 75876 - protein, 303 aa, Clostridium bartlettii
  misc_feature (1)..(303): tr|R5XYK1|R5XYK1_9CLOT Putative iron-sulfur cluster-bin ding protein OS=Clostridium bartlettii CAG:1329 OX=1263 063 GN=BN488_00629 PE=4 SV=1
MHKDRLKQICENKKIDIMGVAPIGPYFELEKILNDRKQKEHLTGMEEEDINKRINPKLIMDDAKSVIVCAFPYYVGEYKDSNISKYCYGEDYHIVTKQILTDICLEIEKEIPDFKYEIFADNGPLVDRYLAYLSGIGYFGINNNIITDKYGSYIFIAYVVNNYEFEPDKPSEKSCLKCNKCVKYCPGNAILGNFEIDPRKCLSYITQKKEELSESEIQLLKENGKVFGCDICQDVCPHNKDIQTTKICEFNNELITKINQEEIDEISNKEFKRRYKNRAFSWRGRKIIKRNLDIISDKNKMDF

SEQ ID NO: 75877 - protein, 276 aa, Clostridium beijerinckii
  misc_feature (1)..(276): tr|A0A1S8R6A1|A0A1S8R6A1_CLOBE Epoxyqueuosine reductase OS=Clostridium beijerinckii OX=1520 GN=queG_1 PE=4 SV= 1
MDKQYFIKTAEDFVENSQDNYITKEIAISENVVGMKIFDAPILAFSSVDDEYFTLLKQPSAIGKHFMLPKEWLPQSKTVISFFLPFSEAVKKGNRRNMSWPSEEWLHGRIEGQSLLNKLCMHLKSELINAGYNSVVPTLDERFWSNANHPNHEEKFTSNWSERHAAFVCGLGTFGLSKGLITKKGISGRLGSIITELYLSPDKREYEKIYEYCSMCGKCVKNCPANAISIENGKNHIICSEFLDKTMEKHKPRYGCGKCQIDVPCESRIPKQHNVK

SEQ ID NO: 75878 - protein, 343 aa, Clostridium beijerinckii
  misc_feature (1)..(343): tr|A0A0K2MAY9|A0A0K2MAY9_CLOBE Fe-S oxidoreductase OS=C lostridium beijerinckii NRRL B-598 OX=1428454 GN=X276_0 8030 PE=4 SV=1
MTLLADKIKSAALNLGYEKCGIIKISDIDGYKERLDERVERVPESKGFYQGQYRFTQLQDTYPWAKSIVICVRRYGKYHIPEHLKGMIAKYYLVDARKDKNSKDFQDSVKFEEYMQELGLRAETERGFGLVPLRFAAMKAGLGIVRKNNFFYTENGSSVYLDAWLIDKELEAVEIPNVRPCSDKCNLCIKACPSASLSKPYTMNPIACVSCITTFMGRDMTNEKYREEIGNWVYGCDACQDACPMNKNRWQETEEFPNLQELSEHISLEKIIKMDYKFLEEVMQPKFWYIDKSSVWKWKVNAINVMVNDYKEQYKEHILYACNDSNPKVREMAEWAIEKLNLK

SEQ ID NO: 75879 - protein, 303 aa, Clostridium bornimense
  misc_feature (1)..(303): tr|W6RZV5|W6RZV5_9CLOT 4Fe-4S ferredoxin-type domain-co ntaining protein OS=Clostridium bornimense OX=1216932 G N=CM240_3074 PE=4 SV=1
MIIKMLKEEALKHNDKIEIVSIERLKDLKTEIEEFKSHNELNGFQNWIVNDLYDFDLPSLDFIAKSIIIVALHHPFYADVKLNYQNKVYNTKCLVRSDFHGSKRYIKDFVNLQGYNLKETKSIPLKRLAVQSGLAVYGKNNITYIDGMGSNLSYIAFYTDIPCFEDHWRPVCHFEFCDKCGNCVKHCPTGAIKKDSFLIDNEKCLSCINESAGDFPHWIPKNIHHTLYDCLRCQEHCPMNKSIINDKIGPITFTEEETSMLLDGKGPDDFPEEFLAKISNLGLFDWRDALPRNINAIIQANSN

SEQ ID NO: 75880 - protein, 324 aa, Clostridium bornimense
  misc_feature (1)..(324): tr|W6S1G0|W6S1G0_9CLOT Iron-sulfur cluster-binding prot ein OS=Clostridium bornimense OX=1216932 GN=CM240_0968 PE=4 SV=1
MDLDSKIRNYICSLGIDTFGAIECRKFEEIKEQLEMNKRLKLENPFEEEDIEKRINPFLLYKDGKSIISIAFPYLYPTKGEENPYFSKYTMGSDYHIVVKSYLNKILEYIKSLGGDGIALVDSNPLPERYLAKLCGVGFIGKNNMIITEKYGSYVFLGEIITNIEMKYDIPIDNKCEQCVKCIERCPTNSLNPKRKNSNICLSYITQKKDIEEKWFKVIDKRLFGCDTCQNYCPFNEDAKYSSIEEFRPKNFMKEPKISEIALLNKSDFQSKYKTTSCGWRGKNILQRNALIVSHNCNYKLDIKDKDINSPYVKEYYEKIKNKI

SEQ ID NO: 75881 - protein, 321 aa, Clostridium botulinum
  misc_feature (1)..(321): tr|A0A0C3HET6|A0A0C3HET6_CLOBO (Fe-S)-binding protein O S=Clostridium botulinum OX=1491 GN=SD74_02085 PE=4 SV=1
MDCKKSVKEYCRNLGLDLIGFTKCRIFHELIPELTERKNENRQNEFEGKDINKRVDPFQYMKEGKTIISIAFPYLFNLGHEHDIYFSKYTHGRDYHTVINEYLQKICNFIQSKGYRAKYFVDSNDLPERYIAYLCGIGFIGKNNMLITEKYGSYVFLGEIITDMEIHEDEPMECKCKECNICFRACPTSSLENKDPNICLSYITQKKNIENEWFDKLKGRMFGCDTCQRVCPYNKNINTSNIEGFKPFDFMKNLDLEELIYVNNKEFKEKYKLTSCGWRGKSILQRNALINCITMNKDVDIQGKNIKSPYVLDYYHRLLKK

SEQ ID NO: 75882 - protein, 321 aa, Clostridium botulinum
  misc_feature (1)..(321): tr|A0A0B4W3P5|A0A0B4W3P5_CLOBO Epoxyqueuosine reductase OS=Clostridium botulinum Prevot_594 OX=1408284 GN=queG PE=4 SV=1
MDCKESVREYCRNLGLDLIGFTKCRIFHELIREFTERKNENKQNEFEGKDINKRVNPFQYMREGKTIISIAFPYLFNLDYENNIYFSKYTQGRDYHTIVNEYLKKICEFIQSKGYTAEHFVDSNDLPERYIAYLCGIGFIGKNNMLITEKYGSYVFLGEIITDMEIDADEPMECRCKDCNICLKACPTNSLENKDPNICLSYITQKKNIEDEWFDKLKGRMFGCDTCQRVCPYNKNIKTSNIEGFKPFNFMENLDLEELINVNNKEFKEKYKLTSCGWRGKSILQRNALINCIKMNKDIDIQEKNIKSPYVLDYYRRLLKK

SEQ ID NO: 75883 - protein, 343 aa, Clostridium butyricum
  misc_feature (1)..(343): tr|A0A2S7FBZ4|A0A2S7FBZ4_CLOBU Epoxyqueuosine reductase OS=Clostridium butyricum OX=1492 GN=AWN73_11125 PE=4 S V=1
MGVKEDIKNYCFSLGINSVGFIKCRRFEELKAFYEVRKSLNLQNEFEEDNIESRINSKEWFEEGKTIISIAFPYVFSDNNLKTKSENNFSIYTQGLDYHHVVNKYLNKICEIIEANGGKYKTFVDSNTLPERYLAYISGVGFIGKNNLIITPKHGSYVFLGEIITDLEIYDEDKRHFDEIDLFRECGECSICYDKCPTKSINNVRKNCNICLSYITQKKDLNDWEIKKLDGRMFGCDTCQLGCPYNSKIEKSELKEFKPLDWFYDYDEDYIIDMNNSMFKESFKKTSCGWRGKNILKRNALIRKYIFKNESIDKLKTVKFESPYLEEYLKIIAEMKSDKVLKK

SEQ ID NO: 75884 - protein, 343 aa, Clostridium butyricum
  misc_feature (1)..(343): tr|C4IE06|C4IE06_CLOBU Iron-sulfur cluster-binding prot ein OS=Clostridium butyricum E4 str. BoNT E BL5262 OX=6 32245 GN=CLP_3588 PE=4 SV=1
MGVKEDIKNYCFSLGINSVGFIKCRRFEELKAFYEVRKSLNLQNEFEEDNIESRINSKEWFEEGKTIISIAFPYVFSDNNLKTKSENNFSIYTQGLDYHHVVNKYLNKICEIIEANGGKYKTFVDSNTLPERYLAYISGVGFIGKNNLIITPKHGSYVFLGEIITDLEIYDEDKRHFDEIDLFRECGECSICYDKCPTKSINNVRKNCNICLSYITQKKDLSDWEIKKLDGRMFGCDTCQLGCPYNSKIEKSQLKEFKPLDWFCDYDEDYIIDMNNSMFKESFKKTSCGWRGKNILKRNALIRKYIFKNESIDKLKTVKFESPYLEEYLKRIAEMKSDKVLKK

SEQ ID NO: 75885 - protein, 333 aa, Clostridium cadaveris
  misc_feature (1)..(333): tr|A0A316LZH6|A0A316LZH6_9CLOT tRNA epoxyqueuosine(34) reductase QueG OS=Clostridium cadaveris OX=1529 GN=queG PE=4 SV=1
MTFKNEVVNYSKGLGLDAVGFTYCRRFNELEDFLKERKERKIENEFEEPDIEKRINPKLYMGDGKTIISIAFPYYGGDSQREDVYFSYYTMGMDYHKVVESYLKKICDFIKEKFCGKAEYFVDSNALPERYIAYLSGLGFIGRNGMLITEKYGSYVFLGEIITDIEVEDLKNNKREVQELLKFKNCGQCKKCLSNCPTSAINYNKTIPNICMSYITQSKVIEKPFINKMDGRIFGCDHCQICCPYNENIATDYLKEFEPMDYMKKADIEEIIYMDNKTFREKYGTTSCGWRGKATLQRNALIAKILKKQEFDIDEEKITSPKVQEYYEILKKL

SEQ ID NO: 75886 - protein, 333 aa, Clostridium cadaveris
  misc_feature (1)..(333): tr|A0A1I2KC65|A0A1I2KC65_9CLOT Epoxyqueuosine reductase OS=Clostridium cadaveris OX=1529 GN=SAMN04487885_10573 PE=4 SV=1
MTFKNEVVNYSKGLGLDAVGFTYCRRFNELEDFLKERKERKIENEFEEPDIEKRINPKLYMGDGKTIISIAFPYYGGDSQREDVYFSYYTMGMDYHKVVESYLKKICDFIKEKFCGKAEYFVDSNALPERYIAYLSGLGFIGRNGMLITEKYGSYVFLGEIITDIEVEDLKNNKREVEELLKFKNCGQCKKCLSNCPTSAINYNKTIPNICMSYITQSKVIEKPFINKMDGRIFGCDHCQICCPYNENIATDYIKEFEPMDYMKKADIEEIIYMDNKTFREKYGTTSCGWRGKATLQRNALIAKILKKQEFDIDEEKITSPKVQEYYEILKKL

SEQ ID NO: 75887 - protein, 324 aa, Clostridium carboxidivorans
  misc_feature (1)..(324): tr|C6PZG2|C6PZG2_9CLOT 4Fe-4S ferredoxin-type domain-co ntaining protein OS=Clostridium carboxidivorans P7 OX=5 36227 GN=CcarbDRAFT_4179 PE=4 SV=1
MNYKSMIINYCKDIGLDTVGFTKCRVFEELKHYFEYRESMSLINEFEEKDINKKINPFMYMEDGKAIISIAFPYLFNDNFQQEVNFSKYTQGRDYHVVVSEYLKKICSFIEREMSGKAVYFVDSNSLPERYIAKLCGIGFVGKNNMIITEKYGSYVFLGEIITNIPIEEDKPMECKCEGCDLCQKSCPTGAIREENNCNICLSYISQKKEIDDQWFDKLKGRIFGCDTCQRICPFNKKASFSNIEEFRPYDFMEVINLEELANIDKRIFLNKYSKSSCGWRGKNVLQRNALINIIGMKKNINIEEINSPYVKNYYNRLLYHFKL

SEQ ID NO: 75888 - protein, 345 aa, Clostridium carboxidivorans
  misc_feature (1)..(345): tr|C6PXZ3|C6PXZ3_9CLOT Uncharacterized protein OS=Clost ridium carboxidivorans P7 OX=536227 GN=CcarbDRAFT_3660 PE=4 SV=1
MLTIEQKIQEKAYELGYEKCGIIPISFMNGYGEKVEERIQKVQKSGPFYQRQRRLVNPLEEYPWAKSIVVVAARYGKYKVPESVRSHIGKSYLFDIRVDANTKEYQNSKVMDKYMQELGLQVATNQKFGVVGLRWAALQAGIGIVRRNNFFYTESGSWVHLEAWLTDREMELREIPTVPQCPKNCGACVAACPTKSLSAPYTMSPTDCISFLTTFGGRNLPQEPLRKSFGQCIYGCDICQDVCPMNKGKWQEVEEFPGLSELAPSLTPENIMDMEESFYREKVQPKFFYLSPDDLWKWKVDVLCFMGNNYKDSYKPYIMRACKNENEKIREMAYSIRRELFDCVR

SEQ ID NO: 75889 - protein, 343 aa, Clostridium carnis
  misc_feature (1)..(343): tr|A0A3P6KDX2|A0A3P6KDX2_9CLOT Putative Fe-S protein OS =Clostridium carnis OX=1530 GN=queG_3 PE=4 SV=1
MDTIEQMIQKKAYELGYEKCGIIPIGLMDGYTEKFNERIEKIPKSKMFYENQQRLAKFREIYPWAKSVVVLTVAYGKYKVPEMLNGLIAKAYLFDTRVDENTKEYQNNRALEKYMQELGLKVETNQKFGVVGMRWAALQAGLGIIRRNNFLYTESGSWVHLEAWVTDREMELKETNNVVECPKSCNRCIASCPTKSLSDPYTMSPTECISFLTTFGGRDLPHEPLSKTFGNCIYGCDICQDACPMNKGKWKDEEEFSGLEELVPSLIPENILNMEEDFYRNKVQPKFFYLSADDLWKWKVDVLCYMRNNYKESYKSLIINACNNENNKVREMACSICDELSLQ

SEQ ID NO: 75890 - protein, 222 aa, Clostridium carnis
  misc_feature (1)..(222): tr|A0A3P6K6N1|A0A3P6K6N1_9CLOT (Fe-S)-binding protein O S=Clostridium carnis OX=1530 GN=queG_1 PE=4 SV=1
MDNDYIKKIVYPLGADVCGFANIGRFDNAPKGFHPLDVYAETKSIIVFGKQFPSSLFQANTNVPYTFFKNNSAKLLDDISIQLTLAIESEGYKAIPIPSDEPYEYWDAENKHGRGILSLKHLAQLCGLGSIGKNTLLINKEYGNRLYFGAVITNAELNEDDLSNNLCPENCNICIKSCPQSALDGITVNQKKCRERCIYATDGGGFVYGCNICRKVCPFANI

SEQ ID NO: 75891 - protein, 340 aa, Clostridium cavendishii
  misc_feature (1)..(340): tr|A0A1M6MQP5|A0A1M6MQP5_9CLOT Epoxyqueuosine reductase OS=Clostridium cavendishii DSM 21758 OX=1121302 GN=SAM N02745163_02726 PE=4 SV=1
MKLKGKVVSYCNLLGLELVGFTKCRRFDELRNFYEHRKIYGLENEFEEEDIEKRINPNHYMSKGKTIISIAFPYLYEESQNIDGFSLYTRGKDYHYVVNSYLQKICSLIEELGGEAKCFVDSNTLPERYIAYLCGIGFIGKNNLIITEKYGSYVFLGEIITDLEIENSTNRNFEDIKKFAECDICEECYNTCPTKSINRNKKNPNICMSYITQKKDIEDKFLNLMNGRIFGCDTCQISCPKNKDIKYSNLDEFKPLEFMNITNTEKILELTNGDFKETFKLTSCGWRGKNVIIRNALIRKANFENKDISKYKFSSEYIMKYKDKLAKEKEGSEKNNETKN

SEQ ID NO: 75892 - protein, 324 aa, Clostridium celatum
  misc_feature (1)..(324): tr|L1QKD6|L1QKD6_9CLOT Putative iron-sulfur cluster-bin ding protein OS=Clostridium celatum DSM 1785 OX=545697 GN=HMPREF0216_01013 PE=4 SV=1
MLKEKIINYCNSLGLDTIGFIECRKFEELREFFKFRKENLLENEFEESDIEKRINPNIYMEDGKTIISIAFPYLWKENDMDNGFSKYTKGLDYHRVVKSYLDKICIYINELGGNAISFVDSNMLPERYIAYLSGIGFIGKNNMIITKKYGSYVFLGEIITDLDIKCTDKRKFSEIKMFNECGECDNCYKECPTKSININKKNPNICSSYITQKKDLNEIEIKLLKDKIFGCDICQIKCPYNKEVYFSNIEAFKPLDFMCNEKIDIYAGMNNKFFKENISKTSCGWRGKNVIKRNAIIRLHNNGKDIKKYEGDSPYINEYISKLI

SEQ ID NO: 75893 - protein, 286 aa, [Clostridium] cellulosi
  misc_feature (1)..(286): tr|A0A078KQM0|A0A078KQM0_9FIRM 4Fe-4S ferredoxin-type d omain-containing protein OS=[Clostridium] cellulosi OX= 29343 GN=CCDG5_1630 PE=4 SV=1
MNDLVTINEIMTSCGMPHWGIASFDNVKTALLECNAKKRLPEGAQSIISAIFPYYTHHAAGEISRYAASADYHIVALRRLNDACEKLRRAYEYNSFEPFCDSSPIPEVKTACLAGLGVLGKNGLLITPDYGSFVFIGEIVTDLSLPPNNKPAGRCMSCGLCAAACPSGCIADNKVDCSRCVSHISQKKGELTAEEQELLKKASTIWGCDICQNVCPHNKNLKETYIDEFKTDFVDSLDAKEIEDAGFKKKYKGYAFMWRGKNVLKRNVSILHSGKANNITCTTLKE

SEQ ID NO: 75894 - protein, 326 aa, Clostridium cellulovorans
  misc_feature (1)..(326): tr|D9SVF9|D9SVF9_CLOC7 4Fe-4S ferredoxin-type domain-co ntaining protein OS=Clostridium cellulovorans (strain A TCC 35296 / DSM 3052 / OCM 3 / 743B) OX=573061 GN=Cloce l_1330 PE=4 SV=1
MDIKEEIKHFCKSLGLNTVGFMRARIFHELRPFYERRKELGVFNSFEESDIEKKINPFLYLHEAKTIITVAFPYKYKESFEDKVYFSRYTRGKDYHKVAYTYLQRICEFIKSFGYDAVALVDSNSLPERYIAAEAGVGFIGKNNMLITEKYGSYVFLGEIITDALIDPDAKIESKCGECNLCIKACPVKAIGEEYNDSNKCLSYLTQKKDLTDEEMESLKGRLFGCDTCQRVCEFNQYTEEANLKELNPYEFMEHVDVKEIAHIDKKIFKDKYIKTSCGWRGKNILQRNALIALFSQGNGEEVDYEKITSDYVKEYYNRLLNRYKL

SEQ ID NO: 75895 - protein, 325 aa, Clostridium chauvoei
  misc_feature (1)..(325): tr|S6EMX1|S6EMX1_9CLOT Uncharacterized protein OS=Clost ridium chauvoei JF4335 OX=1351755 GN=CCH01_21770 PE=4 S V=1
MGIKEDIIAYCSSLGLDTIGFIKCRRFEELKSFYENRKSLGLQNEFEEDNIENRINPNVYMNEGKTIISIAFPYLHNVDYIDNGFSMYTRGLDYHRVLKSYLEKICNYINSLGGNAMAFVDSNTLPERYIAYLAGVGFIGKNNMIITKKYGSYVFLGEIITDLEISCEDVRTFKEIANFKECGNCELCYNECPTKAINKSRKNSNICVSYLTQKKDLEDKFIKLLDGRVFGCDSCQKECPYNLHIEYSKIQDFYPLDFMNKDNNEFLININNKNFKETFLTTSCGWRGKNVLKRNAIIRKKNNGDNIGDIKSDSPYLKDYIDRLF

SEQ ID NO: 75896 - protein, 222 aa, Clostridium chromiireducens
  misc_feature (1)..(222): tr|A0A1V4IJF6|A0A1V4IJF6_9CLOT Epoxyqueuosine reductase OS=Clostridium chromiireducens OX=225345 GN=queG_4 PE= 4 SV=1
MIKLSYLQEKLSSCCEIDSFSISMCSESERQALWDLLPECKSVIVLAHHIKHSIEWAWFPFEAERNNVTCAADLHLKTECEKITSVIKDNGYNSIIIPYPGRSGIRFKDLANKTGLGKIGDNFLFLHKEWGAWAHLRVIVSDGEISDKLPECKEVCYHCGICKTSCPAKVIKDDTLLGVECSQYQNKIDEEFGIQGSYTPKCEECARVCPIGETPEKITISK

SEQ ID NO: 75897 - protein, 342 aa, Clostridium chromiireducens
  misc_feature (1)..(342): tr|A0A1V4IV22|A0A1V4IV22_9CLOT Epoxyqueuosine reductase OS=Clostridium chromiireducens OX=225345 GN=queG_2 PE= 4 SV=1
MNTLALQIKNAALELGYEKCGIIKMSDIYGYKEKLEERIERTPEAKGFFQSQYRFVNAQETFPWAKSIVICIRRYGKYDIPEHLKGVIAKYYLVDSRTDENSKDFQDSLKFEKYMRELGIRAETERKFGLTALRWAAMKAGLGMVRRNNFFYTENGSWLYLEAWLIDEELELIETPNLRPCSDKCNLCIKACPSASLSQPYTMSPIACVSCITTFTGRDMPNEKYREEVGDWVYGCDVCQDVCPMNIKRWSETEEFPNLAELSQKISLEKIIKMDYDFLENVMQPKFWYIPKQDVWKWKVNTINAMVNNYKEQYKESIYEACKDSHEKVREMAEWAISKLNI

SEQ ID NO: 75898 - protein, 327 aa, Clostridium cochlearium
  misc_feature (1)..(327): tr|A0A239Z4F3|A0A239Z4F3_CLOCO (Fe-S)-binding protein O S=Clostridium cochlearium OX=1494 GN=queG PE=4 SV=1
MEYKKKLILDYCMKLGLDTIGVTEIRKFKELESYLINRKQKGHENEFEEKDIEKRINLQDVCDWGKVIISIAFPYMFNFNFQEKIYFSKYTQGRDYHKVVGEYLKKICCFIEYMGGKAQYFVDSNCLPERYIAKLCGIGFIGKNNMLITEKYGSYVFLGEIITDLCLPGDNEKDNKCGQCDLCLKACPTKSIKEKESNPNICLSYLTQKKDLEDVWMNKLQGRLFGCDTCQRVCPFNKGVEKSPLMEFKPLEFMEKVDLQELIYIDNKSFKEKYALSSCGWRGKNILKRNALINEFYYNKDGELKGQKFNSPYIRDYYSRLLKLHNL

SEQ ID NO: 75899 - protein, 324 aa, Clostridium colicanis
  misc_feature (1)..(324): tr|A0A151AN72|A0A151AN72_9CLOT Epoxyqueuosine reductase OS=Clostridium colicanis DSM 13634 OX=1121305 GN=queG PE=4 SV=1
MDYKECIIKYCYEIGLSQIGFTKCRVFHELKEFLTKRKHENIENEFEEKDIEKRINPFLYMKEGKTIISLAFPYMHETSTKADKYFSKYTLGRDYHEVVSKYLESICNFIKSLNGKAIYFVDNNALPERYIAYLSGIGFIGKNNMVITERYGSYIFLGEIITDLEIEEDMPKESKCGNCDICIKACPGRSISEKGCNPNICLSYITQKKNINEEEISKLKGKIFGCDICQDVCPYNKHIEFSKINEFEPFDFMRNTNFQEILNMSKKDFNEKYKMTSCGWRGKSVLQRNALINLAHMKRLKEGKKFNSPYVEEYYNKLLKNSKF

SEQ ID NO: 75900 - protein, 332 aa, Clostridium collagenovorans
  misc_feature (1)..(332): tr|A0A1M5VZP0|A0A1M5VZP0_9CLOT Epoxyqueuosine reductase OS=Clostridium collagenovorans DSM 3089 OX=1121306 GN= SAMN02745196_01463 PE=4 SV=1
MNIKESISQKLRDIDLDTFGFLKCEVFHDLKEFLVVKEELSLINEFEESEIEKRINPLLLMPEGKTIISIAFPYYVENNKEKDEIYFSRYTRTLDYHRVVHRYLDEVIRHIESLGGKALGFVDSNPLPERYIAMKSGVGFIGKNNMIITEKYGSYVFLGEIITDLEIEEDMPKENLCGECRECIKACPTKSIKNIKEKNLKGILNNSKICLSYITQKKEIDFPFIKLMDGRLFGCDSCQESCPYNKDINNKIIKEFESIDYMDKVNLEELLNLDNAKFKELYKCTSCGWRGKNILIRNSMIAAYNKGRLNLDYINNIKSTYVKEYFEKILRL

SEQ ID NO: 75901 - protein, 321 aa, Clostridium combesii
  misc_feature (1)..(321): tr|A0A2G7HFT1|A0A2G7HFT1_9CLOT tRNA epoxyqueuosine(34) reductase QueG OS=Clostridium combesii OX=39481 GN=queG PE=4 SV=1
MDCKESVKEYCRNLGLNLIGFTKCRIFHELIPELTERKNENRQNEFEGKDINKRVDPFQYMKEGKTIISIAFPYLFNLGHKHDVYFSKYTQGRDYHTVVNEYLQKICDFIQSKGYRAEYFVDSNDLPERYIAYLCGIGFIGKNNMLITEKYGSYVFLGEIITDMEIHEDEPMECKCEECNICLRACPTSSLEHKDPNICLSYITQKKNIEDDWFNKLKGRMFGCDTCQRVCPYNKNINTSNIEGFKTFDFMENLDLEELIYVNNKEFKEKYKLTSCGWRGKSILQRNALINCITMNKDVDIQGKNIKSPYVLDYYHRLLKK

SEQ ID NO: 75902 - protein, 266 aa, Clostridium coskatii
  misc_feature (1)..(266): tr|A0A162JDZ2|A0A162JDZ2_9CLOT Epoxyqueuosine reductase OS=Clostridium coskatii OX=1705578 GN=queG_6 PE=4 SV=1
MDKLTSKEIIKLALKTGASLAGIANVEDLKKAPAFTVVPKMPKYNGVGTYMRGEKDKFLTEVLWPQGIKSVLILAYHHPIDNPAVDYWIEDHNTIGNKKLISITKNVKSILEKECVETYSFNYHVEKGGIFLKDSAVTAGLGCIGRNNLLVTPEYGPHVRLRALGLSLDLQSTGPSGYDPCKSCKIKCWEKCKKSAFAKEIYFSSELGRSELPGRVGNFDRTLCNIQMEEDVASIKPMNIPEVSTEEPVNVIKYCRTCEYACPIGK

SEQ ID NO: 75903 - protein, 235 aa, Clostridium coskatii
  misc_feature (1)..(235): tr|A0A166TRH2|A0A166TRH2_9CLOT Epoxyqueuosine reductase OS=Clostridium coskatii OX=1705578 GN=queG_4 PE=4 SV=1
MLEYNIQKILNNFMIDYYGVADISKYENELVKYGGSLVKSYPRAISLGIVFPSTIVDHLNDDSNNITKLEYENCYKTINARLDNIASIISSYIIRKGYKALPISAAERVNSDYINAAFSHKLAARLAGLGWIGKSCLLITPKHGPRVRWVSILTDLPLNPTGKEIEQKCGECMACVKICPQKAFYGKNYIEGEDREKRFDVKKCDSYFSEMEHNKQVPVCGMCVYICPYGRKNNK

SEQ ID NO: 75904 - protein, 331 aa, Clostridium cylindrosporum
  misc_feature (1)..(331): tr|A0A0J8D966|A0A0J8D966_CLOCY Epoxyqueuosine reductase QueG OS=Clostridium cylindrosporum DSM 605 OX=1121307 GN=queG PE=4 SV=1
MNIKNNIIDYANKIGVPYIGFTDTTFSKKFINNLKNRRNENKLSGFEEEDELKRVDIESLLNGAKTIVSIALPYKYKDQNYIEPYFSKYTMGEDYHRILTSKLNLIKSYIEDNFNEKCIFFCDTGVVSDKEIARKSGLGFVGKNTNIITKNHGSYVFLGEIITTLEIEPCNAKESLCGSCDKCIKACPAKAIDETGIDGKRCLSYITQKKDDLTLEEMERLGNRIFGCDTCQDVCPHNKEVSTSNIDEFKPLEHSMNINLEELLFMSNKEFKIKYGRQALAWRGKFIVQRNAIIAAGNSRNKKYIEVLKKKKDDIRLQNYIDIAIEKINQC

SEQ ID NO: 75905 - protein, 343 aa, Clostridium diolis
  misc_feature (1)..(343): tr|A0A2P8RCC8|A0A2P8RCC8_9CLOT Epoxyqueuosine reductase OS=Clostridium diolis OX=223919 GN=C4L39_19390 PE=4 SV =1
MTLLADKIKSAALNLGYEKCGIIKISDIDGYKERLDERVERVPESKGFYQGQYRFTQLQDTYPWAKSIVICVRRYGKYHIPEHLKGMIAKYYLVDARKDKNSKDFQDSVKFEEYMQELGLRAETERGFGLVPLRFAAMKAGLGIVRKNNFFYTENGSSVYLDAWLIDKELEAVEIPNVRPCSDKCNLCIKACPSASLSKPYTMNPIACVSCITTFMGRDMTNEKYREEIGNWVYGCDACQDACPMNKNRWQETEEFPNLQELSEQISLEKIIKMDYKFLEEVMQPKFWYIDKSSVWKWKVNAINVMVNDYKEQYKEHILYACNDSNSKVREMAEWAIEKLNLK

SEQ ID NO: 75906 - protein, 324 aa, Clostridium disporicum
  misc_feature (1)..(324): tr|A0A174CYW9|A0A174CYW9_9CLOT Iron-sulfur cluster-bind ing protein OS=Clostridium disporicum OX=84024 GN=queG PE=4 SV=1
MKEQIKRYCNSIGIENIGFIECRRFDELYDFYDYRKNNKLENEFEESDIEKRINPKWYMSEGKTIISIAFPYLWVDNYIENGFSKYTKGLDYHRVVKKYLDEICRLISENGGKAISFVDSNTLPERYIAYLAGIGFVGKNNMIITKDYGSYVFLGEIITDLTLFDKDKRVFNEIEKFKECGQCDICYKECPTKSINEIKKNPNICSSYITQKKDLSDIEIKLLKGKIFGCDICQNKCPYNEDVKFSNIGEFKPLDFMEESNCEIYAGINNKAFKENILITSCGWRGKNIIKRNAIIRLHNEGRDIKKYKGDSPYLNDYIERLNK

SEQ ID NO: 75907 - protein, 328 aa, Clostridium disporicum
  misc_feature (1)..(328): tr|A0A174CBE3|A0A174CBE3_9CLOT Iron-sulfur cluster-bind ing protein OS=Clostridium disporicum OX=84024 GN=queG PE=4 SV=1
MIKEKIVKYCNSIGLDTIGFVKCRVFEELREFYLDRKEKGLENEFEENDIEKRINPNVYMEDGKTIISIAFPYYMGKEDVDNGFSVYTKGYDYHRVVKSYLDKICTYINELGGKAIPLVDSNSLPERYIGFLAGLGIIGKNNMIITKKYGSYVFLGEIITDLEICCRDAGTFEDIQKYDGCNECKVCIDNCPTKAIMTGRKNPNICSSYITQKKELSKIDYKLIKNRIFGCDICQNTCPYNKEISFSNLEEFKSLDFMNTTDIKYYADLNNKEFKEKISRTSCGWRGKNVIRRNAIIRLHNEGEDIEKYKGDSLMINNCIDEIKRINN

SEQ ID NO: 75908 - protein, 314 aa, Clostridium drakei
  misc_feature (1)..(314): tr|A0A2U8DRQ5|A0A2U8DRQ5_9CLOT 4Fe-4S ferredoxin OS=Clo stridium drakei OX=332101 GN=B9W14_10535 PE=4 SV=1
MQNYSSDFINQIQKYGFKAQVISFKHIKEIQLELETTKQIHKDVNTYIGKYINKFNYNVPINSLEAKSIIIIAVPQPIARINFTLDSKNHTVIMPPMYLLNSSSEFEEKHKKISEITTIVKKILSTENFKVVKANIPCKLIAVKSGLGTYGRNNICYINSESSFYWLGSYISDMPCENDFWQKCTIMDACKNCDLCLKNCPTSAISDDRFLLHTNKCITLQNESKETFPKSLNLKWHNCLIGCIRCQIICPVNKKHIKNVKDITEFSELETKKILSKTPLKELPGETYKKLELISFIEDYNLLARNLSILINNK

SEQ ID NO: 75909 - protein, 324 aa, Clostridium drakei
  misc_feature (1)..(324): tr|A0A2U8DJU7|A0A2U8DJU7_9CLOT Epoxyqueuosine reductase OS=Clostridium drakei OX=332101 GN=B9W14_00265 PE=4 SV =1
MNYKSMIINYCKDIGLDTIGFTKCRVFEELKHYFEHRKSMSLINEFEEQDINKKINPFMYMKDGKTIISIAFPYLFNNDFQQQVGFSKYTQGRDYHVVVSEYLKNICSLIEKEMSGKAVYFVDSNSLPERYIAKLCGIGFIGKNNMIITEKYGSYVFLGEIITNISIEEDEPMECKCEDCDLCQKSCPTGAIRNENNSNICLSYISQKKEIDDEWFNKLKGRIFGCDTCQRICPFNKKASFSNIEEFRPYDFMEVINLEELANIDKRIFLNKYSKSSCGWRGKNVLQRNALINIISMKRNINIKEINSLYVKNYYNRLLYHFKL

SEQ ID NO: 75910 - protein, 330 aa, Clostridium estertheticum
  misc_feature (1)..(330): tr|A0A1J0GCU9|A0A1J0GCU9_9CLOT tRNA epoxyqueuosine(34) reductase QueG OS=Clostridium estertheticum subsp. este rtheticum OX=1552 GN=A7L45_01405 PE=4 SV=1
MSIKDDIIEFCSINGLDVIGFSECRIFHELNPYFDKRKKLGLENEFEEKELDKKINPFIYMEDGKTIISIAFPYLYNNDISGKVYFSNYTMGRDYHLVLIEYMKKICTYIEELGAKAMYFVDSNALPERYIASLCGLGFIGKNNMLITKRYGSYVFLGEIITDLMIEPDKSVTQKCGDCEICLSSCPTSAIVKGKVGINNNSNICLSYITQKKDIEDLWFEKLGGRLFGCDTCQKVCPYNKKVEWSVIKEFKPYEHMKTPELKVLMNIDNKLFKDMYKITSCGWRGKNIIKRNAIINAFIIEKVEIIALQKDTSPYIRDYYYRLLKFFKL

SEQ ID NO: 75911 - protein, 337 aa, Clostridium fallax
  misc_feature (1)..(337): tr|A0A1M4SS18|A0A1M4SS18_9CLOT Epoxyqueuosine reductase OS=Clostridium fallax OX=1533 GN=SAMN05443638_101145 P E=4 SV=1
MIRNNIENFCRGLGLDLIGFVRCREFIELRDFLLDRKKLNLENPFEEEILEKRINPLQYLNEGKTIISIAFPYLHNYEYKENGFSVYTRGEDYHKVVNSYLEKICGFIETLGGKAERFVDSNPLPERYIAYLSGIGFIGKNNMLITKQYGSYVFLGEIITDLVMESYDDDGKHLEDLLKFKECGICDLCYKNCPTKSINKNKKNSNICLSFITQKKDIDDKWFNILNGRIFGCDTCQKVCPFNKYIKYSGIKEFYPLDFMNENLTDKLITITKGDFNKSIKLTSCGWRGKNVLSRNSIIRKYALSKEEIEEGIYNMKFQSSYLEEYKNRILDLSKTE

SEQ ID NO: 75912 - protein, 343 aa, Clostridium felsineum
  misc_feature (1)..(343): tr|A0A1S8LJ53|A0A1S8LJ53_9CLOT Epoxyqueuosine reductase OS=Clostridium felsineum DSM 794 OX=1121310 GN=queG_1 PE=4 SV=1
MNSLAEQIKSAALHMGYEKCGIIKISDMLGYEEKLNERIERIPEVKPYYEDFYSFAHPEDTYPWAKSIVICARQYGKYYIPEHLKGMIAKYYLVDSRTDENSESFQDSLKFEKHMQDIGIKTATDRKFGITALRFAALKAGIGLVRKNNFFYTESGSWVYLEAWLIDKELESIEIPTLKKCSEYCNICIKSCPTSSLSEPYTMNRSSCISCLTTWEGWDMPNEKYKEQIGDWVYGCDVCQDVCPMNKNRWKETEQFPFLRELGEQISLEKILKMDYTFLENVMQHKFWYIQKTDVWKWKTNAINAMVNDYKQQYREYILDACNDSNAKVRKMAEWAIQKLNLL

SEQ ID NO: 75913 - protein, 238 aa, Clostridium felsineum
  misc_feature (1)..(238): tr|A0A1S8LCE2|A0A1S8LCE2_9CLOT Epoxyqueuosine reductase OS=Clostridium felsineum DSM 794 OX=1121310 GN=queG_2 PE=4 SV=1
MELLDKIKELGDIHAIDFIGVAGLTKVKNDIKEISGSLIDEYPRALSIGIVLQDSIVDLLSGSDNYENALENKIHGYDVIMNRLDNFASIVGSVIQRNGYKAMPLPASERIDSTRVCASLSHKLTARLAGFGWIGKSCLLINPKYGPRVRWTSVLTDAPFEENKEILEGRCGDCNNCAKACPSKAILGRNYVADEPREVRLDVRRCEEHLSKRKQEGKFEICGKCMYACPFGMQKITL

SEQ ID NO: 75914 - protein, 245 aa, [Clostridium] fimetarium
  misc_feature (1)..(245): tr|A0A1I0RYR4|A0A1I0RYR4_9FIRM Epoxyqueuosine reductase QueG (Queuosine biosynthesis) (Fragment) OS=[Clostridi um] fimetarium OX=99656 GN=SAMN05421659_1482 PE=4 SV=1
MNRKIERMLLENGASMVGFAKINELYSNVDLKEPRSEDSVTESINIPIYPFGISIILSYPQTVIKNISDFPTIEYYNAYHKLSDKLDDLATMCAEYIIEQGYNAYPQTDSATKEYGIFRTVMPHKTVAVHSGLGWIGKSALFLTEKYGSAVRLTSVLTDAPLEFNKLILQSKCGSCMICTDACPGNAISGLTWNPKLERDEFFDALACRKKAREIAAKSLEKQITLCGKCIEVCPYTRKYTTFDS

SEQ ID NO: 75915 - protein, 377 aa, Clostridium formicaceticum
  misc_feature (1)..(377): tr|A0A1D9FLP0|A0A1D9FLP0_9CLOT tRNA epoxyqueuosine(34) reductase QueG OS=Clostridium formicaceticum OX=1497 GN =BJL90_10705 PE=4 SV=1
MKLKEEIKSYGKSIGVDLIGFTSAEPFEDMRNILEKRKKRNHLSGFEEQNIELRIHPKKTMADAKSIIVIGVSYYKRHIKQGEMNKPPFSGVLARTAWGRDYHYVLKEKLEKIAAFIQERIDDFRYKIFVDTGPLVDRHVAYRAGLGWYGYNALLINEKYGSWFFIGYMMNNVAFEEDKPLENKACEGCNLCIKNCPKGALEGPYEFNAKKCLSNLLQQKEEIYEEDRGILGKNLYGCDICQDVCPHNNKATEMSEDHFSPQAVSSAPDLIELLHMSNKAFKKTYGSTSAGWRGKKVLQRNAIIAIVNHGDKKALPYLIPLLKDNRPEIRSCSIWGIFQLDPFLAREISEEMKKKEEDQKVLDTIVSCLNKAFPFEN

SEQ ID NO: 75916 - protein, 331 aa, Clostridium frigidicarnis
  misc_feature (1)..(331): tr|A0A1I1AIF2|A0A1I1AIF2_9CLOT Epoxyqueuosine reductase OS=Clostridium frigidicarnis OX=84698 GN=SAMN04488528_ 103432 PE=4 SV=1
MKNRIISFCNDLGLDTIGFVKCRKFKELIELYTYRKNKNLENEFEETDIEKRINPFIYMENGKTIISIAFPYMKNFDLNDEIYFSKYTQVMDYHKVVRLYLDKICKFIQSLGGEAIPLVDSNSLPERHIAALGGVGFIGKNNMVITKKYGSYVFLGEIITSLNIQCENNINLDEILSFKKCNECHRCYEKCPTKSINIHNKNCNICLSYITQKKEIDDKWLDKLNGRLFGCDTCQTVCPYNKYIEKSLINEFKTMDFMKNINIEEIIYMDKKTFKEKYIKTSCGWRGKSILQRNALIACLTLNGNYYIDDKKILSPYVKEYYNRLLNKGDL

SEQ ID NO: 75917 - protein, 326 aa, Clostridium gasigenes
  misc_feature (1)..(326): tr|A0A1H0V108|A0A1H0V108_9CLOT Epoxyqueuosine reductase OS=Clostridium gasigenes OX=94869 GN=SAMN04488529_1137 1 PE=4 SV=1
MELKEKIKDYCEFLGLDTIGFIKCREFNELREFYNGRKAFNLENEFEEENIEKRINPNIYMEEGKTIISIAFPYLHNVEYINNGFSVYTRGEDYHKVVKSYLNKICNYIESLGGVAISLVDSNTLPERYIAYLAGVGFIGKNNMIITKKYGSFVFLGEIITNLEINSDDLRTFEELNNFKECKDCEACYYACPTKAININRKNCNICLSYLTQKKDLEDKYIKLLNGRVFGCDSCQDVCPYNKNALFSNIEEFKPFSFMNENNTKVLAYINNKDFKETFLKTSCGWRGKNVLKRNAIIKLAKNDLDSIKELETESPYIINYINRLL

SEQ ID NO: 75918 - protein, 330 aa, Clostridium grantii
  misc_feature (1)..(330): tr|A0A1M5RRV0|A0A1M5RRV0_9CLOT Epoxyqueuosine reductase OS=Clostridium grantii DSM 8605 OX=1121316 GN=SAMN0274 5207_00687 PE=4 SV=1
MKFNVEIRNFCESLGLDLVGFSECREFSELNSYFEQRKNNNLINEFEEKDTLLKINPFQIMKDGKTIISIAFPYKFPIDTDNDAIKDKSIYFSRYTLGQDYHKVVKKYLEKIAFFINERFGGKTEILVDSNALPERYIAYLGGIGFIGKNKMFITEKYGSYVFLGEIITDLKMEWDNPLKNKCEECFLCLNACPSKALISEDFNKCLSYITQKKQIENKWFSKLDKRIFGCDTCQEICPYNKNVTFSNLIEFKPLEFMEKLDKDDLLNLTESSFKEKYKKSSCGWRGKNIIKRNVLINLYKQGYINKENYKSDSPYLMDYYNRLLKETNL

SEQ ID NO: 75919 - protein, 327 aa, Clostridium haemolyticum
  misc_feature (1)..(327): tr|A0A0A0IJF5|A0A0A0IJF5_CLOHA (Fe-S)-binding protein O S=Clostridium haemolyticum NCTC 8350 OX=1443115 GN=Z961 _09020 PE=4 SV=1
MNCKKKIIEYCNELGLDIVGFTKCRVFTELKEYYINRKELNLENEFEENDINKRINPFIYMEKGKTIISIAFPYLYEQISYSKIYFSKYTLGSDYHEVVSSYLKKICEFIKILGGEASYFVDSNSLPERYIAYLSGIGFIGKNNMLVTEKYGSYIFLGEIITDLELEEDYPIKKDCGECELCLKACPTGAISNDINNNSNICLSYITQKKDIDDYWLSKFKGRMFGCDTCQNVCPYNKDVINSNIQEFKPFNFMKEINSEEILNMSKKDFNSKYKLTSCGWRGKNIIQRNMLINMFYFNDIDIKKVKEFSSPYVQSYYNKLLKFLKL

SEQ ID NO: 75920 - protein, 249 aa, [Clostridium] hiranonis
  misc_feature (1)..(249): tr|A0A5C0T388|A0A5C0T388_9FIRM Epoxyqueuosine reductase OS=[Clostridium] hiranonis OX=89152 GN=queG_1 PE=4 SV= 1
MREKFSGLINSFIKEYKSKNNLFAEWEDVLVGFSKVDDKNMKYLREAVIEDHHLATDYLDDAKTMISYFVPFKEIIANSNKEGNLPSDIWVHSYRETNEMADKLNNYLVAEIEKMGYKAAKPVDCGIVDGKAKSRWSQRHIAYLSGLGTFGLNNMLITEKGINGRFFSIVTNMEIKSDEPLKEERCLYKLNGSCGKCVERCFSGALTYDGFDRFKCLEICVENEKNNKMADVCGKCTIGLPCTFKNPLK

SEQ ID NO: 75921 - protein, 320 aa, [Clostridium] hiranonis
  misc_feature (1)..(320): tr|B6G0Z0|B6G0Z0_9FIRM Putative iron-sulfur cluster-bin ding protein OS=[Clostridium] hiranonis DSM 13275 OX=50 0633 GN=CLOHIR_01796 PE=4 SV=1
MLIKDGFEGIEKKSRNDIVKSIFLEYGVECCGIAPVKFGNEIREILQKRADENHLSGMEESDIDKRLDATLIMEDAKSIIVAAFPYYCGENNDSNISCYCRGYDYHLVIRGIMNNICEKIQEKFSNGENCTNENSIKMEIFVDNGPLVDRYLAYISGIGFWGMNGSIITDKYGSYVFIGYIVTNLDIEKDVPLEKTCLKCGKCIKSCPGNALLEGYDMDAKKCLSYITQKKGELSDDEKNIIKENKIIFGCDMCQKVCPHNKNIEMTNIEEFKNDLIEKLDLEEINRISNKEFKRRYYNRAFSWRGKGIIKRNLEILEED

SEQ ID NO: 75922 - protein, 137 aa, Clostridium homopropionicum
  misc_feature (1)..(137): tr|A0A0L6Z8D6|A0A0L6Z8D6_9CLOT Epoxyqueuosine reductase OS=Clostridium homopropionicum DSM 5847 OX=1121318 GN= queG_2 PE=4 SV=1
MQPEIIERINNGPTEEYFREYNRINEKLDSIVMSCVKYIEAKGFNAIGQTTTFVTSDDNLTTSLPHKTVATRAGLGWIGKSALLITPQYGSAIRLSSIITDMPLPIDSPINESKCGDCINHTFEPLRSNKVVFINKK

SEQ ID NO: 75923 - protein, 281 aa, Clostridium homopropionicum
  misc_feature (1)..(281): tr|A0A0L6Z8E2|A0A0L6Z8E2_9CLOT Epoxyqueuosine reductase OS=Clostridium homopropionicum DSM 5847 OX=1121318 GN= queG_3 PE=4 SV=1
MNNNRELKDKIKQFCLDAGADIIGFASVERWEEDNEVPPDFRPQAIFEQARTVIVIGVGMPLPIVDTTPSILHKETYDTANRVLDDMAFNLVRYLNRLGHASYFFTRDGYGNLRLLKDRPQAAFSHIMAGKYAGLGDVGLNNCLLTPEFGPRVRLVSVFTSAILEPDPIIEKDLCIRCGACAKCCPVDSIIIRDKHQVKSEFIPIPCIDRHSELSRDKAYPCGICTKVCPVGKDRVLYNEKGNMKKYLEEEKRLAENPDDPEYKAWTHVRNYGSWNKQYPR

SEQ ID NO: 75924 - protein, 375 aa, [Clostridium] indolis
  misc_feature (1)..(375): tr|A0A3P6KCS5|A0A3P6KCS5_9FIRM 4Fe-4S ferredoxin, iron- sulfur binding domain-containing protein OS=[Clostridiu m] indolis OX=69825 GN=queG PE=4 SV=1
MNIDQLKQDVIDYAHSIGIDSIGFTTADPFDELKQKLVDYHAKGYASGFEESDIGLRTEPKLSLPTARSIIAIAVGYPNKLKGAPRSVRGDRRGMFARASWGQDYHTIMRKRLDQLAEYLEARVPNVEIKSMVDTGVLSDRAVAERAGLGYVGRNGFVINPDLGTWTYLGEMLVSVPFPPDDPLIDSCGDCTICVDRCPTGALVGDGQLNSQKCISFLTQTKGYLADEYRYKIGNRLYGCDTCQQVCPRNRGINTQHDDIVLEPEVLKPRLVPLLQMSNKEFKNTYGHLAGAWRGKKPIQRNAILALAHFKEETAIPELQEVALNDPRPMIRGTAYWAIGQIQGEVARPFIDAHYDNELEEVQHEMLKGLDMRRE

SEQ ID NO: 75925 - protein, 342 aa, Clostridium intestinale
  misc_feature (1)..(342): tr|A0A1M5YWW7|A0A1M5YWW7_9CLOT Epoxyqueuosine reductase OS=Clostridium intestinale DSM 6191 OX=1121320 GN=SAMN 02745941_02297 PE=4 SV=1
MDDLAIKIRDEALKLGYEKCGIIKVDEMYDYEDRLNERIEKVPITKGFYSRYYNFSHLQDTYPWAKSIVVCIKRYDNYHVPEHLQGMIGKTYMFDSRVDEKSKEFQDGLKFEKYMQGLGIKTHTERKFGVTGMRWAALKAGLGIIRRNNFFYTEKGSWLTIEAWVIDEELEYKETPNIKPCSEKCNLCIKACPSKSLSEPYTMNPLACVSCLTTFAGRDMPNEIFKEAMGDWVYGCDVCQDSCPMNKNKWIGNEEFLNLEELSSKISLEKIIKMDYDFLENVLQKKFWYIPKDDVWKWKVNAINAMINNYKEEYKASIYEALEDSHEKVREMADFAIKKLSI

SEQ ID NO: 75926 - protein, 342 aa, Clostridium intestinale
  misc_feature (1)..(342): tr|U2Q5G6|U2Q5G6_9CLOT 4Fe-4S ferredoxin-type domain-co ntaining protein OS=Clostridium intestinale URNW OX=129 4142 GN=CINTURNW_1515 PE=4 SV=1
MVELAIKIRDEALKLGYEKCGIIKVDEMYDYEDRLNERIEKVPITKGFYSRYYNFAHLQDTYPWAKSIVVCIRRYDNYHVPEHLQGVIGKTYMFDNRVDENSKEFQDGLKFEKYMQGLGIKVHTERKFGVTGMRWAALKAGLGIIRRNNFFYTEKGSWLTIEAWVIDKELEYKETPNIRPCSEKCNLCIKACPSKSLSEPYTMNPLTCVSCLTTFAGRDMPNEIFKEAMGDWVYGCDVCQDSCPMNKNKWIGNEEFPNLEEISSKISLEKIIKMDYDFLENVLQKKFWYIPKDDVWKWKVNAINAMINNYKEEYKASIYDALEDSHEKVREMADFAIKKLSI

SEQ ID NO: 75927 - protein, 328 aa, Clostridium isatidis
  misc_feature (1)..(328): tr|A0A343JD04|A0A343JD04_9CLOT tRNA epoxyqueuosine(34) reductase QueG OS=Clostridium isatidis OX=182773 GN=BEN 51_07955 PE=4 SV=1
MIKEDIINFCNSLGLDTLGFIKCRKFIEMKDYLLERKAKGLQNEFEEDDIEKRINPFLYMEEGKTIISIAFPYLHDVEYYDNGFSVYTRGMDYHKVVKSYLGKICEYIESLGGKAAAFVDNNFLPERYIAYLAGVGFIGKNNLIITKKYGSFVFLGEIITDLEIESDEKRSFKDIEKFEECGECTNCYKKCPTKAINPYRKNSNICLSYLTQKKELEDKHIKLLDGRVFGCDSCQKPCPYNENIAYSPIKEFYPYDFMNSDNTEELAAIGNSGFKESFLKTSCGWRGKNVLKRNAIIRLSRNKDISKIKSDSPYLKGYINRLLKNNEI

SEQ ID NO: 75928 - protein, 343 aa, Clostridium kluyveri
  misc_feature (1)..(343): tr|A0A1L5F7R9|A0A1L5F7R9_CLOKL Fe-S oxidoreductase OS=C lostridium kluyveri OX=1534 GN=BS101_10115 PE=4 SV=1
MHTIEKMIQNKAYELGYEKCGIIPISLMEGYAEKFKERIEKVPKSKMFYENQKRLLNPLAMYPWAKSVVVLAASYGKYKIPEVVKGHIAKSYLFDTRIDKNTREYQNNRALEKYMQELGLKVETNQKFGVVGMRWAALQAGIGIIRRNNFLYTESGSWVHLEAWITDREMELKETNEVPQCPKACNRCIASCPTKSLSAPYTMSPTECVSFLTTFGGRNLPQEPLSRTFGNCIYGCDICQDVCPMNKGKWKEEEEFPGLAELSSALTPENILNMEEEFYREKVQPKFFYLSAEELWKWKVDVLCYMRNSYNETYRPLIINACNNENYKIREMACSICRELYLQ

SEQ ID NO: 75929 - protein, 326 aa, Clostridium liquoris
  misc_feature (1)..(326): tr|A0A2T0B3A1|A0A2T0B3A1_9CLOT Epoxyqueuosine reductase OS=Clostridium liquoris OX=1289519 GN=queG PE=4 SV=1
MDNKEKIIKYCNNLGLDNLGFTSCRKFKGLEEYFYLRKSKGQENEFEEKDIQKRINPDIYMREGKAIISIAFPYVFNKNFNNKFYFSKYTMGRDYHLVVTEHLKKICAFIEFLGGKAKYFVDSNALPERYIASLCGIGFIGKNNMLITEKYGSYVFLGEIITDLELDEDNPLRRKCGECNLCLKACPTNSIGEHENNSNICLSYITQKKDIENSWFHKLQGRLFGCDTCQGVCPYNKKASLSTIEAFEPFPFMEEVNIEELINMDNKTFRDKYALTSCGWRGKNILIRNALINVFEKAENYKVGVKHFNSPYVKDYYSRLLQLHKL

SEQ ID NO: 75930 - protein, 235 aa, Clostridium ljungdahlii
  misc_feature (1)..(235): tr|A0A166R1F8|A0A166R1F8_9CLOT Epoxyqueuosine reductase OS=Clostridium ljungdahlii OX=1538 GN=queG_3 PE=4 SV=1
MLEYNIQKILNNFMIDYYGVADISKYENELVKYGGSLVKGYPRAISLGIVFPSTIVDHLNDDSNNITKLEYENCYKTINARLDNIASIISSYIIRKGYKALPISAAERVNSDYINAAFSHKLAARLAGLGWIGKSCLLITPKHGPRVRWVSILTDLPLNPTGKEIEQKCGECMACVKICPQKAFYGKNYIEGEDREKRFDVKKCDSYFSEMEHNKQVPVCGMCVYICPYGRKNNK

SEQ ID NO: 75931 - protein, 343 aa, Clostridium ljungdahlii
  misc_feature (1)..(343): tr|D8GR16|D8GR16_CLOLD Uncharacterized Fe-S protein OS= Clostridium ljungdahlii (strain ATCC 55383 / DSM 13528 / PETC) OX=748727 GN=CLJU_c32750 PE=4 SV=1
MNIIEQMIQKKAYELGYEKCGIIPIGLMDGYAKKFEERIEKVPKSKMFYQNQQRLVNTLATYPWAKSVVVLAVQYGKYKIPEVVKGHIGKSYLFDIRVDKNTKEYQNNRALEKYMQELGLKVETNQKFGVVGMRWAALQAGIGIVRRNNFLYTESGSWVHLEAWVTDREMELKETNDVLQCPKNCNRCMASCPTKSLSDPYTMSPTTCISFLTTFGGRNLPQEPLSRTFGNCIYGCDICQDVCPMDKGKWKEEEEFPGLAELSSVLTPENILNMEEGFYRKKVQPKFFYLSSEELWKWKVDVLCYMRNNYKETYRPLIINACNNENYKVREMAYSICKELCLQ

SEQ ID NO: 75932 - protein, 320 aa, Clostridium luticellarii
  misc_feature (1)..(320): tr|A0A2T0BSE9|A0A2T0BSE9_9CLOT Epoxyqueuosine reductase OS=Clostridium luticellarii OX=1691940 GN=queG_1 PE=4 SV=1
MEILEYCREIGLDTVGFSSCRVYTELEEYLWFRKQNLLENEFEEKDIKKRINSCEYIDGGKTIISIAFPYLFEKVRESSGVEFSLYTRGRDYHKVAETYLKKVCNFIESLGGKTRYFVDSNSLPERYIAFQSGIGFIGKNNMLITEKYGSYVFLGEIITDMNIEGDVPVKTQCSSCSLCQIACPTGAICGYKDSNRCMSYITQRKHIEDKWFTKFKGRLFGCDTCQKVCPYNQDVLYSGIEDLRAFDFMEKVDLNEIVNMDKSTFGKKYANTSCGWRGRNVIQRNGIINALMLDEDVSIKSIRSPYIKNYYDRLLRFLKL

SEQ ID NO: 75933 - protein, 280 aa, Clostridium luticellarii
  misc_feature (1)..(280): tr|A0A2T0B5Z4|A0A2T0B5Z4_9CLOT Epoxyqueuosine reductase OS=Clostridium luticellarii OX=1691940 GN=queG_3 PE=4 SV=1
MENTRKNHIDINLCIGKYLDEFNYNTLKVSFKARSIIVIAVPQPVSRIYFTIKMKKKPVIMPPMYLFNTNSKLEKKQKKVIEVTSIVERVLCSINFRAVKINLPCKLLAVGSGLGSYGRNNICYIDDESSFYWIGVYISDMPCENDTWQENKIMDTCKDCNLCLKNCPGGAIANDRFPIHADKCITLYNENEGGFPKWMNSSCHNSLIGCMRCQSVCPVNRKHIDNIEDIAEFDSYETEMILAGTQLYKLPETTYRKLDTINFVEDYNLLARNLKILISK

SEQ ID NO: 75934 - protein, 326 aa, Clostridium magnum
  misc_feature (1)..(326): tr|A0A162RMV2|A0A162RMV2_9CLOT Epoxyqueuosine reductase OS=Clostridium magnum DSM 2767 OX=1121326 GN=queG_4 PE =4 SV=1
MDYKNSILEYCKSLGLYTVGFTKCRIFSELKTYYEDRKLRNLENEFEEKEIEKRINPFLYMEDGKTIISIAFPYLFDSDSKEHIDFSKYTKGRDYHIIVSAYLKKVCEFIEGLGGKAIYFVDSNALPERYIAVQCGIGFVGKNNTVITKQYGSYVFLGEILTDLYVEQDNPQEDKCGSCNICQSSCPTGAIQGENIPNKCLSYITQKKDIEDEWFLKLKGRIFGCDTCQKVCPHNKEISLSKIEEFKPFDFMEKVNLEELANIDKKTFKEKYSQTSCGWRGKNVLQRNALINAITLNKDIKVSEISSPYVKDYYDRLLKSLNKKKT

SEQ ID NO: 75935 - protein, 254 aa, Clostridium magnum
  misc_feature (1)..(254): tr|A0A161WUK9|A0A161WUK9_9CLOT Epoxyqueuosine reductase OS=Clostridium magnum DSM 2767 OX=1121326 GN=queG_3 PE =4 SV=1
MRNKVETMIKEFVKHYAESKGFKTKWKEPLIAYADAEDKMFYELKVVVSYSHALPKDFLQEAKTVITYFIPFDDTVIRSNIDGRESSRVWAIAYIETNQLIADLNTYINEELKNMGFNGTIIPATHNFDKRKLISDWSHRHVAFIAGLGSFGLNNMLITDKGCCGRIGSLVTDLKIESSERKNREYCLFRHNGTCKKCIDRCVNDALKVDCYDRHKCYEICLNNDKVHLDIGLTDVCGKCLVGIPCSTINPVKK

SEQ ID NO: 75936 - protein, 265 aa, [Clostridium] methylpentosum
  misc_feature (1)..(265): tr|C0E9Y0|C0E9Y0_9FIRM Putative iron-sulfur cluster-bin ding protein OS=[Clostridium] methylpentosum DSM 5476 O X=537013 GN=CLOSTMETH_00632 PE=4 SV=1
MTMLKQILNQAGVREFGVCPMPPEDALLDCRAKSRLPENARSVIVCLFPYYSPGLEGNISRYAMVEDYHKVAREILTPACESLRQAYAAEFSWFADNSPIPEVSAAVQAGLGVQGRNGLLITPDYGTYVFLGEIITDHLFDYSAPAQGSCLGCGRCEAACPGGALCGGAVDISRCVSDISQRKGELTPSETELVRAGGLLWGCDRCQLVCPHNREVKQTHIQAFQKNIVASVAYGQIRPLCKTRAFGFRGPRVLERNYHILYGVD

SEQ ID NO: 75937 - protein, 332 aa, Clostridium neonatale
  misc_feature (1)..(332): tr|A0A2A7MEX9|A0A2A7MEX9_9CLOT tRNA epoxyqueuosine(34) reductase QueG OS=Clostridium neonatale OX=137838 GN=qu eG PE=4 SV=1
MGVKEDIINYCFSLGINSVGFIRCRRFEELEGFFKERKALNLENEFEEKNIDLRIEGREWFKEGKTIVSIAFPYLSLNIDNRIDNGFSLYTRGSDYHYVVNKYLKNIIDIIENYGGKAKAFVDSNTLPERYLAYISGVGFIGKNNMIITKEYGSYVFLGEVITDLEFYEEDKRSFEEINLFKECGDCTICYSECPTKSINSIKKNCNICLSYITQKKELEDWEIKKLDGRVFGCDSCQLKCPYNKKAKLSSIREFDSLEFMNDNNEDFIINMGNAEFKNSFKLTSCGWRGKNILKRNALIRKQLYLKDNMQHKKFESPYLQKYLEKLVLKNE

SEQ ID NO: 75938 - protein, 343 aa, Clostridium neonatale
  misc_feature (1)..(343): tr|A0A2A7MJM7|A0A2A7MJM7_9CLOT Epoxyqueuosine reductase OS=Clostridium neonatale OX=137838 GN=CQ394_06365 PE=4 SV=1
MDTIEQMIQKKAYELGYEKGGIIPIGLMDGYTEKFNERIEKIPKSKMFYENQQRLAKFREIYPWAKSVVVLTVAYGKYKVPEMLNGLIAKAYLFDTRVDENTKEYQNNRALEKYMQELGLKVETNQKFGVVGMRWAALQAGLGIIRRNNFLYTESGSWVHLEAWVTDREMELKETNNVVECPKSCNRCIASCPTKSLSDPYTMSPTECISFLTTFGGRDLPHEPLSKTFGNCIYGCDICQDACPMNKGKWKDEEEFSGLEELVPSLIPENILNMEEDFYRNKVQPKFFYLSADDLWKWKVDVLCYMRNNYKESYKSLIINACNNENNKVREMACSICDELSLQ

SEQ ID NO: 75939 - protein, 327 aa, Clostridium novyi
  misc_feature (1)..(327): tr|A0A386YM20|A0A386YM20_CLONO tRNA epoxyqueuosine(34) reductase QueG OS=Clostridium novyi OX=1542 GN=queG PE= 4 SV=1
MNCKKKIIEYCSELGLDIVGFTKCRVFTELKEYYINRKELNLENEFEENDIDKRINPFIYMEKGKTIISIAFPYLHEQISYSKIYFSKYTLGSDYHEVVSSYLKKICEFIKILGGEASYFVDSNSLPERYIAYLSGIGFIGKNNMLITEKYGSYIFLGEIITDLELEEDYPIKKDCGECELCLKACPTGAISNDINNNSNICLSYITQKKDIDDYWLSKFKGRMFGCDTCQNVCPYNKDVINSNIQEFKPFDFMKEINSEEILNMSKKDFNSKYKLTSCGWRGKNIIQRNMLINMFYFNDINIKKVKEFSSPYVQSYYNKLLKFLKL

SEQ ID NO: 75940 - protein, 327 aa, Clostridium novyi; identical to SEQ ID NO: 75919
  misc_feature (1)..(327): tr|A0A072Z1U7|A0A072Z1U7_CLONO (Fe-S)-binding protein O S=Clostridium novyi B str. NCTC 9691 OX=1443122 GN=Z958 _01015 PE=4 SV=1

SEQ ID NO: 75941 - protein, 235 aa, Clostridium oryzae
  misc_feature (1)..(235): tr|A0A1V4I5Q3|A0A1V4I5Q3_9CLOT Epoxyqueuosine reductase OS=Clostridium oryzae OX=1450648 GN=queG PE=4 SV=1
MFESELINYLKNAGADIVGFGDLTMLDSNIRCNLPYGICVAVKIASEVVKELENGPTEQYYEEYKRLNKLLDKIVSLGEKFIKARGYNAIGQSTTYVTEDDNLTTPLPHKTVATRAGIGWIGKNALLITSDYGSAIRISTILTDIPVKTGQPIDESKCGNCLNCTNACPAEAIKGNLWNVNAERKDLIEPLKCRAKARAMMKKIVGIETAVCGKCIAVCPFTKAYIKRMKGQTAS

SEQ ID NO: 75942 - protein, 296 aa, [Clostridium] paradoxum
  misc_feature (1)..(296): tr|A0A150FQI1|A0A150FQI1_CLOPD Uncharacterized protein OS=[Clostridium] paradoxum JW-YL-7 = DSM 7308 OX=112132 8 GN=JWYL7_0365 PE=4 SV=1
MKHILKSFCESIGIDCIGIAEVRIYKDLEKILKERTDKGYNCGLEEKDIKKRVDPTVIIEDAKSIIVCLFPYFSGYSKDSNLSKYTHSIDYHIIIKDKLNEIGDFLKKNIKNFNYKSFVDNGPLVDRYLAYISGLGYFGVNNSIINDKYGSYVFIGYIVNNYDFESDSPLEKTCIKCGNCIKSCPGGAILGNYEIDYNRCLSYITQKKEELSDKEKELIIKNKTVFGCDICQDVCYHNKNIEHTNILDFKQNLILNLSYEEILNMSNKEFKRVYKDRSFAWRGKKILLRNLELLEK

SEQ ID NO: 75943 - protein, 329 aa, Clostridium paraputrificum
  misc_feature (1)..(329): tr|A0A174U942|A0A174U942_9CLOT tRNA epoxyqueuosine(34) reductase QueG OS=Clostridium paraputrificum OX=29363 G N=CP373A1_16390 PE=4 SV=1
MSLKEEVLSYCNSLGLTNIGFVKCRKFSELEEFYENRKKLNIQNEFEEEDIQKRINPNHYMEEGKTIISIAFPYLHDQEHFDNGFSLYTRGNDYHMVLKDYLDKICEFIRVKGGKAISFVDSNTLPERYIAYLAGVGFIGKNNMLITKEYGSYVFLGEIITDLEMYDDDNGNFEELMKHKECGECSICFGECPTKSINPNRKNSNICLSYITQKKDLEEWEIKALKGRTFGCDSCQLRCPYNEEIKFSHIEGFKPLEFMEKDYSDNIVNMGNGEFKSTLKNTSCGWRGKNVLKRNVLIRMKMYNGKDVSAIKTDSPYIQAYINRIRDIK

SEQ ID NO: 75944 - protein, 326 aa, Clostridium pasteurianum
  misc_feature (1)..(326): tr|A0A1D9N2P0|A0A1D9N2P0_CLOPA Epoxyqueuosine reductase OS=Clostridium pasteurianum OX=1501 GN=AQ984_06385 PE= 4 SV=1
MDNKTHIINFCKELGISEVGFCRCENFYELERYLNKRKNEGVENEFEEKDINKRINPNYYMEEGKTIISIAFPYSFYLHKDEEMYFSLYTRGKDYHKVVSNYLEKVCEFIIKIGGKAKYFVDSNALPERYIACKSGIGFIGKNNMLINKKYGSYIFLGEIITNLSIEPDEPCKNQCGECERCIKACPTKSINKYFNNPNICLSYITQKKDIEDKWFEKFNGRLFGCDTCQLVCPFNYEVKYSEIDDFKPLEFMNNVNLYELISIDNKIFREKYKITSCGWRGKNIIQRNALINFIMKKNENKMHNLEIVSPYVREYFNRLLNFNKL

SEQ ID NO: 75945 - protein, 326 aa, Clostridium pasteurianum; identical to SEQ ID NO: 75944
  misc_feature (1)..(326): tr|A0A0H3J8M7|A0A0H3J8M7_CLOPA Epoxyqueuosine reductase OS=Clostridium pasteurianum DSM 525 = ATCC 6013 OX=126 2449 GN=queG PE=4 SV=1

SEQ ID NO: 75946 - protein, 330 aa, Clostridium perfringens
  misc_feature (1)..(330): tr|A0A127EIU1|A0A127EIU1_CLOPF (Fe-S)-binding protein O S=Clostridium perfringens OX=1502 GN=JFP838_08820 PE=4 SV=1
MKEKILEFCKSLGLDTVGFVKCRRFSELEEMYNIRKDKGFENEFEEQDIEKRVNPNVYMEEGKTIITIAFPYLYDEDYVDNGFSVYTRGMDYHYVVSNFLKKISEYIESLGGRAISLVDSNSLPERYIAYLGNIGFIGKNNMLITKKYGSYVFLGEIITDLEIQCEEERTLEELRTHKECGACEICYKNCPTKVLNRSKMKNTNSCMSYITQKKDIEDKYLKLMKGRIFGCDSCQKECPYNKEITYTNIEDFKPLTFMQKDSFEDFHKISKKEFNETFKKTSCGWRGKNTILRNIMIKEVLINKEDISNYELNSESLKIFRNRLLNFYDV

SEQ ID NO: 75947 - protein, 330 aa, Clostridium perfringens
  misc_feature (1)..(330): tr|B1BX73|B1BX73_CLOPF Putative iron-sulfur cluster-bin ding protein OS=Clostridium perfringens E str. JGS1987 OX=451755 GN=AC3_1725 PE=4 SV=1
MKEKILEFCKSLGLDTVGFVKCRRFSELEEVYNIRKDKGFENEFEEQDIEKRVNPNVYMEDGKTIITIAFPYLYDEDYVDNGFSVYTRGMDYHYVVSNFLKKISEYIESLGGRATSLVDSNSLPERYIAYLGNIGFIGKNNMLITKKYGSYVFLGEIITDLEIQCEEERTLEELRTHKECGTCEICYKNCPTKVLNRSKMKNTNSCMSYITQKKDIEDKYLKLMKGRIFGCDSCQKECPYNKEITYTNIEDFKPLTFMQKDSFEDFHRISKKEFNETFKKTSCGWRGKNTILRNIMIKKVLINKEDISNYELNSESLKNFRNRLLNFYDV

SEQ ID NO: 75948 - protein, 338 aa, [Clostridium] polysaccharolyticum
  misc_feature (1)..(338): tr|A0A1I0AG73|A0A1I0AG73_9FIRM Epoxyqueuosine reductase OS=[Clostridium] polysaccharolyticum OX=29364 GN=SAMN0 4487772_105126 PE=4 SV=1
MKQKIIEFCQSLGLDTIGMIPCRRFEELQGFLMERQKKNLQNEFEESDMEKRINPMHYMENGKTILSIAFPYYYEGEDSCWQSDSNGFSIYTRRLDYHRVVRGYLDKICAFIESQGGNAIPLVDSNTLPERYIAYLAGVGFIGRNNMIITEKYGSYVFLGEIITDLELASSDKRHFEQIGDYVECGECRICYGECPSKSINAHKITPNICLSYITQKKEISEQEMSLLKGNVFGCDFCQLKCPYNLRAEQSRVKEFAQLAYMNGEMAEFAAMDNKFFKEKVSMTSCGWRGKNVIKRNALIHLADKGEDITKYKGDSAYINGYIEQLTNKGIKKKQRFQ

SEQ ID NO: 75949 - protein, 342 aa, Clostridium puniceum
  misc_feature (1)..(342): tr|A0A1S8TFN6|A0A1S8TFN6_9CLOT Epoxyqueuosine reductase OS=Clostridium puniceum OX=29367 GN=queG_1 PE=4 SV=1
MTLLAEQIKSAALEMGYEKCGIIKVSYLDGYEEKLNERIDRIPETKGFYQSMYRFTRIQETHPWAKSIVICVRRYGKYNIPKHLKGMIAKYYLVDGRKDENSKDFQDSLKFEKYMQDLGLRAENERGFGLAPLRWAALKAGLGRVRKNNFFYTENGSWVYLEAWLIDKELEAIEEPKVKACSEKCGLCIKACPSASLSEPYTMSPMACVSCVTTFMGRDMINEKYREQIGNWVYGCDVCQDVCPMNKNRWEETEEFPNLQELSQHISLEKILKMDYSFLEDVMQPKFWYIDKQSVWKWKVNAINVMVNDYEEQYREHILNACNDSNLKVREMAEWAVKKLNL

SEQ ID NO: 75950 - protein, 97 aa, Clostridium puniceum
  misc_feature (1)..(97): tr|A0A1S8TCM8|A0A1S8TCM8_9CLOT Epoxyqueuosine reductase OS=Clostridium puniceum OX=29367 GN=queG_2 PE=4 SV=1
MKILIMGIEIEKNIFYRINKSKCGTCNKCENTCPAKAIKGILWSANVQREKLIDPFKFIQKARKLLKERIGIEMTICGKCIDVCPVTQGYIRKSEVE

SEQ ID NO: 75951 - protein, 334 aa, Clostridium putrefaciens
  misc_feature (1)..(334): tr|A0A381J5M9|A0A381J5M9_9CLOT Uncharacterized Fe-S pro tein OS=Clostridium putrefaciens OX=99675 GN=queG PE=4 SV=1
MKSVTELENYIRSLGLDTFGFIKAKRFEELRSFLEYRKINGLENEFEEQDIEKRINPNMLMEKGKVIISIAFPYLYNNNFNNDTGFSKYTEGLDYHIVVRSYLDKIVEFLNEKGHEAKAFVDSNVLPERYIAYKAGLGFVGKNNMIITKRYGSFVFLGEIITSMDIEINHKENKISDIEKYESCGSCDICLKQCPTKAINEKLRNSNICLSYITQKKQIEDKWFKVLGGRIFGCDSCQKTCPYNDKVKFSNLEGFRPLEFISNIQTKELIYINNKDFKETLKNTSASWRGKSLIQRNALIRFINFENNKEVDIDSIASPYVKDYAIRLLKIRKL

SEQ ID NO: 75952 - protein, 235 aa, Clostridium ragsdalei
  misc_feature (1)..(235): tr|A0A1A6AI28|A0A1A6AI28_9CLOT Epoxyqueuosine reductase OS=Clostridium ragsdalei P11 OX=1353534 GN=queG_6 PE=4 SV=1
MLEYNIQKILNNFMIDYYGVADISKYENELVKYGGSLVKGYPRAISLGIVFPSSIVDHLNDDSNNIAKLEYENCYKTINARLDNIASIISSYIIRKGYRALPISAAERVNNDYINAAFSHKLAARLAGLGWIGKSCLLITPKHGPRVRWVSILTDLPLNPTGKEMEQKCGECMACVKICPQKALYGKNYVEGEDREKRFDVKKCDSHFNEMEHNKQVPVCGMCVYICPYGRQSDK

SEQ ID NO: 75953 - protein, 325 aa, Clostridium ragsdalei
  misc_feature (1)..(325): tr|A0A1A6AS01|A0A1A6AS01_9CLOT Epoxyqueuosine reductase OS=Clostridium ragsdalei P11 OX=1353534 GN=queG_3 PE=4 SV=1
MNYKEDILSYCNKIGLDTVGFTKCRIFTELKDCFKYRKENLLENEFEEKNIENRVNPYVYMDGGKTIVSIAFPYLFEKQDEENISFSLYTRGKDYHVVARYYLQKVCNFIKGLGGKAVYFVDSNSLPERYIAFQCGIGFIGKNNMIITEKYGSYVFLGEIITDIKVEADTPLESKCGSCNLCQTSCPTGALLEDKNSNICMSYITQKKHIDNKWFSQFQGRLFGCDTCQKVCPYNSKVAFSNIQDFKPFDFMSRVDLNEIIDMDKKEFAEKYKNTSCGWRGKNIIQRNAIINMITLNKSINLEYKNIRSTYVRDYYDRLLQVLKL

SEQ ID NO: 75954 - protein, 343 aa, Clostridium roseum
  misc_feature (1)..(343): tr|A0A1S8LV24|A0A1S8LV24_9CLOT Epoxyqueuosine reductase OS=Clostridium roseum OX=84029 GN=queG_2 PE=4 SV=1
MDTIEKMIQKKAYELGYEKCGIISIDLMDEYAEKFNERIEKVPKSKMFYQSQQRLIKPKEIYPWAKSVVVLTAAYGKYKVPKELEGIIAKSYLFDVRVDKNTKEYQNNRELEKYMQTLGLKVETNQKFGVVGMRWAAMKAGVGIIRRNNFLYTEAGSWVHLEAWVTDREMELKETNNVPQCPKSCNRCVSACPTKSLSAPYTMSPTECISFLTSFGGRDLTKEPLSKTFGKCVYGCDLCQDACPMNKGKWKGEEEFPGLKELTESLTPENILNMKEDFYRRKVQPKFFYLSEEELWKWKVDVLCYMRNNYKENYKELIINACNNENIKVQDMAHFICEELCLC

SEQ ID NO: 75955 - protein, 238 aa, Clostridium roseum
  misc_feature (1)..(238): tr|A0A1S8LPT4|A0A1S8LPT4_9CLOT Epoxyqueuosine reductase OS=Clostridium roseum OX=84029 GN=queG_1 PE=4 SV=1
MELLDKIKELGDIHAIDFIGVAGLTKVKNDIKEISGSLIDEYPRALSIGIVLQDSIVDLLSGSDNYENALENKIHGYDVIMNRLDNFASIVGSVIQRNGYKAMPLPASERIDSTRVCASLSHKLTARLAGFGWIGKSCLLINPKYGPRVRWTSVLTDAPFEENKEILEGKCGDCTNCAKACPSKAIIGRNYVADEPREVRLDVRRCEEHLSKRKQEGKFEICGKCMYACPFGMQKITL

SEQ ID NO: 75956 - protein, 268 aa, Clostridium saccharobutylicum
  misc_feature (1)..(268): tr|A0A1S8MNX9|A0A1S8MNX9_CLOSA Epoxyqueuosine reductase OS=Clostridium saccharobutylicum OX=169679 GN=queG_2 P E=4 SV=1
MKEKITKMIQNFVRQYEQQNDISTKWGEPLVGFADANHPYILNLKELITPTHKLPTDVLDDASIVIAYFVPFTKELANTNGIPGDISSPQWALAYEETNAMFIKLNEYITSELRKLSYHADVSPEASTFDQKILKSNWSHRHFAKVAGLGTFGINNMLITKVGCCGRYSTIVTNLNVKPDSPLEDELCLYKKNGSCGICVKHCPSGALTLDGYDRHKCYIVLRKNAELYTEFGSSYSDESGDCPNSVGSEVCGKCVVNTPCTFFYKKS

SEQ ID NO: 75957 - protein, 343 aa, Clostridium saccharobutylicum
  misc_feature (1)..(343): tr|U5MQF5|U5MQF5_CLOSA Fe-S protein OS=Clostridium sacc harobutylicum DSM 13864 OX=1345695 GN=CLSA_c20360 PE=4 SV=1
MGTIEQMIQKKAYELGYEKCGIIPINLMDEYAEKFNERIEKIPKSKMFYQSQQRLANPKQIYPWAKSVVVLTVPYGKYKVPEILNGRIAKAYLFDTRVDENTKEYQNNRVLEKYMQELGLRVETNQKFGVVGMRWAALQSGAGIIRRNNFLYTESGSWVHLEAWVTDREMELKETNNVVPCPKSCNRCRESCPTKSLCAPYTMSPTECISFLTTFGGRDLPKEPLSKTFGNCIYGCEICQDVCPMNKGKWKGEEEFPGLSELSSSLTPENILNMEEDFYRDNVQPKFFYLSAEDLWKWKVNVLCYMRNNYKESYKTLIINACNNENDKVSEMACSICKELCLQ

SEQ ID NO: 75958 - protein, 343 aa, Clostridium saccharoperbutylacetonicum
  misc_feature (1)..(343): tr|M1MD35|M1MD35_9CLOT Uncharacterized protein OS=Clost ridium saccharoperbutylacetonicum N1-4(HMT) OX=931276 G N=Cspa_c20530 PE=4 SV=1
MTLLADQIKNAALNFGYEKCGIIKISDIDGYKEKLEERIEKVPEAKGFYQGQYRFTQLKDTYPWAKSIVICVRKYGKYHIPEHLKGMIAKYYLVDGRKDENSKDFQDSLKYEKYMKDLGLRAETERGFGLVPLRFAAMKAGLGIVRKNNFFYTESGSTVYLEAWLIDKELENIETPKVRPCSEKCNLCMKACPSASLSKPYTMNPIACVSCITTFMGRDMPNEKYKEQIGAWVYGCDACQDVCPMNKNSWKEIEEFPNLQELSEQISLEKILKMDYSYLEEVMQAKFWYIDKASVWKWKVNAINAMVNNYEEHYRDHILEACKDSNLKVREMAEWAVNKLELQ

SEQ ID NO: 75959 - protein, 327 aa, Clostridium sartagoforme
  misc_feature (1)..(327): tr|A0A4S2DG22|A0A4S2DG22_9CLOT tRNA epoxyqueuosine(34) reductase QueG OS=Clostridium sartagoforme OX=84031 GN= queG PE=4 SV=1
MREKIISYCNTLGLDTLGFIKCREFTELRSFFYDRKEKGLENEFEEEDVEKRINPFIYMEEGKTIISIAFPYLHNVDYCDNGFSVYTRGTDYHKVVKSYLSKICEYIESLGGKASSFVDSNFLPERYIAYLAGVGFIGKNNLIITEKYGSYVFLGEIITDLEIDCNERNYEEIKDFKECGSCELCYKSCPSKAINPYRKNSNICVSYFTQKKDLSDNHIKLLKGRVFGCDSCQEPCPYNKDKEFSKIEEFIPFDFMNSDNTLDLANINNKGFKESYLRTSCGWRGKNVLKRNALIKANSCNVDISKIKTDSPYLNDYVNRLLNSNKI

SEQ ID NO: 75960 - protein, 328 aa, Clostridium sartagoforme
  misc_feature (1)..(328): tr|R9BUH4|R9BUH4_9CLOT Uncharacterized protein OS=Clost ridium sartagoforme AAU1 OX=1202534 GN=A500_17630 PE=4 SV=1
MNKENIINYCNSIGLDTLGFIKCREFTELKEFFYKRRSLGLENEFEEKDIDKRINPFNYMSEGKTIISIAFPYLHDIDYFDNGFSVYTRGEDYHKVVKSYLGKICGYIESIGGKAIPFVDSNFLPERYIAYLAGIGFIGKNNLIITKKYGSYVFLGEIITDMEIDCDERDFKELSHFKECGECELCYKACPSKSINPYKKNSNICVSYLTQKKDLEDKHIKLLNGRVFGCDSCQNTCPYNEKINFSNINEFYPFDFMNKENSHELANINNRGFKESFLNTSCGWRGKNVLKRNALIKINNNNQDIKSIKTDSPYLKDYVDRLLNSNKI

SEQ ID NO: 75961 - protein, 324 aa, Clostridium scatologenes
  misc_feature (1)..(324): tr|A0A0E3GRV5|A0A0E3GRV5_CLOSL 4Fe-4S ferredoxin-type d omain-containing protein OS=Clostridium scatologenes OX =1548 GN=CSCA_3856 PE=4 SV=1
MNYKSMIINYCKDIGLDTVGFTKCRVFEELKHYFEYRKSMSLINEFEEQDINKKINPFMYMKDGKTIISIAFPYLFNNDFQQQVGFSKYTQGRDYHVVVSEYLKKICSFIEKEMSGKAVYFVDSNSLPERYIAKLCGVGFIGKNNMIITEKYGSYAFLGEIITNISIEEDEPIECKCEDCDLCQKSCPTGAIRKENNSNICLSYISQKKEIDDEWFNKLKGRIFGCDTCQGVCPFNKKPSFSNIEEFKPYDFMEVINLEELANIDKRVFLNKYSKSSCGWRGKNVLQRNALINIISMKNNINIKEINSPYVKNYYNRLLYHFKL

SEQ ID NO: 75962 - protein, 225 aa, Clostridium scindens
  misc_feature (1)..(225): tr|B0NDK0|B0NDK0_CLOS5 4Fe-4S binding domain protein OS =Clostridium scindens (strain ATCC 35704 / DSM 5676 / V PI 13733 / 19) OX=411468 GN=queG PE=4 SV=1
MDSKKVKELLFSLGADLCGIADLSYFSNAPKGYHPLDVMPTCKSVISFGCRFPVGTLICKSPIPYTRVRNSIVPKVDAIALDFCIEMEKSEIVCVPIPANESQWDKNTGRYRSIISLKHAAQAAGLGTIGRHSLLITPEFGSMIWLGAVLCDAGLEPDKTLEHVCDNCNRCVDICPVNALQMPELDQQKCWNHAFGDDEEIQSWRIICHKCRDICPYNLGTKNSF

SEQ ID NO: 75963 - protein, 330 aa, Clostridium septicum
  misc_feature (1)..(330): tr|A0A386PEN0|A0A386PEN0_CLOSE tRNA epoxyqueuosine(34) reductase QueG OS=Clostridium septicum OX=1504 GN=queG PE=4 SV=1
MGIKEDILEYCSSLGLDTVGFIKCRKFEELKDFYEDRKLKGLENEFEEESIENRINPNIYMKEGKTIISIAFPYLHNIDYIENGFSMYTRGLDYHKVVKEYLEKISNYINSLGGNAITFVDSNTLPERYIAYLSGIGFIGKNNMIITKKYGSYVFLGEIITDLEIQCEDIRTFSEISSFKECGNCEICYSECPTKAINRIRKNSNICVSYLTQKKDLEDKFIKLLDGRVFGCDSCQKKCPYNLEVEYSTIKDFYPLNFMNEENSDFLINMGNKEFKETFQITSCGWRGKNVLKRNAIIRKKYNGENIDGFKTDSPYLKDYIHRLFFRNKI

SEQ ID NO: 75964 - protein, 324 aa, Clostridium sp.
  misc_feature (1)..(324): tr|A0A352NY75|A0A352NY75_CLOSP tRNA epoxyqueuosine(34) reductase QueG OS=Clostridium sp. OX=1506 GN=queG PE=4 SV=1
MDYKKEILDFCRGMGLDTVGFTKCRMYTDLGKYLQFRKENLLENEFEEKDIHRRINSYRYMDGGKTIISIAFPYLFKKPIKKGKIGFSIYTWGKDYHEVIGAYLKKICYFIANLGGKAIYFVDNNFLPERYIAFQSGIGFIGENNMLITEKYGSYVFLGEVITDMEIESDMPQISKCGNCNLCQIVCPTGAIRGYRDSNKCMSYITQKKHIDDMWFAKFQGRLFGCDTCQEVCPYNENVAYSNIKGFKPFDFMEKVDLNEIVNIDKSTFMRKYKNTSCGWRGKNIIQRNSIINTLVLKKNVEIKNIKSSYVKDYYNRLLHILKL

SEQ ID NO: 75965 - protein, 332 aa, Clostridium sp.
  misc_feature (1)..(332): tr|A0A1T4X3G0|A0A1T4X3G0_9CLOT Epoxyqueuosine reductase OS=Clostridium sp. USBA 49 OX=1881060 GN=SAMN05428976_ 106125 PE=4 SV=1
MNYKSEILKFCNNLGLDTVGFCSCRIFDELKPFFKQRKQKGLENEFEEKDIDKRINPKIYMEDGKTIISIAFPYLHDFYENFKYKNDKYVYFSKYTLGRDYHKVISNYLKKICNFIESLGGKAIYFVDSNSLPERYIAYLCGIGFYGKNNMIITEKYGSYVFLGEIITDLEIEIDKPLKQKCGNCDLCLNTCPTKAINKNENCPNICLSYITQKKEIEDVWFNKLDGRMFGCDSCQDICPFNKVINFSNLKEFIPYDYMKKINLKEIINIDNKTFKEKYAITSCGWRGKNIIIRNALINLAKNNNIKYIDIDSINSPYVKNYYHRLLKFFEL

SEQ ID NO: 75966 - protein, 321 aa, Clostridium sporogenes
  misc_feature (1)..(321): tr|A0A1V9IKH6|A0A1V9IKH6_CLOSG Epoxyqueuosine reductase OS=Clostridium sporogenes OX=1509 GN=VT92_0209230 PE=4 SV=1
MDCKKSVKEYCRNLGLDLIGFTKCRIFHELIPELTERKNENRQNEFEGKDINKRVDPFQYMKEGKTIISIAFPYLFNLGHKHDVYFSKYTQGRDYHTVVNEYLQKICNFIQSKGYRAKYFVDSNDLPERYIAYLCGIGFIGKNNMLITEKYGSYVFLGEIITDMEIHEDEPMECKCKECNICFRACPTSSLEHKDPNICLSYITQKKNIEDDWFNKLKGRMFGCDTCQRVCPYNKNIKTSNIEGFKPFDFMENLDLEELIYVNNKEFKEKYKLTSCGWRGKSILQRNALINCITMNKDVDIQGKSIKSPYVLDYYHRLLKK

SEQ ID NO: 75967 - protein, 321 aa, Clostridium sporogenes
  misc_feature (1)..(321): tr|J7T1P8|J7T1P8_CLOS1 Putative iron-sulfur cluster-bin ding protein OS=Clostridium sporogenes (strain ATCC 155 79) OX=471871 GN=CLOSPO_00751 PE=4 SV=1
MDCKESVKEYCRNLGLDLIGFTKCRIFHELIPEFTERKNENRQNEFEGKDINKRVDPFQYMREGKTIISIAFPYLFNLDYKNNIYFSKYTQGRDYHTIVNEYLKKICEFIQSKGYRAEHFVDSNDLPERYIAYLCGIGFIGKNNMLVTERYGSYVFLGEIITDMEINEDEPMECKCKDCNICLKACPTNSLENKDTNICLSYITQKKNIEDEWFDKLKGRMFGCDTCQRVCPYNKDIDTSNIEGFKPFNFMENLDLEELIYVNNKEFKEKYKLTSCGWRGKSILQRNALINCITMNKNIDIQGKNIKSPYVLDYYHRLLKK

SEQ ID NO: 75968 - protein, 325 aa, Clostridium sulfidigenes
  misc_feature (1)..(325): tr|A0A084JHN9|A0A084JHN9_9CLOT (Fe-S)-binding protein O S=Clostridium sulfidigenes OX=318464 GN=IO99_02180 PE=4 SV=1
MDKKQKIINYAKKLSLDTIGFTESRRFNELEEFFIDRKENNLFNEFEEEDIEKKINPKLLMENGETIISIAFPYYHGDKGEGDKFSLYTRGLDYHRVVEKYLKEICDYIESLGGEAKWFVDSNPLPERYIAAISGVGFIGKNNTLITEKYGSYVFLGEIITNLKLQGDKSKKYGCKGCNLCVEKCPTNVIIEDVKKFNSSQCVSYLTQKKHLNNEELNMVKGKIFGCDNCQKVCPHNLNVEVSPIKEFLPKEYMEKVDLLELINLDNKNFKEKYIMHSCGWRGKNLLIRNGLINYYLRYNEDRDNIEESINSPYIKEYYNRLFKK

SEQ ID NO: 75969 - protein, 333 aa, Clostridium taeniosporum
  misc_feature (1)..(333): tr|A0A1D7XM68|A0A1D7XM68_9CLOT tRNA epoxyqueuosine(34) reductase QueG OS=Clostridium taeniosporum OX=394958 GN =queG PE=4 SV=1
MGIKNQIIKTCASLGIDSIGFIKCRRFDELESFYKERKILNLQNEFEEDDVEKRINPNQYLEEGKTIISIAFPYLTSKINTNNGFSLYTKGMDYHYVIGKYLKIICEIIEYHGGKAKGFVDSNALPERYIAYLAGNGFIGKNNLLINKKYGSYIFLGEIITDLEIYDDDNGSLDDLNSFKECGECNKCYVACPTKAINANKKNCNICLSYITQKKELQDWEMEKLQGRMFGCDTCQLVCPYNIEKELSKIPEFLPFDFMNSDDNDFVINMGNTQFKETFKNTSCGWRGKNVLKRNALIRRKIYLKNDDLSKIPKFESPYLNGYINRLFQKTRI

SEQ ID NO: 75970 - protein, 330 aa, Clostridium tagluense
  misc_feature (1)..(330): tr|A0A401UGD2|A0A401UGD2_9CLOT (Fe-S)-binding protein O S=Clostridium tagluense OX=360422 GN=Ctaglu_02210 PE=4 SV=1
MGIKEEIIEFCIKNGIDTIGFSECRIFHELNPYFETRKKLGLENEFEEHSVDKRINPFLYMPEGKTIITIAFPYLYSLDFNKKTQFSKYTLGRDYHVVTTEYMEKICKFIEGIGGKAMSFVDSNALPERYIACNSGIGFIGKNNTLITEKYGSYVFLGEIITDLIILPDKPIVQKCGNCERCLEACPTNAIVKGKAGINNDANVCLSYITQKKHIEDSWFEKLNGRLFGCDTCQRACPYNSGIQFSDISGFKPYEYMKNMDVKTLINMDNDLFKDKYKMTSCGWRGKNILKRNAIINAIHSERVKFITVEKDTSPYIRDYYYRLLKFFKL

SEQ ID NO: 75971 - protein, 327 aa, Clostridium tetani
  misc_feature (1)..(327): tr|A0A4V1LDS1|A0A4V1LDS1_CLOTA tRNA epoxyqueuosine(34) reductase QueG OS=Clostridium tetani OX=1513 GN=queG PE =4 SV=1
MKDKKKLILDYCKDLGLSTVGMTEVRKINELEDYFVYRKEKGYENEFEEENIEKRINLGKVCNWGKVIISIAFPYMFNFKFEDGVYFSKYTQGRDYHKVVGEYLKKICCFIESLGGKAEYFVDSNCLPERYIAKLCGIGFIGKNNMIITEKYGSYVFLGEIITDLPLPKDNEKNNKCGQCDLCLKACPTKSIKEKESNPNICLSYLTQKKDLEDMWLDKLKGRLFGCDTCQRVCPFNREVEKSPLMELKPLDFMTNVHLEELISLNNKMFKDKYATSSCGWRGKNILIRNALINEFYYNKDGTLEGKNFNSPYIKDYYSRLLKLHNL

SEQ ID NO: 75972 - protein, 327 aa, Clostridium tetani
  misc_feature (1)..(327): tr|Q898T9|Q898T9_CLOTE Iron-sulfur cluster-binding prot ein OS=Clostridium tetani (strain Massachusetts / E88) OX=212717 GN=CTC_00352 PE=4 SV=1
MKDKKKLILDYCKDLGLDTVGMTDVRKINELEDYLVYRKEKGYENEFEEENIEKRINLGEVCSWGKVIISIAFPYMFNFKFEDGVYFSKYTQGRDYHKVVGEYLKKICCFIESLGGKAEYFVDSNCLPERYIAKLCGIGFIGKNNMLITEKYGSYVFLGEIITDFSLPKDNEKNNKCGQCDLCLKACPTKSIKEKESNPNICLSYLTQKKDLEDMWLDKLKGRLFGCDTCQRVCPFNMEVEKSPLMELKPLDFMTNLHLEELISLNNREFKDKYAVSSCGWRGKNILIRNALINEFYYNKDGTLEGKNFNSPYIKDYYSRLLKLHNL

SEQ ID NO: 75973 - protein, 326 aa, Clostridium tetanomorphum
  misc_feature (1)..(326): tr|A0A037Z2S7|A0A037Z2S7_CLOTT Iron-sulfur cluster-bind ing protein OS=Clostridium tetanomorphum DSM 665 OX=123 0342 GN=CTM_18226 PE=4 SV=1
MSNKYKIIKYCNELGLDTIGITSCRKFKELEELFQLRKNKGYENEFEEKNIDKRINPKIYMEGGKAIISIAFPYMFNNEFDSKFYFSKYTMGKDYHLVISNYLKKICMFIESLGGEAKYFVDSNFLPERHIASLSGIGFIGKNNMIITKKYGSYVFLGEIITNLELEEDKPVEYGCGNCSLCLQECPTGSIKGNFNNPNICLSYITQKKDLEDVWLSKLNGRIFGCDSCQKICPYNKKVNCSSIKEFIPLPFMENADIGELINLDNKTFKEKYANTSCGWRGKNILTRNALINAFKEGEFENIVIKQFNSPYVKDYYGRLLRLHKL

SEQ ID NO: 75974 - protein, 297 aa, [Clostridium] thermoalcaliphilum
  misc_feature (1)..(297): tr|A0A1V4I8C7|A0A1V4I8C7_9FIRM Epoxyqueuosine reductase OS=[Clostridium] thermoalcaliphilum OX=29349 GN=queG P E=4 SV=1
MKNKLKEFCKSLGIEVGIAPVKVYKDLENILNERMKKGYYTGLEEKDIKKRVDPKLTMENAKSIIVCLFPYFIGHRKDSNLSKYTHSIDYHIIVNNKLSEIANFLSQNIEGFEYKTFVDNGPLVDRHLANISGLGYFGINNNIINDKYGSYVFIGYMLNNYEFEIDLPLNKTCIKCGECIKKCPGGAILGNFEIDFSRCFAYITQKKGELSDFEKTLFEKNKSIFGCDICQDVCYHNTNIKSTEIDEFRENIISNLDYEEVANMSNKEFKRAYGNRSFSWRGKNIIIRNLELVKKIR

SEQ ID NO: 75975 - protein, 325 aa, Clostridium thermobutyricum
  misc_feature (1)..(325): tr|N9Y351|N9Y351_9CLOT 4Fe-4S ferredoxin-type domain-co ntaining protein OS=Clostridium thermobutyricum OX=2937 2 GN=HMPREF1092_01829 PE=4 SV=1
MDRGEILEFCKTLKLDLVGFVKMRKFIELEDLFLKRKEWKAENEFEENDIKKRIDHFTYMEDGKTIISIAFPYFFYENGEENGFSVYTKGIDYHRVVHSYLDKICKFIEEKGGKAIPLVDSNTLPERYIAYLSGIGFIGKNNMLITKRYGSYVFLGEIITDLELVEKEERNLETLLKYSECGDCEICYKECPTKAINRFRKNTNICVSYLTQKKELTDKEISLLNGRIFGCDSCQKKCIYNKEVEESKIPEFKPLNFMKVENLENIINMNNRIFKESFKNTSCGWRGKNILIRNAIIRKRKCKHEDIKDLKSESPYIKGYIDRLL

SEQ ID NO: 75976 - protein, 325 aa, Clostridium thermobutyricum
  misc_feature (1)..(325): tr|A0A1V4SWN7|A0A1V4SWN7_9CLOT Epoxyqueuosine reductase OS=Clostridium thermobutyricum DSM 4928 OX=1121339 GN= queG PE=4 SV=1
MDRGEILEFCKTLKLDLVGFVKMRKFIELEDLFLKRKEWKAENEFEEKDIKKRIDPFTYMEDGKTIISIAFPYFFYDNGEENGFSVYTKGIDYHRVVHTYLDKICKFIEEKGGKAIPLVDSNTLPERYIAYLAGIGFIGKNNMLITKRYGSYVFLGEIITDLELVEKEERDLETLLKYSECGDCEICYKECPTKSINKFRKNTNICVSYLTQKKELTDKEISLLNGRIFGCDSCQKKCIYNEEVEESKIPEFKPLNFMKVENLENIINMNNGIFKESFKNTSCGWRGKNILIRNAIIRKRKCKHEDIKDLKSESPYIKGYIDRLL

SEQ ID NO: 75977 - protein, 324 aa, Clostridium thermopalmarium; identical to SEQ ID NO: 75899
  misc_feature (1)..(324): tr|A0A2T0AVE9|A0A2T0AVE9_9CLOT Epoxyqueuosine reductase OS=Clostridium thermopalmarium DSM 5974 OX=1121340 GN= queG PE=4 SV=1

SEQ ID NO: 75978 - protein, 323 aa, Clostridium tyrobutyricum
  misc_feature (1)..(323): tr|A0A4V1DIJ7|A0A4V1DIJ7_CLOTY Epoxyqueuosine reductase OS=Clostridium tyrobutyricum OX=1519 GN=queG PE=4 SV=1
MNYRNELIEFCRKIGIDTVGFTECRKFCELYNSLKFRRLNSLSNEFEEKDENKRINPFVYMKEGKTIISVAFPYLFNRSTKDKIGFSLYTRGQDYHKVVFKYLNKICRFIESMGGSAVPLVDSNMLPERYIAKLCGIGFLGKNNMLITQRYGSYVFLGEIITDLALGNSEILQSQCRGCNICLKACPTGAIRGEKNSNKCMSYITQKKHIKDEWILKFRGNLFGCDICQNICPYNRKILFSNIQEFRPFEFMEDVDLSEILNMDNKIFRQKYAITSCGWRGKNIIIRNALINSFILGKNITIKNIRSPYVQDYYNRLFKLFKL

SEQ ID NO: 75979 - protein, 323 aa, Clostridium tyrobutyricum; identical to SEQ ID NO: 75978
  misc_feature (1)..(323): tr|W6N5H3|W6N5H3_CLOTY Iron-sulfur cluster-binding prot ein OS=Clostridium tyrobutyricum DIVETGP OX=1408889 GN= CTDIVETGP_1365 PE=4 SV=1

SEQ ID NO: 75980 - protein, 374 aa, [Clostridium] ultunense
  misc_feature (1)..(374): tr|M1ZAI1|M1ZAI1_9FIRM Epoxyqueuosine reductase OS=[Clo stridium] ultunense Esp OX=1288971 GN=queG PE=4 SV=1
MGLKRYIVDKSKELNIDMIGFTDCEPLNNKKDYLIARQKKNRQTEFEERDIDKRINPRLTFPQCKTIIVIGLSYNNRLNERVDYKLKGLISKSSWGIDYHIVLKSKMEDLIKEIRKITNFTYKYFVDTGPLIDRELANKSGIGYYGKNCSIINGEYGSFIFIGYILTDLDINFIPISIDSQCGDCNICIDHCPTGALEGPFKFNPKKCISYLTQTKEKIPYELRDKMEIKIYGCDTCQLVCPKNKDVKKSNCKEFLPKVTKGYMDIEELFFISNRQFKEKYGEMAGSWRGKNILKRNGIIALGNMRDRVNIKLLESLLNDPNPVIREYAAWAILKIDLECGKEVVEERIGIERDENVRSEMKNLIKYFIHKDYQ

SEQ ID NO: 75981 - protein, 328 aa, Clostridium ventriculi
  misc_feature (1)..(328): tr|A0A173ZV59|A0A173ZV59_CLOVE Epoxyqueuosine reductase OS=Clostridium ventriculi OX=1267 GN=queG PE=4 SV=1
MDIKGQIVKYCADLGLDLIGFTPCREFSELRKFYNYRKDEGLENEFEEVDIEKRINPNHYMQEGKTIISIAFPYLHDGVYNSNGFSLYTRGLDYHRVVKSYLDKICEFIEKIGGKAMSFVDSNTLPERYIAYLSGIGFIGKNNMLITKKYGSFVFLGEIITDLDIDTRDIKQLDNTPCKECNRCYTACPTNSINDKKKNCNICMSYITQKKEINDKYLYLMKGRIFGCDTCQNSCPCNKDIAYSGINEFKPLDFMNDNICTESILSLTNSKFKETFKTTSCGWRGKNILIRNSLIKMYLIENKNIEDYSFESPYLEEYKNRLLLLNKV

SEQ ID NO: 75982 - protein, 312 aa, Cnuella takakiae
  misc_feature (1)..(312): tr|A0A1M4XVA5|A0A1M4XVA5_9BACT Epoxyqueuosine reductase OS=Cnuella takakiae OX=1302690 GN=SAMN05444008_10452 P E=4 SV=1
MVKDLAKQYGFDQCGIARAQVLDEDARRLERWLHQGLHGGMQYMENYFDLRIDPTKLVPGAKSVITFLKNYYPQQTAEHTATRVSKYAYGVDYHTVIKNALKGMMAELQTAVGQVEGRGFVDSAPVLERSWAQRSGLGWLGRNGNLITKDSGSFFFIATLIVDLELEYDDPYAKDFCGSCRKCIDACPTQAIGPDKVINGSQCISYFTIELKDALIPEEQKGRFQNWMFGCDTCQDVCPWNRFSKPHQEAQFNPIPEILNFTTRDWEALSEEAFRKIFKQSPMSRAKWKGIQRNVKFLQDEKTLILSNEKEG

SEQ ID NO: 75983 - protein, 356 aa, Cobetia crustatorum
  misc_feature (1)..(356): tr|A0A558HXX3|A0A558HXX3_9GAMM Epoxyqueuosine reductase OS=Cobetia crustatorum OX=553385 GN=queG PE=3 SV=1
MAELAARIKTWGRELGFQQVGITDVDLSAHEAYLERWLANGYHGEMNFMAKHGTKRTRPEELVPGTLRVISVRLDYLPPEVETTQVLSQPTRAYVSRYALGRDYHKLMRKRLASLAKQIEGEVGKFGYRAFVDSAPVMERALAQKAGIGWFGKNAMLMNQKAGSLFFLGELYTDLPLPVDKPFEKEHCGSCNACQVACPTDAIVADRVVDARRCISYLTIELSGAIPEEFRRKMGNRIYGCDDCQLFCPFTRFTKASQEPDFSPRHDLDRAELLDLFCWGESEFLSKTEGSPIRRIGYEKWLSNIAIALGNAPWSERVEHVLRARLPYPSEALREHVRWSLKEQALKRGARLATAL

SEQ ID NO: 75984 - protein, 383 aa, Cobetia marina
  misc_feature (1)..(383): tr|A0A4Y4GPC5|A0A4Y4GPC5_COBMA Epoxyqueuosine reductase OS=Cobetia marina OX=28258 GN=queG PE=3 SV=1
MPLPADAAGSSPDETSGDDSRVADPQAMAELAARIKTWGRELGFQQVGITDVDLSEHEAYLERWLANGHHGEMNFMAKHGTKRTRPEELVPGTLRVISVRLDYLPPEVETTQVLSQPERAYVSRYALGRDYHKLMRKRLANLAKQIEKEVGTFGYRAFVDSAPVMERALAQKAGIGWFGKNAMLMNQQAGCLFFLGELYTDLPLPVDAPFEKEHCGSCNACKVACPTDAIVEDKVIDARRCISYLTIELDGAIPEEFRRAMGNRIYGCDDCQLFCPFTRFAKATQEADFSPRHDLDRIELIRLFCWGEQEFLDKTQGSPIRRIGYEKWLSNIAIGLGNAPWSEQVEHVLRARLPYPSEPLREHVRWALKEQAIKRGARLATAL

SEQ ID NO: 75985 - protein, 356 aa, Cobetia marina
  misc_feature (1)..(356): tr|A0A4U1M387|A0A4U1M387_COBMA Epoxyqueuosine reductase OS=Cobetia marina OX=28258 GN=queG PE=3 SV=1
MAELAARIKTWGRELGFQQVGITDVDLSEHEAYLERWLANGHHGEMNFMAKHGTRRTRPEELVPGTLRVISVRLDYLPPEVETTQVLSQPERAYVSRYALGRDYHKLMRKRLANLAKQIEKEVGTFGYRAFVDSAPVMERALAQKAGIGWFGKNAMLMNQQAGCLFFLGELYTDLPLPVDAPFEKEHCGSCNACKVACPTDAIVEDKVIDARRCISYLTIELDGAIPEEFRRAMGNRIYGCDDCQLFCPFTRFAKATQEADFSPRHDLDRIELIRLFCWGEQEFLDKTQGSPIRRIGYEKWLSNIAIGLGNAPWSEQVEHVLRARLPYPSEPLREHVRWALKEQAIKRGARLATAL

SEQ ID NO: 75986 - protein, 168 aa, Cobetia sp.
  misc_feature (1)..(168): tr|A0A348SW31|A0A348SW31_9GAMM tRNA epoxyqueuosine(34) reductase QueG (Fragment) OS=Cobetia sp. OX=1873876 GN= DCR98_15145 PE=4 SV=1
MSASSPSTDVDFNDLAARIRTWGRELGFQQVGITDVDLSDDEAHLERWLEAGFHGEMGFMAKHGTKRTRPAELEPGTIRVISVRLDYLPPEVETTKVLGQPSRAYVSRYATGRDYHKLMRKRLQRLAKTIEAEVGDFGYRAFVDSAPVMERGLARKAGIGWFGKNAML

SEQ ID NO: 75987 - protein, 356 aa, Cobetia sp.
  misc_feature (1)..(356): tr|A0A0P7DEI8|A0A0P7DEI8_9GAMM Epoxyqueuosine reductase OS=Cobetia sp. UCD-24C OX=1716176 GN=queG PE=3 SV=1
MAALATRIKTWGRELGFQQVGITDVDLSAHEAYLERWLANGHHGEMNFMAKHGTKRTRPEELVPGTLRVISVRLDYLPPEVETTQVLSQPERAYVSRYALGRDYHKLMRKRLANLAKQIEKEVGKFGYRAFVDSAPVMERALAQKAGIGWFGKNAMLMNQQAGCLFFLGELYTDLPLPVDAPFEKEHCGSCNACKVACPTDAIVEDKVVDARRCISYLTIELDGAIPEEFRRPMGNRIYGCDDCQLFCPFTRFAKATQETDFSPRHDLDRIELIRLFCWGEQEFLSKTEGSPIRRIGYEKWLSNIAIGLGNAPWSEQVEHVLRARLAYPSEPLREHVRWALKEQAIKRGARLATAL

SEQ ID NO: 75988 - protein, 351 aa, Cocleimonas flava
  misc_feature (1)..(351): tr|A0A4R1F6K6|A0A4R1F6K6_9GAMM Epoxyqueuosine reductase OS=Cocleimonas flava OX=634765 GN=queG PE=3 SV=1
MTLNNITQIKLKQWAQQLGFQGLGVSGIDLSTQEKYLKRWLANGSHGDMEWMERHGNKRTRPEELEEGTMSVISVRMDYLPPQTVDPIMVLNHPERAYVSRYALGRDYHKIMRKKLEKLAKKINEELSDSEQMQYRVFVDSAPVMEKPIAVKAGLGWMGKHTNILSQNVGSWFFLGEIYTNLPLTESQAVDNHCGDCTACIDVCPTKAIIKPYELDARRCISYLTIEHKGVIPVEFREPMGNRIYGCDDCQLICPWNRFAVDTKESDFSTRNNLDSASLLSLFAWSEEAFLKNLEGSAIRRIGYERWQRNISIALGNAPSSEKIITALNAKYEVSSEMVREHISWALQRLK

SEQ ID NO: 75989 - protein, 343 aa, Cognatishimia maritima
  misc_feature (1)..(343): tr|A0A1M5TBG8|A0A1M5TBG8_9RHOB Epoxyqueuosine reductase OS=Cognatishimia maritima OX=870908 GN=SAMN04488044_26 36 PE=4 SV=1
MDLKARLVAEAQEIGFDLCRICRPDAVPQVPDGLRGFLGKGYHGQMGWLADRVHWRENPAALWPEAQSVIMLGESYTPLHDPLAVHRMSERGAISVYAQNKDYHDLVKKRLKRLARWLIAEAGAEVEVKVFVDTAPVPEKPLGQAAGLGWQGKHTNLVSRDLGSWFFIGSVFTTLKLDTDPAEIDHCGSCRACLDACPTNAFPAPNQIDARRCISYLTIEHHGPIDEDLRPLLGNRIYGCDDCLAACPWNKFAVDAREIRYHARDDLAAPKLSELAALDDAAFRAKFAGSPIKRIGRNRFVRNVLYAMGNSGQPAFLPQIETLTHDPDDTVADAARWARRQLT

SEQ ID NO: 75990 - protein, 347 aa, Cognatiyoonia koreensis
  misc_feature (1)..(347): tr|A0A1I0RL73|A0A1I0RL73_9RHOB Epoxyqueuosine reductase OS=Cognatiyoonia koreensis OX=364200 GN=queG PE=3 SV=1
MSLRTELDSFARAEGFAKIGVCRPDAVSLAQSLEQFVDAGYHGQMGWMADRMHWRGDPSALWPAAKSVVMFAEPYTPTHDPLAVLGHKDKAAISVYAQGRDYHDVLKKRLKRVGRWFISQVPDAEIKVFVDTAPVMEKPLAQAAGLGWQGKHTNLLGRDLGNWFFLGAMFTTVPLDPDPPEVGHCGSCTACLDICPTNAFPAPYKLDARRCISYLTIEHKGPVADDLRGLMGNRIYGCDDCLAICPWNKFAETARDAKYAARADVKDPPLAELAVLDDAAFRERFSGSPIKRIGRDRFVRNVLYAIGNSGLPALMSVAETQLADPDPTVADAARWAVDKLRSGQTGL

SEQ ID NO: 75991 - protein, 341 aa, Cognatiyoonia sediminum
  misc_feature (1)..(341): tr|A0A1M5Q789|A0A1M5Q789_9RHOB Epoxyqueuosine reductase OS=Cognatiyoonia sediminum OX=1508389 GN=queG PE=3 SV= 1
MKQALVAYALEAGFSKVGVCRPSAVPQIADRLAAFVDAGRHGQMGWMAERMGWRSDPTALWPEAKSVIMLAERYTPEHDPLAILDHPEKAAISVYAQGRDYHDVVKKRLKKVGRWLIEQAPGAEIKVFVDTAPVMEKPLAQAAGLGWQGKHTNLLSRDLGNWFFLGAIFTTVELEPDVAEEEHCGSCRACLDICPTDAFPAPFQLDARRCISYLTIEHKGPVDPDLRAALGNRIYGCDDCLAVCPWNKFAQEGRDAKLAAREDLLAPDLIALAQLDDAGFRQFFSGSPIKRIGRDRFVRNVTYALGNSGRPEAAPVLQELVSDPDEAVSDGARWALEQLED

SEQ ID NO: 75992 - protein, 396 aa, Cohaesibacter gelatinilyticus
  misc_feature (1)..(396): tr|A0A285PH62|A0A285PH62_9RHIZ Epoxyqueuosine reductase OS=Cohaesibacter gelatinilyticus OX=372072 GN=SAMN0626 5368_3693 PE=4 SV=1
MSTHHNPKNQIQQDDKQRQKAEKIKAFMKSEALKLGFADLRVCSVAEAKNHEDVLSRFVELGYHGSMEWMRETLERRSHPQNLWSDVQSVIILGMNYGPDHDPRSLLEHGEKANISVYARNRDYHDLIKGRLKQLASKLIARTRDWNEGVEVKVFVDTAPVMEKPLAHLAGIGWQGKHTNLVSREFGSWLFLGSIFTSLPLAPDEAEIDRCGSCDACQVACPTDAFPGPYKIDGSRCISYLTIENKDEIPIEFRKAIGNRIYGCDDCLSACPWNKFAQEASEIKLVARDDLKAPELAEFLSMDEPTFRKTFSGSPVKRIGWARFMRNCLVAAGNSNCDNLIQTVLARVKEEDPIIRQHAVWALGQLLSKEKFAHYRTLFELNETDPNVLEEWQSGR

SEQ ID NO: 75993 - protein, 395 aa, Cohaesibacter marisflavi
  misc_feature (1)..(395): tr|A0A1I5C1F3|A0A1I5C1F3_9RHIZ Epoxyqueuosine reductase OS=Cohaesibacter marisflavi OX=655353 GN=queG PE=3 SV= 1
MTVPNPDKQAKLRAFIDKETQALGFAQLRVCRASDAKSREAVLRHFVEKGYHGSMDWMEETLDRRAHPTNLWDDVQSILMLGFNYGPDEDPRDLLAHPDKANISVYARHRDYHDLIKGRLKQLSAKLLSRVRDSQPDGAIKVFVDTAPVMEKPLAELAGLGWQGKHTNLVSREFGSWLFLGAIFTNLDLVPDEAEMDRCGSCVACQEACPTGAFPKPYQIDASRCISYLTIENKGPIPHTLRGAIGNRIYGCDDCLAACPWNKFAQQASEAKLKARADLKAPALVDFLALDDAAFRQHFSGSPIKRIGRNRFMRNVLIAAGNAGKGDDTEISGLIGAVTPHLGDADPLVRGAAIWALGRLMPAQEFVQMAKDRIDGETALDVNEEWHLALEGKTQ

SEQ ID NO: 75994 - protein, 391 aa, Cohaesibacter sp.
  misc_feature (1)..(391): tr|A0A285LYU5|A0A285LYU5_9RHIZ Epoxyqueuosine reductase OS=Cohaesibacter sp. ES.047 OX=1798205 GN=queG PE=3 SV =1
MTETSGPAEKQAKLRTFLEKEAKALGFSDLRICRTDNVRDHEDTLLSFTANGYHGSMEWIKETLARRSHPNKLWDGARSVIMLGFNYGPEGDPLATLHKTDCASISVYARHRDYHDVLKGRLKQLAAKLLARVRESQPDGEIKVFVDTAPVMEKMLAATAGLGWQGKHTNLVSRDIGSWFFLGAIFTSLDLAPDAPEVDHCGSCRACLDACPTKAFPEPYKIDARRCISYLTIENKGPIPHEFRSAMGNRIYGCDDCLAACPWNKFAQVASEAKLKARTDLNEPSLHDLLALDDTEFRKLFSGSPIKRIGRNRFLRNVLIATGNSNNPALGPIVRRHVSDPEPIVRGAAIWALGRLISKEAFESLASPLVPCETDPYVQEEWHRAMAEETT

SEQ ID NO: 75995 - protein, 389 aa, Cohaesibacter sp.
  misc_feature (1)..(389): tr|A0A2N5XTH4|A0A2N5XTH4_9RHIZ Epoxyqueuosine reductase OS=Cohaesibacter sp. H1304 OX=2067669 GN=queG PE=3 SV= 1
MAAIKPDPQAKLRRFLEQEAEKLGFAEIRICKAGDAQSREEMLRVFVAKGYHGSMQWMEETLKRRAHPNNLWDDVRSVIMLGFNYGPDEDPRPLLQQSDKANISVYARHRDYHDLIKGRLKQLSAKLLSRVRDSHPNGEIKVFVDTAPVMEKPLAELAGLGWQGKHTNLVSREYGSWLFLGAIFTNLDLSPDAPEIDHCGSCRACLDACPTDAFPAPYRIDASRCISYLTIEHKDPIPHVFRPAMGNRIYGCDDCLAACPWNKFAQQASEAKLKARDDLLAPPLSALLQLDDAAFRLHFSGSPIKRIGRNRFLRNVLIAVGNSGDAALIVPAQAHLHDDDPVVRGAAIWALSQLLPVPEFQTLAATLSPSEQDLTVQDEWLRATQGDKA

SEQ ID NO: 75996 - protein, 395 aa, Cohnella kolymensis
  misc_feature (1)..(395): tr|A0A0C2UZX2|A0A0C2UZX2_9BACL Epoxyqueuosine reductase OS=Cohnella kolymensis OX=1590652 GN=SD71_01845 PE=4 S V=1
MAVAVNERDTAYWRELKEEMIAAAPMLGIDKIRVTTADPFMELKDRLIRHRELGRESGFEEPDLDKRTDPALLFSEPRSIIAIAVAYPSKLKGAPVSEPGKRRGILSRSAWGQDYHDALRARLDKLARWLYDRVPDARLLSMVDTGALSDRAVAERAGIGWSGKNAAIITPEWGSWVYLGEMITNLPLPADKPVEEGCGDCTICIDACPTGALVGPGELNAQRCISYVTQTKGIVEDELMVKIGNRLYGCDTCQIVCPHNRGVDVRHHVELLPDPETAKPLLRPLLTMGNREFKEKFGESSASWRGRKPIQRNALIALGNFRDTESVPDINRMLREDPRPVLRATAAWALGRIGGEQAEQCLQSASLSEEDDEVKAAIERALLSIAEKRQQGGGQ

SEQ ID NO: 75997 - protein, 379 aa, Cohnella luojiensis
  misc_feature (1)..(379): tr|A0A4Y8LYZ4|A0A4Y8LYZ4_9BACL tRNA epoxyqueuosine(34) reductase QueG OS=Cohnella luojiensis OX=652876 GN=queG PE=4 SV=1
MRKDTAFWKQLKEEMIAAAPELGIDKLRVTTADPFLELKEQLVRHRELGHESGFEEPDLDLRTEPALIMPEARSIIAIAVAYPSKMKGAPVSEPGKRRGILSRSAWGEDYHQALRRRLTKLAEWIMERVPEAKLMSMVDTGALSDRAVAERAGIGWSGKNCSTLTPEWGSWVYLGEMITNLPLPPDQALLDGCGDCTLCIDACPTGALVGPGQLNAQKCISFVTQTKGIVEDEMMAKIGNRLYGCDTCQIVCPVNRKIDTRHHTELLPDPEVAKPLLRPLLTMGNREFREKFGSSSAAWRGRKPIQRNALIALGNFRDAESVPDVAAVLRNDPRPVLRATAAWALGRIGSPEAVEHLRDAQSSEKDDEVLSSIARALSL

SEQ ID NO: 75998 - protein, 388 aa, Cohnella lupini
  misc_feature (1)..(388): tr|A0A3D9IMY8|A0A3D9IMY8_9BACL Epoxyqueuosine reductase OS=Cohnella lupini OX=1294267 GN=DFP95_104116 PE=4 SV= 1
MSKLNMQTDNLFWIRLKDEMIAAAPSLGIDKLRITTADTFAELKERLVRHRELGHESGFEEPDLDLRTEPKLSMPEARSIIAIAVAYPSKLKNAPVSEPGKRRGILSRSAWGEDYHQALRRRLAKLTEWIHERVPEAKLMSMVDTGSLSDRAVAERAGIGWSGKNCSILTPEYGSWVYLGEMITDLPLPPDRSLVEGCGDCTLCIDACPTGALVGPGQLNAQKCISFVTQTKGIVEDEMMVKIGNRLYGCDTCQIVCPVNRKIDMRHHAELLPDPEVAKPLLRPLLKMGNREFRETFGAGSASWRGRKPIQRNALIGLGNFKDSESVPDIAEVMRDDPRPVLRATAAWALGRIGTSEAIDHLLKARETEKDDETLSAIDKALAAHAAI

SEQ ID NO: 75999 - protein, 388 aa, Cohnella phaseoli
  misc_feature (1)..(388): tr|A0A3D9IPC0|A0A3D9IPC0_9BACL Epoxyqueuosine reductase OS=Cohnella phaseoli OX=456490 GN=DFP98_12635 PE=4 SV= 1
MSDVVVKRDYRYWKQFKEELLKAAPGLGIDKLGVTTAEPFHELKERLLRHRERGHESGFEEPDLDLRTDPSLHMAEAKSIIAIAVAYPSKLKNAPVSEPGRRRGILSRSAWGEDYHQALRRRMANLSEWLLAREPEAKLLSMVDTGALSDRAVAERAGIGWSGKNCSVINPELGSWIYLGEIITSLPLPPDSSLPDDCGDCTLCIDACPTGALVGPGQLNAQRCISFITQTKGFVSDEMKLKIGNRLYGCDTCQIVCPVNRKIDIRHHPELLPDPEVVKPLLRPLLTMGNREFREKLGSSSAAWRGRKPIQRNALIGLGNFRDAESVPDIVAVLRDDPRPELREAAAWALGRIGTSEALDGLRGARSKEGSVEVLDAIDRALERKSDQ

SEQ ID NO: 76000 - protein, 429 aa, Cohnella sp.
  misc_feature (1)..(429): tr|A0A3E0R358|A0A3E0R358_9BACL Epoxyqueuosine reductase OS=Cohnella sp. OX=1883426 GN=queG PE=3 SV=1
MDNLNGVDSSPPRGAEFWQRLKQEMIEAAPGLGIDKIGVASADPFTELKERLIRHRELGRESGFEEPDLDKRTNPALLFDNPRSIIAIAVAYPSKLHAPPMSEPGLRRGILSRSAWGEDYHRVLNRRLERLADWLAERVPEARTLSMVDTGALSDRAVAERAGIGWSGKNTMILTREWGSWVYLGEMITNLPLPPDKPVEDSCGECTRCIDACPTGALVGSGELDAQKCISFLTQTKGTLSEEVMLKIGNRLYGCDTCQIVCPVNRGKDARQHAELIPDAEVAKPLLRPLLKMGNREFKEKFGSSAASWRGRKPIQRNALIGLGNFRDRESVPDIAAVLREDPRYELRATAAWALGRIGGSEAEAALREAIETDADERVKEAARRALEQASGAGRAIRGRPGKRKTPEAPEAEKTAADQKEAIGCERER

SEQ ID NO: 76001 - protein, 401 aa, Cohnella sp.
  misc_feature (1)..(401): tr|A0A1I0VUZ4|A0A1I0VUZ4_9BACL Epoxyqueuosine reductase OS=Cohnella sp. OV330 OX=1855288 GN=SAMN05216312_10157 7 PE=4 SV=1
MDNKGVAAPSRSPIYWSSLKRDMLAAAKSLGIDRIGVTSAEPFPELRERLALHRALGYESGFEEPDLDKRTQPSLSFEAPRSIVAIAVAYPSKLKNPPVSEPGARRGILSRSAWGEDYHRVLGKRLERLAEWLAERAPELRWLSMVDTGALSDRAVAERAGIGWSGKNCMIMNDELGSWMYLGEMITNLPLPPDAPLLDQCGDCTICIDACPTGALVGPGQLNAQKCISYLTQSKGLLDEEAMVKMGNRLYGCDTCQIVCPINRGIDSRHQAETLPDPEVAKPLLRPLLQMGNREFKETFGASSASWRGRKPIQRNALIGLGNFRDEASAGDVARVLREDPRFELRATAAWALGRIRGDVAQAALAEAAEADADERVRAAASRALAALAEPAPKRGGRVSD

SEQ ID NO: 76002 - protein, 318 aa, Coleofasciculus chthonoplastes
  misc_feature (1)..(318): tr|B4VK91|B4VK91_9CYAN Epoxyqueuosine reductase OS=Cole ofasciculus chthonoplastes PCC 7420 OX=118168 GN=queG P E=3 SV=1
MMTKDKGQRTKDKSNQIKQKARSLGFHHCGIAAIEGNADEEAAQHLKTWLAQGYHADMDWMQNPRRLDIHTCMPDVKSVISVALNYYTPHQRPQGNEYAKISRYAWGRDYHKVMHKKLKALTHWLQAQGEGIEARYYVDTGPVQDKVWAERAGIGWIAKNGNLITREYGSWVFLGEILTNLSLTPHTPHTQHCGTCTRCLEACPTGAIVKPFVVDANRCIAYHTIENRAEELPSSITPHLQGWVAGCDICQDVCPWNQRFAQPTDVADFEPYPGNVAPTLAELATLSDHQWHQRFPASALRRIKPQMWRRNAKANQQK

SEQ ID NO: 76003 - protein, 381 aa, Collimonas arenae
  misc_feature (1)..(381): tr|A0A127PUF3|A0A127PUF3_9BURK Epoxyqueuosine reductase OS=Collimonas arenae OX=279058 GN=queG PE=3 SV=1
MLATDHNLIALATTIKAWGRELGFADIRISDVDLAQQEAGFQAWLELGYHGEMDYMAAHGMKRARPAELVPGTIRAIVARMDYLPREYQGDDGQWRLREQARLGKAAATATVSLYARGRDYHKVLRSRLQQLADRIKDEIGEFGYRVFTDSAPVMEVALAQKAGLGWRGKHTLLLNREAGSFFFLGEILTDLPLPLDAPVSSHCGQCSACIDVCPTKAIVGPYRLDARRCISYLTIELKGSIPLELRPLIGNRVYGCDDCQLFCPWNKFAQPSTLGDFDVRNGLDQATLVELFGWTETQFNSRMEGSPIRRIGYQRWLRNMAVGLGNAAAADVSTQEIVAALRARIDDPSELVREHVEWALQQHGAARSDSSVLQHPQPER

SEQ ID NO: 76004 - protein, 372 aa, Collimonas arenae
  misc_feature (1)..(372): tr|A0A561GE18|A0A561GE18_9BURK Epoxyqueuosine reductase OS=Collimonas arenae OX=279058 GN=queG PE=3 SV=1
MAVIDQDLTALAATIKAWGRELGFADIRISDVDLAQQEAGFEAWLALGYHGDMDYMAAHGMKRARPGELVPGAIRAIAVRMDYLPRAYQDDQGSWRPREQARLAPAAAGSATVSLYARGRDYHKVLRSRLQQLADRIKGEIGEFGYRVFTDSAPVMEVALAQKAGLGWRGKHTLLLNREAGSFFFLGEILTDLPLPVDPAISSHCGQCSACIDVCPTKAIVGPYRLDARRCISYLTIELKGSIPVELRPLIGNRVYGCDDCQLFCPWNKFAQPSTLGDFDVRNGLDQATLVELFGWSEEQFNSRMEGSPIRRIGYQRWLRNMAVGLGNTAAAGAATPEIVAALQQRSDDPSELVREHVAWALQQHAIKHGVD

SEQ ID NO: 76005 - protein, 368 aa, Collimonas fungivorans
  misc_feature (1)..(368): tr|A0A127PGR7|A0A127PGR7_9BURK Epoxyqueuosine reductase OS=Collimonas fungivorans OX=158899 GN=queG PE=3 SV=1
MAVIDQNLSALATTIKAWGRELGFADVRISDVDLAQQEAGFEAWLELGYHGEMDYMAAHGMKRARPAELVPGAIRAIAVRMDYLPRAYQDDQGNWRPREQARLAPAAAASATVSLYARGRDYHKVLRSRLQQLADRIKGEIGEFGYRVFTDSAPVMEVALAQKAGLGWRGKHTLLLNREAGSFFFLGEILTDLPLPVDQAISSHCGQCSACIDVCPTQAIVGPYRLDARRCISYLTIELKGSIPVELRPLIGNRVYGCDDCQLFCPWNKFAQPSALGDFDVRNGLDQATLVELFGWSEEQFNSRMEGSPIRRIGYLRWLRNIAVGLGNTAAAGAGSPEIIAALQQRSDYPSELVREHVAWALQQHGID

SEQ ID NO: 76006 - protein, 368 aa, Collimonas fungivorans
  misc_feature (1)..(368): tr|G0ADC9|G0ADC9_COLFT Epoxyqueuosine reductase OS=Coll imonas fungivorans (strain Ter331) OX=1005048 GN=queG P E=3 SV=1
MAVIDQNLSALATTIKAWGRELGFADVRISDVDLAQQEAGFEAWLELGYHGEMDYMAAHGMKRARPAELVPGAIRAIAVRMDYLPRAYQDDQGSWRPREQARLAPAAAGSATISLYARGRDYHKVLRSRLQQLADRIKGEIGEFGYRVFTDSAPVMEVALAQKAGLGWRGKHTLLLNREAGSFFFLGEILTDLPLPVDQAISSHCGQCSACIDVCPTQAIVGPYRLDARRCISYLTIELKGSIPVELRPLIGNRVYGCDDCQLFCPWNKFAQPSTLGDFDVRNGLDQATLVELFGWSEEQFNSRMEGSPIRRIGYQRWLRNMAVGLGNAAAAGAGSPEIIAALQQRSDYPSELVREHVAWALQQHGID

SEQ ID NO: 76007 - protein, 377 aa, Collimonas pratensis
  misc_feature (1)..(377): tr|A0A127Q9H4|A0A127Q9H4_9BURK Epoxyqueuosine reductase OS=Collimonas pratensis OX=279113 GN=queG PE=3 SV=1
MAVTQQHFTGQNPPDPDLAALAVAIKAWGRELGFADIRISDVDLAEQEAGFQAWLELGYHGEMDYMAAHGMKRARPAELVPGTIRAIAVRMDYLPRGYQDAPGQWRPLEQARLAPAAAATATISLYARGRDYHKVIRSRLQQLADRIKGEIGEFGYRVFTDSAPVMEVALAQKAGLGWRGKHTLLLNREAGSFFFLGEILTDLPLPVDPPTSAHCGQCSACIDVCPTQAIVGPYRLDARRCISYLTIELKGSIPLELRPLIGNRVYGCDDCQLFCPWNKFAQPSTLGDFDVRNGLDQATLVELFGWSEEQFNSRMEGSPIRRIGHERWLRNMAVGLGNAAATGISTPEIIAALQARSADPSELVREHVAWALQQHGA

SEQ ID NO: 76008 - protein, 377 aa, Collimonas pratensis
  misc_feature (1)..(377): tr|A0A127R2X3|A0A127R2X3_9BURK Epoxyqueuosine reductase OS=Collimonas pratensis OX=279113 GN=queG PE=3 SV=1
MAVTQQHFTGQNPPDLDLAALAVAIKAWGRELGFADIRISDVDLAEQEAGFQAWLELGYHGEMDYMAAHGLKRARPAELVPGTIRAIAVRMDYLPRGYRDAPGQWRPLEQARLAPAAAATATISLYARGRDYHKVIRSRLQQLADRIKGEIGEFGYRVFTDSAPVMEVALAQKAGLGWRGKHTLLLNREAGSFFFLGEILTDLPLPVDPPTSAHCGQCSACIDVCPTQAIVGPYRLDARRCISYLTIELKGSIPLELRPLIGNRVYGCDDCQLFCPWNKFAQPSTLGDFDVRNGLDQATLVELFGWSEEQFNSRMEGSPIRRIGHERWLRNMAVGLGNVAAAGISTPEIIAALQARSADPSELVREHVAWALQQHGA

SEQ ID NO: 76009 - protein, 373 aa, Collimonas sp.
  misc_feature (1)..(373): tr|A0A1H3DBH0|A0A1H3DBH0_9BURK Epoxyqueuosine reductase OS=Collimonas sp. OK242 OX=1798195 GN=queG PE=3 SV=1
MVVTEQNLAALATTIKAWGRELGFADIRISDVDLAQQEAGFEAWLALGYHGEMDYMAAHGMKRARPAELVPGAIRAIAVRMDYLPRAYKDDQDSQDGQRNWRSREQARLAPAAAGTATVSLYARGRDYHKVLRSRMQQLADRIKGEIGDFGYRVFTDSAPVMEVALAQKAGLGWRGKHTLLLNREAGSFFFLGEILTDLPLPVDESVSSHCGQCSACIDVCPTKAIVGPYRLDARRCISYLTIELKGSIPVELRPLIGNRVYGCDDCQLFCPWNKFAQPSTLGDFDVRNGLDRATLVELFGWSEEQFNSRMEGSPIRRIGYQRWLRNMAVGLGNTAAAGAGTPEIVAALQQRSDDPSELVREHVAWALQQHGA

SEQ ID NO: 76010 - protein, 377 aa, Collimonas sp.
  misc_feature (1)..(377): tr|A0A2A9K659|A0A2A9K659_9BURK Epoxyqueuosine reductase OS=Collimonas sp. PA-H2 OX=1881062 GN=queG PE=3 SV=1
MAVTQQHFTGKTPPPPDLAALAVAIKAWGRELGFADIRISDVDLAEQEAGFQAWLALGYHGEMDYMAAHGMKRARPVELVPGTIRAIAVRMDYLPRGYQDAPGEWRPREQARLAPAAAGTATVSLYARGRDYHKVIRSRLQQLADRIKGEIGEFGYRVFTDSAPVMEVALAQKAGLGWRGKHTLLLNREAGSFFFLGEILTDLPLPVDPPTSSHCGQCSACIDVCPTQAIVGPYRLDARRCISYLTIELKGSIPLELRPLIGNRVYGCDDCQLFCPWNKFAQPSTLGDFDVRNGLDQATLVELFGWSEEQFNSRMEGSPIRRIGYERWLRNMAVGLGNAAAAGVSTPEIIAALQSRSADPSALVREHVAWALQQHGA

SEQ ID NO: 76011 - protein, 381 aa, Colwellia beringensis
  misc_feature (1)..(381): tr|A0A222G805|A0A222G805_9GAMM Epoxyqueuosine reductase OS=Colwellia beringensis OX=1967665 GN=queG PE=3 SV=1
MTTPAINYQYLTEKIKFWGQELGFSQVGISDVDLSEHEAALTSWLENNYHGNMDYMARHGLMRARAKELVEGTLNVISVRMDYLPTDAKFARILKNRDHAYISRYALGRDYHKLMRKRLKQLGEKIKAHCENINYRPFVDSAPILERPLAEKAGLGWVGKHSLLINKQAGSWFFLGELLVDIPLITDTKAENNCGTCVACIKICPTQAIVEPYVVDARRCISYLTIELREAIPEEFRPLIGNRIYGCDDCQLICPWNKFAKLGSEDDFKPRQNLDNIELLTLFAWDEATFLNKTEGSPIRRIGFQSWQRNIAVALGNADFSENNVSALTAKLPKAEAMVAEHIEWAIAQQTLKQQALVKDQNLRLTARLIRSVEKGMPRDA

SEQ ID NO: 76012 - protein, 381 aa, Colwellia chukchiensis
  misc_feature (1)..(381): tr|A0A1H7T7Y4|A0A1H7T7Y4_9GAMM Epoxyqueuosine reductase OS=Colwellia chukchiensis OX=641665 GN=queG PE=3 SV=1
MTAPAINYQDLTEKIKLWGRELGFSQVGISDVNLVDHEPALARWLANNYHGNMDYMARHGLMRARAKELVEGTLNVISVRMDYLPTDAKFARTLKNRQHAYISRYALGRDYHKLMRKRLKQLGERIKQHCQNFNYRPFVDSAPILERPLAEKAGLGWVGKHSLLINKQAGSWFFLGELLVDIPLVVDKKVENACGSCVACIKICPTQAIVEPYVVDARRCISYLTIELREAIPEQFRPLIGNRIYGCDDCQLICPWNKFAKLGSEDDFKPRQQLDDISLLTLFAWDEASFLRKTQGSPIRRIGFQCWQRNIAVALGNADFSATIVTALLEKLPASEPMVAEHIEWALAQQRLKQQALADDKNLRLTARLIRSVEKGMPRDA

SEQ ID NO: 76013 - protein, 398 aa, Colwellia demingiae
  misc_feature (1)..(398): tr|A0A5C6QCC3|A0A5C6QCC3_9GAMM Epoxyqueuosine reductase OS=Colwellia demingiae OX=89401 GN=queG PE=3 SV=1
MSPINYQELTEKIKSWGKELGFSDLGISNIDLSAHESMLERWLANNYHGNMYYMARHGLMRARPAELVPGTIRVISVRLDYLPQNAKFASILKDKNKAYISRYALGRDYHKLMRKRLQQLGKKIAEHCSDFNCRPFVDSAPVMERPLAEKAGLGWAGKHTLLINKEAGSWFFLGELFVDIPLPVSSNEYSESAIKAIETQTKTNDCGTCVACIKICPTKAIVEPYTVDARRCISYFTIESPDAIPEELRPLMGNRIYGCDDCQLICPWNKYAKLSLVDDFQARNNLDDISLLELFAWSEDYFLNTLQGSPIRRIGFQSWLRNIAVALGNAPYSDIIVTALTEKLAEASELVIEHIHWALAQQGDKKMLSDKVAAEQATNHRLTLRLIRSVEKGLTRDS

SEQ ID NO: 76014 - protein, 386 aa, Colwellia hornerae
  misc_feature (1)..(386): tr|A0A5C6QHD2|A0A5C6QHD2_9GAMM Epoxyqueuosine reductase OS=Colwellia hornerae OX=89402 GN=queG PE=3 SV=1
MTTSPIDYQALAENIKRWGLALGFSQVGFSDIDLSSHEDALTQWLENNYHGEMDYMHKHGLMRARAQELVEGTTRVISVRMDYLPPEAKFARTLKKKDHAYISRYALGRDYHKLMRKRLKQLGDKISEYCESFNFRPFVDSAPILERPLAEKAGLGWVGKHSLLINKSAGSWFFLGELLVDIPLPTSEKTANECGSCVSCIKICPTQAIVAPYVVDARRCISYLTIELRDAIPEEFRPLIGNRIYGCDDCQLICPWNKFANISHEGDFSPRQNLDNVELLTVFSWDEATFLSKTAGSPIRRIGFNSWQRNISVAIGNAPYSAENIDALNDKLTTAEPMVAEHIHWALHQQDNKRIAAEQHSDFPIKNQRLTERLIRSVEKGLPRDA

SEQ ID NO: 76015 - protein, 400 aa, Colwellia marinimaniae
  misc_feature (1)..(400): tr|A0A1Z5I5G6|A0A1Z5I5G6_9GAMM Epoxyqueuosine reductase OS=Colwellia marinimaniae OX=1513592 GN=queG PE=3 SV=1
MTMSLINYQELAEKIKCWGKELGFSDLGISDIDLTAHESVLERWLANNYHGNMDYMARHGLMRARPAELVPGTIRVISVRLDYLPQNAKFASVLKDKNKAYISRYALGRDYHKLMRKRLQQLGKKIAEHCRDFNCRPFVDSAPVMERPLAEKAGLGWAGKHTLLINKEAGSWFFLGELFVDIPLPVSSNEYSAAAIKAIETQTKVNDCGSCVACIKICPTKAIVAPYTVDARRCISYFTIESPDAIPEELRPLMGNRIYGCDDCQLICPWNKYAKLSLIDDFQARNNLDDISLLELFAWTEEYFLNTLQGSPIRRIGFQSWLRNIAVALGNAPYSDEVVKALTEKCAEASELVVEHINWALAQQSNKKMLSEKTAAEQEKNHRLTLRLIRSVEKGLTRDA

SEQ ID NO: 76016 - protein, 398 aa, Colwellia psychrerythraea
  misc_feature (1)..(398): tr|Q48A28|Q48A28_COLP3 Epoxyqueuosine reductase OS=Colw ellia psychrerythraea (strain 34H / ATCC BAA-681) OX=16 7879 GN=queG PE=3 SV=1
MSPINYQELAEKIKCWSKELGFSDLGISNIDLSAHESMLERWLANGYHGNMDYMARHGLMRARPAELVPGTIRVISVRLDYLPHNAKFASILKDKNKAYISRYALGRDYHKLMRKRLQQLGKKIVEHCSDFNCRPFVDSAPVMERPLAEKAGLGWAGKHTLLINKEAGSWFFLGELFVDIPLPISRNEYSESAIKAIETQTKTNDCGTCVACIKICPTKAIVEPYTVDARRCISYFTIESPDAIPIELRPLMGNRIYGCDDCQLICPWNKYAKLSLADDFQARNNLDDISLLELFAWSEEYFLNTLQGSPIRRIGFQSWLRNIAVALGNAPYSDVIVTALTEKRPDASDLVVEHINWALVQQSDKKMLSEKVAAEQAKNHRLTLRLIRSVEKGLPRDA

SEQ ID NO: 76017 - protein, 400 aa, Colwellia psychrerythraea
  misc_feature (1)..(400): tr|A0A099KPP8|A0A099KPP8_COLPS Epoxyqueuosine reductase OS=Colwellia psychrerythraea OX=28229 GN=queG PE=3 SV= 1
MTMSSTNYQELAEKIKCWSKELGFSDIGISDIDLSAHESVLERWLANNYHGNMDYMARHGLMRARPAELVPGTIRVISVRLNYLPQNAQFSSILKDKNKAYISRYALGRDYHKLMRKRLQQLGKKIAEHCSNFNCRPFVDSAPVMERALAEKAGLGWAGKHTLLINKAAGSWFFLGELFIDIPLPVSRNEYSENAIKTVETQTKNNDCGTCVACIKICPTKAIVEPYTVDARRCISYFTIESPDAIPVELRPLMGNRIYGCDDCQLICPWNKYAKLSLVDDFQARNNLDDISLLTLFAWSEEHFLNTLQGSPIRRIGFQSWLRNIAVALGNAPYSEVIVAALTEKLAEASELVAEHINWALAQQDNKKMLSEEAAAKQAKNHRLTLRLIRSVEKGLTRDA

SEQ ID NO: 76018 - protein, 403 aa, Colwellia sp.
  misc_feature (1)..(403): tr|A0A2G2IB30|A0A2G2IB30_COLSX Epoxyqueuosine reductase OS=Colwellia sp. OX=56799 GN=queG PE=3 SV=1
MTNTTANNPAINYPALVEKIKCWGKELGFSQLGITDIDLSKHEQALERWLANNYHGNMDYMARHGLMRARPAELESGTIRAISVRLDYLPTQAKCAQILKSKNHAYISRYALGRDYHKLMRKRLQQLGKKITAYVESLECEGIEGEHFNFRPFVDSAPLLERPLAEKAGLGWVGKHSLLLNKEAGSWFFLGELLINIPLPVSVVATIDKSTAANDCGSCVACIKICPTKAIVEPYVVDARRCISYFTIESPDPIPLELRPLMGNRIYGCDDCQLICPWNKYAKLSLENDFQARHHLDEITLLELFSWSEDYFLEHLQGSPIRRIGFQSWQRNIAVALGNAPFDISIVVALEQKLTTASVMVAEHIHWALSQQNKRKSFDNNNTHTRLNARLIRSIEKGLPRDA

SEQ ID NO: 76019 - protein, 397 aa, Colwellia sp.
  misc_feature (1)..(397): tr|A0A396U5Y3|A0A396U5Y3_9GAMM Epoxyqueuosine reductase OS=Colwellia sp. RSH04 OX=2305464 GN=queG PE=3 SV=1
MTTPTINYLELAEKIKCWGKELGFSQLGITDIDLSAHEEALQRWLANGYHGNMDYMAKHGLMRARPAELVPGTTRVICVRLDYLPQDAKFAQTLKDKSSAYISRYALGRDYHKLMRKRLQQLGKKISAHCEAFNCRPFVDSAPVLERPLAEKAGLGWVGKHTLLLNKEAGSWFFLGELFIDIPLPITDIKSEQTKEETAQKKPGCGTCVACIKICPTNAIVEPYVVDAKRCISYFTIESPDPIPVELRPLMGNRIYGCDDCQLICPWNKYAKITPEQDFQPRLQLDQASLLSLFSWSEEDFLSNLEGSPIRRIGYDSWLRNIAVALGNAPYKPEIISALMMKKEVVSELVAEHINWALTQQDAKRSIAQDEFEKQQSNHRLTNRLIRSIEKGLPRDA

SEQ ID NO: 76020 - protein, 385 aa, Colwelliaceae bacterium
  misc_feature (1)..(385): tr|A0A2D6RIU1|A0A2D6RIU1_9GAMM Epoxyqueuosine reductase OS=Colwelliaceae bacterium OX=2026726 GN=queG PE=3 SV= 1
MSTTINYQDLSEKIKQWGKELGFAEVGITDIDLKTHEAYLQKWLDNQYHGSMDYMARHGMMRARPDELEPGTVRVISVAMHYLIPDAKFAKTLKNKKKAYISRYALGRDYHKLMRKRLQQLGQKISQHCETFKFRPFVDSAPILERPLAEKAGLGWVGKHSLLINKQAGSWFFLGELLVNIPLPTDAPKIEHCGNCVACMTICPTNAIVAPYIVDAKRCISYLTIEHQGVIPEVYRSAMGNRIYGCDDCQLICPWNKFGQITEEQDFHPRNSLDDSDLLSLFAWTETEFLARTQGSPIRRIGYQSWQRNIAIGLGNAPYDEDIIVQLSAKLLESDEVVAEHINWAIAQQKEKALDAETASKEVKSALRQNERLIRSIEKGLPRDA

SEQ ID NO: 76021 - protein, 370 aa, Comamonadaceae bacterium
  misc_feature (1)..(370): tr|A0A3C0KHL7|A0A3C0KHL7_9BURK Epoxyqueuosine reductase OS=Comamonadaceae bacterium OX=1871071 GN=queG PE=3 SV =1
MQSGFDGARLVRQLQDWGRELAFSQIGVAGVDLGSAETGLRAWLAAGFHGSMGYMATHGLKRARPAELVPGTVSVITARMDYLPCTAPDDWVADEWQRQQRPGEGIISVYARGRDYHKVLRNRLQKLAERLAADVGPLGHRVFTDSAPVLEAELASRSGQGWRGKHTLILNREGGSMFFLGEIYIDMALPPTPPVGHHCGACTACMVACPTRAIVAPYRLDARRCISYLTIEHDGPIPSELRPLMGNRIYGCDDCQLACPWNKFARRATLPDFDPRDGIAGATLVELFGWEEAEFLRRTEGSPIRRIGHERWLRNIAVALGNALRTDAPAAERLAWQAALQARAGHPSEVVREHVAWALAQQPAAPIVTV

SEQ ID NO: 76022 - protein, 347 aa, Comamonadaceae bacterium
  misc_feature (1)..(347): tr|A0A1E4LX43|A0A1E4LX43_9BURK Epoxyqueuosine reductase OS=Comamonadaceae bacterium SCN 68-20 OX=1660161 GN=qu eG PE=3 SV=1
MQEWARELGFSQIGVTGVDLSSAEPGLMQWLAQGFHGDMHYMAAHGLKRARPAELVPGTVSVITARMDYLPRTTPEGWQAVEWERLRRPGEAIVSVYARGRDYHKVLRARLQKLADRIAEAAGPFGHRVFTDSAPVLEAELARRSGQGWRGKHTLVLSREAGSMFFLGEIYVDMALAPTAPVTAHCGSCQACMDACPTQAIVAPHRVDARRCISYLTIEHAGEIPLALRPRMGNRIYGCDDCQLVCPWNKFAQPSPLPDFDARAGLTGQQLVHLFGWDEATFLRQTEGGPIRRIGHERWLRNVAVALGNALRATGDPAVRAALQARAQDASALVRGHVAWALAQEAA

SEQ ID NO: 76023 - protein, 352 aa, Comamonas aquatica
  misc_feature (1)..(352): tr|A0A1B2D7Y2|A0A1B2D7Y2_9BURK Epoxyqueuosine reductase OS=Comamonas aquatica OX=225991 GN=queG PE=3 SV=1
MQDWARELGFSQIGVSGVDLSSCEDGLLQWLAQGFHGQMQYMQAHGLKRARPAELVPGTVSVITARMDYLPSTTPQDWQAVEWARLQRPQEAIVSVYARGRDYHKVLRNRLQKLAERIAQEVGPLGHRAFTDSAPVMEAELARRSGQGWRGKHTLVLSRDAGSMFFLGEIYVDLALPETAPVTAHCGSCSSCMDACPTGAIVAPHRVDARRCISYLTIEHDGAIPLELRPLMANRIYGCDDCQLACPWNKFAQRSPLPDFDVRGGMVGSTLVQLFGWDEATFLRCTEGSPIRRIGHERWLRNIAVALGNALRAEPQVDARAALRQALQARATHDSALVREHVQWALAQAADE

SEQ ID NO: 76024 - protein, 352 aa, Comamonas aquatica
  misc_feature (1)..(352): tr|A0A014P5E0|A0A014P5E0_9BURK Epoxyqueuosine reductase OS=Comamonas aquatica DA1877 OX=1457173 GN=queG PE=3 S V=1
MQDWARELGFSQIGVSGVDLSSCEDGLLQWLAQGFHGQMQYMQAHGLKRARPAELVPGTVSVITARMDYLPSATPQDWQAVEWARLQRPQEAIVSVYARGRDYHKVLRNRLQKLAERIAQEVGPLGHRAFTDSAPVMEAELARRSGQGWRGKHTLVLSRDAGSMFFLGEIYVDLALPETAPVTAHCGSCSSCMDACPTGAIVAPYRVDARRCISYLTIEHDGAIPLELRPLMANRIYGCDDCQLACPWNKFAQRSPLPDFDVRGGMVGSSLVQLFGWDEATFLRCTEGSPIRRIGHERWLRNIAVALGNALRAEPPADARAALRQALQARATHDSALLREHVQWALAQAADE

SEQ ID NO: 76025 - protein, 351 aa, Comamonas kerstersii
  misc_feature (1)..(351): tr|A0A1V3TP06|A0A1V3TP06_9BURK Epoxyqueuosine reductase OS=Comamonas kerstersii OX=225992 GN=queG PE=3 SV=1
MQDWARELGFSQIGVSGVDLSSCEDGLLQWLAAGFHGSMDYMAAHGLKRARPAELVPGTVSVITARMDYLPRDTLDDWQTVEWARQHRPQEAIVSVYARGRDYHKVLRSRLQKLAERIAQELGPMGHRAFTDSAPVMEAELARRSGQGWRGKHTLVLSRDAGSMFFLGEIYVDMALPETAPVTAHCGSCSSCMDACPTGAIVAPHRVDARRCISYLTIEHDGPIPLELRPLLANRIYGCDDCQLACPWNKFAQRASLPDFDVRGGMVGSTLVQLFSWDEATFLRCTEGSPIRRIGHVRWLRNIAVAMGNALTTALSADDRAAIQTALQQRASHDSEIVREHVQWALAQANQ

SEQ ID NO: 76026 - protein, 351 aa, Comamonas kerstersii
  misc_feature (1)..(351): tr|A0A0W7YXW6|A0A0W7YXW6_9BURK Epoxyqueuosine reductase OS=Comamonas kerstersii OX=225992 GN=queG PE=3 SV=1
MQDWARELGFSQIGVSGVDLSSCEDGLLQWLAAGFHGSMDYMAAHGLKRARPAELVPGTVSVITARMDYLPRDTLDDWQTVEWARQHRPQEAIVSVYARGRDYHKVLRSRLQKLAERIAQELGPMGHRAFTDSAPVMEAELARRSGQGWRGKHTLVLSRDAGSMFFLGEIYVDMALPETAPVTAHCGSCSSCMDACPTGAIVAPHRVDARRCISYLTIEHDGPIPLELRPLLANRIYGCDDCQLACPWNKFAQRASLPDFDVRGGMVGSTLVQLFSWDEATFLRCTEGSPIRRIGHVRWLRNIAVAMGNALTTALSADDRAAIQTALQQRASHDSEIVREHVQWALAQASQ

SEQ ID NO: 76027 - protein, 361 aa, Comamonas serinivorans
  misc_feature (1)..(361): tr|A0A1Y0ESM0|A0A1Y0ESM0_9BURK tRNA epoxyqueuosine(34) reductase QueG OS=Comamonas serinivorans OX=1082851 GN= CCO03_05540 PE=4 SV=1
MAYMAAHGLKRARPAELVPGTVSVISVRMNYLPRAALQAADGAALAGQPTSPVAEANDLAAVPSTVAMPAATAAAGATTGWRQREWQSLQAPGDGVVSLYARGRDYHKVVRNRLQQLQRRMAEQLGPFGHRVFCDSAPVLEAELATRAGLGWRGKHSLVLSRDAGSLFFLGELFVDLALPATSAQAGHCGQCTSCITSCPTGAIVAPYRVDARRCISYLTIEHAGPIDPALRPLVGNHVYGCDDCQLACPWNKFAQASDLPDFDARPDLQAGQLVRWMQWDEAEFLRLTEGSPIRRIGHARWLRNVALVMGNAASAPLTTTQRRDVVQALARWQDHADPVVREQVAWSLARHGADAGPGDR

SEQ ID NO: 76028 - protein, 346 aa, Comamonas sp.
  misc_feature (1)..(346): tr|A0A2G6YYR0|A0A2G6YYR0_9BURK Epoxyqueuosine reductase OS=Comamonas sp. 26 OX=2035201 GN=queG PE=3 SV=1
MQAWARELGFSQIGVAGVDLSSAEPGLLQWLAQGFHGEMHYMQAHGLKRARPAELVPGTVSVITVRMDYLPQATADGWQAVEWDRLKNPAEGIVSIYARGRDYHKVLRNRLQKLAERIAQEIGPFGHRAFTDSAPVLEAELASRSGQGWRGKHTLVLSREAGSMFFLGEIYVDFAIDPTEPVTAHCGNCTSCIDACPTGAIIAPHKVDARRCVSYLTIEHAGSIPEDMRPLLANRIYGCDDCQLACPWNKFAKPSQLPDFDARAGLAGTQLVHFFAWDETQFLRITEGSPIRRIGHARWLRNVAVALGNAWRETGQPELQAALQTRANHPDPVVAEHVAWALAQRA

SEQ ID NO: 76029 - protein, 346 aa, Comamonas sp.
  misc_feature (1)..(346): tr|A0A5D3H6C7|A0A5D3H6C7_9BURK Epoxyqueuosine reductase OS=Comamonas sp. Z3 OX=2601247 GN=queG PE=3 SV=1
MQAWARELGFSQIGVAGVDLSSAEPGLLQWLAQGFHGEMHYMQAHGLKRARPAELVPGTVSVITARMDYLPRDTGDGWQTVEWDRLRRPEEGIVSLYARGRDYHKVLRNRLQKLAERIAQEMGPFGHRAFTDSAPVLEAELASRSGQGWRGKHTLVLSREAGSMFFLGEIYVDFALEPTAPVTAHCGSCSSCMDACPTGAIIAPHKVDARRCISYLTIEHAGSIPEELRPLMANRIYGCDDCQLACPWNKFAHPSVLPDFDARAGLAGTQLVHFFAWDEATFLRVTEGSPIRRIGHARWLRNVAVALGNAWRETGNPALSAALQSRAADSDPVVAEHVAWALAQRA

SEQ ID NO: 76030 - protein, 350 aa, Comamonas terrigena
  misc_feature (1)..(350): tr|A0A2A7V0R6|A0A2A7V0R6_COMTR Epoxyqueuosine reductase OS=Comamonas terrigena OX=32013 GN=queG PE=3 SV=1
MQDWARELGFSQIGVAGVDLSSAEPGLLQWLAAGCHGEMHYMESHGLKRARPAELVPGTLSVITARMDYLPQTTPAGWQAVEFERLQRPQEGIVSVYARGRDYHKVLRARLQKLSDRIAQEIGPFGHRVFTDSAPVLEAELAQRSGQGWRGKHTLVLSREAGSMFFLGEILVDMALEPTEPVSGHCGSCSACMQACPTGAIVAPHQVDARRCISYLTIEHDGPIPLELRPQLANRIYGCDDCQLACPWNKFAQPSRLADFDARDGLAGSSLVQLFAWDEAQFLRRTEGSPIRRIGHARWQRNIAVAMGNALRSLPAGAERDAVQSALAAQAAHPSDLLREHVQWALAQCA

SEQ ID NO: 76031 - protein, 346 aa, Comamonas testosteroni
  misc_feature (1)..(346): tr|A0A0L7MDX8|A0A0L7MDX8_COMTE Epoxyqueuosine reductase OS=Comamonas testosteroni OX=285 GN=queG PE=3 SV=1
MQAWARELGFSQIGVAGVDLSSAEPGLLQWLAQGFHGEMHYMQAHGLKRARPAELVPGTVSVITARMDYLPRATEDGWQAVEWDRLKRPEEGIVSIYARGRDYHKVLRNRLQKLADRIAQEIGPFGHRAFTDSAPVLEAELASRSGQGWRGKHTLVLSREAGSMFFLGEIYVDFALEPTAAVTAHCGSCSSCIDACPTGAIIAPHKVDARRCISYLTIEHAGSIPEELRPLMANRIYGCDDCQLACPWNKFAHPSVLPDFDARAGLAGTQLVHFLAWDEATFLRLTEGSPIRRIGHARWLRNVAVALGNAWRETGRPELRAALQSRADHPDPVVAEHVAWALAQRA

SEQ ID NO: 76032 - protein, 350 aa, Comamonas testosteroni
  misc_feature (1)..(350): tr|A0A076PPT7|A0A076PPT7_COMTE Epoxyqueuosine reductase OS=Comamonas testosteroni TK102 OX=1392005 GN=queG PE= 3 SV=1
MVPLMQAWARELGFSQIGVAGVDLSSAEPGLLQWLAQGFHGEMHYMQAHGLKRARPAELVPGTVSVITARMDYLPRDTGDGWQTVEWDRLRRPEEGIVSLYARGRDYHKVLRNRLQKLAERIAQEMGPFGHRAFTDSAPVLEAELASRSGQGWRGKHTLVLSREAGSMFFLGEIYVDFALEPTAPVTAHCGSCSSCMDACPTGAIIAPHKVDARRCISYLTIEHAGSIPEELRPLMANRIYGCDDCQLACPWNKFAHPSVLPDFDARAGLAGTQLVHFFAWDEATFLRVTEGSPIRRIGHARWLRNVAVALGNAWRETGNPALSAALQSRAADSDPVVAEHVAWALAQRA

SEQ ID NO: 76033 - protein, 346 aa, Comamonas thiooxydans
  misc_feature (1)..(346): tr|A0A176TYB8|A0A176TYB8_9BURK Epoxyqueuosine reductase OS=Comamonas thiooxydans OX=363952 GN=queG PE=3 SV=1
MQAWARELGFSQIGVAGVDLSSAEPGLLQWLAQGFHGEMHYMQVHGLKRARPAELVPGTVSVITARMDYLPRETGDGWQAVEWDRLKRPEEGIVSIYARGRDYHKVLRNRLQKLAERIAQEIGPFGHRAFTDSAPVLEAELASRSGQGWRGKHTLVLSREAGSMFFLGEIYVDFALEPTVPVTAHCGSCSSCIDACPTGAIIAPHKVDARRCISYLTIEHAGSIPEELRPLMANRIYGCDDCQLACPWNKFAHPSVLPDFDARAGLAGTQLVHFLAWDEATFLRVTEGSPIRRIGHVRWLRNVAVALGNAWRETGRPELKAALQSRADHPDPVVAEHVAWALAQRA

SEQ ID NO: 76034 - protein, 346 aa, Comamonas thiooxydans
  misc_feature (1)..(346): tr|A0A0E3BIY6|A0A0E3BIY6_9BURK Epoxyqueuosine reductase OS=Comamonas thiooxydans OX=363952 GN=queG PE=3 SV=1
MQAWARELGFSQIGVAGVDLSSAEPGLLQWLAQGFHGEMHYMQAHGLKRARPAELVPGTVSVITARMDYLPRETGDGWQAVEWDRLKRPEEGIVSIYARGRDYHKVLRNRLQKLAERIAQEIGPFGHRAFTDSAPVLEAELASRSGQGWRGKHTLVLSREAGSMFFLGEIYVDFALEPTVPVTAHCGSCSSCIDACPTGAIIAPHKVDARRCISYLTIEHAGSIPEELRPLMANRIYGCDDCQLACPWNKFAHPSILPDFDARAGLAGTQLVHFLAWDEATFLRVTEGSPIRRIGHVRWLRNVAVALGNAWRETGRPELRAALQSRADHPDPVVAEHVAWALAQRA

SEQ ID NO: 76035 - protein, 351 aa, Commensalibacter intestini
  misc_feature (1)..(351): tr|A0A251ZX37|A0A251ZX37_9PROT Epoxyqueuosine reductase OS=Commensalibacter intestini OX=479936 GN=queG PE=3 S V=1
MLLESFTNLIRDKAFELGFDQFGICKAQLPPEKAKQLNEFLDHDHHGDMKWLQDRAHQRASPDHLWPEVKSAMILGVNYGPQTDPLYNLKHFETGNISVYARHRDYHDIIKGWLKHLAQYFIKEAKPFITPTDQVKVFVDTAPIMEKPLAQQAGLGWQGKHTNLVSRQYGSWLFLGEILTTVELPPSKFSKNHCGSCTQCLQACPTNAFPAPFQLDATRCISYLTIEYSGSIPLEFRKAIGNRIYGCDDCLAVCPWNHFAQHSRHLKLQSRKELNSPLLQDFALFTDETFRQFFSGSPVKRIGHLRFIRNVLIAIGNSQQISLLPHAQHWGNHDNPIIQETAQWAIQQLTS

SEQ ID NO: 76036 - protein, 351 aa, Commensalibacter intestini; identical to SEQ ID NO: 76035
  misc_feature (1)..(351): tr|G6F180|G6F180_9PROT Epoxyqueuosine reductase OS=Comm ensalibacter intestini A911 OX=1088868 GN=queG PE=3 SV= 1

SEQ ID NO: 76037 - protein, 352 aa, Commensalibacter sp.
  misc_feature (1)..(352): tr|A0A318N1J4|A0A318N1J4_9PROT tRNA epoxyqueuosine(34) reductase QueG OS=Commensalibacter sp. ESL0284 OX=20705 37 GN=queG PE=4 SV=1
MLPKNFSKLIQKKAIELGFDQCGICEASLPPEKAALLKEFVSLKRHGTMQWLEDRLYYRSSPHHLWPEVKTAIVLGVNYGPRENPLENLKHPEYANISVYARNRDYHDIIKGWLKHLAQFILKETKYYSNNEQVKVFVDTAPIMEKPLAQKAGLGWQGKHTNLVSRQFGSWLFLGEILTTLHIPPLPASKSHCGSCKKCLVSCPTQAFPEPFKLDAKRCISYLTIEYAGSIPIEFRKAMHNRIYGCDDCLAVCPWNSFASQSRHIKLQARTELVSPPLAKFLQFNEEDFRSFFTGSPVKRIGHLRFIRNILIAAGNSNIENLLPLIINWKNHDNAIIKETAQWAFDQFMISV

SEQ ID NO: 76038 - protein, 351 aa, Commensalibacter sp.
  misc_feature (1)..(351): tr|W7DYQ5|W7DYQ5_9PROT Iron-sulfur cluster-binding prot ein OS=Commensalibacter sp. MX01 OX=1208583 GN=COMX_052 90 PE=4 SV=1
MFPVSFTNLLQQKAFELGFDQFGICKAQLPQEKAQQLREFIDKERHGDMGWLKDRAYQRSSPDHLWPEVKSAIALGVNYGPDIDPLLNLQSPNIANISVYARHRDYHDMIKGWLKHLAQYIIKEAKPLLTPTDQIKVFVDTAPIMEKPLAQQAGLGWQGKHTNLVSRQFGSWLFLGEILTTLQLPETVTSKNHCGSCSQCLQACPTDAFPAPFQLDATRCISYLTIEYSGSIPLEYRKAIGNRIYGCDDCLAVCPWNHFAKNSRHIKLKARQELNHPLLQDFALFTEEEFRQFFAGSPVKRIGHLRFIRNILIAIGNSRQRSLLDSAQLWEHHDNPVIQETANWAIEQFKT

SEQ ID NO: 76039 - protein, 306 aa, Confluentibacter sp.
  misc_feature (1)..(306): tr|A0A2N3HHG1|A0A2N3HHG1_9FLAO Epoxyqueuosine reductase OS=Confluentibacter sp. 3B OX=1909700 GN=queG PE=3 SV= 1
MNVKTKHTQFIKTEAKRLGFLSCGISKAGFLEEEAPRLEKWLNKNMHGQMQYMENHFDKRLDPTKLVEDSKSVISLLLNYYPSQEQTANSYKLSKYAYGTDYHFVIKDKLKSLLNFIQEEIGDVHGRAFVDSAPVLDKAWAAKSGLGWIGKHSNLLSQQVGSFYFIAELIVDLELEYDLPTTDHCGTCTACIDACPTQAITEPYVVNGSKCISYFTIELKEHIPTEFKGKMDDWMFGCDVCQDVCPWNRFSKPHNEPLFNPHPELLSMTKKDWEDITEDVFNKVFKDSAVKRTKFSGLKRNIEFLK

SEQ ID NO: 76040 - protein, 348 aa, Confluentimicrobium lipolyticum
  misc_feature (1)..(348): tr|A0A238KVW2|A0A238KVW2_9RHOB Epoxyqueuosine reductase OS=Confluentimicrobium lipolyticum OX=1524263 GN=queG PE=3 SV=1
MSGALKQNLTTYALEAGFAKVGICRPDAVPEIAARLDAFLADGRHGQMAWMEERKHWRGNPAALWPEARSVIMLAEPYTPAHDPLAVLEQRDHAAISVYAQNRDYHDVVKKRLKRVGRWLLEQVPGEQIKVFVDTAPVMEKPLAQAAGLGWQGKHTNLLSRDLGSWFFLGAIFTTIELEPNTAEYEHCGSCTACLDICPTKAFPAPFQLDARRCISYLTIEHHGPVAEELRPMLGNRIYGCDDCLAACPWNKFAATAQEVKYAARPDLIAPRLADLAVLDDSAFRALFSGSPIKRIGRNRFVRNVLYAIGNSNDETLRPVAQQLAEDPDETVADAARWAVGRLDRVSS

SEQ ID NO: 76041 - protein, 343 aa, Confluentimicrobium sp.
  misc_feature (1)..(343): tr|A0A2E3UGB1|A0A2E3UGB1_9RHOB Epoxyqueuosine reductase OS=Confluentimicrobium sp. OX=1931204 GN=queG PE=3 SV= 1
MSQTLRQRLSDFALQEGFAKTGICTPDAIPQAAARLEAFVGAGRHGQMAWMEERRGWRGDPAALWPAARSVVMLAELYTPGHDPLAVLRQPDRGAISVYAQNRDYHDVVKKRLKRVGRWLLEQEPGAQIKVFVDTAPVMEKPLAQAAGLGWQGKHTNLLSRDLGSWFFLGAIFTTVELEPDAPENEHCGSCTACLDICPTAAFPAPFELDARRCISYLTIEHHGPVDPALRPLMGNRIYGCDDCLAVCPWNKFAAAAHEAKYRAREDLIAPELAELATLDDAAFRALFSGSPIKRIGRDRFVRNVLYAIGNSGDARLRDVAARLTGDPDPAVADAARWAVARL

SEQ ID NO: 76042 - protein, 343 aa, Confluentimicrobium sp.
  misc_feature (1)..(343): tr|A0A0N9NS24|A0A0N9NS24_9RHOB Epoxyqueuosine reductase OS=Confluentimicrobium sp. EMB200-NS6 OX=1609966 GN=qu eG PE=3 SV=1
MSQTLRQRLSDFALQEGFAKTGICTPDAIPQAAARLEAFVGAGRHGQMAWMEERRGWRGDPAALWPAARSVVMLAELYTPGHDPLAVLRQPDRGAISVYAQNRDYHDVVKKRLKRVGRWLLEQKPGAQIKVFVDTAPVMEKPLAQAAGLGWQGKHTNLLSRDLGSWFFLGAIFTTVELEPDTPENEHCGSCTACLDICPTAAFPAPFELDARRCISYLTIEHHGPVDPALRPLMGNRIYGCDDCLAVCPWNKFAAAAHEVKYRAREDLIAPKLAELATLDDAAFRALFSGSPIKRIGRDRFVRNVLYAIGNSGDARLRDVAARLTGDPDPAVADAAQWAVARL

SEQ ID NO: 76043 - protein, 358 aa, Congregibacter litoralis
  misc_feature (1)..(358): tr|A4A6L1|A4A6L1_9GAMM Epoxyqueuosine reductase OS=Cong regibacter litoralis KT71 OX=314285 GN=queG PE=3 SV=1
MTENVLASDGGALVEEIRAWARDLGFAQLGISDIDLGEHEAYLQRWLAAGYQGEMQWMGDHGTKRSRPEELVPGTCRVLTLRMNYLGDGADPMTVLENPHKAYIARYTLGRDYHKLVRKRLAQLAKRIEQRLGQGHYRAFVDSAPVLERALAERAGLGWIAKNTMLINQDAGSWFFLGEIYTDLPLPVDPPQESKHCGSCQACLDICPTKAFAGPFELDARRCISYLTIEHKGSIDPELRPLMGNRIFGCDDCQLVCPWNKFARSSQEKDFQPRHGLDDSELMTLFSWDEDTWAARTEGSALRRIGYERWLRNLAIALGNAPGSPALVEALQRRASHPSELVREHVHWALSRHGALPS

SEQ ID NO: 76044 - protein, 377 aa, Consotaella salsifontis
  misc_feature (1)..(377): tr|A0A1T4QWQ8|A0A1T4QWQ8_9RHIZ Epoxyqueuosine reductase OS=Consotaella salsifontis OX=1365950 GN=queG PE=3 SV= 1
MNDTRESLRRFLFDDARRLGFDAVGVSSAEDDGVAGSRLAAFLAEERHGTMAWMAETAERRASPKALFPQAKTVIVLGLNYGPEEDPRGLQAHPERGAISVYARNRDYHELIKGRLKELASRLLSRAGGDHDVKVFVDTAPVMEKPAASRAGLGWQGKHTNLVSREFGSWLFLGAIFTTLDLCPDTPSRDLCGSCRACLDACPTKAFPAPYQIDARRCISYLTIETKATVPAELRPAMGNRIYGCDDCLAACPWNKFAQRSREAKLQARDDLKAPALADLLALDEPGFRALFSGSPVKRIGRAKFVSNCLIAAGNSGRAELAEPCRRLMRDDAPLVRAMAVWALHRLVPAEALEQRAAALDVEEDPDVRREWNALDG

SEQ ID NO: 76045 - protein, 313 aa, Coprobacter fastidiosus
  misc_feature (1)..(313): tr|A0A354M242|A0A354M242_9BACT tRNA epoxyqueuosine(34) reductase QueG OS=Coprobacter fastidiosus OX=1099853 GN =queG PE=4 SV=1
MNGFSLKNKIFERAFALGFSACGITPVKEVDATHRLHFDKWLQKGKEAQMQYMRNYKDKRFDPRLLVENARSVLVVALNYYPSIHIPENHPQFALYSYGQDYHIVLKEKLNELFSYINTLISIEGRIFCDTAPIMERYWAQQAGIGFIGKNTQLIIPGKGSFFFLGEIISSLELPWDTPMQNRCGHCNSCIEHCPTQALIPGDFTTLDSNRCISYQTIENRSDIPFEIGSKMNNRVYGCDTCQKVCPWNRFSIPTTIPEFEPSSEFLSLDQEKLEHLTHEDYNRIFKKSAVKRVKYERLLRNINILRKNKSES

SEQ ID NO: 76046 - protein, 313 aa, Coprobacter fastidiosus
  misc_feature (1)..(313): tr|A0A495WBK4|A0A495WBK4_9BACT Epoxyqueuosine reductase OS=Coprobacter fastidiosus NSB1 OX=1349822 GN=BC742_11 85 PE=4 SV=1
MNEFSLKNKIFERAFALGFSACGITPVKEVDADCRLHFDKWLQKGKEARMQYMRNYKDKRFDPRLLVENARSVLVVALNYYPSIHIPENHPQFALYSYGQDYHIVLKEKLNELFSYINTLIPIEGRIFCDTAPVMERYWAQQAGIGFIGKNTQLIIPGKGSFFFLGEIISSLELPWDTPMQNRCGHCNSCIEHCPTQALIPGDFTTLDSNRCISYQTIENRSDIPFEIGSKMNNRVYGCDTCQKVCPWNRFSIPTTIPEFEPSSEFLSLDQEKLEHLTHEDYNRIFKKSAVKRVKYEGLLRNINILRKNKSES

SEQ ID NO: 76047 - protein, 303 aa, Coprobacter secundus
  misc_feature (1)..(303): tr|A0A0B2JAX2|A0A0B2JAX2_9BACT Uncharacterized protein OS=Coprobacter secundus OX=1501392 GN=PU94_11675 PE=4 S V=1
MIKSKAKEIGFAACGIAKAAPVNESVRRHLECWLGEGCQDGMSYMSNHFEKRCDPRLLLEGAQSVISVALNYYPKIRQPDSLPQFAFYAYGVDYHKVVKERLFLLSDFIKTLYPDSHFRCFCDTAPLLEKYWAWKAGIGFIGKNTQLIIPGRGSYFFLGEIVTTALLPFDNPLNNSCGRCRRCIDNCPTAALSQTAIPGLDARKCLSCQTIENRGEISPDIASKMHNRVYGCDTCQQVCPWNRMAKPSQIPDFVPTEELLGLTYERLSSLSREEYNRIFKYSAVKRVKYEGLMRNIRILLSKK

SEQ ID NO: 76048 - protein, 313 aa, Coprobacter sp.
  misc_feature (1)..(313): tr|A0A316SSA7|A0A316SSA7_9BACT tRNA epoxyqueuosine(34) reductase QueG OS=Coprobacter sp. OX=1941478 GN=queG PE =4 SV=1
MNIVSIHSDMAEAIRREALRIGFHACGFASAEHVEDNVCHGFKAWLESGYHSRMGYMGNYYDIRCDPSLLHKPVRTIISVALNYFPSERQALNVPQFAVYTYGRDYHEVVKSKLNDLSRYIEAEWSGDNRICCDTAPILERYWAMKAGIGFIGKNTQLIIPGAGSFFFLGEILTSLVLKPSPPLSGGCGHCTRCMDSCPAKALVKPRVLDANRCISYQTIENRGEIPDEIAECLGNRIYGCDTCQDVCPHNRFAKPTEVDEFRPCKDFLQLDAGRLDTLTQEEYNRIFRHSAVKRAKYQGLLRNYKAWKKHNK

SEQ ID NO: 76049 - protein, 342 aa, Coraliomargarita akajimensis
  misc_feature (1)..(342): tr|D5EIV4|D5EIV4_CORAD Uncharacterized protein OS=Coral iomargarita akajimensis (strain DSM 45221 / IAM 15411 / JCM 23193 / KCTC 12865 / 04OKA010-24) OX=583355 GN=Cak a_1333 PE=4 SV=1
MTADGVQIRTHLEEAAKALGFHGFGVARLPVELHADYFREWLATGQHGSMGWMERNPERRLDPNEVLPGVRSMIVLSMNYYQPDPPRGYRIAKYALGDDYHNLMLKRVKKLCRILRDEYGGVQRPYVDTGPLLEKPIGVAAGLGWQGKSTILIEPKRGTWSFLANILTTLELPADDPVKDRCGTCTRCLDSCPTQAITAPYQLDARRCISYLTIEHDGAIPVEFREAIGDRLYGCDECLDVCPWNKWAVPTQEAKFAVRELPDLRELLSWDEATFTARMQGSPMRRLKLHRLQRNICVVLGNCGDQDDLPALEQLSDTGDALLAEHARWAIERIRIRVKSLA

SEQ ID NO: 76050 - protein, 340 aa, Coraliomargarita sp.
  misc_feature (1)..(340): tr|A0A2E0NE41|A0A2E0NE41_9BACT tRNA epoxyqueuosine(34) reductase QueG OS=Coraliomargarita sp. OX=2024828 GN=qu eG PE=4 SV=1
MKNRTSEIRHRIEVEAKNLGFHSFGVTSVPVNLREDYYRDWIAKGKNGSMTWMERNNDRRLHPERLIPEARSILVLAMNYYQPDPDRNYRIAKYALGDDYHNLIFKRLKKLCRILREEFGSMQRPYVDTGPILEKPIAAAAGLGWQGKSTILVEPKRGTWSFLANIVTTLELTPDKASKDRCGSCTRCVDICPTRAITAPYQLDAQRCISYLTIEHDGPIPIEFRAAIGDRLYGCDECLDVCPWNRWAVPHEEAKFAAREFPILRDMLHWSEQIFTEQMQGSPMRRLKINRFKRNICVVLGNVGDAFDLPALQLVAEGSDSLLAEHAQWAINAITLRKKD

SEQ ID NO: 76051 - protein, 340 aa, Coraliomargarita sp.
  misc_feature (1)..(340): tr|A0A317ZL88|A0A317ZL88_9BACT tRNA epoxyqueuosine(34) reductase QueG OS=Coraliomargarita sp. WN38 OX=2174842 GN=queG PE=4 SV=1
MAIETQKNVDRLKSLAEELGFHQFGVTAVPLKLRSEYYEKWIDEGQHGTMSWMERNNDRRLHPESLIEEARSIIVVAMNYYQPDPERGYRIAKYALGDDYHNLIFKRLKKLCRYMRDEFGSVQRPYVDTGPLLEKPIAEAAGIGWQGKSTILVEPGRGTWSFLGNIVSSLDLPASDPGKDRCGSCTRCIDICPTRAITAPYQLDARKCISYLTIEHDGPIPLEYREAIADRLFGCDECLDVCPWNKWAVPTNEAKFSPRQLPKLREMLFWDDETFRENFRGSPMRRLKLHRFRRNICVVLGNVGEADDVTALQSVAAGSDEMVKEHAEWAIGRIQSRCGS

SEQ ID NO: 76052 - protein, 382 aa, Corallincola sp.
  misc_feature (1)..(382): tr|A0A368NPB3|A0A368NPB3_9GAMM Epoxyqueuosine reductase OS=Corallincola sp. C4 OX=2282215 GN=queG PE=3 SV=1
MSIKTSPDLIQLTEDIKRWGQELGFQQVGISDLDLRDQKQGMELWLANGYHGEMQYMTAHGDMRYHPEQLHPGALRAITVRMDYLPENAQFAANLSDPNQAYISRYALGRDYHKLIRNRLKKLAQRIAEQIDGVNARPFVDSAPILERPLAAKAGLGWIGKHSLLLDEQAGSWFFLGELLINLPLPVDTASDTAPGCGNCKACITICPTQAIVEPYVVDARRCISYLTIEHPGIIDEALRPLMGNRIYGCDDCQLICPWNRYAQLTQEGDFSPRQQLHPQKLLDLFAWDEATFLKNTEGSPIRRIGHQRWLRNIAIALGNAPYNEAIVTALTNVIQAEPSEMVGEHVGWAIQQQRSKSADYELRRQTQRLINSVERALPRDA

SEQ ID NO: 76053 - protein, 331 aa, Corallococcus coralloides
  misc_feature (1)..(331): tr|A0A410S0S6|A0A410S0S6_CORCK Putative iron-sulfur clu ster binding protein OS=Corallococcus coralloides OX=18 4914 GN=yjeS PE=4 SV=1
MRQLAQDVGFDLIGFARAEPIPPSSLMSWLEAGYDADMDWMGSRAEERLDVSVLLPGARTVLSLANNYWRDDEPSQGSPIARYARGRDYHSTLRDRMKAFRKTINAWYPGLGTYGGVDSGPMMEKVWAARGGLGYVGKNGCLITESHGSWVLLATLILDAEVDAYPDGPVADRCGSCRRCLMACPTGALVGNRQVDARACLSYQTIENRDRDVPEAFRLKFDNLIFGCDICQQVCPLNRKPVFADDERFMPRAVASLGTLELAALTPEQYKELIPGTALARARYDGLRRNAVYALGVARQAHARPLLEKLSGDDSELVRSAARWALLQLEP

SEQ ID NO: 76054 - protein, 341 aa, Corallococcus coralloides
  misc_feature (1)..(341): tr|H8MT39|H8MT39_CORCM Putative iron-sulfur cluster bin ding protein OS=Corallococcus coralloides (strain ATCC 25202 / DSM 2259 / NBRC 100086 / M2) OX=1144275 GN=yjeS PE=4 SV=1
MYATQLPTARLRQLAQDVGFDLIGFARAEPIPPSSLMSWLEAGYDADMDWMGSRAEERLDVSVLLPGARTVLSFANNYWRDDEPSQGSPIARYARGRDYHSTLRDRMKAFRKTINAWYPGLGTYGGVDSGPMMEKVWAARGGLGYVGKNGCLITESHGSWVLLATLILDAEVDAYPDGPVADRCGSCRRCLMACPTGALVGNRQVDARACLSYQTIENRDRDVPEAFRLKFDNLIFGCDICQQVCPLNRKPVFADDERFMPRAVASLGTLELAALTPEQYKELIPGTALARARYDGLRRNAVYALGVARQAHARPLLEKLSGDDSELVRSAARWALLQLEP

SEQ ID NO: 76055 - protein, 341 aa, Corallococcus exiguus
  misc_feature (1)..(341): tr|A0A5C5DVB7|A0A5C5DVB7_9DELT tRNA epoxyqueuosine(34) reductase QueG OS=Corallococcus exiguus OX=83462 GN=que G PE=4 SV=1
MYATQLPTARLRQLAQDVGFDLIGFARAEPIPPSSLMSWLEAGYDADMDWMGSRAEERLDVSVLLPGARTVLSFANNYWRDDEPSQGSPIARYARGRDYHSTLRDRMKAFRKTINAWYPGLGTYGGVDSGPMMEKVWAARGGLGYVGKNGCLITESHGSWVLLATLILDAEVDAYPDGPVADRCGSCRRCLMACPTGALVGNRQVDARACLSYQTIENRDRDVPEAFRLKFDNLIFGCDICQQVCPLNRKPVFAEDERFVPRAVASLGTLELAGLTPEQYKELIPGTALARARYDGLRRNAVYALGVARQVHARPLLEKLSGDDSELVRSAARWALLQLEP

SEQ ID NO: 76056 - protein, 336 aa, Corallococcus sp.
  misc_feature (1)..(336): tr|A0A3A8GBF5|A0A3A8GBF5_9DELT tRNA epoxyqueuosine(34) reductase QueG OS=Corallococcus sp. AB011P OX=2316735 G N=queG PE=4 SV=1
MPTARLRQLAQDVGFDLIGFARAEPIPPSSLMSWLEAGYDADMDWMGSRAEERLDVSVLLPGARTVLSFANNYWRDDEPSQGSPIARYARGRDYHSTLRDRMKAFRKTINAWYPGLGTYGGVDSGPMMEKVWAARGGLGYVGKNGCLITESHGSWVLLATLILDAEVDAYPDGPVADRCGSCRRCLMACPTGALVGNRQVDARACLSYQTIENRDRDVPEAFRLKFDNLIFGCDICQQVCPLNRKPVFADDERFMPRAVASLGTLELAALTPEQYKELIPGTALARARYDGLRRNAVYALGVARQAHARPLLEKLSGDDSELVRSAARWALLQLEP

SEQ ID NO: 76057 - protein, 341 aa, Corallococcus sp.
  misc_feature (1)..(341): tr|A0A554GLJ6|A0A554GLJ6_9DELT tRNA epoxyqueuosine(34) reductase QueG OS=Corallococcus sp. Z5C101001 OX=259682 9 GN=queG PE=4 SV=1
MFSTQLPTARLRELAQQVGFDLIGFARAEPIPPSSLLSWLEAGYDADMDWMGSRAEERLDVSVLLPGARTVLSFANNYWRDDAPSQGSPIARYARGRDYHSTLRDRMKAFRKTLNAWYPGLGSYGGVDSGPMMEKVWAARGGLGYVGKNGCLITPTHGSWVLLATLILDAEVDAYAEGPVADRCGSCRRCLMACPTGALVGHRQVDARACLSYQTIENREREVPEAFRWKFDNLIFGCDICQQVCPLNRKPVFAEDARFTPRAVASLGTLELAALTPEQYQELIPGTALARARYDGLRRNAVYALGVARQAHARPLLEKLSDDGSELVRSAARWALLQMES

SEQ ID NO: 76058 - protein, 374 aa, Coriobacteriia bacterium
  misc_feature (1)..(374): tr|A0A357ZCG0|A0A357ZCG0_9ACTN PBS lyase OS=Coriobacter iia bacterium OX=2052159 GN=DEB24_02130 PE=4 SV=1
MGTLQSLEERIRTYALEIGYSAAGFAPADDFDEYIDIINDAGARYDWWKNGAREPMAWARPAQKLAGTKSLIVLIYNSAQVRFPAELCEKLGRIYQARCYFAQPGNINHARLELMRGFLADLGMQSTDAPWLPQRWAAQRSGLASFGKNTFAYASGLGSFIVITTLLVDRELNYDEPCAVSTCPEDCTLCIDACPTKALGAPFELDPRRCIAFNNWMPQVSVIPREMRPLLGQRIHGCDYCQEACPRNKQVLENNEKRPKDSLLELLVKEIEFDRLLHLSAEYYEQWVRPVMYNYITNLRLFQRNAAVAIGNSHDVRYLPDLARELSSESELVRAHVAWALGEIAGEEARHLLQARLVVEEDESVRQEIVAALA

SEQ ID NO: 76059 - protein, 378 aa, Corticibacter populi
  misc_feature (1)..(378): tr|A0A3M6R106|A0A3M6R106_9BURK Epoxyqueuosine reductase OS=Corticibacter populi OX=1550736 GN=queG PE=3 SV=1
MGQWARELGFSQIGVAGIDLSDAEAGLMAWLEKGFHGEMEYMQRHGLKRARPAELVPGTLSIVTARMDYLPPGTPTDWQGTELAQLGVPERAVVSMYARGRDYHKVLRTRLQRLAERIQAAVGPLGHRVFTDSAPVLEAELARRSGLGWRGKHTLLLSREGGSMFFLGEIFLDMALPPTEPTSSHCGGCRACIAACPTGAIVASGRVDARLCISYLTIEHPGSIPLALRPLMGNRIYGCDDCQLVCPWNKFAQPSTVADFAARPALQSPALLELLGWSEADFLQRTEGSPMRRIGYLRWQRNLAVASGNALHGGHLSAALAAQVRAMLERWRAAPHTPELVREHVDWALASQVAHGLAFTAPGSAPRSPAGAAAPPAS

SEQ ID NO: 76060 - protein, 167 aa, Corynebacterium pseudodiphtheriticum
  misc_feature (1)..(167): tr|A0A3S0X520|A0A3S0X520_9CORY tRNA epoxyqueuosine(34) reductase QueG (Fragment) OS=Corynebacterium pseudodiph theriticum OX=37637 GN=queG PE=4 SV=1
HCGRCTACLDICPTNAFVGPYVLDARRCISYLTIELKSAIPEDLRPLIGNRVFGCDDCQIVCPWNRFARPTAEGDFKPRHNLDNAELAELFMWDEDKFLSSTEGSPLRRAGYERWLRNLAVGLGNAPSSIPVLEALKARRDYPSELVREHVEWALNQHAGRQCTSSL

SEQ ID NO: 76061 - protein, 384 aa, Cosenzaea myxofaciens
  misc_feature (1)..(384): tr|A0A198FRI1|A0A198FRI1_9GAMM Epoxyqueuosine reductase OS=Cosenzaea myxofaciens ATCC 19692 OX=1354337 GN=queG PE=3 SV=1
MPSLDLNALAENIKLWGTELGFQQTGICDTDLSIEEPRLQEWLDKQYHGEMAWMAKYGMMRARPHELVPGTLRVISVRMNYLPTEAAFARTLNNPEQGYISRYALGRDYHKVLKQRLKKLGEKITQYCQQYEYQGVVNFRPFVDSAPIMERPLAVKAGLGWVGKHSLVINDKSGSWFFLGELLINLPLPIDAPVEEQCGKCVACMTTCPTAAIVEPYTIDARRCISYLTIEHSGAIPEQFRPLMGNRIYGCDDCQLICPWNRFSPLTEEDDFSPRRELHTPELYTLFQWSEEKFLRTTEGSPIRRIGYLRWLRNISVALGNAPYQDKIVLALQERFGLSDVLDEHLQWAIAQQLAKRNEKEVKIQTSQQKRLVRAITKGLPRDA

SEQ ID NO: 76062 - protein, 350 aa, Coxiella sp.
  misc_feature (1)..(350): tr|A0A2G1ZYU3|A0A2G1ZYU3_9COXI Epoxyqueuosine reductase OS=Coxiella sp. (in: Bacteria) OX=59288 GN=queG PE=3 S V=1
MMNFELKDKIKSWGEALGFQDILISDPNLDSINQRFQESISKNHHADMEYLIKNSLLRTNPSKMVEDTKSIIIARMDYLPPNPKIIETLRDKNKAYIARYALGRDYHRLIRKRLKKLAQQIEAVHGPFNWRPFADSAPVFEKPLAAKAGIGWQGKNTLIINRKAGSYFFLGVLYTSLELPFDPPVVDHCGSCTACLDICPTQAFPAPYQLDSRRCISYWTIENKGSIPVEIREKMGNRVFGCDDCQLICPWNKFAKAATEQAFLPRHQLDTSTLIDLFSWDESTYMKRTEGSALRRTGYQSWLRNLAVGLGNAPPSDEKRHALLAQKTQASELVKEHIDWALNTTFVSSR

SEQ ID NO: 76063 - protein, 320 aa, Coxiella sp.
  misc_feature (1)..(320): tr|A0A0S7XYV9|A0A0S7XYV9_9COXI 4Fe-4S ferredoxin-type d omain-containing protein OS=Coxiella sp. DG_40 OX=17033 54 GN=AMJ43_03275 PE=4 SV=1
MNNEICDFNCLADDIKSWGTQLGFTLIGITDIVWAIRESPQWDLPPYPFDAKAVICCAINYLPNDKSRYISRYALGRDYHKVIRKRLRKLVRKINDKIGNFNYRCHVDSNRIPEKHLAARAGLGWQGKNSLIINRHYGSWMFLGEIVTDLPLPIDEPYANHCGKCTACMNACPTQAIVSPGQIDVKRCISYLTIEHRGSIPEDLRHLIGTHIYGCDECQLVCPWNRFAKLTIEQDFQPRHNLNYADLIELFSWSEQDFLRNTEGSAIRRIGYECWLRNIAVALGNMQKDSKIIEALKIRENHSSVLVREHVRWALQKGTL

SEQ ID NO: 76064 - protein, 314 aa, Coxiellaceae bacterium
  misc_feature (1)..(314): tr|A0A359LEY3|A0A359LEY3_9COXI tRNA epoxyqueuosine(34) reductase QueG (Fragment) OS=Coxiellaceae bacterium OX= 2026727 GN=queG PE=4 SV=1
TDITQEVVHLKTWVKSGRHGNMSYFEKHSEIYECPQKLLPTTTRVICCRINYPLSQSSSHPIASFAQIQDYSSHIRQLLKIYVAKILEKIRLPQETRVFSGNAPILEKALAAKAGLGWYGKNSILINQDSGSYFFLGEIFTNMPLPLDKPVEDRCGSCFKCGDSCPTKAIITPHKLDARCCVAYLTIEHKGSIPIELRPLIGTKVFGCDICQQACPWNNCRKNQTPPNTTFVLSNHLGSDNLVDWFLWSEQEFLDKTKNTPIKRIGYERWLRNLAVALGNSEPNKEISEALQSRLNHPSALVREHVEWALASTQ

SEQ ID NO: 76065 - protein, 346 aa, Coxiellaceae bacterium
  misc_feature (1)..(346): tr|A0A357MS34|A0A357MS34_9COXI tRNA epoxyqueuosine(34) reductase QueG OS=Coxiellaceae bacterium OX=2026727 GN= queG PE=4 SV=1
MNSNYKYDFKQLALEIKQLGKELGFDQIGITDTDITQEVVHLKTWVKSGRHGNMSYFEKHSEIYECPQKLLPTTTRVICCRINYPLSQSSSHPIASFAQIQDYSSHIRQLLKIYVAKILEKIRLPQETRVFSGNAPILEKALAAKAGLGWYGKNSILINQDSGSYFFLGEIFTNMPLPLDKPVEDRCGSCFKCGDSCPTKAIITPHKLDARCCVAYLTIEHKGSIPIELRPLIGTKVFGCDICQQACPWNNCRKNQTPPNTTFVLSNHLGSDNLVDWFLWSEQEFLDKTKNTPIKRIGYERWLRNLAVALGNSEPNKEISEALQSRLNHPSALVREHVEWALASTQ

SEQ ID NO: 76066 - protein, 300 aa, Crassaminicella sp.
  misc_feature (1)..(300): tr|A0A5C0SGX3|A0A5C0SGX3_9CLOT tRNA epoxyqueuosine(34) reductase QueG OS=Crassaminicella sp. SY095 OX=2599308 GN=queG PE=4 SV=1
MNVKECLKGFCKKLNIERVGIAPIGPYKELEKILKDRIDKGYITGMEEEDIKKRINPKETMPDVASIIVCLFPYFTGYFDSNISKYTYSIDYHRIIKEKLDKIGEFLKERIENFSYKAFVDTGPLVDRYLAYLAGLGYFGINNNLINDKYGSYVFIGYILNNYKFEVDKPLNKTCKKCGECIKKCPGGAILGDFQMNPRRCLSFITQKKEELTQEERDILKKNKMVFGCDICQDVCPHNQNIEHTNMEEFRKNLIYILDEKEVLDMSNKAFKRKYGDRAFSWRGRKIILRNFEVLREIKN

SEQ ID NO: 76067 - protein, 360 aa, Crenobacter cavernae
  misc_feature (1)..(360): tr|A0A345Y388|A0A345Y388_9NEIS Epoxyqueuosine reductase OS=Crenobacter cavernae OX=2290923 GN=queG PE=3 SV=1
MQEAIENPPNYRELAEQIKAWARELGFADARIGPATLPDGVEPRLEAWLAEGCHGEMAYMEQHGLKRARPYELVPGTLSVISVRMNYWPGAARDAEAVLGDGNAAYLSRYALGRDYHKVLRNRLQALAERVEAAIGGYGYRVFTDSAPVMEVEAAQQAGLGWRGKHTLLINREQGSLFFLGELFTDLPLPADAPTEEGHCGRCKRCLDVCPTGAIVAPYKVDARRCISYLTIELKGAIPEELRPLIGNRVYGCDDCQLVCPWNRFAIDSAEADFAVRHGLDDVSLVELFAWSEEEFKQKMAGSPIYRIGYEKWLSNLAIGLGNAPTSDAVIAALKTRLDSPSMPVSEHVRWALGRHGVVV

SEQ ID NO: 76068 - protein, 360 aa, Crenobacter cavernae
  misc_feature (1)..(360): tr|A0A4Q2JBF3|A0A4Q2JBF3_9NEIS Epoxyqueuosine reductase OS=Crenobacter cavernae OX=2290923 GN=queG PE=3 SV=1
MQEAIENPPNYRELAAQIKAWARELGFADARIGPATLPDGVEPRLEAWLAEGCHGEMAYMEQHGLKRARPYELVPGTLSVISVRMNYWPGAAKSAEAVLGDGNAAYLSRYALGRDYHKVLRNRLQTLAERVGTAIGGYGYRVFTDSAPVMEVEAAEQAGLGWRGKHTLLINREQGSLFFLGELFTDLPLPADPPTEEGHCGRCKRCLDVCPTGAIVAPYKVDARRCISYLTIELKGAIPEELRPLIGNRVYGCDDCQLVCPWNRFAIDSAEADFAVRHGLDDVSLVELFAWSEEEFKQKMAGSPIYRIGYEKWLSNLAVGLGNAPTSDAVIAALKTRLDSPSMPVSEHVRWALGRHGVVV

SEQ ID NO: 76069 - protein, 362 aa, Crenobacter luteus
  misc_feature (1)..(362): tr|A0A165F5R7|A0A165F5R7_9NEIS Epoxyqueuosine reductase OS=Crenobacter luteus OX=1452487 GN=queG PE=3 SV=1
MTMQESMENPANYRELAAQIKAWALELGFADARIGPATLPEGVEARLAAWLAEGRHGEMAYMAQHGMKRARPYELVPGTLSVVSVRMNYWPGGAKRAEDVLADGSAAYLSRYALGRDYHKVLRNRLQKLAERVGAAVGAYGHRVFTDSAPVMEVEAAQQAGLGWRGKHTLLLTKNQGSLFFLGELFTDLPLPADEPTDNGHCGRCTQCLSACPTGAIVAPYEVDARRCISYLTIELKGAIPEALRPLIGNRVYGCDDCQLVCPWNRFAVDTAEADFSVRHGLDDVSLVELFGWSEADFKERLAGSPIYRIGYEKWLSNLAVGLGNAPGSDAVVAALRARLDHPSPPVAETVRWALGRHGVVV

SEQ ID NO: 76070 - protein, 359 aa, Crenobacter sp.
  misc_feature (1)..(359): tr|A0A4T0UL27|A0A4T0UL27_9NEIS Epoxyqueuosine reductase OS=Crenobacter sp. GY 70310 OX=2563443 GN=queG PE=3 SV =1
MIECGLQNVDYPELARQIKAWALEAGFAGARISRASLPDEARAALEAWLADGCHGQMDYMARHGTLRLDPAGLVPGALSVVSLRMDYWPDARDAHAVLADGEAAYVSRYALGRDYHKVLRKRLQALASRIEGEVGAYGYRVFTDSAPLAEVSFAAQAGLGWRGKHTLLLNRDAGSLFFLGEIVTDLPLPEDAAEEGHCGRCTRCIDACPTGAIVAPYRVDARLCISYLTIELPGAIPEALRPRLGNRVYGCDDCQLSCPWNRFARLSGEGDFAVRHGLDAASLAELFAWSEADFRERTAGSPIWRIGYQRWLRNLAVGLGNAPATPAVLAALAARRNDASALVREHVEWALARHGADAR

SEQ ID NO: 76071 - protein, 315 aa, Crenotalea thermophila
  misc_feature (1)..(315): tr|A0A1I7NLA9|A0A1I7NLA9_9BACT Epoxyqueuosine reductase OS=Crenotalea thermophila OX=1393122 GN=queG PE=3 SV=1
MNPVAARHTALVKQLSRKLGFDYCGIARAATLDEDARRLEKWLNKGYHGTMVYMERYFDLRIDPRKLVPGAQSVITLLMNYFPARKQRADSYRISKYAYGRDYHRVIKKKLKQLLKSLQEQIGKIQGRGFVDSAPVLERAWAVRSGLGWVGKNGNLITRQQGSFLFIATLITDLELVYDDPFAKDYCGTCTRCIDACPTQAILPDKIIDASRCISYYTIELKAHIYPQEAEGKWKDWIFGCDICQDVCPWNRFSRVSQEADLEPVPEILDFSTQEWEQLTEEKFVELFGHTPLKRAGWEGLQRNIRLIKKNQTNF

SEQ ID NO: 76072 - protein, 357 aa, Crenothrix polyspora
  misc_feature (1)..(357): tr|A0A1R4H7F9|A0A1R4H7F9_9GAMM Epoxyqueuosine reductase OS=Crenothrix polyspora OX=360316 GN=yjeS PE=3 SV=1
MELIDSNNNLAEQIKQWGLALGFQQVGITDTHLAEAEQHLQRWLAKDYHGEMAYMHQHGLKRSRPALLHEGTVSVICVRMDYLPEATAAMDNVLADPTAAYISRYALGRDYHKILRKRLQKLADKIQAEIGDFGYRAFVDSAPVLEKALAEKAGLGWIGKHSNLINRKAGSWFFLGEIYTDLPLTIDVPATVHCGGCVACLDICPTQAIVAPFQVDARRCVSYLTIELHGSIPVGLRPLIGNRIYGCDDCQLACPWNRFAKLTSEGDFSPRHRLNTQQLVDVFAWTEDEFLTKTEGSAIRRIGYERWLRNIAVALGNAPTSESVINALKLRLDYDSEMVQEHLQWALEQHHENPLKK

SEQ ID NO: 76073 - protein, 353 aa, Crenothrix polyspora
  misc_feature (1)..(353): tr|A0A1R4H1D4|A0A1R4H1D4_9GAMM Epoxyqueuosine reductase OS=Crenothrix polyspora OX=360316 GN=yjeS PE=3 SV=1
MELTDSNNLAKQIKHWGLELGFQQVGITDTNLSDAEQHLQHWLAQDYHGELDYMHRHGLKRSRPALLHEGTISVISVRMDYLPESATAMANTLADATVAYISRYALGRDYHKILRKRLQKLADKIQAEIGNFGYRAFVDSAPVLEKALAEKAGLGWIGKHSNVINRKAGSWFFLGEIYTDLPLPTDTPATTHCGACVACLDICPTQAIVAPYQVDARRCVSYLTIELHGAIPVEFRPLIGNRIYGCDDCQLVCPWNRFAKLTHEGDFNPRHSLNTQQLLDVFAWPEDEFLSKTEGSAIRRIGYARWLRNIAVALGNAPTSNAVINALKSRLDNDSEMVREHIQWALDQHLILS

SEQ ID NO: 76074 - protein, 361 aa, Crenothrix sp.
  misc_feature (1)..(361): tr|A0A1Y2ZZB6|A0A1Y2ZZB6_9GAMM Epoxyqueuosine reductase OS=Crenothrix sp. D3 OX=1880899 GN=queG PE=3 SV=1
METNTAQQLATLALAIKQWGLELGFAQVGISDIDLTSAEQHLNQWLARGFHGDMDYMQRHGDKRSRPALLQEGTVRVISVRLNYLPETRQIMEQSLNDSTAAYISRYALGRDYHKMMRQRLQQLIDKIQAEVGFNSTMRAFVDSAPVLEKAIAEKAGLGWIGKHSNLINRQAGSWFFLGEIYTNLPLPTDNKATAHCGECRACLDICPTQAIVAPYQVDARRCVSYLTIELHGAIPEPLRPLIGNRIYGCDDCQIICPWNRFAKLTAENDFNPRQQLNSQQLLAVFAWSEAEFLTKTEGSAIRRIGYERWLRNIAVALGNAPTSPLIIDALQIRLNDASELVKEHILWALAQQHKPTVNNR

SEQ ID NO: 76075 - protein, 314 aa, Criblamydia sequanensis
  misc_feature (1)..(314): tr|A0A090D236|A0A090D236_9BACT Uncharacterized protein OS=Criblamydia sequanensis CRIB-18 OX=1437425 GN=CSEC_1 217 PE=4 SV=1
MDVALDEIVAKAKELGFDDAKVTEPTVPEEDILAYFSWLDEGLQADLHYMENKIRVEPKNLLPGAKSAIFFASYYKQPKEDFKPGIGVIASYARGKDYHNIHRKRLKQFIFWLDTKTLNTASFKAFSDSTPILEKALAQKAGLGFMGKNTLLIHRKLGTFFLLSGILTTLDLPKSVSLPRMPRCGSCNRCIDACPTGALKPYKLDAAKCLSNILIESDGPVSETIKSKNPGYVFGCDICQDVCPHNARKKPSTHPDFSGESGFGSYLDEDTLSKIENNPELLFGTPLKRRGFKGLRENAKSLPWKLESNEGLNP

SEQ ID NO: 76076 - protein, 346 aa, Cribrihabitans marinus
  misc_feature (1)..(346): tr|A0A1H7DIA6|A0A1H7DIA6_9RHOB Epoxyqueuosine reductase OS=Cribrihabitans marinus OX=1227549 GN=queG PE=3 SV=1
MKDGSALKQKLVAQALEEGFVAARLCRPWDVPEVPGRLAGFVEAGYHGQMGWMAERMHWRGNPAALWPEAKSVIMLAESYAPEQDPLAILERPDRGAISVYARNRDYHDLVKKRLKRLARWLIAEAGGEVKVFVDTAPVPEKALGQAAGLGWQGKHTNLLSRDWGNWAFLGSVFSTLDLPADAPEVDHCGSCRACLDICPTDAFPAPYRLDARRCISYLTIEHKGPVDEELRGKMGNRIYGCDDCLAVCPWNKFAVAASDMRYAAREALEAPHLADLAGLDDASFRAMFSGSPIKRIGRDRFVRNVLYAIGNSGDPSLRPAARARADDADPTVVDAARWALAKLPE

SEQ ID NO: 76077 - protein, 324 aa, Crinalium epipsammum
  misc_feature (1)..(324): tr|K9W326|K9W326_9CYAN Epoxyqueuosine reductase OS=Crin alium epipsammum PCC 9333 OX=1173022 GN=queG PE=3 SV=1
MLVSSDEIKQKALELGFHQVGIADANATNGVEVQRLQAWMALGYHADMEWMANPKRHDIHLLMPEVKSVICVALNYYTPHQRPESREYGKISRYGWGRDYHKVLHKKLKALSNWLQEQSEGIQARYYADTAPVQDKVWAQRAGIGWIAKNGNVITREFGSWVFLGEVLTNLELTADTPHTHHCGNCTRCIEACPTNAIRAVAQDDAQGYPFVIDANRCIAYHTIENRAEELPDAIAPHLQGWIAGCDICQDVCPWNQRFAKNTDVADFQPYPANIAPRLTELAEISDAEWNQRFTASALRRIKPEMLRRNAKANLATLQTPFDD

SEQ ID NO: 76078 - protein, 309 aa, Croceibacter atlanticus
  misc_feature (1)..(309): tr|A3U524|A3U524_CROAH Epoxyqueuosine reductase OS=Croc eibacter atlanticus (strain ATCC BAA-628 / HTCC2559 / K CTC 12090) OX=216432 GN=queG PE=3 SV=1
MNTKAQYSAFIKNEAKRLGFMSCGISKAEFLEAEAPRLEEWLSKNRHGEMQYMENYFDKRLDPTKLVEGSKSVVSLLLNYYPSETQTKESYKISKYAYGTDYHFVIKDKLKTLLHSIQEEIGDVHGRAFVDSAPVLDKAWAAKSGLGWIGKHSNLLSKQAGSFYFIAELIIDLELDYDTPVTDHCGTCTACIDACPTQAIIEPYKVDGSKCISYLTIELKNEIPNGFSNQMDDWMFGCDVCQDVCPWNRFSKPHNEPLFNPHPELLTKSKSEWQELTKEVFAEIFKKSAVKRTKFTGLKRNINFLNSED

SEQ ID NO: 76079 - protein, 363 aa, Croceicoccus marinus
  misc_feature (1)..(363): tr|A0A1Z1FDP4|A0A1Z1FDP4_9SPHN Epoxyqueuosine reductase OS=Croceicoccus marinus OX=450378 GN=queG PE=3 SV=1
MNGSSADRLERLRQALLAQARKEGFVAAGIASAGEEPRRIARLKGWLDDGRHGSMGWMEDRADQRAAPQTLWPEAQSVIALGMSYAPGHDPLALEGQGDRARISVYAQGRDYHDTVKKALKRLARWLVEEARREGIEAGVKVFVDTAPVMEKPLGEAAGIGWQGKHTNMVSRTHGSWLFLGAIYTTLPLRADDIHQDRCGSCSACLDACPTNAFPAPRQLDARRCISYLTIEHKGPIPEEFRKPMGNRIYGCDDCLAVCPWNSFAQSAAANRAFLPRAELVAPRLAELLALDDAGFRALFSGSPIKRIGRDRFVRNCLIAAGNSGDAVLIEPVAALLDDPDPVVAEAANWALAQLEQALQPAG

SEQ ID NO: 76080 - protein, 357 aa, Croceicoccus naphthovorans
  misc_feature (1)..(357): tr|A0A0G3XF01|A0A0G3XF01_9SPHN Epoxyqueuosine reductase OS=Croceicoccus naphthovorans OX=1348774 GN=queG PE=3 SV=1
MPESDGVVLSRLREKMLQRAKGEGFVAVGIADAATDPARADHLAEWLDAGFHATMKWMEGRADQRAAPQTLWPEARRVIALGMSYAPANDPLLLAEAADRARISVYAQGRDYHDVVKKALKRLARWLVEEAKAEGLDAGVKVFVDTAPVMEKPLGEAAGIGWQGKHSNLVSRSHGSWLFLGAIYTTLDLPVDQPHAHRCGSCRRCLDACPTDAFPREGVVDARRCISYLTIEHHGPIPHEFREAMGNRIYGCDDCLAVCPWNSFASAAAANRAFLPRAELVAPRLAELLALDDKGFRSLFSGSPIKRIGRNRFVRNCLIAAGNSGDQSLSAPVAALLSDPDPVVAEAAEWATARLTL

SEQ ID NO: 76081 - protein, 356 aa, Croceicoccus ponticola
  misc_feature (1)..(356): tr|A0A437GXS2|A0A437GXS2_9SPHN Epoxyqueuosine reductase OS=Croceicoccus ponticola OX=2217664 GN=queG PE=3 SV=1
MELRERLIARAAEEGFAAVGIADAGTDPARAARLTDWLKDGNHATMEWMEGRADQRAAPQTLWPDARRVIALGMNYAPAADPLALADRGELGRISVYAQGRDYHDVVKKALKRLARRLVEEARRAGLDAGVKVFVDTAPVMEKPLGEAAGIGWQGKHSNMVSRQHGSWLFLGAIYTTLDLPVDEAHVDRCGSCSKCMDACPTDAFPAPRVVDARRCISYLTIEHKGPIPHEFREAMGNRIYGCDDCLAVCPWNSFAEAAAANMAFLPRAELAAPRLTELLALDDAGFRALFSGSPIKRIGRDRFMRNCLIAAGNSANAALISVVAGLRSDRDPVVAEAADWAAARLDRIALGPVTP

SEQ ID NO: 76082 - protein, 377 aa, Croceicoccus sp.
  misc_feature (1)..(377): tr|A0A2D8D7V5|A0A2D8D7V5_9SPHN Epoxyqueuosine reductase OS=Croceicoccus sp. OX=1927144 GN=queG PE=3 SV=1
MRLCPQTRKIRLRHLNDASADRLERLRQALLTRAQEEGFVAAGIAGAGEDPRRIARLKGWLDEGRHGSMGWMEDRADQRGAPQTLWPEAQSVIALGMSYAPGHDPLALEGQGDRARISVYAQGRDYHDTVKKALKRLARWLVEEARREGIEAGVKVFVDTAPVMEKPLGEAAGIGWQGKHTNMVSRTHGSWLFLGAIYTTLPLRADEVHPDRCGSCSACLDACPTNAFPAPRQFDARRCISYLTIEHKGPIPEEFREAMGNRIYGCDDCLAVCPWNSFAQSAAANRAFLPRAELVAPRLAELLALDDAGFRALFSGSPIKRIGRDRFVRNCLIAAGNSGEAALIEPVGALLTDPDPVVAEAAGWALARLERALQPVG

SEQ ID NO: 76083 - protein, 310 aa, Croceitalea dokdonensis
  misc_feature (1)..(310): tr|A0A0P7A4K4|A0A0P7A4K4_9FLAO Epoxyqueuosine reductase OS=Croceitalea dokdonensis DOKDO 023 OX=1300341 GN=que G PE=3 SV=1
MNQKTTYAQQIKKEAKRLGFLSCGISKAQFLEEEAPRLEHWLKENRHGKMQYMERYFDKRLDPRLLVDDAKSVISVLLNYYPSETQGTETYKISKYAYGRDYHHVIKGKLRELYEFIQDAIGEVNGRAFVDSAPVLDKAWAAKSGLGWMGKHSNLLTQQVGSFYFIAELIVDLELAYDTPVTDHCGTCTACMDACPTEAIVAPYQVDGSKCISYFTIELKEELPTEFSGKFDEWMFGCDVCQDVCPWNRFSKPHSEPLFDPHPDLLSMTKKDWEEITEDVFKKVFKKSAVKRTKFSGLQRNIKFLKKADR

SEQ ID NO: 76084 - protein, 307 aa, Croceivirga radicis
  misc_feature (1)..(307): tr|A0A1V6LU98|A0A1V6LU98_9FLAO Epoxyqueuosine reductase OS=Croceivirga radicis OX=1929488 GN=queG PE=3 SV=1
MISKATHSQMIKTEAERLGFLSCGISKAGFLEEEAPRLEKWLQANLHGQMGYMANHFDKRLDPTKLVEGAKSVISLLLNYFPEEKQRPNSYKISKYAYGKDYHYVIKNKLKQLINFIQDEIGEVDGRAFVDSAPVLDKAWAAKSGLGWIGKNSNLITQKVGSFYFIAELIVDLDLEYDLPTTDHCGTCTACIDACPTQAIIAPYVVDGSKCISYLTIELKEAIPSAFSEKMDNWMFGCDVCQDVCPWNRFSVPHDEPEFKAREELLNYSKQEWEELTQEVFQEIFRKSAVKRTKYKGLMRNITALKR

SEQ ID NO: 76085 - protein, 388 aa, Crocinitomicaceae bacterium
  misc_feature (1)..(388): tr|A0A2E2TBD2|A0A2E2TBD2_9FLAO Epoxyqueuosine reductase OS=Crocinitomicaceae bacterium OX=2026728 GN=queG PE=3 SV=1
MQRYLVKKFATVFFLTFCPKKFVLYCPLVDIPQTIPAEKYKNILRLSLNVPSKKYFTFPIVLYILIIIFALFLISYLFLLENTYKNTHAIKQKAHDLGFEEIGISKAEFLNDEAKKLEAWLNNNHQGEMAYMANHFDMRTDPRKLVPGAKSVISLSYNYYTEAEQEDPKAPKISKYAYGRDYHKVVRKKLKALLQFVQEEIGDVDGRAFVDSAPVMERVWAQKSGLGWIGKNTLLLTKRKGSYFFLAELILDLELDYDGPVKDHCGSCTKCIDACPTDAIYAPYQMDASKCISYLTIELKDKIPSQFKGKMEGWMYGCDICQEVCPINAKSKNHQEPQFNPRKELLRKDRQEWEEITEEVFTKLFEGSPVKRTKYAGLKRNIDFLKKA

SEQ ID NO: 76086 - protein, 313 aa, Crocinitomicaceae bacterium
  misc_feature (1)..(313): tr|A0A1Z8S389|A0A1Z8S389_9FLAO Epoxyqueuosine reductase OS=Crocinitomicaceae bacterium TMED45 OX=1986728 GN=qu eG PE=3 SV=1
MSKSKHVAAERAAWIKRRAKELGFTSVGISVAKELTEEAPRLETWLKEGMHGEMAYMEGHFDKRLDPRKLLPGTKSVVSLLFNYHNPHGQSDPEAPRIAQYAFGEDYHFVLKWKLKELLKWMRAEWGDVGGRVYVDSAPILERAWAERSGLGWIGKHSLLLNKHAGSYFYLAEMMLDLELEPDAPVTDHCGSCTRCIDACPTNAIIQPYVVDGSKCISYFTIELRGAIPEPVHGQMENWMFGCDICQEVCPWNRHASPTTEPRFSPHPRLLDMTKSDWLDLTEDVFREVFKDSAVKRTGWMGLQRNISFLGDA

SEQ ID NO: 76087 - protein, 307 aa, Crocinitomix sp.
  misc_feature (1)..(307): tr|A0A1J5L314|A0A1J5L314_9FLAO Epoxyqueuosine reductase OS=Crocinitomix sp. MedPE-SWsnd OX=1860084 GN=queG PE= 3 SV=1
MTKAELSSFVKSHADRLGFLSCGISKVVFLEKEASHLENWLNNNYNGKMAYMANHFDKRLNPALLVDDAKSVISVLVNYFPEKDLFEDKELKLSKYAYGKDYHQVIRKNLNELIEIIKEEVGDVNARCFTDSAPVLDKAWAERAGLGWIGKNANLISTQKGSFFFIGEIIIDLELEYDEPATDHCGTCTKCIEACPTEAIIKPQVVDGSKCISYLTIELKDELIPQKFEDQMKGWMFGCDICQDICPWNRFSVPHNQESFLPHPDLSQTDFTELSKETFNLLFQKSAVKRTKFEGLKRNIKFVQNKA

SEQ ID NO: 76088 - protein, 309 aa, Crocinitomix sp.
  misc_feature (1)..(309): tr|A0A2W1NIM5|A0A2W1NIM5_9FLAO Epoxyqueuosine reductase OS=Crocinitomix sp. SM1701 OX=2219161 GN=queG PE=3 SV= 1
MREDIPFSEQIKAQALDLGFMSCGISEATFLEKEAPILENWLNNNYNGKMAYMANHFDKRLDPRLLVDDAKSVISVMLNYYPEKDLFADAPLKISKYAYGQDYHSVIKEKLGRLLEFIVENSEEEINARVFTDSAPVLDKAWAERSGLGWQGKNGMLISKQKGSFFFVGEIILDKVLTYDQASTANHCGTCTKCIDACPTDAIKSANVIDGSKCISYLTIELKDEVIPNAFKDKMEGWFFGCDICQDVCPWNRFSTPANSSDFVPHPDLSNTEWTELTEDIFREIFRHSAVKRTKFKGLKRNIGFVNTI

SEQ ID NO: 76089 - protein, 309 aa, Crocosphaera chwakensis
  misc_feature (1)..(309): tr|A3IWQ0|A3IWQ0_9CHRO Epoxyqueuosine reductase OS=Croc osphaera chwakensis CCY0110 OX=391612 GN=queG PE=3 SV=1
MQELTKKIKQKALEIGFHKVGIARVNTDYQDHAVDHLQAWLNLGYQAEMAWMNNPKRFDIRQCMPDVQSVISVALNYYTPHQQSEDKKHGKISRYGWGRDYHKVMQKKLKALSQWLENEDNTIKTRYYVDTGPIQDKVWAQRAGIGWIAKNSNIITREYGSWVFLGEILTNLNLISDTPHTEHCGTCTRCIEACPTNAIARPFVVDANRCIAYHTIENRAEQLPKTIADNLQGWVAGCDICQEVCPWNQRFSQETDIPDFQPYSGNIAPKLEKLADLTHEKWQQQFPASALRRIKPTMWQRNARANLEE

SEQ ID NO: 76090 - protein, 325 aa, Crocosphaera subtropica
  misc_feature (1)..(325): tr|B1WR45|B1WR45_CROS5 Epoxyqueuosine reductase OS=Croc osphaera subtropica (strain ATCC 51142 / BH68) OX=43989 GN=queG PE=3 SV=1
MTWLLNLFPSEKGVSKMQELTEKIKQKAIEIGFHKVGIAKVDTEYQDNAVNRLQAWLRLGYQADMAWMNNPKRFDIRQCMPEVQSVISVALNYYTPHQQSEDKKHGKISRYGWGRDYHKVMQKKLKALSQWLDDQDDNMKTRYYVDTGPVQDKVWAQRAGIGWIAKNSNVITREYGSWVFLGEILTNLNLIPDPPHTEHCGTCTRCIEACPTNAIARPFVVDANRCIAYHTIENRAEKLPEAIADNLQEWVAGCDICQEVCPWNQRFAQETDIPDFQPYSGNIAPDLEQLADMTEEQWQQQFPASALRRIKPTMWQRNARANLEE

SEQ ID NO: 76091 - protein, 309 aa, Crocosphaera watsonii
  misc_feature (1)..(309): tr|G5IZ58|G5IZ58_CROWT Epoxyqueuosine reductase OS=Croc osphaera watsonii WH 0003 OX=423471 GN=queG PE=3 SV=1
MQELTQQIKEKALEIGFHKVGIAKVDTDYQDNAVEHLQTWLGLGYQAEMAWMNNPKRFDIRQCMPEVQSVISVALNYYTPHQHSQDKQQGKISRYGWGRDYHRVMEKKLKALSLWLANQDNNIKTRYYVDTGPIQDKVWAMRSGIGWIAKNSNVITREYGSWVFLGEIITNLHLIADTPHTEHCGTCTRCLEACPTGAIASPFVVDANLCIAYHTIENRAEHLPKDIVKNLQGWIAGCDICQEVCPWNQRFSQVSDVPDFQPYSGNIAPNLEELVNIDQEKWQEKFPASALRRIKPRMWQRNARANLET

SEQ ID NO: 76092 - protein, 309 aa, Crocosphaera watsonii
  misc_feature (1)..(309): tr|T2IJB9|T2IJB9_CROWT Epoxyqueuosine reductase OS=Croc osphaera watsonii WH 8502 OX=423474 GN=queG PE=3 SV=1
MQELTQQIKEKALEIGFHKVGIAKVDTDYQDNAVEHLQTWLGLGYQAEMAWMNNPKRFDIRQCMPEVQSVISVALNYYTPHQHSQDKQQGKISRYGWGRDYHRVMEKKLKALSLWLANQDNNIKTRYYVDTGPIQDKVWAMRSGIGWIAKNSNVITREYGSWVFLGEIITNLHLIADTPHTEHCGTCTRCLEACPTGAIASPFVVDANLCIAYHTIENRAEHLPKDIVKNLQGWIAGCDICQEVCPWNQRFYQVSDVPDFQPYSGNIAPNLEELVNIDQEKWQEKFPASALRRIKPRMWQRNARANLET

SEQ ID NO: 76093 - protein, 379 aa, Cronobacter condimenti
  misc_feature (1)..(379): tr|K8AIN0|K8AIN0_9ENTR Epoxyqueuosine reductase OS=Cron obacter condimenti 1330 OX=1073999 GN=queG PE=3 SV=1
MSEPLDLNQLAQKIKQWGAELGFQQVGITDTDLSASEGALQAWLDKQYHGEMEWMARHGMLRARPHELLPGTLRVISVRMNYLPANAAFASTLKDPSLGYVSRYALGRDYHKLLRNRLKKLGETLQQHCASLNFRPFVDSAPLLERPLAEKAGLGWTGKHSLILSRDAGSFFFLGELLVDLPLPVDKPVEEGCGRCVACMTICPTGAIVEPYTVDARRCISYLTIELEGAIPEEFRPLMGNRIYGCDDCQLICPWNRFSQLTDETDFSPRQALHAPKLIELFAWSEAHFLKVTEGSAIRRIGHLRWLRNIAVALGNAPWDEANLTALQQRKGEQPLLDEHIDWAIAQQIDKRNACVVEVQLPQKQRLVRVIEKGLPRDA

SEQ ID NO: 76094 - protein, 379 aa, Cronobacter dublinensis
  misc_feature (1)..(379): tr|K8ATT9|K8ATT9_9ENTR Epoxyqueuosine reductase OS=Cron obacter dublinensis 1210 OX=1208656 GN=queG PE=3 SV=1
MSEPLDLNQLAQKIKQWGAELGFQQVGITDTDLSASEGALQAWLDKQYHGEMEWMARHGMLRARPHELLPGTLRVISVRMNYLPANAAFARTLKDPSLGYVSRYALGRDYHKLLRNRLKKLGETLQAHCASLNFRPFVDSAPLLERPLAEKAGLGWTGKHSLILNRDAGSFFFLGELLVDLPLPVDKPVEEGCGRCVACMTICPTGAIVEPYTVDARRCISYLTIELEGAIPEEFRPLMGNRIYGCDDCQLICPWNRFSQLTDEADFSPRQALHAPKLIELFGWSEAHFLKVTEGSAIRRIGHLRWLRNIAVALGNAPWDEANIVALRQRKGEHPLLDEHIDWAIAQQTDKRNACVVEVQLPQKQRLVRVIEKGLPRDA

SEQ ID NO: 76095 - protein, 379 aa, Cronobacter dublinensis; identical to SEQ ID NO: 76094
  misc_feature (1)..(379): tr|A0A0K2P6D1|A0A0K2P6D1_9ENTR Epoxyqueuosine reductase OS=Cronobacter dublinensis subsp. dublinensis LMG 2382 3 OX=1159554 GN=queG PE=3 SV=1

SEQ ID NO: 76096 - protein, 379 aa, Cronobacter malonaticus
  misc_feature (1)..(379): tr|V5TUP8|V5TUP8_9ENTR Epoxyqueuosine reductase OS=Cron obacter malonaticus OX=413503 GN=queG PE=3 SV=1
MSEPLDLNQLAQKIKQWGAELGFQQVGITDTDLSASEGALQAWLDKQYHGEMEWMARHGMLRARPHELLPGTLRVISVRMNYLPANAAFASTLKDPSLGYVSRYALGRDYHKLLRNRLKKLGETLQQHCASLNFRPFVDSAPILERPLAEKAGLGWTGKHSLILSRDAGSFFFLGELLVDLPLPVDKPVEEGCGRCVACMTICPTGAIVEPYTVDARRCISYLTIELEGAIPEEFRPLMGNRIYGCDDCQLICPWNRFSQLTDEADFSPRKSLHAPKLIELFSWSEAHFLKVTEGSAIRRIGHLRWLRNIAVALGNAPWDEANITALRQRKGEHPLLDEHIDWAIAQQTDKRNACVVEVQLPQKQRLVRVIEKGLPRDA

SEQ ID NO: 76097 - protein, 384 aa, Cronobacter muytjensii
  misc_feature (1)..(384): tr|A0A2T7AYT3|A0A2T7AYT3_9ENTR Epoxyqueuosine reductase OS=Cronobacter muytjensii OX=413501 GN=queG PE=3 SV=1
MPWSVMSEPLDLNQLAQKIKQWGAELGFQQVGITDTDLSASEGALQAWLDKQYHGEMEWMARHGMLRARPHELLPGTLRVISVRMNYLPANAAFARTLKDPSLGYVSRYALGRDYHKLLRNRLKKLGETLQAHCASLNFRPFVDSAPILERPLAEKAGLGWTGKHSLILNRDAGSFFFLGELLVDLPLPVDKPVEEGCGRCVACMTICPTGAIVEPYTVDARRCISYLTIELEGAIPEEFRPLMGNRIYGCDDCQLICPWNRFSQLTDEADFSPRQALHAPKLIELFGWSEAHFLKVTEGSAIRRIGHLRWLRNIAVALGNAPWDEANIVALRQRKGEHPLLDEHIDWAIAQQTDKRNACVVEVQLPQKQRLVRVIEKGLPRDA

SEQ ID NO: 76098 - protein, 379 aa, Cronobacter sakazakii
  misc_feature (1)..(379): tr|A0A384EUN6|A0A384EUN6_CROSK Epoxyqueuosine reductase OS=Cronobacter sakazakii OX=28141 GN=queG PE=3 SV=1
MSEPLDLNQLAQKIKQWGAELGFQQVGITDTDLSASEGALQAWLDKQYHGEMEWMARHGMLRARPHELLPGTLRVISVRMNYLPARAAFASTLKDPSLGYVSRYALGRDYHKLLRNRLKKLGETLQQHCASLNFRPFVDSAPILERPLAEKAGLGWTGKHSLILSRDAGSFFFLGELLVDIPLPVDKPVEEGCGRCVACMTICPTGAIVEPYTVDARRCISYLTIELEGAIPEEFRPLMGNRIYGCDDCQLICPWNRFSQLTDEADFSPRQALHAPKLIELFSWSEAHFLKVTEGSAIRRIGHLRWLRNIAVALGNAPWDEANITALQQRKGEHPLLDEHIDWAIAQQTDKRNACVVEVQLPQKQRLVRVIEKGLPRDA

SEQ ID NO: 76099 - protein, 403 aa, Cronobacter sakazakii
  misc_feature (1)..(403): tr|K8CFB2|K8CFB2_CROSK Epoxyqueuosine reductase OS=Cron obacter sakazakii 701 OX=1208663 GN=queG PE=3 SV=1
MRSQSAGQMECGILASFLFIPWSVMSEPLDLNQLAQKIKQWGAELGFQQVGITDTDLSASEGALQAWLDKQYHGEMEWMARHGMLRARPHELLPGTLRVISVRMNYLPARAAFASTLKDPSLGYVSRYALGRDYHKLLRNRLKKLGETLQQHCASLNFRPFVDSAPILERPLAEKAGLGWTGKHSLILSRDAGSFFFLGELLVDIPLPVDKPVEEGCGRCVACMTICPTGAIVEPYTVDARRCISYLTIELEGAIPEEFRPLMGNRIYGCDDCQLICPWNRFSQLTDEADFSPRQALHAPKLIELFSWSEAHFLKVTEGSAIRRIGHLRWLRNIAVALGNAPWDEANITALQQRKGEHPLLDEHIDWAIAQQTDKRNACVVEVQLPQKQRLVRVIEKGLPRDA

SEQ ID NO: 76100 - protein, 379 aa, Cronobacter sp.
  misc_feature (1)..(379): tr|A0A5J6X3Z5|A0A5J6X3Z5_9ENTR tRNA epoxyqueuosine(34) reductase QueG OS=Cronobacter sp. JZ38 OX=1906275 GN=BJ P61_03725 PE=4 SV=1
MSEPLDLNQLAQKIKQWGAELGFQQVGITDTDLSASEGALQAWLDKQYHGEMEWMARHGMLRARPHELLPGTLRVISVRMNYLPANAAFARTLKDPSLGYVSRYALGRDYHKLLRNRLKKLGETLQAHCASLNFRPFVDSAPILERPLAEKAGLGWTGKHSLILNRDAGSFFFLGELLVDLPLPVDKPVEEGCGRCVACMTICPTGAIVEPYTVDARRCISYLTIELEGAIPEEFRPLMGNRIYGCDDCQLICPWNRFSQLTDEADFSPRQALHASKLIELFGWSEAHFLKVTEGSAIRRIGHLRWLRNIAVALGNAPWDEANIVALRQRKGEHSLLDEHIDWAIAQQTDKRNACVVEVQLPQKQRLVRVIEKGLPRDA

SEQ ID NO: 76101 - protein, 384 aa, Cronobacter turicensis
  misc_feature (1)..(384): tr|A0A2T7B394|A0A2T7B394_9ENTR Epoxyqueuosine reductase OS=Cronobacter turicensis OX=413502 GN=queG PE=3 SV=1
MPWSVMSEPLDLNQLAQKIKQWGAELGFQQVGITDTDLSASEGALQAWLDKQYHGEMEWMARHGMLRARPHELLPGTLRVISVRMNYLPANAAFASTLKDPSLGYVSRYALGRDYHKLLRNRLKKLGETLQQHCASLNFRPFVDSAPILERPLAEKAGLGWTGKHSLILSRDAGSFFFLGELLVDLPLPVDKPVEDGCGRCVACMTICPTGAIVEPYTVDARRCISYLTIELEGAIPEEFRPLMGNRIYGCDDCQLICPWNRFSQLTDEADFSPRQALHAPKLIELFSWSEAHFLKVTEGSAIRRIGHLRWLRNIAVALGNAPWDEANITALQQRKGEHPLLDEHIDWAIAQQTDKRNACVVEVQLPQKQRLVRVIEKGLPRDA

SEQ ID NO: 76102 - protein, 379 aa, Cronobacter turicensis
  misc_feature (1)..(379): tr|C9Y183|C9Y183_CROTZ Epoxyqueuosine reductase OS=Cron obacter turicensis (strain DSM 18703 / LMG 23827 / z303 2) OX=693216 GN=yjeS PE=3 SV=1
MSEPLDLNQLAQKIKQWGAELGFQQVGITDTDLSASEGALQAWLDKQYHGEMEWMARHGMLRARPHELLPGTLRVISVRMNYLPANAAFASTLKDPSLGYVSRYALGRDYHKLLRNRLKKLGETLQQHCASLNFRPFVDSAPILERPLAEKAGLGWTGKHSLILSRDAGSFFFLGELLVDLPLPVDKPVEDGCGRCVACMTICPTGAIVEPYTVDARRCISYLTIELEGAIPEEFRPLMGNRIYGCDDCQLICPWNRFSQLTDEADFSPRQALHAPKLIELFSWSEAHFLKVTEGSAIRRIGHLRWLRNIAVALGNAPWDEANITALQQRKGEHPLLDEHIDWAIAQQTDKRNACVVEVQLPQKQRLVRVIEKGLPRDA

SEQ ID NO: 76103 - protein, 379 aa, Cronobacter universalis
  misc_feature (1)..(379): tr|A0A376EYL4|A0A376EYL4_9ENTR Epoxyqueuosine reductase OS=Cronobacter universalis NCTC 9529 OX=1074000 GN=que G PE=3 SV=1
MSEPLDLNQLAQKIKQWGAELGFQQVGITDTDLSASEGALQAWLDKQYHGEMEWMARHGMLRARPHELLPGTLRVISVRMNYLPANAAFASTLKDPSLGYVSRYALGRDYHKLLRNRLKKLGETLQQHCASLNFRPFVDSAPILERPLAEKAGLGWTGKHSLILSRDAGSFFFLGELLVDLPLPVDKPVEEGCGRCVACMTICPTGAIVEPYTVDARRCISYLTIELEGAIPEEFRPLMGNRIYGCDDCQLICPWNRFSQLTDEADFSPRKALHAPKLIELFSWSEAHFLKVTEGSAIRRIGHLRWLRNIAVALGNAPWDDANITALQQRKGEHPLLDEHIDWAIAQQTDKRNACVVQVQLPQKQRLVRVIEKGLPRDA

SEQ ID NO: 76104 - protein, 308 aa, Cruoricaptor ignavus
  misc_feature (1)..(308): tr|A0A1M6GH20|A0A1M6GH20_9FLAO Epoxyqueuosine reductase OS=Cruoricaptor ignavus OX=1118202 GN=queG PE=3 SV=1
MHAKTQYFSQIIKSTARRFGFQSCGISRAEFLEDEAPRLERWLREGMHGEMRYMENYFDKRLDPRLLVEGARSVISLSYNYFPEEILPEEGNYKIAKYAYGEDYHEVIKAILREMCEHLLEEIGDFHFRIFTDSAPVLERAWAKRGGIGWVGKNSNLITKKHGSFYFLAEIICDLELEPDPPTTDHCGNCRRCIDACPTGAIVSEKVVDGSKCISYATIELKDQIPDFFQDKMEDWMFGCDICQDVCPWNRFSQPHSQPKFYLNEKLTAMRKEDWKELTEEVYAEIFRKSPVKRAKFSGLMKNIKNLP

SEQ ID NO: 76105 - protein, 308 aa, Cryomorphaceae bacterium
  misc_feature (1)..(308): tr|A0A354S6M0|A0A354S6M0_9FLAO Epoxyqueuosine reductase OS=Cryomorphaceae bacterium OX=1898111 GN=queG PE=3 SV =1
MNSSGAKQVLQMAAMRLGFQACRVARADFLAEEAPSLDAWLAKGYHGSMAYMENHYEKRLDPRKLVPGAKSVISLAYNYFPEKDLADGEKPRIAKYAYGEDYHRVVKDKLFELLDSLRESLGAMEGRCFVDSAPVMERAWAQRSGLGWVGKNSLLLRKNEGSFFFLAELIVDYDFTPDTPVADHCGTCTRCLDACPTGAIISPEVVDSSRCISHMTIELHGALPESHKAAISPWVFGCDICQDVCPWNRHAKSHTEPRFTPNEWPDWTAEDWTEMTEETFGRVFGKSALTRRGLEGIRRNLGAGRLES

SEQ ID NO: 76106 - protein, 306 aa, Cryomorphaceae bacterium
  misc_feature (1)..(306): tr|A0A2A5XUY7|A0A2A5XUY7_9FLAO tRNA epoxyqueuosine(34) reductase QueG OS=Cryomorphaceae bacterium MED-G14 OX=1 986260 GN=queG PE=4 SV=1
MSTINSNTLLVKSIAKDLGFISCGISKSGFLEDEADRFEKWLKNNYHGKMSYMQRNFDKRLDTTKLVEGSKSVISLLYNYYPKKKQNPNSYKISKYAYGIDYHYVIKDKLKNFISILNGKIGDVNSRVFVDSAPILERAWAKKSGLGWIGKNTNLISKKTGSFFFISEIIVDIDLVPDNEVTDHCGQCTACLDSCPTGAFYEPYKLDASKCISYLTIELKDKISEKFDAQFKDWIFGCDICQDVCPWNKFSTEHNEPLFEPIDQVINYSKKDWVEITNEVFDVIFENSPINRPKFDGFKRNIEFVK

SEQ ID NO: 76107 - protein, 329 aa, Cryptosporangium aurantiacum
  misc_feature (1)..(329): tr|A0A1M7RPT8|A0A1M7RPT8_9ACTN Epoxyqueuosine reductase QueG (Queuosine biosynthesis) OS=Cryptosporangium aura ntiacum OX=134849 GN=SAMN05443668_13349 PE=4 SV=1
MDDQDASAPLDAAWLRELCLAAGADDVGFVALDTPGLEDERDYVLEALPSTRSLIAVCVRLARENFRSRATSNVNTEMDTAIPVLDRIGHRISVALQDRGYRTLYPSVTFPVEAHRLPSRGWAVSYKPVAVAAGLGHMGIHRCVIHPKFGSFIGLGAVLTEAVITPYSRPLDWNPCLGCNLCVSACPVGAIHNDGSFDFSACYTHTYSQFVNNFADWVEDIADSADAEDYRQRVTPGETVGKFHRQYRSGYCVSVCPAGEDVIGPFLADRKQHLHDVVRPLQHKPEYVYVTEGSTAEAYARKKFPHKPIRYVESGIAPPDGIDAAPEPT

SEQ ID NO: 76108 - protein, 404 aa, Cupriavidus alkaliphilus
  misc_feature (1)..(404): tr|A0A2W7P5U8|A0A2W7P5U8_9BURK Epoxyqueuosine reductase OS=Cupriavidus alkaliphilus OX=942866 GN=queG PE=3 SV= 1
MIDRVAPGQADAPPTPVPDTSGHAAAGPGELAALAGSIRAWGAALGFASVRIADVDLAHAEPGLLAWLAQGYHGDMDYMANHGLRRARPAELVPGTVRAIVARMPYVPVAGAHAQAADWRRHELARLDDPATAVVSLYARGRDYHKVLRSRLQQLASRIEAEIGKFGYRVFTDSAPVMEVALASQGGLGWRGKHTLLLDRDGGSMFFLGEILVDIPLPADPPESGHCGSCHRCVDICPTRAIVAPYRLDARRCISYLTIEHKGAIPVEFRAPMGNRVYGCDDCQLACPWNKFAHVATVPDFDVRNGLDAPDMVALFQWTEAEFNQRLEGSPIRRIGHERWLRNLAVGLGNSLRTALSGSRAEDAALAARIRGALLARRETATPMVQEHIDWALAQGGPPVQRAG

SEQ ID NO: 76109 - protein, 404 aa, Cupriavidus alkaliphilus
  misc_feature (1)..(404): tr|A0A329B0R8|A0A329B0R8_9BURK Epoxyqueuosine reductase OS=Cupriavidus alkaliphilus OX=942866 GN=queG PE=3 SV= 1
MIDRVAPGQADAPPTPVPDTSGHAAAGPGELAALAASIRAWGAALGFASVRIADVDLAHAEPGLLAWLAQGYHGDMDYMANHGLRRARPAELVPGTVRAIVARMPYVPVAGAHAQAADWRRHELARLDDPATAVVSLYARGRDYHKVLRSRLQQLATRIEAEIGKFGYRVFTDSAPVMEVALASQGGLGWRGKHTLLLDRDGGSMFFLGEILVDIPLPADPPESGHCGSCHRCLDICPTRAIVAPYRLDARRCISYLTIEHKGAIPVEFRAPMGNRIYGCDDCQLACPWNKFAHVATVPDFDVRNGLDAPDMVALFQWTEAEFNQRLEGSPIRRIGHERWLRNLAVGLGNSLRTALSGVRAEDAALAARIRAALLARRETATPMVQEHIDWALAQGGPPAQPGG

SEQ ID NO: 76110 - protein, 371 aa, Cupriavidus basilensis
  misc_feature (1)..(371): tr|A0A0C4Y5G7|A0A0C4Y5G7_9BURK Epoxyqueuosine reductase OS=Cupriavidus basilensis OX=68895 GN=queG PE=3 SV=1
MHAGTDAAGLEALVGSIRAWGTELGFDALSIADVDLSRAEAGLLAWLAQGYHGDMDYMANHGLRRARPAELVPGTVRAIVARMPYLSAAGPHDWRAHELARLDDPATAVVSLYARGRDYHKVLRNRLQQLASRIEAAIGPFGYRVFTDSAPVMEVALAAQGGLGWRGKHTLLLDRDGGSMFFLGEILVDVPFPADAPEPGHCGNCRRCIDICPTQAILEPYRIDARRCISYLTIEHKGAIPEALRAPMGNRVYGCDDCQLACPWNKFAHRATLPDFDVRNGLDAPDMAELFGWTQAQFNQRLEGSPIRRIGHERWLRNLAVGLGNSLRAAVASGDTALATRIRAALGARQAEASPLVREHIDWALAQAPAN

SEQ ID NO: 76111 - protein, 386 aa, Cupriavidus basilensis
  misc_feature (1)..(386): tr|H1S3C8|H1S3C8_9BURK Epoxyqueuosine reductase OS=Cupr iavidus basilensis OR16 OX=1127483 GN=queG PE=3 SV=1
MAPGLAPSIAHTGTDAAGLAALVGLIRTWGTELGFDAVSIADVDLSRAEAGLLAWLAQGYHGEMDYMANHGLRRARPAELVPGTVRAIVARMPYLPAAVPNDWRAHELARLDDPATAVISHYARGRDYHKVLRNRLQQLASRIEAAIGPFGYRVFTDSAPVMEVALAAQGGLGWRGKHTLLLDRDGGSMFFLGEILVDVPFPADAPVSDHCGQCRRCIDICPTQAILEPYRIDARRCISYLTIEHKGAIPEALRAPMGNRVYGCDDCQLACPWNKFAHRATLPDFDVRNGFDAPDMAELFGWTEAEFNQRLEGSPIRRIGHERWLRNLAVGLGNSLRAAIASGDVALATRIRAALGARLADASPLVREHIEWALRQAPARAEAPLS

SEQ ID NO: 76112 - protein, 424 aa, Cupriavidus campinensis
  misc_feature (1)..(424): tr|A0A556USH4|A0A556USH4_9BURK Epoxyqueuosine reductase OS=Cupriavidus campinensis OX=151783 GN=queG PE=3 SV=1
MACTATASAAPNRAVAASSGSVRMRSSSRGIAYNSGMIDVAAPAPTEISPQAPPDLAALAQSMRAWGAALGFDAIRIADVDLRHAEAGLLAWLQAGYHGDMDYMANHGTRRARPAELVPGTVRAIVARMPYLPAGGADKGPDDWRGHELARLDDPSTAVLSLYARGRDYHKVLRNRLQQLAARIEQAIGPFGYRVFTDSAPVMEVALASQGGLGWRGKHTLLLDRDGGSMFFLGEILVDLPLPADAPETPHCGNCRRCIDICPTAAILEPYRLDARRCISYLTIEHKGPIPEEFRAPMGNRVYGCDDCQLACPWNKFAHRATLPDFDVRNGFDAPDMVDLFDWTEAEFNQRLEGSPIRRIGHERWLRNLAVGLGNSLRAASGTDPALAGRIRAALRGRQDTATPLVREHIDWALAQDPSPTSAS

SEQ ID NO: 76113 - protein, 401 aa, Cupriavidus gilardii
  misc_feature (1)..(401): tr|A0A5A8EXM3|A0A5A8EXM3_9BURK Epoxyqueuosine reductase OS=Cupriavidus gilardii OX=82541 GN=queG PE=3 SV=1
MIDRAAQAPDAVLSGTPAAQHATGADPHALVAQIRAWGAALGFDDVRVADVDLSHAEAGLLAWLAQGCHGDMDYMANHGLKRARPAELVPGTVRAIVARMPYLPASTHDEDDRNDGNDGDRDDWREREFARLAQVEAGGTAATISLYARGRDYHKVLRTRLQQLAGRIEAAIGPFGYRVFTDSAPVMEVALAGQAGLGWRGKHTLLLDRDGGSMFFLGEILVDLPLPIDPPASAHCGQCRRCIDICPTQAIVGPYRLDARRCISYLTIEHKGAIPEPLRAPMGNRVYGCDDCQLACPWNKFAHRATLPDFAVRNGFDAPDMVALFGWSEEEFNRRLEGSPIRRIGHERWLRNLAVGLGNALRGAGEPAQAERIRAALLARAGHPSELVREHVAWALAQRPQ

SEQ ID NO: 76114 - protein, 402 aa, Cupriavidus gilardii
  misc_feature (1)..(402): tr|A0A562BMG5|A0A562BMG5_9BURK Epoxyqueuosine reductase OS=Cupriavidus gilardii J11 OX=936133 GN=queG PE=3 SV= 1
MIDRAAPASSLPPRHGADHEATDSAASTASPQLADVAARIRAWGAELGFDDIRIADVDLGHAESGLLAWLAQGYHGDMDYMANHGVKRARPAELVPGTVRAIVARMPYLPASTGPDWREREFARLAAVGEGAAAISLYARGRDYHKVLRSRLQQLASRIGQAIGPFGYRVFTDSAPVMEVALASQGGLGWRGKHTLLLDRDGGSMFFLGEILVDLPLPVDPAVDPHCGQCRRCIDVCPTQAILEPYRLDARRCISYLTIEHKGAIPEALRAPMGNRVYGCDDCQLVCPWNKFAHRATLPDFDVRNGLDAADMVALFGWSETEFNQRLEGSPIRRIGHERWLRNLAVGLGNALRETSDPARARAIREALHARLGHDSGLVREHVQWALAQEPARRAGPDAQAS

SEQ ID NO: 76115 - protein, 394 aa, Cupriavidus metallidurans
  misc_feature (1)..(394): tr|A0A482IH53|A0A482IH53_9BURK Epoxyqueuosine reductase OS=Cupriavidus metallidurans OX=119219 GN=queG PE=3 SV =1
MIDRAVPASSPAKDPVPVPSTLSPQAARDSLASLVAQIRAWGGELGFDAIRIADVDLRHAEAGLLAWLQAGYHGDMDYMANHGTKRARPAELVPGTVRAIVARMPYLPMQRDDGWRRHELARLDDPSTAVISLYARGRDYHKVLRNRLQQLAARIETAIGAFGYRVFTDSAPVMEVALASQGGLGWRGKHTLLLDRDGGSMFFLGEILVDIPLPADSAEAPHCGNCRRCIDICPTQAIVEPYLVDARRCISYLTIEHKGAIPEDLRAPMGNRVYGCDDCQLTCPWNKFAHRATLPDFDVRNGFDAPDMATLFGWSEAEFNQRLEGSPIRRIGHERWLRNLAVGLGNSLRAAAVNDPALADRIRASLRARLDAATPLVREHIEWALAQDRAPERG

SEQ ID NO: 76116 - protein, 377 aa, Cupriavidus metallidurans
  misc_feature (1)..(377): tr|Q1LR16|Q1LR16_CUPMC Epoxyqueuosine reductase OS=Cupr iavidus metallidurans (strain ATCC 43123 / DSM 2839 / N BRC 102507 / CH34) OX=266264 GN=queG PE=3 SV=1
MPSTSSPQAARDSLASLVAQIRAWGGELGFDAIRIADVDLRHAEAGLLAWLQAGYHGDMDYMANHGTKRARPAELVPGTVRAIVARMPYLPMQRDDGWRRHELARLDDPSTAVISLYARGRDYHKVLRNRLQQLAARIETAIGAFGYRVFTDSAPVMEVALASQGGLGWRGKHTLLLDRDGGSMFFLGEILVDIPLPADSAEAPHCGNCRRCIDICPTQAIVEPYLVDARRCISYLTIEHKGAIPEDLRAPMGNRVYGCDDCQLTCPWNKFAHRATLPDFDVRNGFDAPDMATLFDWSEAEFNQRLEGSPIRRIGHERWLRNLAVGLGNSLRAAAVNDPALAERIRASLRARLDAATPLVREHIEWALAQDRAPERG

SEQ ID NO: 76117 - protein, 404 aa, Cupriavidus nantongensis
  misc_feature (1)..(404): tr|A0A142JFY3|A0A142JFY3_9BURK Epoxyqueuosine reductase OS=Cupriavidus nantongensis OX=1796606 GN=queG PE=3 SV =1
MIDRVAPGQADAPPIPVPDTSGHAAAGPGELAALAASIRAWGAALGFASVRIADVDLAHAEPGLLAWLAQGYHGDMDYMANHGLRRARPAELVPGTVRAIVARMPYVPAAGAHAQAADWRRHELARLDDPATAVVSLYARGRDYHKVLRSRLQQLASRIEAEIGRFGYRVFTDSAPVMEVALASQGGLGWRGKHTLLLDRDGGSMFFLGEILVDIPLPADPPESGHCGSCHRCLDICPTRAIVAPYRLDARRCISYLTIEHKGAIPVEFRAPMGNRVYGCDDCQLACPWNKFAHVATVPDFDVRNGLDAPDMVALFQWTEAEFNQRLEGSPIRRIGHERWLRNLAVGLGNSLRAALSGTRAEDAALAARIRAALLARRETATPMVQEHIDWALAQGGPPVQRAG

SEQ ID NO: 76118 - protein, 406 aa, Cupriavidus necator
  misc_feature (1)..(406): tr|A0A1U9UK58|A0A1U9UK58_CUPNE Epoxyqueuosine reductase OS=Cupriavidus necator OX=106590 GN=queG PE=3 SV=1
MIDRVASGQADAPPAPVSVSDTTGHLAAGPGELAALAASIRAWGAELGFASVRIADVDLSHAEPGLMAWLARGYHGDMDYMANHGLRRARPAELVPGTVRAIVARMPYIPAAGAQADAADWRRHELARLDDPATAVVSLYARGRDYHKVLRSRLQQLASRIEAEIGKFGYRVFTDSAPVMEVALASQGGLGWRGKHTLLLDRDGGSMFFLGEILVDIPLPADPPESGHCGNCHRCIDICPTRAIIAPYRLDARRCISYLTIEHKGPIPVEFRTPMGNRVYGCDDCQLACPWNKFAHVASVPDFDVRNGLDAPDMVALFQWTEAEFNQRLEGSPIRRIGHERWLRNLAVGLGNSLRAALSGTRAQDAALAARIRTALLARRETASPLVREHIDWALAQGGPPPERVS

SEQ ID NO: 76119 - protein, 439 aa, Cupriavidus necator
  misc_feature (1)..(439): tr|G0EWR4|G0EWR4_CUPNN Epoxyqueuosine reductase OS=Cupr iavidus necator (strain ATCC 43291 / DSM 13513 / N-1) O X=1042878 GN=queG PE=3 SV=1
MACTVAASAAPRRAVAASSGSVRVRSSSKGIAYNSGMIDRVAPGQADAPPTPVSGTPGHLAAGPGELAALAASIRTWGAELGFASVRIADVDLSHAEPGLMAWLAQGYHGDMDYMANHGLRRARPAELVPGTVRAIVARMPYIPAAGAQAGATDWRRHELARLDDPATAVVSLYARGRDYHKVLRSRLQQLASRIEAEIGKFGYRVFTDSAPVMEVALASQGGLGWRGKHTLLLDRDGGSMFFLGEILVDIPLPADAPESGHCGNCHRCLDICPTRAILAPYRLDARRCISYLTIEHKGPIPVEFRAPMGNRVYGCDDCQLACPWNKFAHVAMVPDFDVRNGLDAPDMVALFQWTEAEFNQRLEGSPIRRIGHERWLRNLAVGLGNSLRAARSGTRAEDAALAARIRAALLERRESATPLVREHIDWALAQDGPPPGAS

SEQ ID NO: 76120 - protein, 411 aa, Cupriavidus oxalaticus
  misc_feature (1)..(411): tr|A0A375GE44|A0A375GE44_9BURK Epoxyqueuosine reductase OS=Cupriavidus oxalaticus OX=96344 GN=yjeS PE=3 SV=1
MIDPAVKPPASAPGAHSVPANAPGQSGHAGHAGQADPEELAALAESIRAWGAALGFASVRIADVDLGHAEPGLLAWLEQGCHGDMDYMANHGLRRARPAELVPGTVRAIVARMPYVPATETPPGAPDWRRRELARLGDPATAVVSLYARGRDYHKVLRSRLQQLASRIEAEIGKFGYRVFTDSAPVMEVALASQGGLGWRGKHTLLLDRDGGSMFFLGEILVDIPLPADAPETDHCGNCHRCLDICPTRAIVAPYRLDARRCISYLTIEHKGPIPVEFRAPMGNRVYGCDDCQLACPWNKFAHVASVPDFDVRNGLDAPDIMALFQWTEDEFNQRLEGSPIRRIGHERWLRNLAVGLGNSLRAALSGTRAEDAALAARVRAALQARRDSASPLVQEHIDWALAQGEPARTS

SEQ ID NO: 76121 - protein, 444 aa, Cupriavidus oxalaticus
  misc_feature (1)..(444): tr|A0A4P7L966|A0A4P7L966_9BURK Epoxyqueuosine reductase OS=Cupriavidus oxalaticus OX=96344 GN=queG PE=3 SV=1
MACTVAASAAPRRAVAASSGSVRVRSSSKGIAYNSGMIDPAVKPPASAPGAHSVPANAPGQSGQAGHANPEELAALAESIRAWGAALGFASVRIADVDLGHAEPGLLAWLEQGYHGDMDYMANHGLRRARPAELVPGTVRAIVARMPYVPASETPPGAPDWRRRELARLGDPATAVVSLYARGRDYHKVLRSRLQQLASRIEAEIGKFGYRVFTDSAPVMEVALASQGGLGWRGKHTLLLDRDGGSMFFLGEILVDIPLPADAPETDHCGNCHRCLDICPTRAIVAPYRLDARRCISYLTIEHKGPIPVEFRAPMGNRVYGCDDCQLACPWNKFAHVASVPDFDVRNGLDTPDMVALFQWTEDEFNQRLEGSPIRRIGHERWLRNLAVGLGNSLRAALSGTRAEDAALAARIREALQARRDSASPLVQEHIDWALAQGEPARTS

SEQ ID NO: 76122 - protein, 399 aa, Cupriavidus pauculus
  misc_feature (1)..(399): tr|A0A3G8GWV0|A0A3G8GWV0_9BURK Epoxyqueuosine reductase OS=Cupriavidus pauculus OX=82633 GN=queG PE=3 SV=1
MIDRAVPAPTPPSRGNPPAQDAVPTPAATAPVIGQAALDSLAVALRGWGRELGFDEIRVADVDLRHAEAGLLAWLQAGCHGDMDYMANHGTRRARPHELVPGTVRAIVARMPYLPADGPADWRRHELARLDDPATAVVSLYARGRDYHKVLRNRLQQLAARIETEIGRFGYRVFTDSAPVMEVALASQGGLGWRGKHTLLLDREGGSMFFLGEILVDIPLPADPAEAPHCGSCRRCIDICPTGAILEPYRLDARRCISYLTIEHKGPIPEPLRAPMGNRVYGCDDCQLACPWNKFAHRATLPDFDVRNGFDAPDMVDLFGWTEAEFNQRLEGSPIRRIGHERWLRNLAVGLGNSLRRAAADDPALAARIRAALRACQDTATPLVREHVDWALAQDPAAD

SEQ ID NO: 76123 - protein, 397 aa, Cupriavidus pauculus
  misc_feature (1)..(397): tr|A0A2N5CJM3|A0A2N5CJM3_9BURK Epoxyqueuosine reductase OS=Cupriavidus pauculus OX=82633 GN=queG PE=3 SV=1
MIDRAVPAPTPAQTAHPAEDSAPARPDPASVTTDVDLASLAASLRSWGRALGFDEIRIADVDLRHAEAGLLAWLQAGYHGDMDYMANHGAKRARPHELVPGTVRAIVARMPYLPAQGPGDWRRHELARLDDPSTAVISLYARGRDYHKVLRNRLQQLAARIETAIGPFGYRVFTDSAPVMEVALASQGGLGWRGKHTLLLDRDGGSMFFLGEILIDIPLPADPTEAPHCGNCRRCIDICPTGAILEPFRLDARRCISYLTIEHKGAIPEPLRAPMGNRVYGCDDCQLACPWNKFAHRATLPDFDVRNGFDAPDMADLFGWTEAEFNQRLEGSPIRRIGHERWLRNLAVGLGNSLRVASTSDPALAQRIRTALLARRDTATPLVREHIDWALAQDTAG

SEQ ID NO: 76124 - protein, 393 aa, Cupriavidus pinatubonensis
  misc_feature (1)..(393): tr|Q475G9|Q475G9_CUPPJ Epoxyqueuosine reductase OS=Cupr iavidus pinatubonensis (strain JMP 134 / LMG 1197) OX=2 64198 GN=queG PE=3 SV=1
MTERASEAPGAPVPLPAAAADAAGTDGLEALVQSIRDWGTELGFASVRIADVDLGHAEPGLMAWLAQGYHGDMDYMANHGPRRARPAELVPGTVRAIVARMPYLPAPATPDWRRHELARLDDPSTAVLSLYARGRDYHKVLRNRLQQLASRIEGAIGPFGYRVFTDSAPVMEVALASQGGLGWRGKHTLLLDRDGGSMFFLGEILVDIPLPADPPEASHCGNCHRCIDICPTRAILAPYKLDARRCISYLTIEHKGPIPEQFRAPMGNRVYGCDDCQLACPWNKFAHRATLPDFDVRNGFDAADMVDLFLWTEAEFNLRLEGSPIRRIGHERWLRNLAVGLGNSLRAAASGQRPQDRELAERIRTALESRLADATPLVREHLDWALAQGRAVS

SEQ ID NO: 76125 - protein, 368 aa, Cupriavidus plantarum
  misc_feature (1)..(368): tr|A0A316F4E4|A0A316F4E4_9BURK Epoxyqueuosine reductase OS=Cupriavidus plantarum OX=942865 GN=queG PE=3 SV=1
MRALVASIRAWGAELGFDAVRIADVDLSHAEAGLLAWIDAGHHGDMDYMANHGARRARPAELVPGTVRAIVARMPYLPAQGPENWRAHEFSRLDDPSTAVISVYARGRDYHKVLRSRLQQLASRIEQALGAFGYRVFTDSAPVMEVALATQGGLGWRGKHTLLLDREGGSMFFLGEILVDIPLPADPPETPHCGQCTRCIDICPTQAILAPYRMDARRCISYLTIEHKGAIPEALRAPMGNRVYGCDDCQLACPWNKFAHRATLPDFDVRNGFDAPDMVALFLWTEAEFNQRLEGSPIRRIGHERWLRNLAVGLGNSLRAASAAQGDAALAALAARIRGALHARQQDASALVREHVDWALAQDAAPVS

SEQ ID NO: 76126 - protein, 400 aa, Cupriavidus sp.
  misc_feature (1)..(400): tr|A0A2E9RZC2|A0A2E9RZC2_9BURK Epoxyqueuosine reductase OS=Cupriavidus sp. OX=1873897 GN=queG PE=3 SV=1
MIDRAAPAPSPLCSASATSPQSTAQAPDASWQAGEEDMARLTASIRAWGCELGFDAIRIADVDLRHAEAGLLAWLQAGYHGDMDYMANHGTKRARPGELVPGTVRAIVARMPYLPAQGPQDWRRHELARLEDPATAAISLYARGRDYHKVLRNRLQQLAARIEAEIGTFGYRVFTDSAPVMEVALASQGGLGWRGKHTLLLDRDGGSMFFLGEILVDIPLPADAPEATHCGNCRRCIDICPTGAILEPYRLDARRCISYLTIEHKGAIPEPLRVPMGNRVYGCDDCQLVCPWNKFAHRATLPDFDVRNGLDSPDMVELFGWSEAEFNQRLEGSPIRRIGHERWLRNLAVGLGNSLRAASHDNAALAARIRAALLARRNDATPLVREHIDWALAQESAAVS

SEQ ID NO: 76127 - protein, 400 aa, Cupriavidus sp.
  misc_feature (1)..(400): tr|A0A1G6LY30|A0A1G6LY30_9BURK Epoxyqueuosine reductase OS=Cupriavidus sp. YR651 OX=1855315 GN=queG PE=3 SV=1
MIDRAVPASLPSKDLPPAPLATASGTSGISGGSPAADDLALLVQSIRDWGAELGFDAIRIADVDLSHAEAGLLAWLQAGYHGDMDYMANHGTRRARPAELVPGTVRAIVARMPYLPAQGPDDWRRHELARLEDPATAVISLYARGRDYHKVLRNRLQQLAGRIETAIGAFGYRVFTDSAPVMEVALASQGGLGWRGKHTLLLDREGGSMFFLGEILVDIPLPADPAEDPHCGSCRRCIDICPTGAILAPYRLDARRCISYLTIEHKGPIPVEFRAPMGNRVYGCDDCQLACPWNKFAHRAALPDFDVRNGFDAPDMVELFLWTEEAFNQRLEGSPIRRIGHERWLRNLAIGLGNSLRTASATDAALADRIRSALLARRDDATPLVREHIDWALAQDAAAS

SEQ ID NO: 76128 - protein, 408 aa, Cupriavidus taiwanensis
  misc_feature (1)..(408): tr|A0A375GW95|A0A375GW95_9BURK Epoxyqueuosine reductase OS=Cupriavidus taiwanensis OX=164546 GN=yjeS PE=3 SV=1
MIDRVAPGPADAPPTPVPVPDPSGHAAAGPGELAALAASIRAWGAALGFASVRIADVDLAHAEPGLLAWLAQGYHGDMDYMANHGLRRARPAELVPGTVRAIVARMPYVPVAGAHAAAADWRRHELARLDDPATAVVSLYARGRDYHKVLRSRLQQLASRIEAEIGKFGYRVFTDSAPVMEVALASQGGLGWRGKHTLLLDRDGGSMFFLGEILVDIPLPADPPEAGHCGSCHRCLDICPTRAIVAPYRLDARRCISYLTIEHKGAIPVEFRAPMGNRVYGCDDCQLACPWNKFAHVATVPDFDVRNGLDAPDMVALFAWTEAEFNQRLEGSPIRRIGHERWLRNLAVGLGNSLRAALSGTRAEDAALAARIRAALLARRETATPMVQEHIDWALAQGGPPAQRAGAD

SEQ ID NO: 76129 - protein, 404 aa, Cupriavidus taiwanensis
  misc_feature (1)..(404): tr|B3R0W1|B3R0W1_CUPTR Epoxyqueuosine reductase OS=Cupr iavidus taiwanensis (strain DSM 17343 / BCRC 17206 / CI P 107171 / LMG 19424 / R1) OX=977880 GN=queG PE=3 SV=1
MIDRVAPGQADAPPTPVPDTSGHAAAGPGELAALAASIRAWGAALGFASVRIADVDLAHAEPGLLAWLAQGCHGDMDYMANHGLRRARPAELVPGTVRAIVARMPYVPAAGAHAQAADWRRHELARLDDPATAVVSLYARGRDYHKVLRSRLQQLASRIEAEIGKFGYRVFTDSAPVMEVALASQGGLGWRGKHTLLLDRDGGSMFFLGEILVDIPLPADPPESGHCGSCHRCLDICPTRAIVAPYRLDARRCISYLTIEHKGAIPVEFRAPMGNRVYGCDDCQLACPWNKFAHVATVPDFDVRNGLDAPDMVALFQWTEAEFNQRLEGSPIRRIGHERWLRNLAVGLGNSLRAARSGTRAEDAALAARIRAALLARREAATPLVHEHIDWALAQGGPPAQQAG

SEQ ID NO: 76130 - protein, 379 aa, [Curtobacterium] plantarum
  misc_feature (1)..(379): tr|A0A3M7UE21|A0A3M7UE21_9GAMM Epoxyqueuosine reductase OS=[Curtobacterium] plantarum OX=221276 GN=queG PE=3 S V=1
MSYPLDLHQFAQQIKQWGLDLGFQQVGITDTDLSAEEPRLQAWLDKQYHGEMEWMARHGMMRARPHELLPGTLRVISVRMNYLPAKAAFASTLKNPQLGYVSRYALGRDYHKVLRNRLKKLGEMIQQHCGELNFRPFVDSAPLLERPLAAKAGLGWTGKHSLILNREAGSWFFLGELLIDIPLPIDTPQQEQCGRCVACMTICPTSAIVEPYVVDARRCISYLTIELEGAIPEEFRPLMGNRIYGCDDCQLICPWNRYGQLSDESDFSPRAALHAPELIDLFQWDEAKFLRITEGSAIRRIGHLRWLRNIAVALGNAPWSPEIVQVLEQRLGESDLLDEHILWAITQQQQKREQLVVEVQPAQQKRLVRAVEKGLPRDA

SEQ ID NO: 76131 - protein, 431 aa, Curvibacter putative
  misc_feature (1)..(431): tr|C9YGD6|C9YGD6_9BURK Epoxyqueuosine reductase OS=Curv ibacter putative symbiont of Hydra magnipapillata OX=66 7019 GN=yjeS PE=3 SV=1
MAHQRSFAGPQIAMQRDEGMGQFGLCRPVRSESGGGGFICPHQHRGGGSAFYNGVVTINSTQIKAQFDGDHVVALMQGWARELGFSQIGVAGVDLSSAEAGLLAWLSHGFHGEMGYMAHHGLKRARPAELVPGTVSVITTRMDYLPMGTNDGWADVELARLQRPQEGIVSLYARGRDYHKVLRNRLQKLADQLSAHMGPLGYRVFTDSAPVLEAELAARSGQGWRGKHTLLLNREAGSMFFLGEIYVDVALPATAPTEAHCGSCNACITACPTQAIIAPHRLDARRCISYLTIEHDGPIPLELRPLIGNRIYGCDDCQLVCPWNKFARRSSLPDFDAREGLAGEALATLLDWTEDTFLKRTEGSPIRRIGHVRWLRNVAVAMGNALRSERLGDIERLTLVRSLQRRIHHPDPLVQEHVQWAMQAFQPVSPD

SEQ ID NO: 76132 - protein, 376 aa, Curvibacter sp.
  misc_feature (1)..(376): tr|A0A433BD74|A0A433BD74_9BURK Epoxyqueuosine reductase OS=Curvibacter sp. OX=1888168 GN=queG PE=3 SV=1
MQINGHQFVSRIQGWALELGFSQIGVAGIDLASAEPGLEAWLAEGFHGSMNYMAAHGLKRARPAELVPGTVSVLTARMDYLPASTSPDWTEHELARLQRPGEAVVSLYARGRDYHKVLRSRLQKLAERMAAELGPLGYRVFTDSAPVLEAELAARSGQGWRGKHTLVLNREGGSMFFLGEIYLDIALPPSEPVTAHCGQCSACLQACPTQAIVAAHRVDARRCVSYLTIEHDGPIDPALRPLMGNRIYGCDDCQLVCPWNKFAQRSPLPDFDERAGLSGQTLAQMLGWSESEFLRRTEGSPIRRIGHWRWVRNLAVAAGNALKAGLSGDEAAVLCQALVAHQPGADPVLAEHLAWALSAAPPGPMAGSPCPAGSTG

SEQ ID NO: 76133 - protein, 351 aa, Curvibacter sp.
  misc_feature (1)..(351): tr|A0A2D0IC33|A0A2D0IC33_9BURK Epoxyqueuosine reductase OS=Curvibacter sp. PD_MW3 OX=2027918 GN=queG PE=3 SV=1
MRGWARELGFSQIGVSGVDLSAAEEGLQAWLARGFHGEMAYMAAHGLRRARPAELVPGTVSVITARMDYLPSGTADDWQSVEFDRLQRPQEGVVSIYARGRDYHKVLRARLQKLSDRMAEHIGPFGHRVFTDSAPVLEAELAARSGQGWRGKHTLVLSREAGSMFFLGEIYVDVALPASEPVSGHCGSCNACIEVCPTQAIVAPFRLDARRCISYLTIEHAGPIPLELRPLLGNRIYGCDDCQLICPWNKFAQRSPLPDFDAREGLSGSSLVALFAWSEPEFLQRTEGSPIRRIGHIRWLRNIAVALGNALRTTTDPAIVEALRQRASDPSELVREHVAWALAQQTQARQA

SEQ ID NO: 76134 - protein, 320 aa, Cuspidothrix issatschenkoi
  misc_feature (1)..(320): tr|A0A2S6CVW1|A0A2S6CVW1_9CYAN Epoxyqueuosine reductase OS=Cuspidothrix issatschenkoi CHARLIE-1 OX=2052836 GN= queG PE=3 SV=1
MNECTSISSTIVKEKAKEVGFHLVGVTTVKDLEPRETENLSNWLKQGYHADMEWMKNPKREDISLVMPEVRSLISVALNYYTPHVHQKGDEYGKISRYAWGRDYHRIMHKKLKELASWLESLDADIKARYYADTGPVQDKIWAQKTGIGWIAKNGNVITKKYGSWVFLGEILTNLELESDRPATQHCGTCTRCLQACPTSAITEPFVVDANRCIAYHTIENRAKELPPDITPHLQGWVAGCDICQDVCPWNQRFSQVTDVSDFQPYPGNLAPKLVELAQISNEEWDKRFTASALRRIKPEMLRRNARANLDQKYGIEASY

SEQ ID NO: 76135 - protein, 318 aa, Cyanobacteria bacterium
  misc_feature (1)..(318): tr|A0A3M2G573|A0A3M2G573_9CYAN Epoxyqueuosine reductase OS=Cyanobacteria bacterium J007 OX=2420339 GN=queG PE= 3 SV=1
MVSTSSSPPPDRDRVKQQALDLGFHKVGIATVEPPPTDAARQLQTWCDRGYGAEMDWMANPKRQDIRQVMPEARSLICVALNYYTPTPHSDRPDRAKISRYGWGRDYHRVMHKKLKALATWLQAQGDGIQARYYADTGPIQDKVWAQRAGIGWIAKNSNVITREYGSWVFLGEVLTNLTLESDRPHTQHCGSCTRCIDACPTGAIVEPFVVDANRCIAYHTIENRSPDLPDNIKPHLEGWVAGCDICQDVCPWNQRFATETDVSEFRPYPENLAPTFAKLAELSDTEWDRRFRASALRRIKPQMWRRNARANLENVRE

SEQ ID NO: 76136 - protein, 322 aa, Cyanobacteria bacterium
  misc_feature (1)..(322): tr|A0A352ABW1|A0A352ABW1_9CYAN Epoxyqueuosine reductase OS=Cyanobacteria bacterium UBA9273 OX=2055791 GN=queG PE=3 SV=1
MKIAVTSSEVKQKAQSLGFHKVGLAPVNSDLDSSTRQHLKTWLALGYQADMTWMENPKRLDIRACMPEVQSIICVALNYYTPHQHPEGKDYAKISRYGWGRDYHKVMHQKLKALANWLSEQGEGIQARYYADTGPVQDKVLAQRAGIGWIAKNGNVITREYGSWVFLGEVLTNLALTPDAPHTEHCGSCTRCLDACPTGAITKPFVVDANRCIAYHTIENRNPELPSSLVPYLNGWVAGCDICQDVCPWNQRFAQPTNVPEFEPYPGNLAPKLTELATLSDGEWDRCFRASALRRIKPEMLRRNARANQLASESKSSSIDTL

SEQ ID NO: 76137 - protein, 312 aa, Cyanobacterium aponinum
  misc_feature (1)..(312): tr|K9Z7Q0|K9Z7Q0_CYAAP Epoxyqueuosine reductase OS=Cyan obacterium aponinum (strain PCC 10605) OX=755178 GN=que G PE=3 SV=1
MEKLSEQIKEKALEIGFHRVGIVDVNENRDKQQENQKRLQKWLDNGYHAQMEWMDNPRRKDITLCWQEVKSIICLALNYYTPHQHSDNPEIGKISRYGWGRDYHRIITKKLKTLARWLTEKDPSAKVRYYVDTGPIQDKFWAQQAGIGWIAKNANVITREYGSWVFLGEILTNLPLEADQPHTNHCGTCTRCLSACPTNAITEPFVVDANRCIAYHTIENRNPQLPDEIAKNLNGWVAGCDICQDVCPWNQRFAQETDITDFHPYPENLHPKLADLANMTEQEWDKRFQGSALRRIKPQMWQRNAKTQMKKI

SEQ ID NO: 76138 - protein, 312 aa, Cyanobacterium aponinum
  misc_feature (1)..(312): tr|A0A2G3PFE8|A0A2G3PFE8_9CHRO Epoxyqueuosine reductase OS=Cyanobacterium aponinum IPPAS B-1201 OX=2047986 GN= queG PE=3 SV=1
MEKLSEQIKEKALEIGFHRVGIVDVNENRDKQQENQKRLQKWLDNGYHAQMEWMDNPRRKDITLCWQEVKSIICLALNYYTPHQHSDNPEIGKISRYGWGRDYHRIITKKLKTLARWLTEKDPSAKVRYYVDTGPIQDKFWAQQAGIGWIAKNANVITKEYGSWVFLGEILTNLPLEADQPHINHCGTCTRCLSACPTNAITEPFVVDANRCIAYHTIENRNPQLPDEIAKNLNGWVAGCDICQDVCPWNQRFAQETDITDFHPYPENLHPKLADLANMTEQEWDKRFQGSALRRIKPQMWQRNAKTQMKKI

SEQ ID NO: 76139 - protein, 294 aa, Unknown
  misc_feature (1)..(294): tr|A0A0R2U4J7|A0A0R2U4J7_9CYAN Epoxyqueuosine reductase (Fragment) OS=cyanobacterium BACL30 MAG-120619-bin27 O X=1655601 GN=ABR96_06155 PE=3 SV=1
FDPVGLAAVPAGERLSLRTAALERWLAAGYQADMAWMADPRRRAVEQLLPGVRSLLAVGLNYYVEAERAPGALKVARYGWGRDYHRVIDGRLRQLGRWLEQQVPEVGWRACVDSAPLMDKAWAEQAGLGWIGKNGNLINRERGSWLLLGHLLTTLELPADAAATPLCGSCSRCLPACPTGAISEPFVVDSRRCLAFHTIENRDPELPQAISSKLEGWVAGCDICQDVCPWNQQPLRSSEDADLQPRPWLLNLQAEEALGWSDADWDTKLRASALRRLKPWMWRRNLRASRSDTA

SEQ ID NO: 76140 - protein, 326 aa, Epithemia turgida
  misc_feature (1)..(326): tr|A0A077JFB4|A0A077JFB4_9CYAN Epoxyqueuosine reductase OS=cyanobacterium endosymbiont of Epithemia turgida is olate EtSB Lake Yunoko OX=1228987 GN=queG PE=3 SV=1
MLNGSFCLEKKQKLVMNIEKWTETIKQKILDLGFHKVGIVNVNSQFNDTATTHLKRWLALGYHADMAWMSNPKRLNIRDCMPEVKSVICVALNYYTPHQRPEGKKYGKVSRYGWGRDYHNVMHKKLKAFSQYLKEQEDSIKTRYYADTGAIQDKVWAQRAGIGWISKNSNLITREYGSWVFLGEVLTNLTLIPDTPHTQHCGTCTRCLEACPTGAIVQPFVVDANRCIAYHTIENRQATLPKAITSNLKGWIAGCDICQDVCPWNQRFGQETNIVDFQPYSQNIAPKLTEIANISLKAWDNHFRSSALRRLKWERLRRNARAILDT

SEQ ID NO: 76141 - protein, 311 aa, Rhopalodia gibberula
  misc_feature (1)..(311): tr|A0A2Z5SXF4|A0A2Z5SXF4_9CYAN Epoxyqueuosine reductase OS=cyanobacterium endosymbiont of Rhopalodia gibberula OX=1763363 GN=queG PE=3 SV=1
MNTEEWTETIKQKILELGFHKVGIANVDSQFNDTATNYLKRWLALGYHADMAWMDNPKRLNIRDYMPQVKSIICVALNYYTSHQRPDGKEYGKISRYGWGRDYHNVMHKKLKAFSQQLKGQEGSIKIHYCADTGTIQDKVWAQRAGIGWIAKNSNLITREYGSWVFLGEVLTNLTLIPDTPYTQHCGTCTRCLEACPTGAIVQPFVIDANRCIAYHTIENRQATLPEEIASNLKGWVAGCDICQDVCPWNQRFAQETNIVDFEPYTQNIAPKLTELANISPKDWDNHFRASALRRIKWERLRRNARASLGK

SEQ ID NO: 76142 - protein, 315 aa, Cyanobacterium sp.
  misc_feature (1)..(315): tr|A0A2K8WKP7|A0A2K8WKP7_9CHRO Epoxyqueuosine reductase OS=Cyanobacterium sp. HL-69 OX=2054282 GN=queG PE=3 SV =1
MMKLTAQEVKQKAKEIGFHEVGIASVEEVGDYHQRAVNNLQKWLDKGYQADMKWMGNPKRQNINECMEGVQSVISVALNYYTPHERSGNPEDAKISRYGWGRDYHRIIQKRLKVFAQWFNDMGIEARYYVDTGPIQDKVWAQKAGIGWIAKNGNVITRNYGSWVFFGEVLVNIPLDVDKPHTNHCGTCTRCISACPTDAITEPFVVDANRCIAYHTIENRAESLPSAIAPNLNNWVAGCDICQDVCPWNQRFAQPTDIEDFNPYPENLNPKLTELAQLSDEEWDKRFTASALRRIKPAMWRRNAQAQINNLIPNT

SEQ ID NO: 76143 - protein, 310 aa, Cyanobacterium sp.
  misc_feature (1)..(310): tr|A0A1E5QYB8|A0A1E5QYB8_9CHRO Epoxyqueuosine reductase OS=Cyanobacterium sp. IPPAS B-1200 OX=1562720 GN=queG PE=3 SV=1
MKLTAEEVKQKAKDIGFHEVGIASVEEVGDYHQRAVNNLQKWLDKGYQAEMKWMGNPKRQNIKECMEGVESVISVALNYYTPHERSGNPEDAKISRYGWGRDYHRIIQKRLKVFAQWFNDMGIEARYYVDTGPIQDKVWAQKAGIGWIAKNGNVITRNYGSWVFLGEILVNIPLDVDKPHTNHCGTCTRCISACPTDAITEPFVVDANRCIAYHTIENRAENLPSAIAPNLNNWVAGCDICQDVCPWNQRFAQPTDVEDFNPYPENLNPKLTELAQLSDEEWDKRFTASALRRIKPAMWRRNAQAQIEMT

SEQ ID NO: 76144 - protein, 311 aa, Cyanobacterium stanieri
  misc_feature (1)..(311): tr|K9YQ25|K9YQ25_CYASC Epoxyqueuosine reductase OS=Cyan obacterium stanieri (strain ATCC 29140 / PCC 7202) OX=2 92563 GN=queG PE=3 SV=1
MGLTAREVKEKAREIGFHAVGIASVEEMDDYRQKAVNHLQRWLDKGYQADMEWMANPRRQDITQCMEGVKSVISVALNYYTPHERSGNAEDAKISRYGWGRDYHRIIQKRLKIFTQWLKERDEDLEARYYVDTGPIQDKVWAQKAGLGWIAKNGNLITRNYGSWVFLGEILVNIPLEVDKPHTSHCGTCSRCISACPTEAITEPFVVDANRCIAYHTIENRAENLPSAIALNLNGWVAGCDICQDVCPWNQRFAQPTDIEDFNPYPENLNPKLKELAQLSEEEWDKRFTASALRRIKPPMWRRNAQAQLNK

SEQ ID NO: 76145 - protein, 313 aa, Ornithocercus magnificus
  misc_feature (1)..(313): tr|A0A4Y3G6T4|A0A4Y3G6T4_9CYAN Epoxyqueuosine reductase OS=cyanobiont of Ornithocercus magnificus OX=2496102 G N=queG PE=3 SV=1
MANQDSIGRLSAELKRQARNQGFEPVGIACLPGGPQLQLRTAALQRWLAAGHQADMSWMAKASRTQAGLLLDGAKSLLAVGLNYYVRQERKPGCLAVARYGWGRDYHRVVSRRLRRLGHWLEEQCPGSRWRVCVDTAPLLDKAWAEEAGLGWIGKHSNLIQAQRGSWMVIGHLLTTEKLQADRPSTPLCGRCHDCIDACPTKAIREPFVVDARRCIAYHTIENRSQQLPSMITATLGPWVAGCDICQDVCPWNHGPIPSSEDPDVQPRPWLLSLEREKAMVWSNASWDKRLQGSALRRIKPWMWRRNITSAQP

SEQ ID NO: 76146 - protein, 323 aa, Cyanobium gracile
  misc_feature (1)..(323): tr|K9PA57|K9PA57_CYAGP Epoxyqueuosine reductase OS=Cyan obium gracile (strain ATCC 27147 / PCC 6307) OX=292564 GN=queG PE=3 SV=1
MSTPSSLSALAAGLRARAEGLGFAPVGLAAVPGGSRLPLRTAALERWLAAGHQAGMGWMNDPRRRRIEALLPGVRSILAVGWNYHVARERAPGSLQVARYGWGRDYHRVIDGRLRQLGRWLEQAAPGTTWRACVDSAPLLDKAWAEEAGLGWIGKNGNLIHRRRGSWMLLGHLLTSLDLPPDRPAEPLCGACTACIDACPTGALDEPFVVDARRCIAYHTIENRDEALPAAIAGKLEGWVAGCDICQEVCPWNRRPLPVATDADVQPRPWLLDLRGTEALGWSDADWDERLRASALRRIRPALWRRNIRAALAGGWGQRGTAP

SEQ ID NO: 76147 - protein, 310 aa, Cyanobium sp.
  misc_feature (1)..(310): tr|A0A2W7A644|A0A2W7A644_9CYAN Epoxyqueuosine reductase OS=Cyanobium sp. OX=2164130 GN=queG PE=3 SV=1
MTLARELKREAAALGFEPVGLAAVPAGERIELRTAALQRWLAAGHQASMDWMADPRRQRIESLLPGVRSLLAVGLNYHVAMQRVPGSLAVARYGWGRDYHRLIDGRLRQLGRWLEGQVPGVRWRACVDSAPLLDKAWAEQAGLGWIGKNGNLIHRRHGSWFLIGHLLTSLELPADSPAEPLCGSCNRCLDACPTGAIPEPFVVDARRCIAFHTIENRDPVLPAAISAAMGPWVAGCDICQDVCPWNHQPLVSSTDADLQPRPWLLNLKAEEAINWSDSDWDQRLRASTLRRIKPWMWRRNLLASAGRTGA

SEQ ID NO: 76148 - protein, 321 aa, Cyanobium sp.
  misc_feature (1)..(321): tr|A0A2E8TF17|A0A2E8TF17_9CYAN Epoxyqueuosine reductase OS=Cyanobium sp. RS427 OX=2024873 GN=queG PE=3 SV=1
MSELPINSDQPLGQALKQRAQTEGFSPVGIARLPGSTRLQLRTAALERWLEAGHQADMGWMAAPRRKDPTTLLDGARSLLAVGLNYYVDVQATPGSLRVARYGWGRDYHRVVDQRLRRVGRWLSDQRPDCRWRACVDSTPLLDKAWAEEAGLGWIGKHSNLITSHQGSWLVIGHLLTDLDLEPDEPARSLCGRCRACMDACPTDAITEPFVVDSRRCIAYHTIENRDAELPDQIASALGPWVAGCDICQEVCPWNHKQLPSSADPELQPRPWLLNLDREKLDSWDDATWNTNLQGSALRRIKPWMWRRNAAAAQPDPPSTL

SEQ ID NO: 76149 - protein, 315 aa, Cyanobium usitatum
  misc_feature (1)..(315): tr|A0A2P7MU10|A0A2P7MU10_9CYAN Epoxyqueuosine reductase OS=Cyanobium usitatum str. Tous OX=2116684 GN=queG PE= 3 SV=1
MTLHAHHDLALRLKQQAQQLGFDPVGLAAVPAGERLELRTAALERWLAAGYQADMAWMADPRRRAVEQLLPGVRSLLAVGLNYYVEADRAPGALKVARYGWGRDYHRVIDGRLRQLGRWLEQQVPGVGWRACVDSAPLMDKAWAEQAGLGWIGKNGNLINRERGSWLLLGHLLTTLELPADAAATTLCGSCSRCLPACPTGAITEPFVVDSRRCLAFHTIENRDPELPQAITSKLEGWVAGCDICQDVCPWNQQPLQSSEDADLQPRPWLLNLQAEEALGWSDADWDTKLRASALRRLKPWMWRRNLRASRSGTA

SEQ ID NO: 76150 - protein, 319 aa, Cyanosarcina cf.
  misc_feature (1)..(319): tr|A0A2T1F8A8|A0A2T1F8A8_9CHRO Epoxyqueuosine reductase OS=Cyanosarcina cf. burmensis CCALA 770 OX=2107697 GN= queG PE=3 SV=1
MTNLTSDQIKQKALELGFHKVGIAAVEAVGTAERQRLQAWLQLGYQADMAWMANPKREDIRLVMPEVRSLICVALNYYTPHQHSTDPTNAKISRYGWGRDYHKVLHKKLKALSQWLRSQAADIQTRFYADTGPIQDKAWAQQAGIGWIAKNGNVITREYGSWVFLGEVLTDLVLTPDRPHTQHCGNCTRCIEACPTQAITQPFVVDANRCIAYHTIENRAEKLPEAIASRLDGWVAGCDICQDVCPWNQRFARTTDINEFHPYAHNLAPKLTELATIEDGEWDRRFTGSALRRVKPEMLRRNARANLESSATIVYSDSL

SEQ ID NO: 76151 - protein, 312 aa, Cyanothece sp.
  misc_feature (1)..(312): tr|B8HQK9|B8HQK9_CYAP4 Epoxyqueuosine reductase OS=Cyan othece sp. (strain PCC 7425 / ATCC 29141) OX=395961 GN= queG PE=3 SV=1
MVTKISSEGVKQQALRLGFHKVGIARADTAGIGQAVAHLQSWLNKGQQAGMEWMQAPQRQDIRQVMPEVQSVISVGLNYYTPHGHSTVTQRAKISRYAWGRDYHKVMQRRLKALANWLTEQGEGILVRYYADTGPVQDKAWAEQAGLGWVGKHSNLISRDYGSWLFLGEVLTNLPLDPDRPHSQHCGTCTRCLEACPTGAITQPFVVDANRCIAYHTIENRAETLPAEIVPHLQGWVAGCDICQDVCPWNQRFAQVTDVEEFQPYPWNLAPSVSELANLSDEEWDRRFRASALRRIKPAMLRRNAKAIASKS

SEQ ID NO: 76152 - protein, 312 aa, Cyanothece sp.
  misc_feature (1)..(312): tr|A0A3B8XYA3|A0A3B8XYA3_9CYAN Epoxyqueuosine reductase OS=Cyanothece sp. UBA12306 OX=2055757 GN=queG PE=3 SV= 1
MINRQEWTHIIKQKALDLGFHKIGIANVDSTFNDQAVTRLKNWLALGYHSDMAWMANPKRFDIRNCLPEVKSVICVALNYYTPHQHPPGKEYGKISRYGWGRDYHKVINKKLKALSQWLQNQGNSIQTRYYVDTGPIQDKVWAQRAGIGWIAKNSNVITREYGSWVFLGEILTNLTLIPDQPHTQHCGTCTRCLDACPTGAIPQPFVVDANRCIAYHTIENPAEILPEAIASNLQGWVAGCDICQEVCPWNQRFAQETDIADFQPYPQNLAPELKELAQMSLEEWDQRFRSSALRRIKLRRWQRNANANLEK

SEQ ID NO: 76153 - protein, 265 aa, Cyclobacteriaceae bacterium
  misc_feature (1)..(265): tr|A0A5C7Z424|A0A5C7Z424_9BACT tRNA epoxyqueuosine(34) reductase QueG (Fragment) OS=Cyclobacteriaceae bacteriu m OX=2099675 GN=queG PE=4 SV=1
MNPSVLIKKIATELGFSYCGIARADFLEEEAPRLEAWLKSGYQGKMGYLENHFDKRLDPTLLVPGAKSVISLIYNYYPEKDLAKENADSYKIAKYAYGEDYHQVIKEKLKHFLERVKETIGAVEGRAFVDSAPVHERAWAKKAGLGWIGKNSLLLNKSMGSFFFLAELIVDLELEYDGPIKDYCGTCTACMDACPTDAIPQPYVVDGSKCISYFTIELKDEIPLEAKGKFENWIFGCDICQDVCPWNSFSKPHTEPRFAPANELG

SEQ ID NO: 76154 - protein, 310 aa, Cyclobacteriaceae bacterium
  misc_feature (1)..(310): tr|A0A3N4H667|A0A3N4H667_9BACT Epoxyqueuosine reductase OS=Cyclobacteriaceae bacterium YHN15 OX=2487897 GN=que G PE=3 SV=1
MNNPLKYAQIIKIQAKNLGFDFCGIAKAEFLEEEAPKLDNWLNKNYQGQMTYMSNHFDKRLDPTKLVDGAKTVVSLIYNYYPQKTLPENPEDYKLAKYAYGQDYHFVIRDKLRMLLKLLQEQIGDFGGRAFVDSAPIMERQWAKKSGLGWLGKNSLLLNRQMGSFFFLAELIIDLEVEPDTPLLKDYCGTCTKCIDACPTEAIVQSGVVDGSKCISYFTIELKDQIPSEFKGKFENWVFGCDICQDVCPWNRFSKPHLEPAFNPHPDLENMNKRDWEEITEETFNRIFKKSAVKRAKYTGFLRNIIFQGK

SEQ ID NO: 76155 - protein, 307 aa, Cyclobacterium amurskyense
  misc_feature (1)..(307): tr|A0A0H4PEF0|A0A0H4PEF0_9BACT Epoxyqueuosine reductase OS=Cyclobacterium amurskyense OX=320787 GN=queG PE=3 S V=1
MNILAKHTQIVKNTASKLGFDYCGIAEATFLEEDAPKLEEWLNNNYHGKMAYMANHFDKRLDPRKLVEGAKSVVSLMYNYYPQQKLPESAEDLKIAKYAYGEDYHFVIKDKLKVFLECLKEEIGEVNGRVFVDSAPVMERQWAQKSGLGWKGKNSLLLNKTSGSFFFLAELIIDLPLAYDNPITKDYCGTCTRCIDACPTDAILQDNVIDGSKCISYLTIELKDAIPEDFKGKMKNWVFGCDICQDVCPWNRFSKPHQEEAFLPHADLEKIAWEEMTKETFNKVFKRSALKRTKWEGFQRNISFVKN

SEQ ID NO: 76156 - protein, 310 aa, Cyclobacterium halophilum
  misc_feature (1)..(310): tr|A0A1H6XRD8|A0A1H6XRD8_9BACT Epoxyqueuosine reductase OS=Cyclobacterium halophilum OX=1416801 GN=queG PE=3 S V=1
MQNREKNSQLIKDAARKLGFDFCGIAKAEFLEAEAPKLESWLNNNYHGKMAYMANHFDKRLDPRKLVDDAQSVISLIYNYYPPNRLPEGREDLKIAKYAYGKDYHFVIKDKLKDLLSLLREEIGEINGRVFVDSAPVMERQWAQKAGLGWTGKNSLLLNQHKGSFFFLAELIIDLPLHYDTPVTKDYCGTCTRCIDACPTDAILQPNLLDASKCISYLTIELKEEIPSEFKGKMENWAFGCDICQDVCPWNRFSKPHQEPEFLPHPELKSLDWEEMTKETFDRVFKKSALKRSKWEGLQRTIKFIRSSLS

SEQ ID NO: 76157 - protein, 308 aa, Cyclobacterium lianum
  misc_feature (1)..(308): tr|A0A1M7KIQ8|A0A1M7KIQ8_9BACT Epoxyqueuosine reductase OS=Cyclobacterium lianum OX=388280 GN=queG PE=3 SV=1
MSQLEKNTLLVKKTAQHLGFDYCGIAKAEFLEEEAPKLEAWLARNYNGKMAYMANHFDKRLDPTRLVDNARSVVSLVFNYYPPKKLPEGKNDIKIAKYAYGKDYHFVIREKLNHFLEILKEEIGEINGRAFVDSAPVMERQWAQRAGLGWTGKNSLLLNKNMGSFFFLAELIIDLPLHHDNPVERDYCGTCTRCIDACPTDAIVEANLVDASRCISYLTIELKEEIPAEFKGKMENWAFGCDICQDVCPWNRFSRPHREPEFLPHTEVESLDWQEMTKDTFDRVFRKSAVKRSKWTGMMRNIQFIRKK

SEQ ID NO: 76158 - protein, 310 aa, Cyclobacterium marinum
  misc_feature (1)..(310): tr|A0A5D9B5P7|A0A5D9B5P7_9BACT Epoxyqueuosine reductase OS=Cyclobacterium marinum OX=104 GN=queG PE=3 SV=1
MSTIEKHTQIVKKTASKLGFDYCGIAEATFLEEEAPKLENWLNKNYHGKMAYMANHFDKRLDPRKLVEGAKSVVSLMFNYYPQQNLDESRNALKIAKYAYGEDYHFVIKDKLKEFLKCLKEEIGEVHGRVFVDSAPVMERQWAVKAGLGWKGKNSLLLNKSSGSFFFLAELIIDLPLIYDNPSDKDYCGTCTRCVDACPTDAILQDNLIDGSKCISYLTIELKEAIPDDFKGKMENWVFGCDICQDVCPWNRFSKPHKEEAFLPHADLEKSAWEEMTKETFNKVFKRSALKRTKWEGFQKNIHFVKNESS

SEQ ID NO: 76159 - protein, 310 aa, Cyclobacterium marinum
  misc_feature (1)..(310): sp|G0J2F8|QUEG_CYCMS Epoxyqueuosine reductase OS=Cyclob acterium marinum (strain ATCC 25205 / DSM 745) OX=88007 0 GN=queG PE=3 SV=1
MSTIEKHTQIVKKTASKLGFDYCGIAEATFLEEEAPKLENWLNKNYHGKMAYMANHFDKRLDPRKLVEGAKSVVSLMFNYYPQQNLDESRNALKIAKYAYGEDYHFVIKDKLKEFLKCLKEEIGEVHGRVFVDSAPVMERQWAVKAGLGWKGKNSLLLNKSSGSFFFLAELIIDLPLIYDNPSDKDYCGTCTRCVDACPTDAILQDNLIDGSKCISYLTIELKEAIPDDFKGKMENWVFGCDICQDVCPWNRFSKPHKEEAFLPHADLEKSAWEEMTKETFNKVFKRSALKRTKWEGFQRNIHFVKNEAS

SEQ ID NO: 76160 - protein, 307 aa, Cyclobacterium qasimii
  misc_feature (1)..(307): tr|A0A512CG31|A0A512CG31_9BACT Epoxyqueuosine reductase OS=Cyclobacterium qasimii OX=1350429 GN=queG PE=3 SV=1
MKTLAEHTQIVKSTASRLGFDYCGIAEATFLEEDAPKLERWLNNNYHGKMAYMANHFDKRLDPRKLVEGAKSVISLMYNYYPQQEQLKDEDALKIAKYAYGEDYHFVIKDKLKEFLECLKEEIGEVDGRVFVDSAPVMERQWAQKSGLGWKGKNSLLLNKTSGSFFFLAELIIDLPLVYDSPTTKDYCGTCTRCIDACPTDAILQDNVIDGSKCISYLTIELKDAIPEDFKGKMKNWVFGCDICQDVCPWNRFSKPHKEEAFLPNADLEKSAWEEMTKETFNKVFKRSALKRTKWEGFQRNISFVKK

SEQ ID NO: 76161 - protein, 307 aa, Cyclobacterium qasimii; identical to SEQ ID NO: 76160
  misc_feature (1)..(307): tr|S7WGN9|S7WGN9_9BACT Epoxyqueuosine reductase OS=Cycl obacterium qasimii M12-11B OX=641524 GN=queG PE=3 SV=1

SEQ ID NO: 76162 - protein, 360 aa, Cycloclasticus sp.
  misc_feature (1)..(360): tr|A0A2G2QQ67|A0A2G2QQ67_9GAMM Epoxyqueuosine reductase OS=Cycloclasticus sp. OX=2024830 GN=queG PE=3 SV=1
MNANSTDFHDLAQEIKTLGQSLGFQQVGISDTELSEAEKQLADWLDAGFHGEMNYMHKHGTKRTRPNELHPGTVRVISCRMDYLPESMSITNELMADPARAYISRYALGRDYHKVIRKKLQQLATLIEELIGPFGYRAFVDSAPVMEKSIAEKAGLGWIGKHSNLINKEAGSWFFLGELYVDLPLPVDQPIKDHCGHCTDCIDICPTQAIVAPYVVDSRRCISYLTIELQGAIPEHLRPLMGNHIYGCDDCQQVCPWNRFANLTVEKDFMTRHQLDTASLLDVFSWSEEDFLRNTEGSAIRRIGYVSWIRNIAVALGNASYDPDILVALNKRENHPNPIINEHVRWAIEQHVAALHEVTT

SEQ ID NO: 76163 - protein, 353 aa, Cycloclasticus sp.
  misc_feature (1)..(353): tr|A0A1X1QKS4|A0A1X1QKS4_9GAMM Epoxyqueuosine reductase OS=Cycloclasticus sp. symbiont of Poecilosclerida sp. N OX=1840472 GN=queG PE=3 SV=1
MSKNSTDFQQLARDIKTLGESLGFQQVGITDTDLSEAEQQLSKWLGAGLHGEMGYMQKHGSKRTRPNELHAGTVRVISCRMDYLPEPMQRTNELMEDPVRAYISRYALGRDYHKVIRKKLQKLADLIEQKIGPFGYRAFVDSAPVMEKALAEKAGLGWIGKHSNVLNKQAGSWFFLGELYTSLALPIDDPAEEHCGDCTDCIDICPTQAIIAPYTVDARRCISYLTIELRGSIPIEFRPLMGNRIYGCDDCQQVCPWNRFASLTDEGDFKPRQNLDTIDLFNVFQWTEKTFLTKTEGSAIRRIGYESWIRNIAIALGNAPKNRLILSLLESRQNDSNPVIREHILWAIDQQAA

SEQ ID NO: 76164 - protein, 360 aa, Cycloclasticus zancles
  misc_feature (1)..(360): tr|S5T6U1|S5T6U1_9GAMM Epoxyqueuosine reductase OS=Cycl oclasticus zancles 78-ME OX=1198232 GN=queG PE=3 SV=1
MNENNIDLQQLAKEIKSLGQSLGFQQVGITDTELSDAEKQLNHWLEAGFHGDMDYMHKHGTKRTRPSKLHEGTIRVISCRMDYLPEHMERTKDLMKDPVRAYISRYSLGRDYHKLIRKRLQKLATLIEQKIGPFGYRVFVDSAPVMEKAIAEKAGLGWIGKHSNVLNKEAGSWFFLGELYIDLPLPIDTAAEKHCGRCTDCIDICPTQAIVAPYTVDARRCISYLTIELKGSIPEEFRAPMGNRIYGCDDCQQVCPWNRFASLTNEEDFLARQHLDTTSLIDIFRWDEHTFFKNTEGSAIRRIGYVSWIRNIAVALGNAPHDKEIIKTLSEKQHDDNPIIQEHVQWAITQQKQKKPLSNC

SEQ ID NO: 76165 - protein, 323 aa, Cylindrospermopsis raciborskii
  misc_feature (1)..(323): tr|A0A1X4G585|A0A1X4G585_9CYAN Epoxyqueuosine reductase OS=Cylindrospermopsis raciborskii CENA303 OX=1170769 G N=queG PE=3 SV=1
MSYLTSLSTHTIKEKAYKLGFHKVGVAVVLGESKEKERLRKWISLGYHADMDWMTNPKREDIKLVMPEVRSLVCVAINYYTPHPRPQGVEYGKISRYGWGRDYHRILHKKLKQLATWLESQGEGIKARYYADTGPIQDKVWAEKAGIGWIGKNGNVITREYGSWVFLGEVLTNLELEGDTPATQHCGTCNRCIEACPTEAIAQPFVVDANKCIAYHTIENRGETLPINIERNLQGWVAGCDICQDVCPWNQRFSQITDVVDFHPYPGNLAPKLVELSEITDEQWNEKFSASALRRIKPGMLRKNARANLTTLKLNNDSKSNHL

SEQ ID NO: 76166 - protein, 324 aa, Cylindrospermopsis raciborskii
  misc_feature (1)..(324): tr|A0A3F3KF70|A0A3F3KF70_9CYAN Epoxyqueuosine reductase OS=Cylindrospermopsis raciborskii S05 OX=2014879 GN=qu eG PE=3 SV=1
MSSLTSLSTHTIKEKAYKLGFHKVGVAVVLGVESKEKERLRKWISLGYHADMDWMTNPKREDIKLLMPEVRSLICVAINYYTPHSHPMGEEYGKISRYGWGRDYHRILHKKLKQLATWLESQGEGIKARYYADTGPIQDKVWAEKAGIGWIAKNGNVITREYGSWVFLGEVLTNLELEGDTPATQHCGTCNRCIEACPTQAITQPFVVDANKCIAYHTIENRGETLPINIERNLQGWVAGCDICQDVCPWNQRFSQVTDVVDFHPYPGNLAPNLVELSGITDEQWSEKFPASALRRIKPKMLRRNARANLTTLKLNNDSKSNHL

SEQ ID NO: 76167 - protein, 324 aa, Cylindrospermopsis sp.
  misc_feature (1)..(324): tr|A0A0R0M9J9|A0A0R0M9J9_9CYAN Epoxyqueuosine reductase OS=Cylindrospermopsis sp. CR12 OX=1747196 GN=queG PE=3 SV=1
MSSLTSLSTHTIKEKAYKLGFHKVGVAVVLGVESKEKERLRKWISLGYHADMDWMTNPKREDIKLLMPEVRSLVCVAINYYTPHSRPLGGEYGKISRYGWGRDYHRILHKKLKQLATWLESQGEGIKARYYADTGPIQDKVWAEKAGIGWIAKNGNVITREYGSWVFLGEVLTNLELEGDTPATQHCGTCNRCIEACPTQAITQPFVVDANKCIAYHTIENRGETLPINIERNLQGWVAGCDICQDVCPWNQRFSQVTDVVDFHPYPGNLAPKLLELSEITDEQWNEKFTASALRRIKPKMLRRNARANLTTLKLNNDSKSNHL

SEQ ID NO: 76168 - protein, 325 aa, Cylindrospermum sp.
  misc_feature (1)..(325): tr|A0A1Z4QC71|A0A1Z4QC71_9NOST Epoxyqueuosine reductase OS=Cylindrospermum sp. NIES-4074 OX=2005457 GN=queG PE =3 SV=1
MTQCALTSSSVVKEKAKELGFHQVGIAAVDDGVNATAVQRLQAWLALGYHAEMEWMAAPKRQDIHLVMPEVRSLVCVALNYYTPDQRPESEEYGKISRYGWGRDYHKIMHKQLKQLATWLESLGEGVQARYYADTGPVQDKVWAQKAGIGWIAKNGNVITREYGSWVFLGEVLTNLELESDRPSTEHCGTCTRCMQACPTGAITEPFVVDANRCIAYHTIENRSEQLPETVTPHLQGWVAGCDICQDVCPWNQRFAQVTDVTDFQPYPGNLAPKLIELAEISDQEWDQQFPASALRRIKPEMLRRNARANLDASRLKNDPESNNI

SEQ ID NO: 76169 - protein, 324 aa, Cylindrospermum stagnale
  misc_feature (1)..(324): tr|K9X0K7|K9X0K7_9NOST Epoxyqueuosine reductase OS=Cyli ndrospermum stagnale PCC 7417 OX=56107 GN=queG PE=3 SV= 1
MNQCALTSSSVIKEKAKELGFHKVGIAAVDGVDATERQRLQAWIALGYHADMEWMTSPKRQDIRLVMPEARSLVCVALNYYTDDQRPEGEEYAKVSRYGWGRDYHRVVHKKLKQLATWLESLDQSIQARYYADTGPVQDKVWAQKAGIGWIAKNGNVITREYGSWVFLGEVLTNVELESDRPSTEHCGTCTRCIQACPTGAITEPFVVDANRCIAYHTIENRAEKLPQTVAPHLQGWVAGCDICQDVCPWNQRFSQVTDVTDFQPYPGNVAPKLIELAEISDQEWDIKFTASALRRIKPEMLRRNASANLDASRRKNDPKSDNF

SEQ ID NO: 76170 - protein, 339 aa, Cystobacter ferrugineus
  misc_feature (1)..(339): tr|A0A1L9BCW1|A0A1L9BCW1_9DELT tRNA epoxyqueuosine(34) reductase QueG OS=Cystobacter ferrugineus OX=83449 GN=B ON30_13625 PE=4 SV=1
MPPLSTQHLRQLSTQVGFDLVGFARAEPIPGDFLLEWLAAGCDADMDWLGTRTAERLDVSLLLPGARTVIAFATNYYREDPRTEDSPIARYARGRDYHSTLRDSLKSFRRRLKEAYPEVHDYGSVDSGPMMEKVWAARAGLGYVGKNGCFITEPLGSWVLLAVLVLDAEVDAYAEGPTADRCGSCHLCIMSCPTGALLGQGRVDARACLSYQTIENRHAEVPESFRVEMDNLVFGCDICQDVCPLNRRPVTTSNKRFAPRAVAELGVMELAALTPEQYDQLIPGTALGRAKYDGLRRNAVYALGAAKRVEARPLIERLREDPSEAVRHAAEWALLHLNP

SEQ ID NO: 76171 - protein, 365 aa, Cystobacter fuscus
  misc_feature (1)..(365): tr|A0A250JFY2|A0A250JFY2_9DELT Epoxyqueuosine reductase OS=Cystobacter fuscus OX=43 GN=CYFUS_008288 PE=4 SV=1
MDPGEVHDLAPRVISEGARRLGYVEAVPPLSTEHLRQLSTQVGFDLAGFARAEPIPGDFLLEWLAAGRDADMDWLGERTAERLDVSLLLPGARTVIAFATNYYREEPRTEDSPIARYARGRDYHSTLRDSLKSFRRRLKEAYPEVRDYGSVDSGPMMEKVWASRAGLGYVGKNGCFITEPLGSWVVLAVLVLDAEVDAYADGPTADRCGSCHLCIMSCPTGALLGQGRVDARACLSYQTIENRHAEVPESFRVEMDNLVFGCDICQDVCPLNRRPVSTSNKRFVPRAVAELGVMELAALTPEQYDQLIPGTALGRAKYDGLRRNAVYALGAARRMEARPLIERLREDPSEAVRHAAEWALLHLGS

SEQ ID NO: 76172 - protein, 345 aa, Cystobacter fuscus
  misc_feature (1)..(345): tr|S9PPS3|S9PPS3_9DELT Epoxyqueuosine (OQ) reductase Qu eG OS=Cystobacter fuscus DSM 2262 OX=1242864 GN=D187_00 0456 PE=4 SV=1
MGYVEAVPPLSTKHLRQLSTQAGFDLVGFARAEPIPGDFFLEWLAAGCDADMDWLGERTAERLDVSLLLPGARTVIAFATNYYREEPRTEDSPIARYARGRDYHSTLRDSLKSFRRRLKEAYPEVRDYGGVDSGPMMEKVWAARAGLGYVGKNGCFITEPLGSWVVLAVLILDAEVDTYADGPTVDRCGSCHLCIMSCPTGALLGQGRVDARACLSFQTIENRHGEVPESFRVEMDNLIFGCDICQDVCPLNRRPVVTPNERFAPRAVAELGVMELAALTPEQYSQLIPGTALARAKYDGLRRNAVYALGAAKRLEARPLLERLREDPSEVVRHAAAWALLHLHP

SEQ ID NO: 76173 - protein, 314 aa, Cytophaga hutchinsonii
  misc_feature (1)..(314): tr|Q11Y54|Q11Y54_CYTH3 Epoxyqueuosine reductase OS=Cyto phaga hutchinsonii (strain ATCC 33406 / NCIMB 9469) OX= 269798 GN=yjeS PE=3 SV=1
MASLQIAHNTRIVKEAARIAGFDYCGISAARFLEEEAPRLESWLNRNQHGTMSWMENYFDKRLDPRKLVDGAKSVVSVLLNYTPAPEDEILSTGETKISRYAYGKDYHYVLKDKFKQMLQHITEQIGEVNGRAFVDSAPVMDKAWAKQGGLGWVGKHSNIITKDSGSYFFIGELIIDLELDADGPIKDYCGTCTRCIDACPTNAITEPYQVDGSKCISYLTIELKEQIPSEFKEQMQGWAFGCDICQEVCPWNRFAQPINKNEFSPSEELKKYFEMPLKEITKEVFNILFKDSTIKRTKIEGLSRNLTFIKKET

SEQ ID NO: 76174 - protein, 322 aa, Cytophaga sp.
  misc_feature (1)..(322): tr|A0A4R4KLT2|A0A4R4KLT2_9BACT Epoxyqueuosine reductase OS=Cytophaga sp. DMA-K-7a OX=2070510 GN=queG PE=3 SV=1
MTQTDKIAQERAILIKEKAAALGFDFCGISNAQFLEAEAPRLEKWLNKNQHGQMAWMANHFDKRLDPRKLMEGAQSVVSVLLNYYPEQRLSEDSEAYKLSKYAYGTDYHFVLKDKLKSLLTFIHTEIGEVQGRAFVDSAPVMDKVWAARSGLGWIGKHSNLLNRQMGSFFFIGELILDLELAADGPMTDYCGTCTRCIDACPTDAIVEPYVVDGSKCISYFTIELKEAIPKEVQGKFENWIFGCDICQDVCPWNRFSQPHTTPEFALSPALAAFTNKDWEEITEDVFKEIFRRSPVKRTKLEGLKRNLRFVQGNSGIETEND

SEQ ID NO: 76175 - protein, 316 aa, Cytophaga xylanolytica
  misc_feature (1)..(316): tr|A0A2W7NEH4|A0A2W7NEH4_9BACT Epoxyqueuosine reductase OS=Cytophaga xylanolytica OX=990 GN=queG PE=3 SV=1
MTSTPNLTDAIHRQQIRAKALDLGFDDIGFATAQRLNDDEPRLQKWLLNGANAEMAYMANHFEKRVDPRLLVDGACTIVSLLSSYKPAVESNNPDNFKIARYAWGHDYHEVIREKLNELFNYIRDHHYPDLQGRAFVDSAPVLERAWAARAGLGWMGKNTCLIHPKLGSYVFISELIINMPLTGNSSLVNNHCGSCSRCIDACPTQAITPGFVDARKCISYWTIEHKGEIDPSITQNLNNWIFGCDICQEVCPWNRKTPPSKEPSFSPQPQLLQMNKSDWEELSEDSFRIIFKKSAVKRTKYIGLMRNIRANTNQK

SEQ ID NO: 76176 - protein, 310 aa, Cytophagaceae bacterium
  misc_feature (1)..(310): tr|A0A2E2SJD4|A0A2E2SJD4_9BACT Epoxyqueuosine reductase OS=Cytophagaceae bacterium OX=2026729 GN=queG PE=3 SV= 1
MNSKDKYTQIIKNEAKRLGFMSCGIARAQFLEEEAPRLENWLNQDMHGEMGYMANHFDKRLDPTVLVPGAKSVVSLLLNYYPGEKQRPDTYKISKYAYGRDYHMVIKEKLKELMHHINLQIGEVHGRVFVDSAPVMDKAWAAKAGLGWIGKNSNLLTRQVGSFYFIAELIIDLELAYDTPVTDHCGTCTACIDACPTQAIVEPYKVDGSKCISYFTIELKDAIPDYAQGKMDEWMFGCDVCQDVCPWNRFSRPHSEPLFEPHPELLSNSRHEWEELTKEVFNEIFRKSAVKRTKYEGLRRNIQFLKDQEG

SEQ ID NO: 76177 - protein, 310 aa, Cytophagaceae bacterium
  misc_feature (1)..(310): tr|A0A401U727|A0A401U727_9BACT Epoxyqueuosine reductase OS=Cytophagaceae bacterium Ys OX=2482724 GN=queG PE=3 SV=1
MSPQTAHTALIKSAAANLGFSFCGIAKAEFLEDEAPRLEEWLQRGYQGKMSYLENYFDKRLDPRLLVPGAKSIITLGYNYYPSADLSQTSNLKIAKYAYGEDYHFVIKDKLKTLLEELRLSIGEIDGRAFVDSAPVMERAWAQRAGTGWIGKNSLLLNKQMGSFFFLAELIIDLELDYDSPIKDYCGTCTACMDACPTEAIPEPYVVDGSKCISYFTIELKDAIPEEVKGKFDNWIFGCDICQDVCPWNRFSKAHSEKKFEPSDELKNLSKSDWKEITEEVFQLVFRRSAVKRTKLEGLQRNIEFVKTSK

SEQ ID NO: 76178 - protein, 314 aa, Cytophagales bacterium
  misc_feature (1)..(314): tr|A0A355BMP1|A0A355BMP1_9BACT Epoxyqueuosine reductase OS=Cytophagales bacterium OX=2053541 GN=queG PE=3 SV=1
MNIRPAQRAQLMKEIAREEGFDFCGIAKAVFLEDEAHRLDTWLKRGYQGTMSYLENYTDKRLDPRLLVPGAQSVVSLLYNYYPAESLHADDGEFKVARYAYGEDYHHVIKDKLFIVLQRLKERIGDIQGRVFVDSAPVMERAWAARSGLGWIGKNSLLLNRSMGSYFFLAEIIIDLEMEADGPIKDYCGSCTACQDACPTDAIVEPYVVDGSRCISYYTIELREQIPQVAQGKMNNWIFGCDICQEVCPWNRFSKPHQEPRFQPSNDLVDLDRKRWLEMTEDTFDRVFANSAIQRTKYEGLKRNIEFVTREVTK

SEQ ID NO: 76179 - protein, 312 aa, Cytophagales bacterium
  misc_feature (1)..(312): tr|A0A286IGH1|A0A286IGH1_9BACT Epoxyqueuosine reductase OS=Cytophagales bacterium TFI 002 OX=1945892 GN=queG P E=3 SV=1
MPQNPTNLIKTKAKELGFDFCGVSKAEFLEEEAPRLEQWLNQNYHGKMAYMANHFDKRLDPCKLVDGAKSVISVMLNYYPSKRLPEGEEDLKISKYAYGIDYHLVLKDKLKELFAYINEEIGEVGGRIFVDSAPVMDKAWAKKSGLGWVGKHSNLLNREMGSFFFLGEIICDLELEPDGPIKDYCGTCTACIDACPTDAITEYVVDGSKCISYYTIELKDAIPQDAKGKMKNWVFGCDICQDVCPWNRFSKPHSTPEFDLKPELAAFTNKDWEEITEEAFKEVFRKSPLKRTKLDGLKRNVSFVLNQSNYES

SEQ ID NO: 76180 - protein, 305 aa, Cytophagia bacterium
  misc_feature (1)..(305): tr|A0A2E0GYE2|A0A2E0GYE2_9BACT Epoxyqueuosine reductase OS=Cytophagia bacterium OX=2026730 GN=queG PE=3 SV=1
MIQKNTEFIKTEAKKLGFSGCGISKARFLSEEAKNFEKWLSNGYQGSMSYLEKNIDKRLNPTILVPGSKSVISLAFNYFPPKKLIDNNNFIISKYAYGKDYHKVLKKKLKKLFFLMREKIGNIEGRVFVDSAPIHERAWAKLSGLGWVGKNSLLINKNQGSFFFLAEIICDLELEYDEPVLNRCGNCSRCIDACPTDAITKAQVINAKKCISYLTIENKDNIPEELNDSMNNSIFGCDICQDVCPWNKNSKPHEEIEFLPKKNLRKLRKKDWVELTEETFDRIFEGSAIKRTKYKGLKRNIRAVS

SEQ ID NO: 76181 - protein, 305 aa, Cytophagia bacterium
  misc_feature (1)..(305): tr|A0A2E9WJY7|A0A2E9WJY7_9BACT Epoxyqueuosine reductase OS=Cytophagia bacterium OX=2026730 GN=queG PE=3 SV=1
MKKRNSKIIKKLAKKIGFSSCGISKARFLKEEEKNFEDWLKQGKQGKMGYLERNFDKRLNPKKLVPGAKSVISLTFNYFPPKKISNNNSFIISKYAYGKDYHYIIKEKLNALFSKIKEKIGNVEGRVFVDSAPIHERAWAKISGLGWIGKNSLLINKNMGSYFFLAEIVCDLDLEYDSIVSDHCGTCSKCIDACPTNAITEAQVIDSNRCISYLTIENKGDIPKELSQSFNDYIFGCDICQDVCPWNRFSKPHSEKELMPKEKLKKMSKKDWKELTKETFDIIFKDSAIKRCKFDGLKRNILSVS

SEQ ID NO: 76182 - protein, 310 aa, Dactylococcopsis salina
  misc_feature (1)..(310): tr|K9YWG9|K9YWG9_DACSA Epoxyqueuosine reductase OS=Dact ylococcopsis salina PCC 8305 OX=13035 GN=queG PE=3 SV=1
MVLTSQEIKTKAKRLGFHLVGVAAAENDEQILAQKRLQNWLASGYNADMEWMNNPKRFALQKCLPNVKSVIAVALNYYTPEQQSEDPEKGKISRYAWGRDYHKVMTKKLKALACWLEEQEETIQARFYCDTGPVQDKFWAQQAGLGWIAKNGNLITREYGSWVFLGEVLTTLELTPDTPHTEHCGTCTRCLEACPTDAFPQPFVVNAKRCIAYQTIENRAAELPKEINLNNWVAGCDICQEVCPWNQRFAKETDCDDFQPRPENIAPNLIELAQLRDESWDQKTRGSALRRIKPAMWRRNARANLEKDRD

SEQ ID NO: 76183 - protein, 356 aa, Dankookia rubra
  misc_feature (1)..(356): tr|A0A4R5Q9E3|A0A4R5Q9E3_9PROT Epoxyqueuosine reductase OS=Dankookia rubra OX=1442381 GN=queG PE=3 SV=1
MPETPTPAAFPPGETARAAIRAEARRLGFDAVGFTEALLPDAVRARLDGFLAAGMHGSMGWLAERAAQRAQPRGLWPEAVSVVSLGLSYAPGEDPLAILARRDRGAISVYAQGRDYHDVVKSRLKALGRWMAQRFGAELKVFVDTAPVAEKPLAQQAGLGWQGKHSNLVSRRHGSWLFLGEVYTTLALSPDPPERDHCGSCRNCLAACPTNAFPAPYRLDARRCISYLTIEHRGPIPEEFRAPMGNRIYGCDDCLAVCPWNKFARAHSEPGFAPRAALAAPKLAELAALDDAGFRALFSGSPVKRIGRDRFVRNVMIAAGNSADPALRPVAQALTEDPDPVVAEAARWAALRLEEA

SEQ ID NO: 76184 - protein, 354 aa, Dechloromonas aromatica
  misc_feature (1)..(354): tr|Q47BK0|Q47BK0_DECAR Epoxyqueuosine reductase OS=Dech loromonas aromatica (strain RCB) OX=159087 GN=queG PE=3 SV=1
MHDQNSTVDYAALKEKIREAGKELGFAAIGVARAEPGPAVEKMQEWLAAGCHGEMDYMARHAELRAQPQLLHPGTITVISAAIDYLPHTKTADHAGQAAISRYAQGRDYHKLIRSRLQKLADAIAAITGAFGYRVFSDSAPVMEVEYARQAGLGWRGKHTLLLSKQGSWRFLGDIYTDLPLPPDTPIEEHCGTCSACIAACPTGAIVAPYKVDARRCISYLTIELDGPIPEQYRPLIGNRIYGCDDCQLCCPWNRFAQIGDPEFAPRHGLDAATLIELFAWTEHQFNDRLAGNPIRRIGHERWLRNIAVALGNGPANTAAVEALARHADHPSQLIREHVAWALHKLGTQPRQAR

SEQ ID NO: 76185 - protein, 350 aa, Dechloromonas denitrificans
  misc_feature (1)..(350): tr|A0A133XMY7|A0A133XMY7_9RHOO Epoxyqueuosine reductase OS=Dechloromonas denitrificans OX=281362 GN=queG PE=3 SV=1
MHDQDSTVDYAALKEKIREAGQELGFAAVGVARAEPGPAVEHLRAWLAAGCHGEMDYMARHAELRAHPPQLHPGTITVISAAVDYLPHAKIADQPEQAAISRYAQGRDYHKVIRSRLQKLADAIAALIGPFGYRVFSDSAPVMEVEFARQAGLGWRGKHTLLLSKQGSWRFLGEIYTDLPLVPDAPIEEHCGTCSACLSACPTQAIVAPYQVDARRCISYLTIELDGPIPEEFRPLIGNRIYGCDDCQLCCPWNRFAQLGDPEFSPRHGLDAAQLIDLFAWTETEFNDRLAGNPIRRIGHARWLRNIAVAMGNGSPAVDAANALKSRAEHPDPLVREHVAWALQQLQAKS

SEQ ID NO: 76186 - protein, 349 aa, Dechloromonas sp.
  misc_feature (1)..(349): tr|A0A5C7ZH50|A0A5C7ZH50_9RHOO Epoxyqueuosine reductase OS=Dechloromonas sp. OX=1917218 GN=queG PE=3 SV=1
MHDQDSSVDYVALKAAIRDAGNVLGFSALGVARADPGPAVEHLRAWLAEGMHGTMDYMARHAELRAQPATLQPGTLTVISVALDYLPHTTVVSDPARAAVSRYAQGRDYHKVVRSRLQKLADAIAGIAGPFGYRVFSDSAPVMEVEFARQAGLGWRGKHTLLLSQQGSWRFLGEIYTDLPLPPDTPVAEHCGTCSACIDACPTGAIVAPYRVDARRCISYLTIELDGTIPEAFRPLLGNRIYGCDDCQLCCPWNRFARIGDPEFTPRQRLDSATLIELFAWTEAQFNDRLAGNPIRRIGHERWLRNIAIALGNGPATVDAEKALKSRADHPSAIIREHVAWALARHSAR

SEQ ID NO: 76187 - protein, 348 aa, Dechloromonas sp.
  misc_feature (1)..(348): tr|A0A3B7A988|A0A3B7A988_9RHOO Epoxyqueuosine reductase OS=Dechloromonas sp. HYN0024 OX=2231055 GN=queG PE=3 S V=1
MHDQDSMVDYAALKEKIRAAGQKFGFAAVGVARAKPGHAAEKMREWLAAGCHGEMDYMARHADLRADPQQLHPGTITVISAAIDYLPHLGTTDEPGQAAISRYAQGRDYHKLIRSRLQKLADAISELTGPFGYRVFSDSAPVMEVEFARQAGLGWRGKHTLLLSKQGSWRFLGDIYTDLPLPPDEPIDEHCGSCTACLDACPTRAIVAPYKVDARRCISYLTIELAGPIPEEFRPLIGNRIYGCDDCQLCCPWNRFAQLGDPEFSPRHGLDTASLINLFAWTAPEFDYRLAGNPIRRIGHERWLRNIAVALGNGPASTEARNALTAKLDNPSPLVREHVAWALTRLAP

SEQ ID NO: 76188 - protein, 353 aa, Defluviimonas alba
  misc_feature (1)..(353): tr|A0A159Z7S6|A0A159Z7S6_9RHOB 4Fe-4S ferredoxin, iron- sulfur cluster binding protein OS=Defluviimonas alba OX =1335048 GN=AKL17_4283 PE=4 SV=1
MPISTSEPPGAALKARLQAQALAEGFAKMGVCAPDAVPEAAGRLAAFVAAGRHGQMGWMAERMGWRGDPAALWPEARSVVMLAEVYTPGHDPLAVLERPECGAVSVYAQGRDYHDLVKRRLKRVGRWLLDQTVDGEAIKVFVDTAPVMEKPLAQAAGLGWQGKHTNLLGRDLGSWFFLGAIFTTVDLPKDAAEPERCGSCTACLDICPTRAFPAPFQLDARRCISYLTIEHRGPVDPELRALMGNRIYGCDDCLAVCPWNKFAQDATETGYASREAEPPLLADLAMLDDAGFRARFAGSPIKRIGRDRMVRNVLYAIGNSGDAGLRPVAAQLTGDADAAVADAARWAVARLGA

SEQ ID NO: 76189 - protein, 352 aa, Defluviimonas aquaemixtae
  misc_feature (1)..(352): tr|A0A2R8BJR7|A0A2R8BJR7_9RHOB Epoxyqueuosine reductase OS=Defluviimonas aquaemixtae OX=1542388 GN=queG PE=4 S V=1
MDLLALKARIADRATAEGFSAVGFCGPDAIPEAAGRLEAFVAAGRHGQMGWLAERMGWRGNPVALWPEAKTVIMLAEVYTPAGDPLAMLEARGRAAVSCYAQGRDYHDLVKKRLKRVGRWLIDEASKGSVPAEIKVFVDTAPVMEKPLAQAAGIGWQGKHTNLLSRDLGNWFFLGAIFTTLDLPKDMAESDHCGSCRACLDICPTRAFPAPYELDARRCISYLTIEHRGPVDEEFRALLGNRIFGCDDCLAVCPWNKFAARARETGYAARVGAPPLAELAGLDDAGFRARFSGSPVKRIGRDRFVRNVLYAIGNSGDPALAETARSLTGDPDAAVADAARWALGRLADSRQG

SEQ ID NO: 76190 - protein, 350 aa, Defluviimonas denitrificans
  misc_feature (1)..(350): tr|A0A2S8S8N4|A0A2S8S8N4_9RHOB Epoxyqueuosine reductase OS=Defluviimonas denitrificans OX=404881 GN=queG PE=3 SV=1
MDAAGLKHRLVAKAVEEGFAAARICRPDAIPEAAGRLATFVDQGRHGQMGWMAERMGWRGDPAALWPEARSVVMLAEVYTPEGDPLAVLDRPDRAAVSCYAQGRDYHDLVKKRLKRVGRWLIEAAEKGSVPAEIKVFVDTAPVMEKPLAQAAGLGWQGKHTNLVSRELGSWFFLGAIFTTLDLPVDGAEVDHCGSCRACLDICPTGAFPAPYQLDARRCISYLTIEHKGPVDEALRGALGNRIYGCDDCLAVCPWNKFAVAAREAGYAARVGAPPLAELATLDDAAFRARFSGSPVKRIGRDRFVRNVLYAIGNSGEEALSPLVESLLADADPAVADAAQWALRRLKSAR

SEQ ID NO: 76191 - protein, 344 aa, Defluviimonas sp.
  misc_feature (1)..(344): tr|A0A059INY1|A0A059INY1_9RHOB Epoxyqueuosine reductase OS=Defluviimonas sp. 20V17 OX=1417296 GN=queG PE=3 SV= 1
MFADLKNRLKARAIDEGFVAMGVCRPDAIPQAPARLEAFVGAGMHGQMGWMAERMGWRGDPAALWPEARSVVMLAESYTPEGDPLAVLEARDRGAVSVYAQGRDYHDLVKKRLKRLGRWLIEAGGGEIKVFVDTAPVMEKPLAQAAGLGWQGKHTNLLSRDFGNWVFLGAIFTTLDLPADPPETEHCGSCRACLEICPTRAFPAPFVLDARRCISYLTIEHKGPVDPELRPLMGNRIYGCDDCLAVCPWNKFAAVARETRYAGKVGAPPLAELAGLDEAAFRARFSGSPIKRIGRDRFLRNVLYAIGNSGDRSLAGAARAQIGDPCETVAEAARWAVTRLAAGG

SEQ ID NO: 76192 - protein, 342 aa, Dehalobacter sp.
  misc_feature (1)..(342): tr|A0A4R4CW92|A0A4R4CW92_9FIRM Fe-S oxidoreductase OS=D ehalobacter sp. 12DCB1 OX=2070364 GN=C1I38_11200 PE=4 S V=1
MHVENLIQDKAYEFGYEKCGIVRIQDLEGYDKCLRERIDKVPVSKMFYRSQSRLTDLQERYPWAKSVIVAVSHFGHYKAPGELKGHIAKHYLFDGRVNTESKEFKRSVAMEQFLQDLGLKTASNRNFGIVGLRWAAMKAGLGIIRKNNFFYTESGSWVELEAWITDRDMELVESTNLPICPEGCSNCIKACPTCSLSSPYTMNPLSCVSFLTTFGGRDLANDPLGKSFGTWIYGCDACQDACPMNSGKWTEKDEFPGVLEISLCLTPENIMKMEEEFYKHNIQPKFFYLSPDELWKWKVNVLNFMRNNYQESYKQYILEACNNENEKIRDIAQTIYKDVFNR

SEQ ID NO: 76193 - protein, 342 aa, Dehalobacter sp.
  misc_feature (1)..(342): tr|T0JCB7|T0JCB7_9FIRM Epoxyqueuosine (OQ) reductase Qu eG OS=Dehalobacter sp. UNSWDHB OX=1339256 GN=UNSWDHB_58 7 PE=4 SV=1
MRVENLIQDKAYEFGYEKCGIVRIQDLEGYDKCLRERIDKVPASKMFYRSQSRLTDLQGRYPWAKSVIVAVSHFGHYKAPEQLKGHIAKHYLFDGRVNTESKEFKRSVAMEQFLQDLGLKTASNRNFGIVGLRWAAMKAGLGIIRKNNFFYTESGSWVGLEAWITDRDMELVESTNLPICPEGCSNCIKACPTCSLSSPYTMNPLSCVSFLTTFGGRDLANDPLGKSIGTWIYGCDACQDACPMNSGKWTEKDEFPGVLEISLCLTPENIMKMEEEFYKHNIQPKFFYLSPDELWKWKVNVLNFMRNNYQESYKQYILEACNNENEKIRDIAQMICKDIFNR

SEQ ID NO: 76194 - protein, 460 aa, Dehalococcoides mccartyi
  misc_feature (1)..(460): tr|A0A2J1E0C1|A0A2J1E0C1_9CHLR Reductive dehalogenase O S=Dehalococcoides mccartyi OX=61435 GN=CVH13_00156 PE=4 SV=1
MVDPQKWDLNRRDFIKKTGLASVAATAVVAVNTTGIIADEFVKPGIKAMDPLGNASIKRELPENFYKKIEHRPGYIGTTQIVSSGERMDAREHGFAQIVRRSSTGDWSGEPGDWGPVLLAAVKEKNKHLAEISDIERLDYTWSSTLQVAMDRWHINLAPGKFEPAPISATKVEMSPAEATAKIKKMARWLGAEQVGICEVTEDMKPFFYSIGRKHGNYSGPVANYEEDEGREIPWPYPYKYCIVLADKCDTDTLSALEGPLVEASARVSCSICDFLPHYLESIIRALGYDAKANPFSDTDIIEAPFAVKAGLGELGRSGLLVSPWGAQLRLLEVFTNMPLVPDMPIDFGLQEFCKVCKKCAENCPSQAISMDDEPSEVITTVKSIRWLQDEKKCLARRLAYGCAKCQSVCPWSKPDTLMHEIGRMIGQNPALASFLVKVDDFFYNRFPEGHSAADYAPWR

SEQ ID NO: 76195 - protein, 308 aa, Dehalococcoides mccartyi
  misc_feature (1)..(308): tr|A0A076IEL5|A0A076IEL5_9CHLR FeS-binding protein OS=D ehalococcoides mccartyi CG1 OX=1432059 GN=X792_07630 PE =4 SV=1
MSDISGRAVAGLTENGFKAGTVSCKHLPELEENIENLKRQGLVDTLLAKTYLQFKYDSDSAMPDTRTVFIIAIPQPLTRTRFTWKGHIYNADIPPTYIGSKDDAAVSNILTSIIQAEGFKSVRTNLPVKILAVRSGLAEYGRNNLAYIHGFGSYHRLIAFVSDCPCTQDNWNEPKEMKACSKCFKCTRNCPSGCISDERFLLKAENCLTWHNEREDTLAGWIDPDWHNALIGCMRCQTVCPLNTRQSARVIPGPEFTEEETNLIRQKLPANQIPADLYQKLSTIAMDDSYPVFARNLELLVNPKNIIR

SEQ ID NO: 76196 - protein, 308 aa, Dehalococcoides sp.
  misc_feature (1)..(308): tr|A0A0C6ER71|A0A0C6ER71_9CHLR Uncharacterized protein OS=Dehalococcoides sp. UCH007 OX=1522671 GN=UCH007_1399 0 PE=4 SV=1
MSDISGRAVAELTENGFKASTVSCKHLPELEENIENLKRQGLVDTLLAKTYLQFKYDFDSAMPNTRTVFIIAIPQPLTRARFTWKGHIYNADIPPTYIGSKDDAAVSNILTSIIQAEGFKSVRANLPVKILAAHSGLAEYGRNNLAYIHGFGSYHRLIAFVSDCPCTQDNWNEPKEMKACSKCFKCTRNCPSGCISDERFLLKAENCLTWHNEREDTLAGWIDPDWHNALIGCMRCQTVCPLNIRQSARVIPGPEFTEEETNLIRQKLPANQIPADLYQKLSTIAMDDSYPVFARNLELLVNPKNIIR

SEQ ID NO: 76197 - protein, 455 aa, Dehalococcoides sp.
  misc_feature (1)..(455): tr|A0A0C6EH59|A0A0C6EH59_9CHLR RdhA protein OS=Dehaloco ccoides sp. UCH007 OX=1522671 GN=rdhA PE=4 SV=1
MDGKINRRDFVKGAGIASAATVATIMATASTVSAEELVNPSIKAMDEMGSASLTRDLPESFYKRIENKDGYIGTTRVIAPTQRLDAREHGFSQIVRRGSTGDWSGEPGDWGPVLFAAVQEKKKHAAEITPLEAADYTWSNAFQIAMDRWHITLEPGRYQQAPIAATKVELSPEEMTARIKKICRWFGCEQVGICEVTEDMKPFFYSVGRTKGTYTTGHANYVDEGREIPWPYPYKYCIVMADKCDTDTLSAMTGPLVEASAKIACSQSDFAPHYLESIIRSLGHDAKANIFSDTDIMDTPFAVKAGLGELGRSGLVISPWGAQMRIMEVFTNLPLVPDKPIDFGLQEFCKVCKKCADNCPASAISMDDEPSEVDTVVKSIRWFQDGKKCLSQRLAYGCSKCQSVCPWSKPDTLIHEIGRMVGQNPAFAPFLVKLDDFFYNRYPEGHATGEWAPWR

SEQ ID NO: 76198 - protein, 201 aa, Dehalococcoidia bacterium
  misc_feature (1)..(201): tr|A0A523X8C6|A0A523X8C6_9CHLR Epoxyqueuosine reductase (Fragment) OS=Dehalococcoidia bacterium OX=2026734 GN= E3J42_03285 PE=4 SV=1
MTGEILEQAMELFDSAGVVTTEAGIVLILGLGSTMETNLDEAVIEHGRLVLQGWLKHAKPRVTALIDLIRERGFEAEAVGWWGYPMAAEVMHLKRLAVIAGLGMQGKNTLIIHHKFGPWLRLAAIRTNAPLIPTGPGIYVRRENPLCQSCQACIKACPVEGLLQPYRLLDPARCRLNISPDIDWEKVVWCDMGCVTKCPVG

SEQ ID NO: 76199 - protein, 380 aa, Dehalococcoidia bacterium
  misc_feature (1)..(380): tr|A0A0S8CKP6|A0A0S8CKP6_9CHLR PBS lyase OS=Dehalococco idia bacterium SG8_51_3 OX=1703394 GN=AMJ70_02105 PE=4 SV=1
MSLTEDIKDFALDLGYSRVGITTADPFPGYIAELKARQDMYAFYINHSTTPLQGAEPRSVMPSARSIVMVVYDAFKESFPEKLVGKIGRIYQARCYRPPSHRINGARYRLMREFLENNGCQVDRKIRVPERLVACRAGTVTYGKSGFAFADGIGSFVVISAFVIDTELEYDAPTYEVKCPPKCTLCIDACPTGSLYEPMKIDPRRCIGFNHWNTQEEGDRYVEAVGSYIPPEIREKMGTWIHGCDICQEVCPRNQKRLKAKLPQNEFLARVSKDFELTKLLNLSDEFFTKRVQPLMYNYIHKKKYFQRNAAIAIGNTGDSSYIPDLAQAMQDPEGMVRGYAAWALGKIGGSQARKILETSLLRETDEFAKAEIQVALDIN

SEQ ID NO: 76200 - protein, 311 aa, Dehalogenimonas alkenigignens
  misc_feature (1)..(311): tr|A0A0W0GJ65|A0A0W0GJ65_9CHLR Uncharacterized protein OS=Dehalogenimonas alkenigignens OX=1217799 GN=DEALK_14 080 PE=4 SV=1
MNETAVYEHLTTELKSINCMHGFLEIRRVPELKRELESRLHKGQLDTAFFVKNLERLEVSAPTRFAEVNSLIIIAAPLPLTRLIFEYQGRGRPVQIPPFYVFKDKLAAIRKALGRSLGAAGYQIADARVPLKLAAIRSGLARYGRNNLAYIQGMGSFHRLVAFYTDLPAPADAWFRLSEMEECTSCGFCLGNCHTDCLNPDAGNRFLARAEKCLTLYNEEPGELPSWITPWLHNSLIGCMRCQSSCPLNRTFIRNVPISDTFNEPEAMAILATPVFGDLPGALQEKLVKYDLQDYYDLVPRNLKFLLEWEL

SEQ ID NO: 76201 - protein, 309 aa, Dehalogenimonas alkenigignens
  misc_feature (1)..(309): tr|A0A0W0GJ57|A0A0W0GJ57_9CHLR 4Fe-4S double cluster bi nding domain OS=Dehalogenimonas alkenigignens OX=121779 9 GN=DEALK_14090 PE=4 SV=1
MISTLAEKVTDELELSGYRAANASIDRLATIEQEFRSIANRDEWRKSPHLSQHIFDFTLPQEYQAKSILVVAAPVAPVNIGFVFGGEYFSFDAPPLSEDYEQDAANIFSEIKKIISPQGYRLSESNLPTKILASHCGLISNGVNNIGYIDGMGSYFRLSAYFSDIEPGNEKWLNNHSVNPKCAGCSRCIDTCPTKCIERSSFQVNRCLSLLSKEPTDFPVWINSKWHNALIGCRICQKVCPLNQEVSFKASIGADFDETETAAILSGEPLENLCSKTREKLRYFTLEPLYPVVSRNLRLLFKKHGLTVN

SEQ ID NO: 76202 - protein, 306 aa, Dehalogenimonas formicexedens
  misc_feature (1)..(306): tr|A0A1P8F6R9|A0A1P8F6R9_9CHLR Epoxyqueuosine reductase OS=Dehalogenimonas formicexedens OX=1839801 GN=queG PE =4 SV=1
MTPSTEVINNLAEAGYRACIAPIERLADLEAEYKMITARDVWRRSPHLSQHRFDFAPPIDFPARSIIVIAAPVTPVRLGFIYRGIHHSFEAPPLSGDYDRVVARIIKIITDAIGTHGYRLADSNLPTKVLASHTGLLQNGINNMGYIEGMGSFFRLTSFFSDLPAVDDTWGEQHRVAPSCRECGLCIEACPTQCISQEVYDVSRCLSLLSKEPSDFPDWVKKRWHNSLIGCRVCQQVCPMNHDVINSAANVAEFSEAETLAILSGVDLDKLNQSTRDKLRYFHLAPFYSILPRNLRLLLEKSGEPA

SEQ ID NO: 76203 - protein, 312 aa, Dehalogenimonas lykanthroporepellens
  misc_feature (1)..(312): tr|D8K0K3|D8K0K3_DEHLB 4Fe-4S ferredoxin iron-sulfur bi nding domain protein OS=Dehalogenimonas lykanthroporepe llens (strain ATCC BAA-1523 / JCM 15061 / BL-DC-9) OX=5 52811 GN=Dehly_0829 PE=4 SV=1
MSIKDAVSVQLMENLRKVGYRACIVDSVHLAEVEKEYRAHTETQAWRSSPHLQGHTFDFQPPSWAAGNGTIIIVAAPVAPVRLEFTTGNRKIPVDAPPLSTDYLQDLVIFGSIIDSVLLPAGYRQTTADLPTKLIASHGGLLENGYNNMGFIAGMGSFFRLAAFYSDLPGEPEQWYPHEVSERCPDCGVCLAYCPTGCLKVGEYDVSRCLSLLSKEPFDFPDWVDKRWHNAVVGCRVCQLNCPQNHDIVNGSAVTESFDRTETEDILAGVPYDKLRIETRSKLERFHLSAYYGILPRNLRLLLTGEARETIG

SEQ ID NO: 76204 - protein, 318 aa, Dehalogenimonas sp.
  misc_feature (1)..(318): tr|A0A2P5P9J1|A0A2P5P9J1_9CHLR Uncharacterized protein OS=Dehalogenimonas sp. GP OX=1536648 GN=JP09_003625 PE= 4 SV=1
MGGAVDQRINIRMALATEVIQNLAQAGYRACIAPIERLAELEAEYNAITSRDVWRRSPHLSQHRFDFTRPTDFSVKSIIVVAAPVTPVRLGFKYRGTHHSFEAPPLSGDYDQDVARMKKVITDTIGPLGLHVADSNLPTKVLASHTGLLQNGINNMGYIPGMGSFFRLTSFFSDLQPSDNTWNEQHLVAPVCRECGLCMDACPTGCISQEVYDVGRCLSLLSKEPSDFPDWVKKRWHNSLIGCRVCQQICPMNRSVLDEAANGIEFSEAETEAILSGVPFDTLDQATRDKLRYFHLAAFYSILPRNLRLLLEKSGEPV

SEQ ID NO: 76205 - protein, 309 aa, Dehalogenimonas sp.
  misc_feature (1)..(309): tr|A0A0F7GE86|A0A0F7GE86_9CHLR Uncharacterized protein OS=Dehalogenimonas sp. WBC-2 OX=943347 GN=DGWBC_0868 PE =4 SV=1
MTVYEKLANELSTIGCRYGILDVKRVTELKEELWNRFIEGQFDESFFDRNLKRLDGDPPKNMPEARSIIIIAAPLPFIQLSFSYRGKIYFAGIPPYYTFSNNLTRIRKALGRSLGADGHRIIDARIPYKLAAVRCGLAVYGQNNLTYVDGMGSFHRLVAFYSTLTAPEDLWIPSQLMDACADCGFCRGNCPTGCLVPMSEGGRFIARSEKCITLYNEEPGTFPEWLGLHLHNAIIGCMRCQSSCPVDRPLLRDIKVSEVFNEQETMAIIEATPFDDLSPELKEKLTKYNLDTYYNVIPRNLRAILEGQT

SEQ ID NO: 76206 - protein, 373 aa, Deinococcus actinosclerus
  misc_feature (1)..(373): tr|A0A2Z3YW86|A0A2Z3YW86_9DEIO tRNA epoxyqueuosine(34) reductase QueG OS=Deinococcus actinosclerus OX=1768108 GN=queG PE=4 SV=1
MSASPHDRLHDLALSLGADAVGWAPAQVPRAAVDEYAGWLAAGRHAGMSYLERQLPVRADPSQRLAGVQSVLVLGVSHAFAPPPVPEGGVRVGRVARYAWTPDYHDQLQPVLSQLEAEAARLGVSARGYVDHGPVMERLFASGAFLGWRGKSGMLVSTSLGAFVTLAVLLTDLPHPGEAQAHPDRCGRCLRCVTACPTAAIGPDRAIDARRCVSYLTIEHRGPVPPELRAGMGEWLFGCDVCSEVCPWTLKAGPLARFLRPDPELAHPDLTRFFGVSEREFERQWAGTAFLRPRRKGMARNALTVLGNTRAPQGWPLLLLGAQDPAWEVREAAAWALAQWGESRHLERLLDDHHEAVRATAAWGLGVTAPAGP

SEQ ID NO: 76207 - protein, 373 aa, Deinococcus actinosclerus
  misc_feature (1)..(373): tr|A0A0U4CYE0|A0A0U4CYE0_9DEIO Epoxyqueuosine reductase OS=Deinococcus actinosclerus OX=1768108 GN=AUC44_06155 PE=4 SV=1
MSASPHDRLHDLALSLGADAVGWAPAQVPRAAVDEYAGWLAAGRHAGMSYLERQLPVRADPSQRLSGVQSVLVLGVSHAFAPPPVPEGGVRVGRVARYAWTPDYHDQLQPVLSQLEAEAARLGVRARGYVDHGPVMERLFASGAFLGWRGKSGMLVSTSLGAFVTLAVLLTDLPHPGAAQAHPDRCGRCTRCVAACPTAAIGPDRAIDARRCVSYLTIEHRGPIPPELRPGMGEWLFGCDVCSEVCPWTLKAGPLARFLRPDPELAHPDLTRFFGVSEREFERQWAGTAFLRPRRKGMARNALTVLGNTRAPQGWPLLLMGAQDPAWEVREAAAWALAQWGETGHLAPLLDDPHEAVRTTAGWGLGVTASAGP

SEQ ID NO: 76208 - protein, 367 aa, Deinococcus aerius
  misc_feature (1)..(367): tr|A0A2I9DSS7|A0A2I9DSS7_9DEIO Electron transport prote in yjeS OS=Deinococcus aerius OX=200253 GN=DAERI_050086 PE=4 SV=1
MNAADLLSDLAVSLGADAVGWAPARVPASAVAEYAGWLSAGRHAGMGYLERQLPARSDPASRLEGVGSVLVLGVSHAFADPGVPTGGVRVGRVARYAWTPDYHDQLQPVLSRLEAEAARLGVRSRGYVDHGPVMERLFAAGASLGWRGKSGMTVSTRLGAFVTLAVLLTDLSFEGVEESHPDRCGRCFRCVAACPTGAIGNDRAIDARRCVSYLTIEHRGPVPHELRPGMGDWLFGCDVCSEVCPWTAKAGPLARLLRPDPDLAHPDLSAFFGVGERQFERRFAGTAFLRPRRKGMARNALTVLGNTRAQEGWPLLLAGAQDPAWEVREAAAWALGQWGESRHLRPLLDDEHGTVREAAALALSHAS

SEQ ID NO: 76209 - protein, 368 aa, Deinococcus cellulosilyticus
  misc_feature (1)..(368): tr|A0A511MWX9|A0A511MWX9_9DEIO Epoxyqueuosine reductase OS=Deinococcus cellulosilyticus NBRC 106333 = KACC 116 06 OX=1223518 GN=DC3_07170 PE=4 SV=1
MNRQDLLLEKALELGFDVAGWAVATTPPEATTRYQQWLEKGFHAGMDYLERQLVRRNDLTTTLSGARSVLVLGISHAFPDLEVPAGGVRVGRVARYAWTPDYHGQIEPLLRDLEETATQLGVRSRGCVDYAPIMERELSSRAFLGWQGKSGMMISQKLGAFVTLAVLLTDLEMEEQGRHVDRCGRCQACVNACPTSAIQEGRVIDSRRCISYLTIEHRGPIPQEFRSGMGSWLFGCDHCLEVCPWSIKAGAVSRNLIPNPELAHPDLSVFFEGSNRDFDRRFAHTAFSRPRRKGMARNALMVLGNLRDPLHLALVLKGAQDEAWEVRASAAWALGQFEEKQSLSAIENLLQDPQEEVRQEASRQLAKI

SEQ ID NO: 76210 - protein, 380 aa, Deinococcus deserti
  misc_feature (1)..(380): tr|C1CWQ4|C1CWQ4_DEIDV Putative Fe-S protein putative e poxyqueuosine reductase OS=Deinococcus deserti (strain VCD115 / DSM 17065 / LMG 22923) OX=546414 GN=Deide_1649 0 PE=4 SV=2
MNAHELLPDLAIALGADAVGWAPAQVPAAAAQEYAGWLDAGRHAGMSYLERQLPARMDPTSRLPGAASVLVLGVSHAFEEPAAPAGGIRVGRVARYAWTPDYHDQLQPVLTRLEAEAAKLGVRAKGYVDHGPVMERLFASEAFLGWRGKSGMNISTRLGAFVTLAVVLTDLPFEAEAQAHPDRCGRCTRCVLACPTAAIGPDRAIDARRCVSYLTIEHRGPLPPEHRTGVGDWLFGCDVCSEVCPWSAKAGPLAKLLQPHADLAHPDLSAFFGVSERSFERQFAGTAFLRPRRKGMARNALTVLGNTRDPRGWPLLLLAREDPAWEVREAAAWALGQWDETAHASVLLADPHEAVRVSAQRALGETDPGPGQLQHPAVHL

SEQ ID NO: 76211 - protein, 373 aa, Deinococcus ficus
  misc_feature (1)..(373): tr|A0A221SVA4|A0A221SVA4_9DEIO Epoxyqueuosine reductase OS=Deinococcus ficus OX=317577 GN=DFI_05850 PE=4 SV=1
MSAHDLLSALALDLGADTVGWAPAAVPAGSVQEYAAWLGAGRHAGMGYLERQLPARAEPQSRLEGAASVLVLGVSHGFAPLPVPAGGVRLGRVARYAWTPDYHHQLQPVLERLEREAAALGVRAKGYVDHGPVMERLFANGAFLGWRGKSGMTVSTDLGAFVTLAVLLTDLPGAAPGEVHPDRCGRCTRCVTACPTAAIGDDRAIDARRCVSYLTIEHRGPVPLDLRAGMGGWLFGCDVCSEVCPWSVRAAGREGGLGRFLRPDPELAHPDLSAFFHVSEREFERRFRGTAFLRPRRKGMARNALTVIGNTRDPRGRPLLDAGLADPAWEVRDAAAWALARWEEWGPLETLRRDPDERVAALAGALLDGRAGH

SEQ ID NO: 76212 - protein, 397 aa, Deinococcus geothermalis
  misc_feature (1)..(397): tr|Q1IWW2|Q1IWW2_DEIGD 4Fe-4S ferredoxin-type domain-co ntaining protein OS=Deinococcus geothermalis (strain DS M 11300) OX=319795 GN=Dgeo_1978 PE=4 SV=1
MPAAAFPLFPVRHSSRARDSILSGVNAAELLSDLAVSLGADAVGWAPAVVPASAVAEYAAWLKAGRHAGMEYLERQLSARSDPASRLEGVASVLVLGVSHAFADLGVPAGGVRVGRVARYAWTPDYHDQLQPVLNRLEEEAARLGVRARGYVDHGPVMERLFAAGAFLGWRGKSGMTISTRLGAFMTLAVLLTDLPFAGAAKAHPDRCGRCFRCLAACPTNAIGPDRAIDARRCISYLTIEHRGPVPPELRTEVGDWLFGCDVCSEVCPWTGKAGALARLLKPDPELAHPDLGAFFGVSERAFERRFVGTAFLRPRRKGMARNALTVLGNTRAPQGWPLLLAGAADPAWEVREAAAWALGQWGEPGPLRALLNDPHAAVRAVAAHALREASSPLNPV

SEQ ID NO: 76213 - protein, 376 aa, Deinococcus gobiensis
  misc_feature (1)..(376): tr|H8GVH5|H8GVH5_DEIGI 4Fe-4S ferredoxin-type domain-co ntaining protein OS=Deinococcus gobiensis (strain DSM 2 1396 / JCM 16679 / CGMCC 1.7299 / I-0) OX=745776 GN=DGo _CA0425 PE=4 SV=1
MPAAETLADLAVSLGADAVGWAPARVPAGAVAEYAGWLGAGWHAGMDYLERQLPDRADPARKLEGAASVLVLGVSHAFAPPPVPAGGIRLGRVARYAQTPDYHDQLQPVLSRIEQEAAGLGVRARGYVDHGPVMERLFASGGLLGWRGRSGMLVSTRLGAFVTLAVVLTDLPFGGTDTPHPDRCGRCFRCGVACPTGAIGPERTIDARRCVSYLTVEHRGPVPHDLRPGIGDWLLGCDVCSEVCPWSQKAGPLAGLLRPDPELAHPDLTRFFGVSERKFARDFAGTPHLRPRRKGMARNALTVVGNLRDPAGWPLLDLGAQDPAWEVREAAAWALWRWDEPRRLRALLDDPDERVRAAALSLTSPTPDLGATLQDA

SEQ ID NO: 76214 - protein, 397 aa, Deinococcus grandis
  misc_feature (1)..(397): tr|A0A100HKT3|A0A100HKT3_9DEIO Electron transport prote in yjeS OS=Deinococcus grandis OX=57498 GN=DEIGR_101286 PE=4 SV=1
MNGPHPDSGAASPLSGAGGAAYCAAMSASPHDRLHDLALSLGADAVGWAPAQVPRAAVDEYAGWLAAGRHAGMGYLERQLPVRADPSQRLEGVQSVLVLGVSHAFAPPPVPEGGVRVGRVARYAWTPDYHDQLQPVLSRLEAEAARLGVRARGYVDHGPVMERLFASGAFLGWRGKSGMLISTRLGAFVTLAVLLTDLPHPSGAEAHPDRCGRCTRCVIACPTAAIGPDRAIDARRCVSYLTIEHRGPVPPELRPGMGEWLFGCDVCSEVCPWTLKAGPLAQLLKPDPELAHPDLTRFFGVSEREFERQWTGTAFLRPRRKGMARNALTVLGNTRAPQGWPLLLAGAQDPAWEVREAAAWALGQWGETGRLAPLLDDPHEAVREAAGHALGTTPTRP

SEQ ID NO: 76215 - protein, 384 aa, Deinococcus hopiensis
  misc_feature (1)..(384): tr|A0A1W1V9C9|A0A1W1V9C9_9DEIO Epoxyqueuosine reductase OS=Deinococcus hopiensis KR-140 OX=695939 GN=SAMN00790 413_00587 PE=4 SV=1
MLPGLPFHFLERGILGHVSAAELLSDLAVSLGADAVGWAAAQVPASAVAEYAGWLGAGRHAGMDYLERQLQARSDPGSRLAGAGSVLVLGVSHAFAQPPVPHGGIRVGRVARYAWTPDYHSQLQPLLTRLEEEAARLGVRARGYVDHGPVMERLFASGAFLGWRGKSGMTVSTRLGAFVTLAVLLTDLPFAGTLEVHPDRCGRCFRCVTACPTNAIGPDRAIDARRCISYLSIEHRGPVPHELRAAMGEWLFGCDVCSEVCPWSAKAGPLARLLKPDPELAHPDLSAFFGVGERQFERRFAGTAFLRPRRKGMARNALTVLGNTRAPQGWPLLLAGVEDSAWEVREAAAWALGQWGEAGPLTGLLSDPHEVVRGAAQAALTWAS

SEQ ID NO: 76216 - protein, 368 aa, Deinococcus indicus
  misc_feature (1)..(368): tr|A0A246BGA3|A0A246BGA3_9DEIO tRNA epoxyqueuosine(34) reductase QueG OS=Deinococcus indicus OX=223556 GN=CBQ2 6_17760 PE=4 SV=1
MSASPHDRLSDLALSLGADAVGWAPAQVPLAAVDEYAGWLDAGRHAGMTYLERQLPVRADPSQRLPGVGSVLVLGVSHAFAPPVVPNGGVRVGRVARYAWTPDYHEQLQPVLSRLEQEAAALGVRARGYVDHGPVMERLFASGAGLGWRGRSGMTINTGLGAFVTLAVVLTDLPAPDGGVAHPDRCGRCLRCVTACPTGAIGPDRAIDARRCVSYLTIEHRGPVPPDLRAGVGDWLFGCDVCSEVCPWTVKAGPLARLLKPDPELAHPDLGRFFGISEREFERQWAGTAFLRPRRKGMARNALTVLGNTRAPQGWPLLLLGAQDPAWEVREAAAWALGQWNEPGHVRALLDDPHAAVREGAALALERV

SEQ ID NO: 76217 - protein, 378 aa, Deinococcus irradiatisoli
  misc_feature (1)..(378): tr|A0A2Z3JFH9|A0A2Z3JFH9_9DEIO tRNA epoxyqueuosine(34) reductase QueG OS=Deinococcus irradiatisoli OX=2202254 GN=queG PE=4 SV=1
MLALPSSTNAAETLRDLAFELGFDVAGWASGQVPREAWQGYGEWLGSGRQAGMTYLETGAWRRADLSTSLLAAPQVGRVLALGISHAFEELVPPPGGLRAGRVARYAWTPDYHAQIEPRLSRLVREAAALGVRARGYVDHGPVMERDLAGRAFLGWHAKSGMLVSTELGAFVTLAVLLTDLPDEGDGPAHPDRCGRCTRCVSACPTGAIDADRAIDAGKCVSYLTIEHRGPVPWERRPGIGEWLLGCDVCCAVCPWSLKAGALAQALQPDPELAYPDLLGFFGLSEREFERRYGHTAHARPRRKGMARNAVTVAGNLREERLRPVLDLAAADPAWEVREAATYALTCWQDVAGLEKLRFDPHEQVRAGAQRGLNELLG

SEQ ID NO: 76218 - protein, 362 aa, Deinococcus koreensis
  misc_feature (1)..(362): tr|A0A2K3V0K6|A0A2K3V0K6_9DEIO tRNA epoxyqueuosine(34) reductase QueG OS=Deinococcus koreensis OX=2054903 GN=q ueG PE=4 SV=1
MSAAETLADLAQHLGADAVGWAPAQVPQGAVDEYAGWLAAGRHAGMGYLERQLPARADPSSRLEGVGSVLVLGVSHAFTEPPKPAGGVRVGRVARYAWTPDYHDQLQPVLSRLEQEAAALGVRARGYVDHGPVMERLFAAGGFLGWRGKSGMLVSTRLGAFVTLAVLLTDLPLQGPPQDHPDRCGRCFRCVAACPTNAIGDDRAIDARRCISYLTIEHRGPLPLELRPGVGDWLFGCDVCSEVCPWSEHAGPLATLLRPEPELAFPDLGRFFGVSERGFERAFAGSAFLRPRRKGMARNALTVLGNTRAPQGWPLLLAGAADPTWEVREAAAWALTQWDEPRHLRPLQSDPHEAVRAAAGHL

SEQ ID NO: 76219 - protein, 371 aa, Deinococcus maricopensis
  misc_feature (1)..(371): tr|E8UAD1|E8UAD1_DEIML 4Fe-4S ferredoxin-type domain-co ntaining protein OS=Deinococcus maricopensis (strain DS M 21211 / LMG 22137 / NRRL B-23946 / LB-34) OX=709986 G N=Deima_2382 PE=4 SV=1
MNPYSTLADLALDLGFDAVGWASAQVPREAWVRYADWLSAGRHADMTYLERQAWRRTDLGTSLPDVSSVLVLGVSHAFPELPVPAGGVRVGRVARYAWTPDYHDQLTPRLERLEVEAARLGVRTRGYVDHGPIMERDLGGRAFLGWQGKSGMLVSTQLGAFLTLAVLLTDLPFEGRDARHPDRCGRCTRCVTACPTGAIGPDRMIDARRCVSYLTIEHRGVVPRALRAGVGEWLFGCDGCLEVCPWSGKAGAVARALVPDAELAHPDLSAFFGGSERAFERRFAGSAFLRARRKGMARNALTVLGNTLVPEGRPLARQGAADPAWEVRASSAWTLARYAERRAVEALTRDPHEAVRAAAQLELESWGSVPS

SEQ ID NO: 76220 - protein, 386 aa, Deinococcus marmoris
  misc_feature (1)..(386): tr|A0A1U7P488|A0A1U7P488_9DEIO Epoxyqueuosine (OQ) redu ctase QueG OS=Deinococcus marmoris OX=249408 GN=BOO71_0 001135 PE=4 SV=1
MTAPAELLADLAQSLGADAVGWAAATVPASAVDEYARWLDAGRHAGMAYLERQLPARADPSSRLEGVGSVLVLGVSHAFEEPPIPPGGIRVGRVARYAWTPDYHDQLQPLLTRLETEAAALGIRARGYVDHGPVMERLFASGAFLGWRGKSGMTISTQLGAFVTLAVLLTDLPFEGTDTAHPDRCGKCFRCVAACPTNAIGNDRTIDARRCISYLTIEHRGPVPHEFRADMGDWLFGCDVCSEVCPWSRKAGPLAELLRPQPELAHPDLSAFFGVGEREFNRRFAGTAFLRPRRKGMARNALTVLGNTRAPEGWPLLLAGTTDPAPEVREAAAWALGQWGEMDHVRALLHDPDEGVRAGAARILATPQLSSLHGPGSTILGQMSDT

SEQ ID NO: 76221 - protein, 367 aa, Deinococcus metallilatus
  misc_feature (1)..(367): tr|A0A4Q0W9T0|A0A4Q0W9T0_9DEIO tRNA epoxyqueuosine(34) reductase QueG OS=Deinococcus metallilatus OX=1211322 G N=queG PE=4 SV=1
MNRAELLSDLAVSLGADAVGWAPANVPASAVTEYAAWLAAGRHAGMGYLERQLPARSDPASRLEGTASVLVLGVSHAFADPGVPTGGVRVGRVARYAWTPDYHDQLQPVLTRLEEEAARLGVRARGYVDHGPVMERLFAAEAFLGWRGKSGMNISTRLGAFVTLAVLLTDLPFVGPQEAHPDRCGRCFRCVAACPTNAIGPDRAIDARRCISYLTIEHRGPVSPELRAGMGDWLFGCDICSEVCPWTQKAGPLARLLQPDPELAHPDLGAFFGVSERQFERRFAGTAFLRPRRKGMARNALTVLGNTRDPGGWPLLLAGVQDPAWEVREAAAWALGQWGEAGHVRALLDDPQETVRETAARALGVAS

SEQ ID NO: 76222 - protein, 366 aa, Deinococcus peraridilitoris
  misc_feature (1)..(366): tr|K9ZXF1|K9ZXF1_DEIPD Uncharacterized Fe-S protein OS= Deinococcus peraridilitoris (strain DSM 19664 / LMG 222 46 / CIP 109416 / KR-200) OX=937777 GN=Deipe_0278 PE=4 SV=1
MSTPDILAALALDLGFDAVGWSAAHVPDTSVEEYARWLKHGHHAGMDYLERQLPRRADLSSSLEGSLSVLVLGISHAFEQLPPPPGGVRLGRVARYAWTPDYHEQLAPLLSRLETETAKLGGRARAYVDHGPVMERLLGASAFLGWRAKSGMLVSTSLGAFMTLAVVLTDLPLQVETQAHPDRCGRCTRCISACPTQAILPGRALDARRCVSYLTIEHRGPVPWELRSGVGDWLFGCDGCTEVCPWSMRAGSVARALRPQAELAHPDLTPFFMLSGRQFDQAYQGTPFARPRRKGMARNACYVIGNTRDPQGFSLLERAVHDPAWEVREAAAWALGQFGETKLLHRLMSDPHPQVSDAARRLYVPC

SEQ ID NO: 76223 - protein, 367 aa, Deinococcus phoenicis
  misc_feature (1)..(367): tr|A0A016QPB9|A0A016QPB9_9DEIO 4Fe-4S ferredoxin-type d omain-containing protein OS=Deinococcus phoenicis OX=14 76583 GN=DEIPH_ctg032orf0096 PE=4 SV=1
MNRADLLSDLALSLGADAVGWAPAHVPASAVAEYAAWLGAGRHAGMGYLERQLPARSDPASRLEGAASVLVLGVSHAFADPGVPAGGVRVGQVARYAWTPDYHDQLQPVLTRLEQEAARLGVRARGYVDHGPVMERLFASGAFLGWRGKSGMNISTRLGAFVTLAVLLTDLPFEGPQEAHPDRCGRCFRCLAACPTNAIGPDRAIDARRCISYLTIEHRGPVPPELRAGTGDWLFGCDVCSEVCPWSQKAGPLAQLLRPDPELAHPDLSAFFGVGERQFERRFAGTAFLRPRRKGMARNALTVLGNTRTPEGWPLLLAGVQDPAWEVREAAAWALGQWGEVGHLRPLLDDPHEAVRKAAARSLGIAS

SEQ ID NO: 76224 - protein, 370 aa, Deinococcus proteolyticus
  misc_feature (1)..(370): tr|F0RNX4|F0RNX4_DEIPM 4Fe-4S ferredoxin-type domain-co ntaining protein OS=Deinococcus proteolyticus (strain A TCC 35074 / DSM 20540 / JCM 6276 / NBRC 101906 / NCIMB 13154 / VKM Ac-1939 / CCM 2703 / MRP) OX=693977
MNADAAAETLCALALELGADAVGWADAEVPAAAVDEYAGWLVEGRHARMDYLERQLPRRADLGTSLPGAGRVLVLGISHAYDPPAPPPGGIRLGRVARYAWTPDYHDQLQPVLDRLGREAATLGVRAKGYVDHGPVMERLLGARSFLGWRSKSGMLVSTELGAFFTLAVLLTDLPPAGPSTAHPDRCGRCFRCGQSCPTGAIGPDRKIDARRCLSYLTIEHRGPLPWEHRAALGEWLFGCDICCGVCPWSVKAGTLARLFQPRRELAHPDLSRFFGVSERQFTREWAGSALLRPRRKGMARNALNVLGNLRDPQGWPLLLAGAEDPAWEVREAAAWALAQWNEWAEVERLRSDPEPQVRASAERLLSERA

SEQ ID NO: 76225 - protein, 378 aa, Deinococcus puniceus
  misc_feature (1)..(378): tr|A0A172TAY4|A0A172TAY4_9DEIO (Fe-S)-binding protein O S=Deinococcus puniceus OX=1182568 GN=SU48_11010 PE=4 SV =1
MLSAAPTSAAETLADLASALGADAVGWAAARVPASAVAEYAGWLGAGKHAGMGYLERQLPARADPASRLEGVGSVLVLGVSHAFAPPPVPSDGVRLGRVARYAWTPDYHDQLQPLLTRLEQEAARLGVRARGYVDHGPIMERLFAAGAFLGWRGKSGMTVSTRLGAFVTLAVLLTDLPWETEAAAHPDRCGRCTRCISACPTAAIGDDRTIDARRCVSYLTIEHRGALPHEWRAGVGDWLLGCDVCSEVCPWSAKAGPLARLLEPQARLAFPDLTRFFGVSERQFEREWAGTALLRPRRKGMARNALTVLGNLPADHEGREQARPLLLAGTQDPVWEVREAAAWALGRWGEADLLSPLLADPHEAVRDTAAQALAGVL

SEQ ID NO: 76226 - protein, 367 aa, Deinococcus radiodurans
  misc_feature (1)..(367): tr|A0A5C1MMP9|A0A5C1MMP9_DEIRD tRNA epoxyqueuosine(34) reductase QueG OS=Deinococcus radiodurans OX=1299 GN=qu eG PE=4 SV=1
MTAAESLAALALDLGADVVGWAPAQIPAAAVEEYAGWLEAGRHAGMSYLERQLPARADPGSRLEGAASVLMLGVSHAMIPPERPAGGVRVGRVARYAWTPDYHEQLQPVLTRLEQEAASQGVRARGYVDHGPVMERLLAARAFPGWRGKSGMLLSTELGAFTTLAAVLTDLPYQGDGASHPDRCGRCTRCVAACPTAAIGPDRAIDARRCISYLTIEHRGPLPPELRPGVGDWLFGCDVCSAVCPWSVKTGPLARLFQPLPELSYPDLTRFFGVSERHFEREWAGTAFLRPRRKGMARNALTVLGNTRAPEGWPLLLAGTEDPAWEVREAAAWALAQWGERAELDKLEHDPDERVQAAARALAEAGA

SEQ ID NO: 76227 - protein, 368 aa, Deinococcus radiophilus
  misc_feature (1)..(368): tr|A0A431W5R3|A0A431W5R3_9DEIO tRNA epoxyqueuosine(34) reductase QueG OS=Deinococcus radiophilus OX=32062 GN=q ueG PE=4 SV=1
MSDAAQTLADLALELGADAVAWADADIPSSAVEEYAVWLRAGRHARMDYLERQLPRRADLGTSLPGAGRVLVLGISHAYPAPPQPAGGIRLGRVARYAWTTDYHDQLQPVLERLEGEAAALGVRAKGYVDHGPVMERLLGAQAALGWRSKSGMLVSTELGAFFTLAVLLTDLEPQGEDTGHPDRCGRCFRCGLSCPTGAIGPDRKIDANRCLSYLTIEHRGPLPWEHRTALGDWLFGCDICCRVCPWSEKAGPLARLFQPHAEFVYPDLSRFFGVSERRFTREWAGSALLRPRRKGMARNALNVLGNLRDPHGWPLLGAGAEDPAWEVREAAAWALAQWGEWAEVERLRGDDHESVRASVERLLTEKG

SEQ ID NO: 76228 - protein, 370 aa, Deinococcus radiopugnans
  misc_feature (1)..(370): tr|A0A5C4Y4X5|A0A5C4Y4X5_9DEIO tRNA epoxyqueuosine(34) reductase QueG OS=Deinococcus radiopugnans ATCC 19172 O X=585398 GN=queG PE=4 SV=1
MTAPAELLADLAQGLGADAVGWAAAQVPASAVDEYARWLDAGRHAGMSYLERQLPVRADPSSRLEGVGSVLVLGVSHAFEEPPAPAGGVRVGRVARYAWTPDYHDQLQPLLTRLEAEAAALGVRARGYVDHGPVMERLFASGAFLGWRGKSGMLVSTRLGAFVTLAVLLTDLPFEGTGEAHPDRCGRCFRCVAACPTNAIGSDRAIDARRCISYLTIEHRGPIPAEFRADMGEWLFGCDVCSEVCPWSQKAGPLARLLRPQHELAHPDLSTFFGIGEREFNRRFAGTAFLRPRRKGMARNALNVLGNTRAPQGWPLLLAGAADPAPEVREAAAWALAQWGEADRVRALLADPDEQVRGSAARLLAAPTVV

SEQ ID NO: 76229 - protein, 368 aa, Deinococcus reticulitermitis
  misc_feature (1)..(368): tr|A0A1H6VLM9|A0A1H6VLM9_9DEIO Epoxyqueuosine reductase OS=Deinococcus reticulitermitis OX=856736 GN=SAMN04488 058_103105 PE=4 SV=1
MKAREALTARALSLGADAVGWAPARIPVDAVTEYAAWLAAGRHAGMEYLERQLPVRADPAQRLPGAASVLVLAVSHAFVPPPRPAGGVRVGRVARYAWTPDYHEQLAPVLTRLEEEAAQVGVRARGYVDHGPVMERLLAGGAGIGWRGKSGMLLNTSLGAFTTLAVLLTDLPFEQEGPLHPDRCGRCTRCVSACPTAAIGPDHAIDARRCISYLTIEHRGPVPEGLRPGIGEWLFGCDVCSEVCPWSVRAGPLARLFSAQPEFAWPDLTRFFGVSERQFEREWAGSAFLRPRRKGMARNALTVLGNTRAPQGWPLLLAGAEDPAWEVREAAAWAFARWGETAHLRALEHDSDERVGAAALRFSSSVPL

SEQ ID NO: 76230 - protein, 372 aa, Deinococcus soli
  misc_feature (1)..(372): tr|A0A0F7JJG7|A0A0F7JJG7_9DEIO (Fe-S)-binding protein O S=Deinococcus soli Cha et al. 2016 OX=1309411 GN=SY84_0 3270 PE=4 SV=1
MSISPHDRLHDLALSLGADAVGWAPAQVPRAAVDEYARWLEAGRHAGMSYLERQLPVRADPTQRLSGVQSVLVLGVSHAFALPPVPEGGVRVGRVARYAWTPDYHDQLQPVLSQLEAEAARLGVRARGYVDHGPVMERLFASGAFLGWRGKSGMLVSTQLGAFVTLAVLLTDLPHPGDQAAHPDRCGRCLRCVTACPTAAIGPDRAIDARRCVSYLTIEHRGPVPPELRAGMGEWLFGCDVCSEVCPWTLKAGPLAQLLKPDPELAHPDLTRFFGVSEREFERQWAGTAFLRPRRKGMARNALTVLGNMRAPQGWPLLLMGAQDPAWEVREAAAWALGQWGETGKVRPLLDDPHEAVRATAEHALGTTSTRP

SEQ ID NO: 76231 - protein, 386 aa, Deinococcus sp.
  misc_feature (1)..(386): tr|A0A5J6YU45|A0A5J6YU45_9DEIO tRNA epoxyqueuosine(34) reductase QueG OS=Deinococcus sp. AJ005 OX=2652443 GN=q ueG PE=4 SV=1
MSAPTELLADLAQSLGADGVGWAAATVPSSAVDEYARWLDDGRHAGMAYLERQLPARADPSSRLEGVGSVLVLGISHAFEDPPKPTDGIRVGRVARYAWTPDYHDQLQPLLTRLETEAAALGIRARGYVDHGPVMERLFASGAFLGWRGKSGMTISTRLGAFITLAVLLTNLPFEGSQAAHPDRCGKCFRCVAACPTNAIGNDRAIDARRCISYLTIEHRGPVPHGFRADMGEWLFGCDVCSEVCPWSQKAGPLAELLRPQPELAHPDLSAFFGIGEREFNRRFAGTAFLRPRRKGMARNALTVLGNTRAPEGWPLLLAGMTDPAPEVREAAAWALGQWGEMDSVRTLVNDPDETVKAGAAQVLATPQLSSLHRPGSTILGQMSDT

SEQ ID NO: 76232 - protein, 368 aa, Deinococcus sp.
  misc_feature (1)..(368): tr|A0A2G7H0M0|A0A2G7H0M0_9DEIO tRNA epoxyqueuosine(34) reductase QueG OS=Deinococcus sp. UR1 OX=1704277 GN=que G PE=4 SV=1
MSASPHDRLSDLALSLGADAVGWAPAQVPRAAVDEYAGWLDAGRHAGMTYLERQLPVRADPGQRLPGVGSVLVLGVSHAFGPPTVPEGGVRVGRVARYAWTPDYHDQLQPVLTCLEQEAAALGVQARGYVDHGPVMERLFASGAGLGWRGKSGMTINTGLGAFVTLAVVLTDLPAPDSGAAHPDRCGRCRRCVTACPTGAIGPDRAIDARRCVSYLTIEHRGPVPPDLRAGVGDWLFGCDVCSEVCPWTVKAGPLARLLKPDPQLAHPDLSRFFGVSEREFERQWAGTAFLRPRRKGMARNALTVLGNTRAPQGWPLLLLGAQDPAWEVREAAAWALGQWNEPGHVRALLDDPHAAVREGAARALERP

SEQ ID NO: 76233 - protein, 370 aa, Deinococcus swuensis
  misc_feature (1)..(370): tr|A0A0A7KGN7|A0A0A7KGN7_9DEIO (Fe-S)-binding protein O S=Deinococcus swuensis OX=1182571 GN=QR90_09670 PE=4 SV =1
MTAPAELLADLAQGLGADAVGWAAAQVPASAVDEYARWLDAGRHAGMSYLERQLPVRADPSSRLEGVGSVLVLGVSHAFEKPPAPAGGVRVGRVARYAWTPDYHDQLQPLLTRLEAEAAALGVRARGYVDHGPVMERLFASGAFLGWRGKSGMLVSTRLGAFVTLAVLLTDLPFEGTGEAHPDRCGRCFRCVAACPTNAIGSDRAIDARRCISYLTIEHRGPIPAEFRADMGEWLFGCDVCSEVCPWSQKAGPLARLLRPQPELAHPDLGAFFGIGEREFNRRFAGTAFLRPRRKGMARNALNVLGNTRAPQGWPLLLAGAADPAPEVREAAAWALAQWGEADRVRALLADPDELVRGSAARLLAAPTVV

SEQ ID NO: 76234 - protein, 368 aa, Deinococcus wulumuqiensis
  misc_feature (1)..(368): tr|A0A345IFU6|A0A345IFU6_9DEIO tRNA epoxyqueuosine(34) reductase QueG OS=Deinococcus wulumuqiensis OX=980427 G N=queG PE=4 SV=1
MNAAESLAALALDLGADVVGWAPAQIPAAAVQEYAGWLAAGRHAGMTYLERQLPARADPGSRLDGAASVLMLGVSHAMTLPQRPAGGVRVGRVARYAWTPDYHEQLQPLLTRLEQEAASQGVRARGYVDHGPVMERLLAAQAFPGWRGKSGMLLSTELGAFTTLAAVLTDLPYLGDGAPHPDRCGRCVRCVGACPTAAIGPDRAIDARRCVSYLTIEHRGPLPVELRPGVGDWLFGCDICSAVCPWSVRAGPLARLFGPRPELAHPDLSRFFGVSERHFEREWAGTAFLRPRRKGMARNALTVLGNGRAPEGWPLLLAGAGDPAWEVREAAAWALSRWEEWAELARLERDPDERVQAAARAFAELGTG

SEQ ID NO: 76235 - protein, 366 aa, Deinococcus yavapaiensis
  misc_feature (1)..(366): tr|A0A318SCA2|A0A318SCA2_9DEIO Epoxyqueuosine reductase OS=Deinococcus yavapaiensis KR-236 OX=694435 GN=DES52_ 10127 PE=4 SV=1
MDAALHLQEFALSLGFDVAGWTTADVPRSAVDEYASWLRASRHAGMEYLERQLPRRADLSSTLPNAAGVLALGISHAFEDVTAPPGGVRLGNVARYAWTPDYHEQLQPLLSALEAEAARLGITARGTVDHAPVMERLLAGRAFLGWRGKSGMLVSTSLGAFTTLAVLLTDLPTPSVDEAHPDRCGRCARCVLACPTAAIGSDRAIDARRCVSYLTIEHRGPIPHALREGVGSWLFGCDGCLEVCPWSRKAGPLAQTLRPDPNLAHPDLTPFFTLTSRQFDKLYAGTAFSRPRRKGMARNACVVIGNTRAEQGRPLLDLAVRDPAWEVREAAAWALARFEAWRELALLEHDEHEIVRRTARHRAASF

SEQ ID NO: 76236 - protein, 188 aa, Unknown
  misc_feature (1)..(188): tr|A0A3M2EWV3|A0A3M2EWV3_9DEIN tRNA epoxyqueuosine(34) reductase QueG (Fragment) OS=Deinococcus-Thermus bacter ium OX=1913990 GN=D6684_08135 PE=4 SV=1
PYPDRCGACARCLGGCPTGALLGDGTLDARRCISYWTIEHRGTIPLELWSGLGDWLFGCDVCQEVCPWNRKARAFWAGFSPEADLAYPNLLDFFELSSRAFERRYAGTAFLRPGRTRMARNALVVLSNLAYPELLPLALKAAQDVNPVVRATAAQALARLGERALLERFFQDPDPKVAGVARGLREAL

SEQ ID NO: 76237 - protein, 181 aa, Unknown
  misc_feature (1)..(181): tr|A0A3M2EUH8|A0A3M2EUH8_9DEIN Epoxyqueuosine reductase (Fragment) OS=Deinococcus-Thermus bacterium OX=1913990 GN=D6684_11390 PE=4 SV=1
MWPLPLRGSSRALKIPAVDPVAVLTQAAQERGFLTAWAGLELPEVAQARYRAWLAQGHQAGMGYLLEQAPTRLEPARRFGWAKSVLVLAAPHAYPPPPRPAGGLRLGRVARYAWVRDYHLLLRPHLEALQALAHRLGLEARAYVDTGPLSERGYAVKGGLGWVGRSAMLLRMGEGSHLTLA

SEQ ID NO: 76238 - protein, 351 aa, Delftia acidovorans
  misc_feature (1)..(351): tr|A0A286IVW8|A0A286IVW8_DELAC Epoxyqueuosine reductase OS=Delftia acidovorans OX=80866 GN=queG PE=3 SV=1
MQGWARELGFSQIGVAGVDLSSAEPGLMQWLAQGFHGEMDYMQAHGLRRARPAELVPGTVSVITARMDYLPRDTPADAPGAWQAVEWARLQRPDEGIVSVYARGRDYHKVLRNRLQKLAERIAQEVGPFGHRAFTDSAPVLEAELARRSGQGWRGKHTLVLNREAGSMFFLGEIYVDLALEPTEPVTAHCGSCAACITACPTGAIVAPHRVDARRCISYLTIEHAGAIPEELRPLMANRIYGCDDCQLACPWNKFAQPSRLPDFDAREALSGGQLVHFFAWDEPTFLRLTEGSPIRRIGHARWLRNVAVALGNAWRETGNAALQQALASRAEHPDALVREHVAWALSQRSD

SEQ ID NO: 76239 - protein, 324 aa, Delftia acidovorans
  misc_feature (1)..(324): tr|S2WIB6|S2WIB6_DELAC 4Fe-4S ferredoxin-type domain-co ntaining protein OS=Delftia acidovorans CCUG 274B OX=88 3101 GN=HMPREF9701_02919 PE=4 SV=1
MQWLAQGFHGEMDYMQAHGLRRARPAELVPGTVSVITARMDYLPRDTPADAPGAWQAMEWERLQRPAEGIVSVYARGRDYHKVLRNRLQKLAERIAQEVGPFGHRAFTDSAPVLEAELARRSGQGWRGKHTLVLNREAGSMFFLGEIYVDLALEPTAPVTAHCGSCAACITACPTGAIVAPHRVDARRCISYLTIEHAGAIPEELRPLMANRIYGCDDCQLACPWNKFAQPSRLPDFDAREILAGGQLVHFFAWDEATFLRLTEGSPIRRIGHARWLRNVAVALGNAWRETGDTALRQALASRAEHPDAMVREHVAWALSQRSD

SEQ ID NO: 76240 - protein, 324 aa, Delftia lacustris; identical to SEQ ID NO: 76239
  misc_feature (1)..(324): tr|A0A1H3GGF2|A0A1H3GGF2_9BURK Epoxyqueuosine reductase OS=Delftia lacustris OX=558537 GN=SAMN05421547_102171 PE=4 SV=1

SEQ ID NO: 76241 - protein, 351 aa, Delftia sp.
  misc_feature (1)..(351): tr|F6AL74|F6AL74_DELSC Epoxyqueuosine reductase OS=Delf tia sp. (strain Cs1-4) OX=742013 GN=queG PE=3 SV=1
MQGWARELGFSQIGVAGVDLSSAEPGLMQWLAQGFHGEMDYMQAHGLRRARPAELVPGTVSVITARMDYLPRDTPADAPGAWQAVEWARLQRPDEGIVSVYARGRDYHKVLRNRLQKLAERIAQEVGPFGHRAFTDSAPVLEAELARRSGQGWRGKHTLVLNREAGSMFFLGEIYVDLALEPTAPVTAHCGSCAACITACPTGAIVAPHRVDARRCISYLTIEHAGAIPEELRPLMANRIYGCDDCQLACPWNKFAQPSRLPDFDAREALSGGQLVHFFAWDEPTFLRLTEGSPIRRIGHARWLRNVAVALGNAWRETGNAALQQALASRAEHPDALVREHVAWALSQRSD

SEQ ID NO: 76242 - protein, 324 aa, Delftia sp.
  misc_feature (1)..(324): tr|A0A031IQW2|A0A031IQW2_9BURK Epoxyqueuosine reductase OS=Delftia sp. RIT313 OX=1468410 GN=queG PE=4 SV=1
MQWLAQGFHGEMDYMQAHGLRRARPAELVPGTVSVITARMDYLPRDTPADAPGVWQAVEWARLQRPDEGIVSVYARGRDYHKVLRNRLQKLAERIAQEVGPFGHRAFTDSAPVLEAELARRSGQGWRGKHTLVLNREAGSMFFLGEIYVDLALEPTAPVTAHCGSCAACITACPTGAIVAPHRVDARRCISYLTIEHAGAIPEELRPLMANRIYGCDDCQLACPWNKFAQPSRLPDFDAREALSGGQLVHFFAWDEPTFLRLTEGSPIRRIGHARWLRNVAVALGNAWRETGNAALQQALASRAEHPDALVREHVAWALSQRSD

SEQ ID NO: 76243 - protein, 324 aa, Delftia tsuruhatensis
  misc_feature (1)..(324): tr|A0A1I0W1P2|A0A1I0W1P2_9BURK Epoxyqueuosine reductase OS=Delftia tsuruhatensis OX=180282 GN=SAMN05444579_101 173 PE=4 SV=1
MQWLAQGFHGEMDYMQAHGLRRARPAELVPGTVSVITARMDYLPRDTPADAPGAWQAMEWERLQRPAEGIVSVYARGRDYHKVLRNRLQKLAERIAQEVGPFGHRAFTDSAPVLEAELARRSGQGWRGKHTLVLNREAGSMFFLGEIYVDLALAPTAPVTAHCGSCAACITACPTGAIVAPHRVDARRCISYLTIEHAGAIPEELRPLMANRIYGCDDCQLACPWNKFAQPSRLPDFDAREILAGGQLVHFFAWDEATFLRLTEGSPIRRIGHARWLRNVAVALGNAWRETGDTALRQALASRAEHPDAMVREHVAWALSQRSD

SEQ ID NO: 76244 - protein, 351 aa, Delftia tsuruhatensis
  misc_feature (1)..(351): tr|A0A1D8J967|A0A1D8J967_9BURK Epoxyqueuosine reductase OS=Delftia tsuruhatensis OX=180282 GN=queG PE=3 SV=1
MQGWARELGFSQIGVAGVDLSSAEPGLMQWLAQGFHGEMDYMQAHGLRRARPAELVPGTVSVITARMDYLPRDTPADAPGAWQAMEWERLQRPAEGIVSVYARGRDYHKVLRNRLQKLAERIAQEVGPFGHRAFTDSAPVLEAELARRSGQGWRGKHTLVLNREAGSMFFLGEIYVDLALEPTAPVTAHCGSCAACITACPTGAIVAPHRVDARRCISYLTIEHAGAIPEELRPLMANRIYGCDDCQLACPWNKFAQPSRLPDFDAREILAGGQLVHFFAWDEATFLRLTEGSPIRRIGHARWLRNVAVALGNAWRETGDTALRQALASRAEHPDAMVREHVAWALSQRSD

SEQ ID NO: 76245 - protein, 294 aa, Unknown
  misc_feature (1)..(294): tr|A0A1V4M0V3|A0A1V4M0V3_9DELT Uncharacterized protein OS=delta proteobacterium ML8_F1 OX=1775671 GN=AVO33_037 10 PE=4 SV=1
MRPHEIIADKALSLGFHQVGFSRVAVFENLREIFEARDFLEMEIKDSQKRIDPWSHFPGGGTFVVLGMSYPLYGIPPLHGDRVRVSASLVPDYHLVLREKLEELLDFVITELGGEGRTFVDVEGLDDRQVAFRSGLGFYGKNTQIISPYLGSNFNIGYLVLSLELDYQSPVITGDCRDCTRCVEACPTGALPGDYTLTAQKCLSYLTQKKDLSPQEASWLNRCVYGCDICQRVCPYNSISSQSIEHVFTREDFEALSQRQYKKKYGHRDFSFRGVKIIRRNIDLALGNSGSETE

SEQ ID NO: 76246 - protein, 294 aa, Unknown
  misc_feature (1)..(294): tr|D8F6T0|D8F6T0_9DELT Putative iron-sulfur cluster-bin ding protein OS=delta proteobacterium NaphS2 OX=88274 G N=NPH_5844 PE=4 SV=1
MNIARQAKDSGFIASGVSPSGKPLFFDAFCKWIDAAKFGQMAWLQKHRSLREDPGKLLRECRTIISLAYPYPSAKPCTPDGYTMARYSAPQKNDYHIRLRKKAEHLATKIKASYPGAKTRVCIDSAPILERSFALRSGMGFLGKNNMFIVPGHGSYLFLAEVLTTALLPPSQDTSTIGDLCGDCTRCVDACPTGALESPRYLNASKCLSYLTIEHEGDLDKKTGKKMGRCFLGCDICQEVCPFNRSEKPDEISLPGIKEFLKMEEREFKTLFGQTALARPGLRRIQRNIKAILH

SEQ ID NO: 76247 - protein, 399 aa, Deltaproteobacteria bacterium
  misc_feature (1)..(399): tr|A0A2E8GLM8|A0A2E8GLM8_9DELT Epoxyqueuosine reductase OS=Deltaproteobacteria bacterium OX=2026735 GN=queG PE =3 SV=1
MPVLSAKPETPEIWIRQKAEELGFGLVGFAKVAPSRTIGIYQDWLRQGYAGAMEYLERHAELKEDPRHLLPEAQTLIALGMHYQTDDPDPVQSNNPALGRVSRYAWGDDYHQVLRAKLRELSDGIQQKFRVGDGQHRPCVDTGPLLERELAHHAGLGWFGKHSNLIHWPQGSWFFLAELLVDFPLTPDAPFTRVDCGSCTRCIEACPTDAIVADRTVDARRCISYLTIELKGAIPQELRTRMGNWIFGCDICQEVCPWNRNAPRTSEPAFQPRSGFQHPELLEWMGMNQEEFRRRFRKSPLKRTQRRGLLRNIAVALGNWGSPKAIPALGKGLRDTEPLVRQHAAWALGRIAAPESQRLLQHSLVAETDEAVRREIRGSLNPHESTNRLDSASDFSDNY

SEQ ID NO: 76248 - protein, 352 aa, Deltaproteobacteria bacterium
  misc_feature (1)..(352): tr|A0A1Z8TE67|A0A1Z8TE67_9DELT tRNA epoxyqueuosine(34) reductase QueG OS=Deltaproteobacteria bacterium TMED58 OX=1986674 GN=CBC18_04065 PE=4 SV=1
MKKELDLTNQIKNIILSNGFDSVGVSEAHKLDDEFFLANWIQKDFHGSMKYMEDVEKRSDVRKIDSNFKSVISCTLNYNTLDKEKSSMLAEKKGKGWISRYAIGDDYHKIIEKKLKKIGFLIKKLYSETVNVRAYVDTGPLLERAYASRSGLGWIGKNSCLINRGQGSWIFLSNILLDQKLKFDDVTTKDFCGTCTLCIDSCPTNAIVDNKIIDSRKCISYLTIENRNYIEDALASKIKNNIYGCDICQEVCPWNRKSIIDLENGINPKNLLIEPDIINLISIVEEDWETLKIKSPLKRVKKDGLIRNILIVMGNSLNKKYLSILQKYLESKNLIHSMTARDSIKRIKSHIS

SEQ ID NO: 76249 - protein, 275 aa, Dendrosporobacter quercicolus
  misc_feature (1)..(275): tr|A0A1G9S254|A0A1G9S254_9FIRM Epoxyqueuosine reductase QueG (Queuosine biosynthesis) OS=Dendrosporobacter que rcicolus OX=146817 GN=SAMN04488502_103182 PE=4 SV=1
MAITKQQISKYARTLGANLIGFAPASRWDEYDEVEADYRPAAIWPETNTVIVLGVPVLLPVIETTPSINYVELYDTTNTLLDQIAYRLAVYLTEKGYGSIFMPRDAYGDIQVLVDKPVAAFSHVFAGKYAGLGTIGYSHVLLNRQYGPRVRYVSVFTRLKIAPDNVLETDLCTKCRVCQRLCPTQAFTTRDDRIIALMDKHACARHHAQLRQEHRYPCGICVKVCPVGEDRQVFNSNDIGLYLQEKESIRKNPDDPRYKRWVHMRRHGSNGERLF

SEQ ID NO: 76250 - protein, 357 aa, Denitratisoma sp.
  misc_feature (1)..(357): tr|A0A518U837|A0A518U837_9PROT Epoxyqueuosine reductase OS=Denitratisoma sp. DHT3 OX=1981880 GN=queG PE=3 SV=1
MHDWNSLIEEIGTWARELGFAAIGVSSADLGTAEAGLSAWLDAGCHGEMDYMASHGLKRARPAELLPGTRSVITARMDYLPAAADAAANLADGRRAYVSRYALGRDYHKLLRNRLQKLADRIADRVGPFGYRAFTDSAPVLEVELAIRSGLGWRGKHTLLLNREAGSHFFLGEIFTDLPLPPTAPPAGTTAAAHCGTCRACIDACPTGAIVAPYRLDARRCISYLTIELKGAIPIELRPLIGNRIYGCDDCQLYCPWNRFAPLTHEQDFAVRHGLDQATLVELFAWSEAEFNERLAGSPIRRIGHERWLRNIAVALGNAPPDAVLQAALRTRADDPSPLVREHVAWALARQASTEPA

SEQ ID NO: 76251 - protein, 368 aa, Denitromonas halophilus
  misc_feature (1)..(368): tr|A0A557R2R7|A0A557R2R7_9RHOO Epoxyqueuosine reductase OS=Denitromonas halophilus OX=1629404 GN=queG PE=3 SV= 1
MNKMDHQEVSGAVGEAFDVDALAARIRAWGLGFGFGEVGITGTELPGAEAGLQAWLAAGFHGEMDYMAKHGLRRCRPAELVPGTLRVITARLDYWPESADADAALNDPERAYISRYALGRDYHKVLRLRLKKLAERIAEEVPHGFRVFTDSAPVTEVALATESGIGWRGKHTLLISREAGSFFFLGEIFTDLPLPVDPPVSDHCGDCTACITVCPTQAIVAPYKLDARRCISYLTIELHGAIPAEFRPLIGNRVYGCDDCQLVCPWNRFAQRTAEADFAVRNGLDAASLVELFAWTADDFESRMPGSPIYRIGHERWLRNLAVGLGNAPSMPAVLGALQARAEDPSELVREHVAWALAQHADRSPPSA

SEQ ID NO: 76252 - protein, 368 aa, Denitromonas halophilus
  misc_feature (1)..(368): tr|A0A557R3U9|A0A557R3U9_9RHOO Epoxyqueuosine reductase OS=Denitromonas halophilus OX=1629404 GN=queG PE=3 SV= 1
MDKFDHQEVSGAVGEAFDVDALAARIRAWGLGFGFGEVGITGTDLPGAEVGLQAWLAAGFHGEMDYMAKHGLRRCRPAELVPGTLRVITARLDYWPESADADAALNDPERAYISRYALGRDYHKVLRLRLKKLAERIAEEVPHGFRVFTDSAPVTEVALATESGIGWRGKHTLLISREAGSFFFLGEIFTDLPLPVDPPVSDHCGDCTACITVCPTQAIVAPYKLDARRCISYLTIELHGAIPVEFRPLIGNRVYGCDDCQLVCPWNRFAQRTAEADFAVRHGLDTASLVELFAWTAEDFESRMPGSPIYRIGHERWLRNLAVGLGNAPGTPAVLAALQARADDSSELVREHVAWALAQHADRAAASA

SEQ ID NO: 76253 - protein, 396 aa, Desemzia incerta
  misc_feature (1)..(396): tr|A0A1I5YHK8|A0A1I5YHK8_9LACT Epoxyqueuosine reductase OS=Desemzia incerta OX=82801 GN=SAMN04488506_2017 PE=4 SV=1
MATTKRLGFDMVNGTVLKERIIEESKRIGIDKIGFTTAEPFDGLEEKLRTQQSKGYHSGFEHKVIEERVYPELIFRRPRSIIAIALAYPTKMAEPPEREKGVRRGEFARASWGQDYHDVLRDRMDRLIAFIREAAGEEAEFKPMVDTGELVDVAVAQRAGLGFIGRNGLLITKEFGSYVYLGEIITNLDFEPDEPVPFGCGECMRCVTACPTGALLGDGRINAKECLSYQTQTKGMMEEKYRRKMGHVIYGCDICQIVCPYNKGKDFHFHPEMEPDPEKVLPKLKPLLTISNKDFKQQFGSMAGSWRGKKPLQRNAIIALGNKRDRTALPDLLRCIEEDIRPVIRGTAAWSISKIVTRRDEMVLEFLREALEKETDEEAYHEITLAIEAIENKKGF

SEQ ID NO: 76254 - protein, 318 aa, Desertifilum sp.
  misc_feature (1)..(318): tr|A0A1E5QPX6|A0A1E5QPX6_9CYAN Epoxyqueuosine reductase OS=Desertifilum sp. IPPAS B-1220 OX=1781255 GN=queG PE =3 SV=1
MNLNADRVKQKALELGFHLVGIASVDNELVKEAVERLQSWLALGYQADMAWMANPRRQDVREVMPNVQSVVCVALNYYTPYQRPPGAKYAKISRYGWGRDYHKVMHKKLKAFSLWLEAQGLQTRYYADTGPVQDKVWAQAAGLGWIAKNGNAITRQYGSWVFLGEVLVDRYLTPDRPHTQHCGTCTRCLEACPTGAIAQPFVVDANRCIAYHTIENREADLPEAIAPHLEGWVAGCDICQEVCPWNQRFAQPTDVADFTPYPHNLAPTLAELANLSEEEWDRRFVASALRRIKPQMWRRNARANLEASLEVASAHPNP

SEQ ID NO: 76255 - protein, 387 aa, Desmospora activa
  misc_feature (1)..(387): tr|A0A2T4Z7S5|A0A2T4Z7S5_9BACL Epoxyqueuosine reductase OS=Desmospora activa DSM 45169 OX=1121389 GN=C8J48_051 1 PE=4 SV=1
MVTPEQIKQSLIQETERLGIDKIGFASADPFLELKERLIQHRKSGFESGFEEPDLDKRTDPRLSLPNARTIIAIALAYPTRMDDPPANRPGAYRGFFCRASWGEDYHHVLRRKLEGLERHLRELVPDVTTEIMVDTGALSDRAVAERAGIGFIGKNTSLITTQFGSWVYLGEMLVDIALPPDQPVTEGCGDCTVCIDACPTGALVGPGQLNSQACLAYQTQTKGFLADEYRDLLGGYLYGYETCQAVCPFNRGKNFTHQEAFRPDPEKVKPLLKPLLTISNRQFQQRFGTMAGSWRGKKPIQRNAIIALGRFRDKSAVPDLIKLLQDDPRPVIRGTAAWALGRIGGSEAEKALMEAEQREQDSEVQKEIKRALKNRITHEKQENEQG

SEQ ID NO: 76256 - protein, 419 aa, Desmospora sp.
  misc_feature (1)..(419): tr|F5SL20|F5SL20_9BACL Iron-sulfur cluster binding prot ein OS=Desmospora sp. 8437 OX=997346 GN=HMPREF9374_3802 PE=4 SV=1
MTIMIRCRDGAVIEWPCYHRGNEWITEGGGGMDPEQIKEELKREAKRLHIDKIGFASAEPFTELKERLIQHRKAGYESGFEEPDLEKRTDPRKSLPEARSIIAIALAYPTRMENPPESRAGALRGGFCRASWGEDYHRVLKNKLEGLKAKLSELVPGAAAKVMVDTGALSDRAVAERAGIGWSGKNTSIITQEFGSWVYLGEMITDVQLPPDEPITQACGDCTACLDACPTGALTEPGRLNSQACLAYLTQTKGYLPEEYRSKLGGSLYGYETCQLVCPYNRGKNFTHHREFTPEPDQVKPLLKPLLQMSNREFRERFGSMAGSWRGKKPIQRNAIIALGRYRDRTAVPDLIHLLETDIRPVIRGTAAWALGRIGGAEAETALRQSKDREQDEEVLQEIASALQACHSEEKAEHRYREA

SEQ ID NO: 76257 - protein, 351 aa, Desulfacinum hydrothermale
  misc_feature (1)..(351): tr|A0A1W1XPP6|A0A1W1XPP6_9DELT Epoxyqueuosine reductase QueG (Queuosine biosynthesis) OS=Desulfacinum hydrothe rmale DSM 13146 OX=1121390 GN=SAMN02746041_02475 PE=4 S V=1
MAELSRIVREFAEIEGACAAGIVTPRTLSGGPPSTDLSYVLPQARSAVVFAVPMDPAPIDGYLRKEDRLSLERAYVRANTVASGIALHLANFLAQKGYPSAAVAANNVFRPASSQSGNGCPADSYYPDIAHRYLAVRSGVGHMGFSGNVITKDHGAAVILGTVVTEADLAPTEPLAPEESYCDRCGLCRAACASGFMDFRNTTRVVLGGVEIAYSGRRHYGRCDLVCSGYTGLHPSGKWSTWSPGRFPVPDRDEDLPAAYERMQKAHASWPASEGGRYFFFMDEKLRFSCGHCMLICHPSREERKRRYQLLRHSGVVVQMADGTRKAVTPHEARTILDAMHPERRILYEDV

SEQ ID NO: 76258 - protein, 353 aa, Desulfacinum infernum
  misc_feature (1)..(353): tr|A0A1M4VMP9|A0A1M4VMP9_9DELT Epoxyqueuosine reductase QueG (Queuosine biosynthesis) OS=Desulfacinum infernum DSM 9756 OX=1121391 GN=SAMN02745206_00706 PE=4 SV=1
MTKLSRIVREFAEIEGACATGIVSTETLAGGPPSTDLSYVLPGARSAVVFAVPMDPAPIEPYLKKQDRLSLERAYVRANTLASGIALHLANYLTQKGYPSVPVAANNVFRPVPSGKEETCLADTYSYYPDIAHRYLAVRSGVGHMGFSGNLIIPDHGATVILASVATAADLVPTPPLPPEENYCDRCGLCLAACASGFMDFKRNTTVVLGGVEISYSKRRHYGRCDLVCSGYTGLHPSGRWSTWSPGRFPVPDRDEDLPAAYDRVQEAHGKWPASEGGRYFFFMDEKLRFSCAHCMLVCAPTKEERKRRYQLLRDSGVVVQTADGSRKAVSPEEARTILDAMPPERRALYEPV

SEQ ID NO: 76259 - protein, 226 aa, Desulfallas geothermicus
  misc_feature (1)..(226): tr|A0A1I6EL67|A0A1I6EL67_9FIRM Epoxyqueuosine reductase QueG (Queuosine biosynthesis) OS=Desulfallas geothermi cus DSM 3669 OX=1121426 GN=SAMN05660706_1591 PE=4 SV=1
MTGMTEKLKKYAHDLGITAIGTAPVERYHLAPPGHRPGDFLPAAKSVVTFAYKLNDGPLNNLPVTRNQYMVEFEAVNQFLLQTAHKIARFLESGGYESVAFGPEAAIGDYPRLKGDLSHKHSAVLCGLGSFGINNLLLTPDHQARVRLASVVTTAPLDYDEPLIISVCHQCLKCVRECPSGALDDWEKSYSPQTGWTINKEKCAHYMFVTSAGKRCGLCVKACAQK

SEQ ID NO: 76260 - protein, 374 aa, Desulfarculus sp.
  misc_feature (1)..(374): tr|A0A3A6P4K7|A0A3A6P4K7_9DELT Epoxyqueuosine reductase OS=Desulfarculus sp. OX=2093367 GN=C4525_06235 PE=4 SV =1
MGLKQLIREKALELGFEGIGFTGVEPLDLYIKEFRSRPEMYQWVTTPQFDLLRGAEVTQRYPWARSLLVLIRNYHRRRFPRQLIGVIGRCYQVDERKEKGSEHQRLMDFFAFLKDQGLKFRWDGEIPARMAAARAGVVTYGKNCFVYARGAMRGASWLESIPLVLDAELAPDEPSIELGCPDWCKNACVAACPTGALYAPKKMRPQRCIAYNTYFAPGLTPAELREPMGTWVYGCDRCQEVCPRNQPWLNQPLPDNPPLMARAEDFALERLLAMDTEYYLANIWPLCFYISRRQVAQWQMNAARALGNRGDREAAPLLARALADSPDYTVRAMAAWALGRLGGERAGKFLEAARPREDGMVRQEIEDALARARA

SEQ ID NO: 76261 - protein, 373 aa, Desulfatibacillum aliphaticivorans
  misc_feature (1)..(373): tr|B8F9F5|B8F9F5_DESAL Heat repeat-containing PBS lyase OS=Desulfatibacillum aliphaticivorans OX=218208 GN=Dal k_1198 PE=4 SV=1
MITKQDVMQAAYDNGFVDVGITTMEPFDNSKDYLEAHQEEYGWAEKMGLSLLQGTDPANIMPEGKSIIVLLEGYFQKSFPPSMERHFGRCYLDDDRVTKDGLALRIKAFRNFLREGGINSKVPFNLPHRAAATRAGLGTLGKNCLFYSRKAEAQSSFSFPIAVVVDREFEADEPTMRFGCPDWCRNACIAACPTKALKGNGRLDPRKCISFLSYYGRGITPLEIREAMGLFVYGCDRCQNVCPRNAPWLAKDLPVNQKAAAKAGDFELPKLLHMDKEYFETKIWPHMFYMGYKHIWRWKMNVARVMGNTLDPIYVDDLIKAFGEHDDERVLGMIAWALGRIGGEKAKQALEGFASKAQEPVLGEINHALEMID

SEQ ID NO: 76262 - protein, 241 aa, Desulfatibacillum alkenivorans
  misc_feature (1)..(241): tr|A0A1M6U0A3|A0A1M6U0A3_9DELT Epoxyqueuosine reductase QueG (Queuosine biosynthesis) OS=Desulfatibacillum alk enivorans DSM 16219 OX=1121393 GN=SAMN02745216_03775 PE =4 SV=1
MPDDYTLQIKAKAAQLGADLAGIADLAPFKDEKTYPASLLAPFTRALSMAVQIPSMVFETIHKKPSDLYNHVYKTANMMLDQIALKAAGSLEQDGYRSLPIPASQIIDVKDYRGALSHKAIARMAGLGWQGKSLLLVTPKFGPRVRLVTVLTNAPLEPDGPVANRCGKCTNCKDACPAGAIKGVQIKDRYADRNQALDFQKCVDKTAEFARMDNIGARICGFCIKACPFGRKNPKNLPWLQ

SEQ ID NO: 76263 - protein, 373 aa, Desulfatibacillum alkenivorans
  misc_feature (1)..(373): tr|A0A1M6PNR7|A0A1M6PNR7_9DELT Epoxyqueuosine reductase OS=Desulfatibacillum alkenivorans DSM 16219 OX=1121393 GN=SAMN02745216_02858 PE=4 SV=1
MITKQDVMQAAYDNGFVDVGITTMEPFDNSKEYLEAHQEEYGWAEKMGLSLLKGTDPASVMPEGKSIIVLLEGYFQKAFPPSMERHFGRCYLDDDRVTKDGLALRIKAFRSFLRDAGINSKVPFNLPHRGAATRAGLGTLGKNCLFYSRKAEARSSFNFPIAVVVDQEFEADEPTMRFGCPDWCRNACIAACPTKALKGNGRLDPRKCISFLSYYGRGITPMEIREAMGLFVYGCDRCQNVCPRNAPWLAKDLPVNPKVVAKAGDFELPKLLHMDKEYFETKIWPHMFYMGYEHIWRWKMNVARVMGNTLDPMYVDDLVTAFGEHDDERVLGMIAWALGRIGGEKAKQALEGFAPKAQEPVLGEIRHALDMFD

SEQ ID NO: 76264 - protein, 376 aa, Desulfatitalea sp.
  misc_feature (1)..(376): tr|A0A0F2QVV4|A0A0F2QVV4_9DELT PBS lyase OS=Desulfatita lea sp. BRH_c12 OX=1629708 GN=VR64_14895 PE=4 SV=1
MLSKEDVIRQAQSLGFEDIGFTSAEPFDSHREVLAARQQEYGWVEEKGIALLQGTDPRNALPQAQSIIVLMSVYLRNAYPKYLEGHFGRCYLDDDRITKNGLAVKVKALRAFLQDNGIASKVPFNLPHRMAAARAGLGTFGKNGLFYSRKAARQSSWVLPITVVVDQPFEPDAPTIRMGCPDWCRNACIAACPTRALKGNAAVDPRRCISYLTYYGEGLTPRELREPMGLYVYGCDRCQNVCPRNAAWLAEQLPPNPAVDAMQADFQLEQLLGMDKAYFKNRIWPRMFYMPPEQMWRWQMNAARAMGNTRDEKYIQPLAQACQGNGDERVRAMAAWALGRIRTIKARTVLETLKASAPGLVAAEIAVAALDMPEGP

SEQ ID NO: 76265 - protein, 409 aa, Desulfitibacter sp.
  misc_feature (1)..(409): tr|A0A101V6J6|A0A101V6J6_9FIRM Reductive dehalogenase O S=Desulfitibacter sp. BRH_c19 OX=1734395 GN=APF76_10245 PE=4 SV=1
MNIHQLNTTTAQLYNVDETYRRYNQKYNLNIRGYWDKESKNLELQIVNTMSDYVKKNTPGYSPFDYGFFMGSLNYLKQIGFNANLCDQNANSWNYDIKSIKEAKEKVTDERETTVALKKAAKMYGASAMGIARLDRRWIYSHWFDEKTKQEYPIRFTDESKEYADISQPTLLPDGVRVIPATMKYVIVLLFEMDYESLKYAPTLLACASTVNTYAKASLTTMSLAGMIKALGYEAIPSLNCTGLNVPLAIDAGLGQLGRNGKLISPRYGSISRIAKIITDIPLLPDKPIDFGVTEFCEACRKCARECPSNAISSGTREMGPVDDTGNTGYLRWPVDHKKCHSYFCGSGTNCNVCISVCSYNRGYKWTNSMLSTFNKKNGLVDSILDGLDDEIYGEELFKKGKNVFWKEE

SEQ ID NO: 76266 - protein, 376 aa, Desulfitibacter sp.
  misc_feature (1)..(376): tr|A0A117S4Z7|A0A117S4Z7_9FIRM Uncharacterized protein OS=Desulfitibacter sp. BRH_c19 OX=1734395 GN=APF76_1323 0 PE=4 SV=1
MNLSEKLIKFCKDMGFDLVGIVEPDFLKDRLDVLTERRRKGYNSRFENPDLNLRTSPQLVLPNVKSILVLGLGYYSDVESSPEPLKAQVARYTRGMDYHLVMKQKMNKVIEYLKSEEESFEYKALVDSSPLLERFLAEKIGLGWIGQNSCFYTKATGSWIFLGEILLTIELGITEVSSVETGCKNCKVCIKACPTGAIEGMYTLNPHKCLAYVTQAKEIVPKKLRPLIGSNLMGCDICQEVCPNNKGVSPNGHKYLEPLDFLDISLKDILTLTNSKFKQLFSRAAFGWCGKKVLQRNALIVLGNQKQSDAIHLIEPFLNHEDYKMRVHAAWALGQIGNQQSKTLLEKSMHIENHLEVVHEIKDALDKTREKTPHYT

SEQ ID NO: 76267 - protein, 253 aa, Desulfitobacterium chlororespirans
  misc_feature (1)..(253): tr|A0A1M7SKP9|A0A1M7SKP9_9FIRM Epoxyqueuosine reductase QueG (Queuosine biosynthesis) OS=Desulfitobacterium ch lororespirans DSM 11544 OX=1121395 GN=SAMN02745215_0100 6 PE=4 SV=1
MKEKIKKFILDLGVDDVGFAKVEDYHSPKSYPIASFLPEARTIISLVFQELDTCESPSVTIAMNGRLDMNSFQRSCSYQINRFLKREFRAKVVDMPYSYPMELHKDRPAIADFSQRHAAVAAGMGTFGRHNLVIHPRFGTRIGLTALITNLEIEPNEKIEQDLCRHCDLCVRNCPAGALDEAGKTSVGKCIRNSQPYGLGANIAFWQEFSGSSPEEQKNMFMEERYGRLQQAGSMGMQYYCFNCMKFCPVGVR

SEQ ID NO: 76268 - protein, 364 aa, Desulfitobacterium chlororespirans
  misc_feature (1)..(364): tr|A0A1M7U057|A0A1M7U057_9FIRM Epoxyqueuosine reductase OS=Desulfitobacterium chlororespirans DSM 11544 OX=112 1395 GN=SAMN02745215_02838 PE=4 SV=1
MDQKEGILWKERLRHLALESGFVAVGFTHAEPVAGLYEFLAERSAQGYHTSFEEQELRKRVDPKAIWPACETVVVLAYPLVYSAPPQKGEGVLARSAVGEDYHSQVKRALHQLVSSFGEAGWRGEAPQIQVDTGPLNERALATRAGLGWLGKNQQLIISGKGSFVALGLMLLDKALPPDEPLAGQCGKCTRCIRACPAQILGTRHFQANECLSYLTQSKEPLTERQRTALGKRIFGCDTCQEVCPHNGLRCDEEGKRSILNKIKGDRQGELRKAGQERQEPDISGEKALRRGVDLWDTLNLTKSQFNQQWRGTAAGWRGKGILQRNAYLALKNLRDPRLPSWEEERTGQDIPKLIQPYYSKADK

SEQ ID NO: 76269 - protein, 403 aa, Desulfitobacterium dehalogenans
  misc_feature (1)..(403): tr|I4AEH2|I4AEH2_DESDJ Reductive dehalogenase OS=Desulf itobacterium dehalogenans (strain ATCC 51507 / DSM 9161 / JW/IU-DC1) OX=756499 GN=Desde_4096 PE=4 SV=1
MRIQRLNTSAAELHEIDQNYSRYNQKHNIFIRLFWDEEIKRLEHARQKNAEQYSKDNKPGYSKFDKAFLAGTMNFMREKIVQNIHICDQEFNAWNGEKGTKEEGMDIFTLTKAIKKAAKMYGACAVGIAPLDRRWVYSHWYDLQTRQSYPIQFSDEAPEYNRIQEPTLLENKVRVIPASMKTAIVMLFEMDPGCLKYSPTLLPYANGRFVYSEMCLTTNSLAGLIRELGYNAIPSVNCTALNIPLAIDAGLGQIGRNGKLINPYLGTRIRIAKVITDLPLDCDQPIDFGVNEFCEACRKCARKCPAGAIPSDSKVCSGMDELSNDGYLRWAIDHKKCFCYWSECGTNCNICITVCSYNRGYKWTKSILNSSKESSTLVDNLLDSLDDCGPDVFDPEASFWLNS

SEQ ID NO: 76270 - protein, 350 aa, Desulfitobacterium dehalogenans
  misc_feature (1)..(350): tr|I4A8L5|I4A8L5_DESDJ Uncharacterized Fe-S protein OS= Desulfitobacterium dehalogenans (strain ATCC 51507 / DS M 9161 / JW/IU-DC1) OX=756499 GN=Desde_1909 PE=4 SV=1
MEEKEGALWKERIRHLALESGFAAVGFTHAEPIEGLYGFLEERSAQGYHTSFEEKELRKRVDPKAIWPACETVVVLAYPLAYSSPPQRGEGVLARSAVGEDYHSQVRRALCRLADSLGEAGWRGENPQTQVDTGPLNERALAARAGLGWIGKNQQLIVPGVGSFVALGLMLLDRALPPDEPLDGQCGNCTRCIAVCPAQILGAMHFRANQCLSYLTQSKEPLTEQQRAALGNRIFGCDTCQEACPHNRLRLAGEEEPIDLDKVKGDSQAELRKEGRRGVDLWETLNLTKSQFNQQWRGTAAGWRGKGILQRNAYIALKNLQDPRLQSWVEERAEQDIPKLVQPYFDRADK

SEQ ID NO: 76271 - protein, 316 aa, Desulfitobacterium dichloroeliminans
  misc_feature (1)..(316): tr|L0F7C6|L0F7C6_DESDL Uncharacterized Fe-S protein OS= Desulfitobacterium dichloroeliminans (strain LMG P-2143 9 / DCA1) OX=871963 GN=Desdi_1584 PE=4 SV=1
MELTEGYNWKQCIRELAHQSGFSAVGFTSGDPLEGLKEYLEERSELGYQISFEDKDLQKRVDPKALWPVCETVVALAYPLPLSAKPREGEGVLARSAVGEDYHRLVRKGLDSLVISITAAGWQGQRPLTQVDTGPVNERAFAKRAGLGWVGKNQQLIVPGVGSFVALALLFLDQALPPDNPIQSQCGECTRCVQACPAQILGQVHFQANQCISYLTQSKECLTEPQQNYLGNRIFGCDTCQEACPYNRNRLDKEDELEKEGEGLEGTRGVDLWETLNLTKSQFIRKWKNSAAGWRGKGILQRNAQLVLQNLNMIKR

SEQ ID NO: 76272 - protein, 388 aa, Desulfitobacterium hafniense
  misc_feature (1)..(388): tr|A0A0W1JFF8|A0A0W1JFF8_DESHA Epoxyqueuosine reductase OS=Desulfitobacterium hafniense OX=49338 GN=AT727_0849 5 PE=4 SV=1
MRTLNSWIQSPLFISVQKKGGISVDQKEGMLWKERLRHLALESGFAAVGFTHAEPVAGLYEFLAERSAQGYHTSFEEKELRKRVDPKAVWPACETVVVLAYPLVYSAPPQKGEGVLARSAVGEDYHSQVKRALHQLVNSLGEAGWRGEIPQIQVDTGPLNERALATRAGLGWLGKNQQLIIPGKGSFVALGLMLLDKALPPDEPLAGQCGNCTRCIRACPAQILGTRHFQANECLSYLTQSKEPLTERQRTALGKRIFGCDTCQEVCPHNGLRCDEEGKCSILNEIKGDRQGELRKAVLEGKEPDISGEKALPRGVDLWDTLNLTKSQFNQQWRGTAAGWRGKGILQRNAYLALKNLQDPRLPSWEEERAGQDIPKLIQPYYSKADKE

SEQ ID NO: 76273 - protein, 388 aa, Desulfitobacterium hafniense; identical to SEQ ID NO: 76272
  misc_feature (1)..(388): tr|G9XS31|G9XS31_DESHA Putative iron-sulfur cluster-bin ding protein OS=Desulfitobacterium hafniense DP7 OX=537 010 GN=HMPREF0322_03779 PE=4 SV=1

SEQ ID NO: 76274 - protein, 203 aa, Desulfitobacterium metallireducens
  misc_feature (1)..(203): tr|W0ED25|W0ED25_9FIRM 4Fe-4S ferredoxin OS=Desulfitoba cterium metallireducens DSM 15288 OX=871968 GN=DESME_08 450 PE=4 SV=1
MNDGSTDLQSYITQTALENGALLVGYTKVRRTQPVIILAFPFSNSWILNHPFYITRRFGEELWHEHKVHEKLTTLLQKEGYRYKVKSSLSVFGDIRPLAIAAGIGQWGKNGLVVNKTYGSKLLFSALFSDAPFEAIDQTHPFEISSELNPLSSSSDSCVNCDRCLKACPGKAFKNGIFNPRRCFLKSIRGCSECIQSCTGEAQ

SEQ ID NO: 76275 - protein, 359 aa, Desulfitobacterium metallireducens
  misc_feature (1)..(359): tr|W0E6Z1|W0E6Z1_9FIRM (Fe-S)-binding protein OS=Desulf itobacterium metallireducens DSM 15288 OX=871968 GN=DES ME_05275 PE=4 SV=1
MELQEQLSWKARFREVAESLGFIKVGFTGAQPLLDLTQYLKGTEKEGCFTPFVEADITLRTDPQAVWAACKTVVVLAYPLPLTSKSQPNEGVLARSSVGEDYHHVLHSRLDKLLQKLREINWPSEQIQLQVDTGPLNERGFALRSGLGWAGRNQQLIVPGVGSFVALALVFLDQELPPDEPMDNLCGTCQKCIQSCPAQVLGKEHFVATQCLSFLTQSKERLSDGQAKSLGQRLFGCDTCQEACPHNQGFLRREEEAQNKVQRQSYNRTEGVSYSDEATCLRRGADLYEVLNLTKAQFNERFRWTAAGWRGKGILQRNAYRIMENLQDERRIAWLNENKDNQTLPLVLRQELMGKNKDR

SEQ ID NO: 76276 - protein, 365 aa, Desulfitobacterium sp.
  misc_feature (1)..(365): tr|A0A562HEN5|A0A562HEN5_9FIRM Epoxyqueuosine reductase OS=Desulfitobacterium sp. LBE OX=884086 GN=DesLBE_0984 PE=4 SV=1
MDQKEGMLWKERLRHLALESGFAAVGFTHAEPVAGLYEFLAERSAQGYHTSFEEKELRKRVDPKAIWPACETVVVLAYPLVYSAPPQKGEGVLARSAVGEDYHSQVKRALHQLVNSLGEAGWRGEIPQIQVDTGPLNERALATRAGLGWLGKNQQLIIPGKGSFVALGLMLLDKALPPDEPLAGQCGNCTRCIRACPAQILGTRHFQANECLSYLTQSKEPLTERQRTALGKRIFGCDTCQEVCPHNGLRCDEEGKCSILNESKGDRQGELRKAVLEGKEPDGSGEKAFRRGVDLWDTLNLTKSQFNQQWRGTAAGWRGKGILQRNAYLALKNLQDPRLPSWEEERAGQDIPKLIQPYYSKADKE

SEQ ID NO: 76277 - protein, 347 aa, Desulfobacter sp.
  misc_feature (1)..(347): tr|A0A2D6EUJ6|A0A2D6EUJ6_9DELT 4Fe-4S ferredoxin OS=Des ulfobacter sp. OX=2294 GN=CL941_09135 PE=4 SV=1
MEKLTGRVKDLARGYGAGTIGITTTQMLEGGPPSADLSYVLPNARSAVSFAIPLDQNHIAPWFNKKDHHAHFQNNIHINVMASGISLELANYLKHKGFPSVPLSANTAYRTDTKNGIYDEKPPISHRYLAVCSGVGFFGLSGNVLTKTNGAAIILGSVVTEADLIPTEPIPVEDNYCDDCRLCKAACASGFIDGEEKVTIKMGGVEFSYSKKHHHSRCDYVCGGFTGLHKSGKWSTWSPGRFPIPDNDDEFFPALLNSVGPYLKRTRPGISFFNALMPGDKVQLTCGNCQLICHPDKDVRKKRFKLLIESGVIVQNPSGSLEAVTPEEAIKRLVSMHPEKRALYEEI

SEQ ID NO: 76278 - protein, 307 aa, Desulfobacteraceae bacterium
  misc_feature (1)..(307): tr|A0A523XTC0|A0A523XTC0_9DELT Uncharacterized protein OS=Desulfobacteraceae bacterium OX=2049433 GN=E3J46_136 75 PE=4 SV=1
MISTAEKLLRDFENRGWKGQIVPVKHLTDLREAILGTHERGLFDEEFYQEWLTQFSFEHPEALPSAQSIIVIAVPVPLHQTIFHWQGKRWLLSIPPTYVNYTATTECVRTTVAALLEQEGYGVVKTKLPLKTLAVRSGLAEWGRNNICFVPGMGSFLQLVGCFSDLPCVEDPWREPRLMERCDSCVACMRKCPTGAITRERVLLHAERCLTFHNERDVEIPFPPWIDSAWHNSLIGCMNCQLICPENKAVKTWIEEIGEFSAEETALLMERIPFDQLPAEMLAKLRNLGINDVQALPRNLAAILNRE

SEQ ID NO: 76279 - protein, 371 aa, Desulfobacteraceae bacterium
  misc_feature (1)..(371): tr|A0A1J5E3Z9|A0A1J5E3Z9_9DELT PBS lyase OS=Desulfobact eraceae bacterium CG2_30_51_40 OX=1805128 GN=AUK25_0237 0 PE=4 SV=1
MVTKDDIIQKAHDLGFEDVGFTSADPFDSQRKILAERHREYAWTKAGGLDLDAGTDPKNILPEARSIIVLMEVYFRKAFPRRMEPFFGRCYLDDDRMTKDGLAIRIKAFRSYLMENGIASKVPFNIPHRLAAGRAGMGTFGKNCLFYSNKVARKSSWVLPVAFVVDAEFEPGVPTLEVGCPDWCRNACLTACPTGALQGPRKIDPRRCISFLTYFGRGLTPLELREPMGLWIYGCDRCQNVCPRNAPWLSAALEPNEKAAEKAPYFDPVKLLHMDRKYFEERIWPHMFYMSSEDIWRWKMNVARAMGNSTDEGYVPELILAFGEDGDERVRGMIAWALGRIGGRAARKALEGFRASSAGVVMEEVERALSV

SEQ ID NO: 76280 - protein, 371 aa, Desulfobacterales bacterium
  misc_feature (1)..(371): tr|A0A2G9ZX01|A0A2G9ZX01_9DELT PBS lyase OS=Desulfobact erales bacterium CG23_combo_of_CG06-09_8_20_14_all_51_8 OX=1973983 GN=COX19_16010 PE=4 SV=1
MVSKQEIIEKSKEFGFEDVGFTTADPFETHRKFLAEHQAEYGWAEAVGLELMKGTDPTAIMADAQTVIVLMEVYFRKAYPRTMEGHFGRCYLDDDRVTKDGLSQRIKAFRGFLRDHGIDSKVPFNLPHRVAAARAGMGTFGKNCLFYSSKVARQSSWVLPIAVVINQKLEPGVPTLKMGCPDWCRNACIAACPTRALKGNGAIDLRKCISFLTYFGTGLTPKDLRAPMGTYVYGCDRCQNVCPRHAGWLAADLSINEKVAAKAGDFELPKLLHMDKAYFESKIWPHMFYMGADDIWRWKMNVARAMGNTQDTEYAKDLARAFSENTDDRVRAMCAWALGRIGGETARSALGGFLAESSGDVREEVADALGG

SEQ ID NO: 76281 - protein, 353 aa, Desulfobacterales bacterium
  misc_feature (1)..(353): tr|A0A1F9NY94|A0A1F9NY94_9DELT PBS lyase OS=Desulfobact erales bacterium RIFOXYA12_FULL_46_15 OX=1797914 GN=A22 77_06365 PE=4 SV=1
MVLKEDIIRAAEEAGFEDIGFTTAEPFEEHAKLLASMKEEYAWAEGAGLDLYNGIDPKTILPGAKTIIVLMETYFRKAFPRTMEGRFGRCYLDDDRVTKDGLYLRIRQFRDFLRNHGIDSRVPFNLPHRVAAARAGMGGFGKNCLFYSNRVARGGSWTLPIAVVIDREFTPGEPSIGINCPDWCKNACIAACPTRALKGNGRIDPRKCISYLTYFGEGLTPLELREPMGMYVYGCDRCQNVCPRNQPWLAADLLPNERAAAKAPDFDLPLLLHMDKNYFNTRIRPHMFYMSDRDLWRWKMNVARAMGNSLDPAYIPDLVRAFRENSDDRVKAMAAWAMGHIGESHGDPAFYLF

SEQ ID NO: 76282 - protein, 373 aa, Desulfobacterium autotrophicum
  misc_feature (1)..(373): tr|C0Q9H0|C0Q9H0_DESAH Leucine-rich ARM-like family pro tein OS=Desulfobacterium autotrophicum (strain ATCC 439 14 / DSM 3382 / HRM2) OX=177437 GN=HRM2_14250 PE=4 SV=1
MISKEDIVIKSKEFGFEDVGFTTAEPFETHRKFLADRQEEYGWAEAVGLDLIKGTDPRAIMADAQTVIVLMEVYFRKAYPRHMEGHFGRCYLDDDRVTKDGLSQRIKAFRSFLRDNGIDSKVPFNLPHRVAAARAGMGTFGKNCLFYSNTVARQGSWVLPIAVVINHTFEPGKPTVEMGCPDWCKNACIAACPTRALKGNGTIDPRKCISYLTYFGQGLTPKELREPMGLYVYGCDRCQNVCPRNAAWLANDLLPNEKVEAKASAFELSALLHMDKPYFESKIWPHMFYMSSDDLWRWRMNVARAMGNTRDSMYTDDLIRAFRENKDDRVRAMSAWALGRIGCKKDKAALEDFLTDSSGQVHGEVQDALEQCN

SEQ ID NO: 76283 - protein, 294 aa, Desulfobacterium sp.
  misc_feature (1)..(294): tr|A0A1W9U7W3|A0A1W9U7W3_9DELT tRNA epoxyqueuosine(34) reductase QueG OS=Desulfobacterium sp. 4572_20 OX=19716 21 GN=B6I32_01220 PE=4 SV=1
MNQVFVHKAKELGFIAVGFSQPTTPPYYDFFCQWLKEFEIGDMHYLKRNMDIRRDPSLLLKGLKSVISLAYPYPASKPSTPDGYTASRYSTPQEADYHLRLKKLGKQLCTFIAEIFPESKSRVCVDSAPILERSFAAMSGVGFIGKNNMLIVPGYGSYSFLVEILTTAQFSFSPYNGIENMCGSCTKCIDMCPTGALKAPFYIDVSKCLSYLTIEAKDAVDKKTAKKMGNTFFGCDVCQEVCPFNKKESGVVALPSTKEILAMTEIDFNKIFGKTAFERAGKEKLSKNLQAILA

SEQ ID NO: 76284 - protein, 133 aa, Desulfobacterium sp.
  misc_feature (1)..(133): tr|A0A1W9U4L3|A0A1W9U4L3_9DELT tRNA epoxyqueuosine(34) reductase QueG (Fragment) OS=Desulfobacterium sp. 4572_ 20 OX=1971621 GN=B6I32_04225 PE=4 SV=1
QTIPESDFCGSCTRCIEACPTGAILDNRTIDSERCISYQTIENKGDISPDIEVRLTGRVFGCDICQDVCPWNRKALNHLEHGFNPDPELMEMSREDWQNLDREKFSLLFNQSPVQRTGYRKLKSNLDSLQKNP

SEQ ID NO: 76285 - protein, 262 aa, Desulfobacterium vacuolatum
  misc_feature (1)..(262): tr|A0A1W2DKP3|A0A1W2DKP3_9DELT Epoxyqueuosine reductase QueG (Queuosine biosynthesis) OS=Desulfobacterium vacu olatum DSM 3385 OX=1121400 GN=SAMN02746065_11863 PE=4 S V=1
MKKEAIHHIEKFVKNHQAKPEITTHWGVPIVGFASADEPLFSQLPSVASPTHAVPRDFLPNAKTVIAYFIPFKKEMTRTNLKKRNSSKEWGLAYIETNEMIRQLSESLKEWFKIQGHEGHTIPATHNWDEKKLISDWSHRHIAYMAGIGNFGLNNMLITEQGCCGRVGSFITSAKIAPDTRYQEETCLYKYDGTCKKCVKECVNEALFVTSFDRFKCYEMLLENVENSRAIGYADVCGKCLVGTPCSHMNPVANKRKTLPRE

SEQ ID NO: 76286 - protein, 321 aa, Desulfobulbaceae bacterium
  misc_feature (1)..(321): tr|A0A1E7JDF2|A0A1E7JDF2_9DELT Uncharacterized protein OS=Desulfobulbaceae bacterium C00003063 OX=1869307 GN=B A873_10935 PE=4 SV=1
MMGPKEELYSEKIRNLAYSTGIDVLGFAEASEFTDYALKHSRRRDPKLTLPEAKTIIVAGIYIGELTLPDWANPWYGRTSRLYLSEFFLDIVKPLEPIVNFLKQKGYQAIVCDSSTEEGSILPLKLAAIRAGLGWQGKHSLLISKKYGTFLALGGVITNADLDYNTKEESNRCHKCDKCQKACPLAALDQPYALNREKCLSNILQVDHLPTEALPVMENRIGDCEICQQACPWNKKHLNNPLLTNKTESFQERIGAWKNFFYLPNLAKLTEKEYRKILGHLNTDIPFKLFHRNVLVGLERAKKMERKSEKNLSAPSGLGSM

SEQ ID NO: 76287 - protein, 321 aa, Desulfobulbaceae bacterium; identical to SEQ ID NO: 76286
  misc_feature (1)..(321): tr|A0A1E7GHD0|A0A1E7GHD0_9DELT Uncharacterized protein OS=Desulfobulbaceae bacterium S5133MH15 OX=1869306 GN=B A866_12960 PE=4 SV=1

SEQ ID NO: 76288 - protein, 349 aa, Desulfococcus oleovorans
  misc_feature (1)..(349): tr|A8ZSS4|A8ZSS4_DESOH 4Fe-4S ferredoxin iron-sulfur bi nding domain protein OS=Desulfococcus oleovorans (strai n DSM 6200 / Hxd3) OX=96561 GN=Dole_0177 PE=4 SV=1
MKFEEPIREFLAERGALRVGFCTRETLAGGPPSADLTYVLPSARSAVTFALPLDRDIMRQCLAKKSQFAFEQHNIDVNLKAGRIAKELALWLEEKGYKSVRIHANNVYRKDEPNWQLAMRPDVSHRYLAVRSGVGSFGWSGNVGIKGYGSAIILGSVVTELALEPTPPLPPEEGFCDRCKLCVASCPSGMFHDSRETSVTLGGQTFSYSERISYLPCQLVCGGFTGLSKNKKWSTWSPGRYVIPDPADENSQMETLVRAVGNYTKWPRRSDGDGGFENNAFGGLNIRLTCGNCQMVCRGDREETKENYRLLTTSGCVIQREDGTIEVLGAEDAAREFERMPPEHTTLYR

SEQ ID NO: 76289 - protein, 375 aa, Desulfococcus oleovorans
  misc_feature (1)..(375): tr|A8ZWL8|A8ZWL8_DESOH PBS lyase HEAT domain protein re peat-containing protein OS=Desulfococcus oleovorans (st rain DSM 6200 / Hxd3) OX=96561 GN=Dole_2545 PE=4 SV=1
MMLQQEEIIKKARELGFADIGFTTADPFEEHRRMLLERQEEYGWAEQVGLDLLKGTDPDAILPGAKSIIVLIENYFSHAYPRSMEGIFGRCYLDDDRVTKDGLVPRIKAFRAFLREDGINTKVPFNLPHRVAAARAGLGDFGRNCLFYAHNAVRGGSWTLPIAVVVDREFTPGTPTLGIGCPDWCKNVCIAACPTGALKGSGRIDPRKCISFLSYFGDGITPLKMREPMGMFVYGCDRCQNVCPRNQPWLAQALPVNERAAAKAENFDLRALLHMDTAYFESSVWPHMFYMSSADIWRWKMNVARAMGNSRDQGFVPDLARAFEENEDPRVKGMAAWALGHIGGDQAKTALEKFSETTLAGPVAEEVRLAMDACA

SEQ ID NO: 76290 - protein, 297 aa, Desulfococcus sp.
  misc_feature (1)..(297): tr|A0A1W9Q6Z8|A0A1W9Q6Z8_9DELT tRNA epoxyqueuosine(34) reductase QueG OS=Desulfococcus sp. 4484_242 OX=1968523 GN=B5M55_02645 PE=4 SV=1
MDLIRKANDLGFIAVGFSRPGRPSFFDHLRVWISEGKHAGMAWIERHLNLRENPAMLLEGCRTVISLAYPYSSCKPYTPEGLCAARYSEPQKQDYHHRLRKRTKILAKALQEHFPGTRSRICVDSAPIMERSLAWQSGIGFIGKNTQLIIPGHGSYVFLAEILTTAVIHFPEPRPMENRCGSCTRCLDACPTGAIEGPFQLNAGKCLSYRTIEQKEAVDRKTGKKMGDCFFGCDVCQEVCPFNQKHETGEIILPSANDILNMDEKSFRETYGKSAFARAGLAKIQSNIQAMDNERQV

SEQ ID NO: 76291 - protein, 249 aa, Desulfofundulus thermosubterraneus
  misc_feature (1)..(249): tr|A0A1M6HWT3|A0A1M6HWT3_9FIRM Epoxyqueuosine reductase QueG (Queuosine biosynthesis) OS=Desulfofundulus therm osubterraneus DSM 16057 OX=1121432 GN=SAMN02745219_0214 0 PE=4 SV=1
MAMERALKHAFTSFEIRKYLLELGATLVGFGDVSEGLAGELRHLPVAISLAIRHPSPGRNLIHTTRGPIYSNRYQQIDLKLEQLQKRLVSLLKSHGFKCLAIPPDSHRHDTRFVARLYPLFPHKTAATCAGLGWIGKNGLLVNETYGPRLSWATVLTNAPLEVSATPYVSGRCGKCRRCVETCPAGAIADREWVRDEGLVPHIDVEACRRQLEQNRQQVGEDICGLCILACPRGQANLQEARDLRWVLR

SEQ ID NO: 76292 - protein, 315 aa, Desulfoluna spongiiphila
  misc_feature (1)..(315): tr|A0A1G5ASB4|A0A1G5ASB4_9DELT Epoxyqueuosine reductase OS=Desulfoluna spongiiphila OX=419481 GN=SAMN05216233_ 101418 PE=4 SV=1
MKTHQFITTRALLHNEKAKVIPVRRLHCLQDEIHRFQDAEDLNDFQQWIVDELYTFDVPDVGFPVESILLIAVPHPFCAHVEFSHRGRTYKSFSFVMPDFKRTEEALRKALSGLNHHLAEAGDIPLKRLAVQSGLAAYGRNNICYIDGMGSNFSLMAYFTDMPCEEDPWTDVTMSSSCTDCNACLNNCPTRAIRKERFLIDNEKCLSFLNESGAPFPEWLPETVHHCVYDCMKCQIVCPMNRKQVDYVTGPVQFTESETDHLLSGTPFEDFPMALQNKATYLGLHQWPEGIPRNLKTLFDISDRKGDPTETPSPR

SEQ ID NO: 76293 - protein, 315 aa, Desulfoluna spongiiphila
  misc_feature (1)..(315): tr|A0A5E7XDX3|A0A5E7XDX3_9DELT 4fe-4s double cluster bi nding domain OS=Desulfoluna spongiiphila OX=419481 PE=4 SV=1
MKTHQFITTRALLHNEKAKVIPVRRLHCLQDEIHRFKDAEDLNDFQQWIVDELYTFDVPDVGFPVESILLIAVPHPFCAHVEFSHRGRTYKSFSFVMPDFKHTEEALRKALSGLNHHLAEAGDIPLKRLAVQSGLAAYGRNNICYIDGMGSNFSLMAYFTDMPCEEDPWTDVTMASSCTDCNACLNNCPTKAIRKERFLIDNEKCLSFLNESGAPFPEWLPETVHHCVYDCMKCQIVCPMNRKQVDYVTGPVQFTESETDHLLSGTPFEDFPMALQNKATYLGLHQWPEGIPRNLKTLFDISDRKGDPTETPSPR

SEQ ID NO: 76294 - protein, 395 aa, Desulfopila aestuarii
  misc_feature (1)..(395): tr|A0A1M7YE19|A0A1M7YE19_9DELT Epoxyqueuosine reductase QueG (Queuosine biosynthesis) OS=Desulfopila aestuarii DSM 18488 OX=1121416 GN=SAMN02745220_03656 PE=4 SV=1
MESAETRLKSLAKSLGADLVGVTTRDLLANGPPSADPRYLLPSANSVISFALSLDRDLVQNFISKKDWRSHCDNRKNIAQTLYAIGDNLAEQLRTEGYEAVNVDLNNNYRPEKAAADVTEMTDFHPDFSHRYAAIAAGVGRLGWSGNLLTKKYGALVELGSVLTSAILTPDSPVPDEENPCDRCKMCSLVCPVEMIHPRESFQVAIAGVTETISRKRPNTCCWIGCTGYEGLAASGTWSNWSPYRLGRKLPEDKKELDALCTSLQKLDPQMQADDNSWSDYRQAVFDPDWFYYTVCGFCRSVCSPCREERLANRKLIVNSGTAVLRLDGSHDVTDEETIEMRTPFGVNVVVPRAELSEKQSKKRKWPGQFPLDREVIEYLRQYVNSADTKGRTTE

SEQ ID NO: 76295 - protein, 362 aa, Desulfosporosinus acididurans
  misc_feature (1)..(362): tr|A0A0J1FUH3|A0A0J1FUH3_9FIRM Epoxyqueuosine reductase OS=Desulfosporosinus acididurans OX=476652 GN=queG PE= 4 SV=1
MSLEEWQDWKKKLRKWALDLGFIAVGFTTAQPIKGLNGLLQDRLEQGVSTPFESQIIQQRVDPKAVWQDCRGVVALGYELPLTVAPEKGEGILARSAIGEDYHRVINQKLKELAEIMAENHWPGAIRWQVDTGPLVERAFAVRAGLGWIGRNQQLIIPGYGSFVGLALLLLNHELPSDEMILDKCGSCRKCIQACPAQILGKEIFAAKRCYSYLTQSKEVLTPGERIGLGNRIFGCDTCQEACPHNQQRLQEETRMVSAAGKKRGVDLVDTLNLTKGEFRERFLHTAAGWRGKGILQRNAFLALRNLQDPRLKSWLVDKERALPPILTPYLEEVMEDDVQRENLRSTNRPIRCNASSSCSRE

SEQ ID NO: 76296 - protein, 350 aa, Desulfosporosinus acidiphilus
  misc_feature (1)..(350): tr|I4D4L9|I4D4L9_DESAJ Uncharacterized Fe-S protein OS= Desulfosporosinus acidiphilus (strain DSM 22704 / JCM 1 6185 / SJ4) OX=646529 GN=Desaci_1755 PE=4 SV=1
MSVNEWQDWKRKLREWAFDLGFAAVGFTTAEPVEGLDSLLEVRLDQGVSTPFESREIRERVDPRVVWPDCQGVVALAYPHPSTAVPNQGEGILARSAIGEDYHRVIQKKLHELSERMTGSHWPGALRWQVDTGPLVERAFAVRAGIGWIGRNQQLIIPGYGSFAGLALLLLDHELPSDELVQNHCGSCRKCIEACPAQILGKDIFAAKNCYSYITQSKEVLTPAERIGLGNRIFGCDTCQEVCPHNQKRVREELRELSIPGKKRGADLLGILNLTKGEFRERFLHTAAGWRGKGVLQRNAFLALRNMQDPRLNSWLAQREKSLPPILTPYLEEAVGEQEHKGSVKGTIIT

SEQ ID NO: 76297 - protein, 335 aa, Desulfosporosinus fructosivorans
  misc_feature (1)..(335): tr|A0A4Z0R6Y9|A0A4Z0R6Y9_9FIRM tRNA epoxyqueuosine(34) reductase QueG OS=Desulfosporosinus fructosivorans OX=2 018669 GN=queG PE=4 SV=1
MNFLDQMQWKTKIKRWGQELGFVSIGFTTAEPINSLVPLLEARIDQGVSTPFESKEIKSRIDPKEGWHCCQTVVALAYPFPYASIPQEGKGVIARSAVGEDYHHFMEQKINHLVEIMANNDWPGTIRLQVDTGPLIERAFALRAGIGWIGRNQNLIIPGYGSFVALALLLLDQAIEPDHPSMLDQCGTCLRCVQACPAQILGKDPFAAKHCVSYLTQSKEVLTPEECERLGLRVFGCDTCQEVCPHNQTRIEEELAFSSDAKLQRGVDLMVTLNLTKGEFQRHFKATAAGWRGKGVLQRNAFLALRNLQDGRSREWLNERENDQTVPPIITPYRR

SEQ ID NO: 76298 - protein, 375 aa, Desulfosporosinus hippei
  misc_feature (1)..(375): tr|A0A1G8LV68|A0A1G8LV68_9FIRM Epoxyqueuosine reductase OS=Desulfosporosinus hippei DSM 8344 OX=1121419 GN=SAM N05443529_1558 PE=4 SV=1
MSLTTQIKEFALDIGYSKVGIIPAESFPEYIADLTNRQEMYSFYIKGAYRPLLGAEPRSLMPKAKSIITTVYDYSQKKFPKELTDKIGRVYQARCYNAPPERINGARPQLMKNFLRQLGCEVGEKISLPERLVAAKAGIVNYGRNNFAYAEGIGSFIYLTSFVVDKELDYDSPSFVVGCPEGCSACMKACPTQAIYEPLKLNPRRCIAFNTFITQDRMVGSYIEPEIRDKMGTKIHGCDICQEVCPRNQARLKEKLLEDEFLVKVAQDFSLAKILNMTDNLYLSRIQPLMYNYIKEKKYFQRNAAIALGNLGDPAFIPDLSVAMHDPEELVRGYVAWALGKIGGQLAKGILMEGNGRETSEFAKREIREALSRIE

SEQ ID NO: 76299 - protein, 347 aa, Desulfosporosinus hippei
  misc_feature (1)..(347): tr|A0A1G8JD27|A0A1G8JD27_9FIRM Epoxyqueuosine reductase OS=Desulfosporosinus hippei DSM 8344 OX=1121419 GN=SAM N05443529_13233 PE=4 SV=1
MDLHEQLHWKKMIVEWARKLGFVSVGFTTAEPIEDLAAILQARVDQDWATPFESKEIQQRVAPKAVWPDCQTVVALAYPLPFTVSPQEGEGVISRSAVGEDYHRVVLRKVQELIDTMVNNNWLGLCRFQVDTGPLVERAFATRAGIGWIGRNQQLIIPGVGSFVTLALLLLDQELRPDDPLVLQLCGNCQKCATSCPAQIIGREPFPANKCVSYLTQSKELLTSEEISSLGLQIFGCDVCQEVCPHNQKWLEEEQTSLTAADSSSAARPALRRGVDLVETLNLTKGEFGQRFKITAAGWRGKGVLQRNAYLALRKVEETSAKQWINVHTIARAIPPRILPYVEREQE

SEQ ID NO: 76300 - protein, 384 aa, Desulfosporosinus lacus
  misc_feature (1)..(384): tr|A0A1M5XLU7|A0A1M5XLU7_9FIRM Epoxyqueuosine reductase OS=Desulfosporosinus lacus DSM 15449 OX=1121420 GN=SAM N02746098_02090 PE=4 SV=1
MSLTTQIKEFALDIGYSKVGIIPAESFPEYIADLTDRHEMYSFYIKGPSRPLVAAEPRSLMPTAKSIITTVYDYAQKSFPKELTDKIGRVYQARCYNAPDERINGARPQLMREFLRKLGCEVGDKINLPERLVAAKAGIVNYGRNNFAYAEGIGSFIYLTSFVVDIELDYDSPTVEVGCPEGCSACMKACPTQAIYEPLKLNPRRCIAFNTFITQDRMVGSHIEPEIREKMGTKVHGCDICQEVCPRNQTRLKEKLLDDEFLVKVAQDFSLSQMLNMTDEFYSTRIQPLMYNYIKERKYFQRNAAIALGNLGDPAFVPNLAVAMNDPEDLVRGYAAWALGKIGSRSAKQILKDNLSKETTESVIEEIRNALFRSEIRGELIDFS

SEQ ID NO: 76301 - protein, 254 aa, Desulfosporosinus lacus
  misc_feature (1)..(254): tr|A0A1M5Z778|A0A1M5Z778_9FIRM Epoxyqueuosine reductase QueG (Queuosine biosynthesis) OS=Desulfosporosinus lac us DSM 15449 OX=1121420 GN=SAMN02746098_03051 PE=4 SV=1
MGVKCLCDQGLEKMKGSDTVTINALMIKRKAIELGADLVGIADLTRVEGLPTVPQGLLETYTHAVVIAVAISPDIFEQIVNEPTPLYLHHYLAANILLDDINLRLQREIIGNGFRALAIPASQVVDKVNWMGHISHKAMAKAAGLGWQGKSLLLVTPGYGPRVRLATLLTDAPFEPDPILTNRCGKCKNCQEACPASAIKGGSWEDHPQTREEALHFSRCVEKVNEDFAKRPEIGKPICGVCIKVCPWGKPKGK

SEQ ID NO: 76302 - protein, 375 aa, Desulfosporosinus meridiei
  misc_feature (1)..(375): tr|J7IQL3|J7IQL3_DESMD Putative Fe-S protein OS=Desulfo sporosinus meridiei (strain ATCC BAA-275 / DSM 13257 / NCIMB 13706 / S10) OX=768704 GN=Desmer_0414 PE=4 SV=1
MSLTTQIKEFALDIGYSKVGIIPAESFPEYIADLTNRQEMYSFYIKGAYRPLLGAEPRSLMPKAKSIITTVYDYSQKNFPKELTEKVGRVYQARCYNAPPERINGARPQLMKNFLRQLGCEVGEKISLPERLVAAKAGIVNYGRNNFAYAEGIGSFIYLTSFVVDKELDYDSPSFVVGCPEGCSACMKACPTQAIYEPLKLNPRRCIAFNTFITQDRMAGSYIEPEIRDKMGTKIHGCDICQEVCPRNQARLKEKLLEDEFLVKVAQDFSLAKILNMTDNLYLSRIQPLMYNYIKEKKYFQRNAAIALGNLGDPAFIPDLSVAMHDPEELVRGYAAWALGKIGGQLAKGILTEGNRRETSEFAKREIRDALLRIE

SEQ ID NO: 76303 - protein, 347 aa, Desulfosporosinus meridiei
  misc_feature (1)..(347): tr|J7J0D2|J7J0D2_DESMD Uncharacterized Fe-S protein OS= Desulfosporosinus meridiei (strain ATCC BAA-275 / DSM 1 3257 / NCIMB 13706 / S10) OX=768704 GN=Desmer_2873 PE=4 SV=1
MDLDEQIHWKKMIGGWARELGFVAVGFTAAEPIEDLATILQARIDQGWATPFESKEIQQRIDPQAVWPDCQTVVALAYPLPFTVSPQEGEGLISRSAVGEDYHRVVLRKVQELIDTMVNNNWLGLCRFQVDTGPLVERAFATRAGIGWIGRNQQLIIPGVGSFVTLALLLLDQELRSDDPFVFQQCGNCQKCVISCPAQIIGREPFPANKCVSYLTQSKELLTSEEISSLGLQIFGCDVCQEVCPHNQKWLEEEQTSLTVADSSSAARPSFRRGVDLVETLNLTKSEFGQRFKITAAGWRGKGVLQRNAYLALSKVKETSAKQWINVQTIANAIPPRILPYVEREQE

SEQ ID NO: 76304 - protein, 346 aa, Desulfosporosinus orientis
  misc_feature (1)..(346): tr|G7WIP1|G7WIP1_DESOD Uncharacterized Fe-S protein OS= Desulfosporosinus orientis (strain ATCC 19365 / DSM 765 / NCIMB 8382 / VKM B-1628) OX=768706 GN=Desor_3637 PE= 4 SV=1
METLEDVMDLHEQIKWKEDIKRWAREGGFAASGFTTADPVESLRSVLKTRIDQGIGTPFESQDIKERIDPRALWQECSTVIALAYPFPLSLPPEKGEGILARSAAGDDYHHVVTRKIRQLMDLMIQHDWPGSLRFQVDTGPLIERAFAVRAGIGWIGRNQHLIIPGYGSFVALALLLLDQEIPGDEPLSPGQCGACQRCIRACPARILGREPFNSKRCVSYLTQSKEVLTLEERQRLGLRIFGCDTCQEVCPHNQQWLQEERKSPLRRGVNLKEILNLSKGEFLKEFKHTAAGWRGKGVLQRNAYIALQNAQDSESVQILFDYQKNKTIPPSILPYVTWQEHDQEL

SEQ ID NO: 76305 - protein, 342 aa, Desulfosporosinus orientis
  misc_feature (1)..(342): tr|G7WAZ8|G7WAZ8_DESOD Putative Fe-S protein OS=Desulfo sporosinus orientis (strain ATCC 19365 / DSM 765 / NCIM B 8382 / VKM B-1628) OX=768706 GN=Desor_1868 PE=4 SV=1
MEGMGIAQVIRDKAYDLGYAGCGIISLERLHGYAEKLEERVRKVPESAGFYATQRRLIDPRKQFPWAKSVVVVAERYGTYKIPRELKGRIGRPYLFDGRVDAHSKEFKAGLQMESLMHSLGLKFASERKFGLVGLRWAALQAGIGRIRRNNFFYTKYGSWVTLYAWLTDQDMECTEAADLPECPTSCDRCIKACPTGSLSAPYTMSPMACVSFLTTFGGRNLPEEPLRSKFGNCIYGCDICQEVCPMNKGKWEESEEFPGLSQLAPFLTPEKIMEMDDEFYKDFVQPKFFYLKPDELWKWKVDTLCFMHNQYQEAYEPYILEACHSPHEKIREMAKSICQER

SEQ ID NO: 76306 - protein, 339 aa, Desulfosporosinus sp.
  misc_feature (1)..(339): tr|A0A356PEL6|A0A356PEL6_9FIRM tRNA epoxyqueuosine(34) reductase QueG OS=Desulfosporosinus sp. OX=157907 GN=qu eG PE=4 SV=1
MDSAEQMWWKTNIKKWCKELRFISIGFTTAQPIECLASQLQARMDQGLATPFESRDVKRRIDPKAGWHGCETVVALAYPLPYSSFPQEGEGVMARSAVGEDYHHFMNLQIDRLVEIMASNDWPGTSRRQVDTGPLVERAFALRAGIGWIGRNQHLIIPGYGSFVALALLLLDRELEPDHPHIPNQCGTCQRCVQACPAQILGKDMFASKHCVSYLTQSKEVLTPEERQRLGLRLFGCDTCQEACPHNEQRLEQEQTNLSPTSLGRGVDLLETLNLTKGEFQRRFKATAAGWRGKGVLQRNAFLALRNLHDERCEIWLAEREKDQSVPPIITPYIENLVR

SEQ ID NO: 76307 - protein, 343 aa, Desulfosporosinus sp.
  misc_feature (1)..(343): tr|A0A4Z0QQ20|A0A4Z0QQ20_9FIRM tRNA epoxyqueuosine(34) reductase QueG OS=Desulfosporosinus sp. Sb-LF OX=256002 7 GN=queG PE=4 SV=1
MKPNEQISWKTNIKRWGSELGFASVGFTTAESIEDLAPLLETRFEKEVATPFEIKEIRQRIDPRVVWEYCKTVVAVAYPLPLTTPPLEGEGIIARSAVGEDYHQVLQNKIKQLINIMVVNGWTGSFHSQVDTGPLIERAFAFRAGIGWIGQNQQLIIPGYGSFVTLALLLLDREIKPDYPMINQCGSCQRCVEACPAQIIGKEPFAAKHCISYLTQSKEVLTQKERRGLGLRVFGCDTCQEVCPHNQKRLAEEQQATSSSAPSSLRRGVDLRETLNLTKGEFHQRFKGTAAGWRGKGILQRNAFLALRNGLDRGDKVWLAEHEKNKIVPPIIALYLEGLENSK

SEQ ID NO: 76308 - protein, 376 aa, Desulfosporosinus youngiae
  misc_feature (1)..(376): tr|H5XVX3|H5XVX3_9FIRM Uncharacterized Fe-S protein OS= Desulfosporosinus youngiae DSM 17734 OX=768710 GN=Desyo DRAFT_3403 PE=4 SV=1
MLYYLGKNQTSVERRFSKSGNLKMDIVEQTQWKMNIKRWARELGFVSVGFTAAEPIDSLASLLQTRIDQGLMTPFESKVIEQRIDPQAVWQDCRTVAALAFPLPLTVPPQEGEGVMARSAVGEDYHRVIVRKINQLIDRMVNHGWPGFPRFQVDTGPLVERAFALRAGIGWIGRNQHLIIPGYGSFAALALLLLDQEIRQDDPLIPGQCGTCQKCVQACPARIIGQEPFAAKKCVSYLTQSKEVLTSEERHRLGLRIFGCDTCQEVCPHNQKRLEEEALAEDPGLCPPAASTAPAPFCRGVNLYEILNLSKGEFIKRYKATAAGWRGKGVLQRNAFLALRNAQDARSEQWLAEREKDKSVPPVILPYIQDGSGRCE

SEQ ID NO: 76309 - protein, 374 aa, Desulfotignum phosphitoxidans
  misc_feature (1)..(374): tr|S0G866|S0G866_9DELT 4Fe-4S ferredoxin, iron-sulpur b inding domain-containing, electron transport protein OS =Desulfotignum phosphitoxidans DSM 13687 OX=1286635 GN= Dpo_1c06570 PE=4 SV=1
MTGLTKEDIIAKACELGFEDVGFTTADPFDTHLDFLKDRQDEYGWAEATGLKLMEGTDPKTVMARAQTIIVLMEVYFKKRFPRQMEGHFGRCYLDDDRVTKDGLSRRIKAFRSFLLDSGIDSKVPYHLPHRVAAARAGMGTFGKNCLFYSNKVARQGSWVLPIAVVVDRAFDPDMPSVEMGCPDWCRNACITACPTQALKGNGTIDPRKCISFLTYFGQGLTPRELREPMGIYVYGCDRCQNVCPRNAPWLAADLPVNERVAAREKDFRLSSLLNMDESCFTSRIWPHMFYMGPDRLWLWQMNVARAMGNTRDTGYTKDLIRCFKENRDDRVRAMCAWALGRIGGQPSRAALEGFLPGGTAILEEEIRYALGLV

SEQ ID NO: 76310 - protein, 226 aa, [Desulfotomaculum] guttoideum
  misc_feature (1)..(226): tr|A0A1I0J667|A0A1I0J667_9FIRM Epoxyqueuosine reductase QueG (Queuosine biosynthesis) OS=[Desulfotomaculum] gu ttoideum OX=58134 GN=SAMN05443270_2765 PE=4 SV=1
MKTEINSSIVKKYGMDAGANVVGIAASKDFGLAPNGFKPTDVLTECLSVIVLGTTFSPEVLNDIAEYTTSRNAMLTAMTNMAKEVAKRIKADGGKTKVISAAGGKWVEGDGRKEQFGYISLKHAAEIAGLGVIGKNYLLTNPQYGNLLWLSAVLTDAEIMPDEKAQSTMCDNCNKCVEACPAGALDDLASFGKKGCSKFFTIEDRKFKVKCFLCRTICPYRFGNSE

SEQ ID NO: 76311 - protein, 372 aa, Desulfotomaculum sp.
  misc_feature (1)..(372): tr|A0A358QXB0|A0A358QXB0_9FIRM Epoxyqueuosine reductase OS=Desulfotomaculum sp. OX=41211 GN=DEF36_13105 PE=4 S V=1
MLSKSEIIARARDLGFEDVGFTGPEPFDSQREILLSRSEEYAWAHEKGLDLIGGTDPKNIYPSCQSIIVLVEAYFRQAFPPSMEGKFGRCYLDDDRVTRDGLSRRIKDFRTFLKEDGIDSKAPFNLPHRLAAARAGLGTFGRNCLIYSSRAARRSSFILPVAVLVSRSFEPDQPTMAGGCPAWCKNTCLVACPTGALKGSRKIDPRRCISYLTYYGEGITPLEMREPMGMWIYGCDRCQNVCPRNAAWMAQDLPVNPRAAVKSADFDLKRLLHMDKEYFEKKIWPHMFYMSSSDIWRWKMNVSRVMGNSLDPAYIPDLIKAFNESTDDRVRGMAAWALGRIGGEDAKKALADFLTISQGQVREEVREALRQI

SEQ ID NO: 76312 - protein, 269 aa, Desulfotomaculum sp.
  misc_feature (1)..(269): tr|A0A373D4K3|A0A373D4K3_9FIRM Epoxyqueuosine reductase OS=Desulfotomaculum sp. OF05-3 OX=2305243 GN=DXA87_128 35 PE=4 SV=1
MKGRVAKYYLTDGRRHTDSEGYKTSVAFEKYLADCGLQVATDRDFGITALRWAGMKAGIGIIRKNNFFYTEKGSYQYLEAFLIDEPLQYIVENQIRPCAEKCNLCMRSCPTESLEAPYMMCRNTCVSCLTTWDGWDLRTEPLQNKFEKWIYGCDACQDAWPHNRKAWKDTEEFPELEAWSSHFTDTEIVLAEYSWLRSVVQPKLWYIPQGKEWRYKTNALNAMLNNYDPKYLPVIKKVCQDEYCEVRDMAEWVLEEIERKDIGESENGQ

SEQ ID NO: 76313 - protein, 378 aa, Desulfovibrio carbinoliphilus
  misc_feature (1)..(378): tr|G7QCM5|G7QCM5_9DELT PBS lyase HEAT domain protein re peat-containing protein OS=Desulfovibrio carbinoliphilu s subsp. oakridgensis OX=694327 GN=DFW101_0164 PE=4 SV= 1
MSLTENIKEYALDIGYAAVGFTAADAFADYRAELSARNDQYDFLMKRPAGPFAGAEPRTLMPGARSIVVVAYDFGCTAFPESLVGVIGRIYQARCYTPPPNRLHGARRELLASFLRQNGCAVGQGFMVPLRPAATRAGVATVGRNTFAYAARAGSFICLEAFVVDAELACDAPTERVNCPPNCRACIDACPTGALYEPLHMNPRRCITFNTCFARDGLGPGVSDSIPHDIREAMSTRVHGCDACQEACPRNRARLEAKLPEDPFLERHAREFSLNRMVNMDEAYFETTAQLLLYNYIREKKYHQRNAAIALGNLGDRAAVPDLRQALGDPEAVVREHAAWALGKIGGTEAKRALEGARGTEPVALVAAAIEEALARSA

SEQ ID NO: 76314 - protein, 378 aa, Desulfovibrio sp.
  misc_feature (1)..(378): tr|A0A1Q8QAV1|A0A1Q8QAV1_9DELT Epoxyqueuosine (OQ) redu ctase QueG OS=Desulfovibrio sp. DV OX=1844708 GN=DVDV_4 210 PE=4 SV=1
MPLTDDIKNYALDIGYTAVGITTADPFDAYAADLTARGEAYAFYRNSPRRPLDGAAPRSLMPTARSILILAYDYARLAFPAALCGVIGRIYQARAYSPPPQRIHGARRQLLEAYLIERGLTIGQNITVPFRMAAARAGITTYGNNTFAYARGGSSFLSLDAMVVDAELAPDAPSLAVRCRKGCTACQDACPTGAILGPLRLDPRRCITFQNCFARDGFAPGVTGTIPLEFRQAMGQRVHGCDACQEACPRNRPRLTAALPSDPFLERFAAGFRLTDLLAMDEAYFATTAQQLMYNYIRERKYFQRNAAIALGNRGDDAAIPALGTALGDPEGLVRGHAAWALGRLGGGAARRALEAARTGEADPMVRTEIDRALAGAA

SEQ ID NO: 76315 - protein, 378 aa, Desulfovibrio sp.
  misc_feature (1)..(378): tr|I2Q2X7|I2Q2X7_9DELT Putative Fe-S protein OS=Desulfo vibrio sp. U5L OX=596152 GN=DesU5LDRAFT_2477 PE=4 SV=1
MSLTENIKEYALDIGYAAVGITSADAFAGYRAELSARSDQYDFLKKRPAGPFAGAEPRTLMPGARSVVVLAYDYGRTAFPESLVGVIGRIYQARCYTPPPNRLHGARRELLASFLRQNGCAVGQGFMVPLRPAATRAGVATVGRNTFAYAARAGSFICLEAFVVDAELACDAPTERVKCPPNCRACIDACPTGALYEPLHMNPRRCITFNTCFAKDGFGPGVSDSIPKDIREVMGTRVHGCDACQEACPRNKARLAGKLPEDPFLERHAREFSLKRMVTMDEEYFETTAQLLMFNYIREKKYHQRNAAVALGNLGDRAAVPDLRQALGDPEAVVREHAAWALGKIGGREARRALEGARGTEPVALVSAAIEEALARSA

SEQ ID NO: 76316 - protein, 405 aa, Desulfuribacillus alkaliarsenatis
  misc_feature (1)..(405): tr|A0A1E5G4I6|A0A1E5G4I6_9BACL Reductive dehalogenase O S=Desulfuribacillus alkaliarsenatis OX=766136 GN=BHF68_ 13140 PE=4 SV=1
MNNNQNTAAKIHEVGEEYQRFNQKNHVIMQTLWNEELKDIDAERNKILKEHVQSGKQGYNRFDYAFHHGAMNFIDKIGFGINVPDQSANSWDNFVCSIPYEGAFEDPVETTKVVKKAAMMYGADAVGITKLDRRWVYSEWYDPEKKESFPIRFSDENSAYHQITKPVLMADGTRVLPKAMDTVIVLMFEMNYDRLRYAPTLLAYGETSKVYTDMCKVSMNVAGFINALGFNALPSINCTALNVPLAIDAGLGQIGRHGKVISPTLGSRTRVAKIITDMPLLPDEPIDFGVTEFCDTCKKCARECPSNAISNGKRAKEAVDETGNSHYLRWIIDHKRCYKYWAECGTNCNICLYVCPYNRGYRWTRNVLDLTDDRNTNSNNMIDSLEDIYSLDGLSARSHKYWKKE

SEQ ID NO: 76317 - protein, 345 aa, Desulfuribacillus alkaliarsenatis
  misc_feature (1)..(345): tr|A0A1E5G0M6|A0A1E5G0M6_9BACL tRNA epoxyqueuosine(34) reductase QueG OS=Desulfuribacillus alkaliarsenatis OX= 766136 GN=BHF68_07345 PE=4 SV=1
MKTNERITEFSREIGIDAIGFTKAERQSDLLNTLVEHSSQGFQSGWEETDIEKRVNPKLSLKDAKTIIVIALNYHNIESKMYETKRSDNRGRISKAAWGIDYHQVLNKKLEQLSQYIIKNIDADAKSLAFVDTGPMVDRELAVRAGIGFYGMNCNIIHPELGSFIFIGSLLTTVDIEPSNPTDTKCFACNKCIEHCPTGAIIKPYKINSKKCLAYLTLTKGEHGHGYQTALNDHIYGCDICQDVCPHNKDIPLTKHQEFVEQDEVKYPNLIELLTISNKDFKAKYGHSSGAWRGKKPWQRNAMLLIGKRKLHEAIPALKHVITRDPREDMRLLAEDTLKNIKNIK

SEQ ID NO: 76318 - protein, 350 aa, Desulfuribacillus stibiiarsenatis
  misc_feature (1)..(350): tr|A0A1E5L9E7|A0A1E5L9E7_9BACL tRNA epoxyqueuosine(34) reductase QueG OS=Desulfuribacillus stibiiarsenatis OX= 1390249 GN=BHU72_10205 PE=4 SV=1
MGSDSRRKIVDFSREIEIDAIGFASVAEFAHIRDYLAEHRSLNHHTGWEEADIEKRIHPSTHLPHAKTIIVIAISYHAPETNEQWTNQEKLTRGRLAKIAWGQDYHKVVLNKLHQLESFIHSSIDGTASNLAFVDTGPLVDREVAIRAGIGFYGYNCNIIHPHLGSYIVIGSLLTTLQLPTDTQLQAECMTCNKCVNACPTGALYEPYRLNSQRCLAYLTLTKGEMGDDYQENLDNHIYGCDICQSVCPHNKRAPHHNHQEFNELDEIKYPDLIELLHISNQTFRHKYGHSSGAWRGKKPWQRNALLLIGKRKITAAIPALQEMIEKDPRTDMRELARNILNQFSMKSVD

SEQ ID NO: 76319 - protein, 383 aa, Desulfuromonas sp.
  misc_feature (1)..(383): tr|A0A2N6F3I5|A0A2N6F3I5_9DELT 4Fe-4S ferredoxin-type d omain-containing protein OS=Desulfuromonas sp. OX=892 G N=C0622_12300 PE=4 SV=1
MSVCGASSFKKGERIKGKGARLKTQRCYFYLYPLAFFLLPFMVMNPDNFSGWLAETAKHIGAHSAACLRLDNPLMRDQCAEQQQRTSAWLDAGLHGAMDYLARLQPDRYSPWTRFSFARSVIILTFANRWSDPAATHPFPAPPADALLGYVSSYVRTADYHTTGRGMLDELARRLGHDIHCAATVDTGPVDERLLAIAGGLGIQGGNNLLRLPDLGTRVFIGCLFVELELPEVIAETQFPFACDDCRACARNCPTGALTYGEQFDARQCISYLTIEKPGLLTHAEGESIGAWLFGCDNCTAVCPPAVADLRIPVDLEWLLTASSGDIARIIKGTAMAYAGVTRLRRNAVAILKNQNSPRALALLDRVARTTGSELIREQIAAW

SEQ ID NO: 76320 - protein, 329 aa, Desulfuromonas sp.
  misc_feature (1)..(329): tr|A0A0Q1AGZ2|A0A0Q1AGZ2_9DELT 4Fe-4S ferredoxin-type d omain-containing protein OS=Desulfuromonas sp. SDB OX=1 735325 GN=APR63_13080 PE=4 SV=1
MNSSESLLIQLARRFHLDKIGFTSDLIIDKPIPPDDDQNFSWVVDRRFHNPRLSVPWAKSMVVGIISYYQDIKNTYNPLHGNVAMYTRGDYYHLLRKKLTYIAREFKKSTGCRISKTYVNGPFNEKEYARRAGLGYIASNSLLISDQLGSFTVIGLFLTDARLENSEIIDKSCRLCGQCELHCPTGALNSGVIDRNKCIQELSQRDLIIPDEIKLHWGNRFYGCDQCQLCCPLNQNLTPQNHKPLRGVVGEKVDVYELIKLDPLQIKQKFKGNQMGAGWVSPFALIRNAVLVLSHQKVKLTGSDLDKLKGYFNPGINDALTWNQLETSG

SEQ ID NO: 76321 - protein, 342 aa, Desulfuromusa kysingii
  misc_feature (1)..(342): tr|A0A1H4C497|A0A1H4C497_9DELT Epoxyqueuosine reductase OS=Desulfuromusa kysingii OX=37625 GN=SAMN05660420_024 21 PE=4 SV=1
MNPNNFREWLTQAGREIGAHSVACLRMDNPRLRRTIADNNIQVSAWLQNEMHGEMEYLERMFPEKSNPWNTYPFAKSVIVLSFNNLWGDPAAKHPFPEPAKDALLGYISAYAREDDYHFIGQAMLSKLTSMLGENIRAAATVDTAAVYERLFATVAGLGVVGGNSLLRVSGSGNTRVFIGCLFVDIELPEVIHEAQMPFACATCHACVKNCPTGAIQVDQPIDARKCISYLTIEKRGPLSQAEGRSIGRWLFGCDGCTLACPPRPKTDMRIPIDLEWLLQSSAAEIRRTIKGNATAYAGVTQLRRNAVVILKNMETRRAQEVLRWTRENSGSELIRQQIDLW

SEQ ID NO: 76322 - protein, 187 aa, Dethiobacter alkaliphilus
  misc_feature (1)..(187): tr|C0GIB4|C0GIB4_9FIRM 4Fe-4S ferredoxin iron-sulfur bi nding domain protein OS=Dethiobacter alkaliphilus AHT 1 OX=555088 GN=DealDRAFT_2223 PE=4 SV=1
MQLQLAHYIRQTALRKGAVLVGFTKIRKVEPVILLAFPFSDTWFLRQPAKITKQLASTLKVSRHVQGVIAGILRSQGYLAQHKSILSLYGDFRPLAVAAGLGEWGRNGIITNRKHGSALLFAATFTNAPLPSAKSPAMASRHCSHCGECIRACPADAFTPFGFSATRCLAYSLKGCAQCLLVCSGKM

SEQ ID NO: 76323 - protein, 290 aa, Dethiosulfatibacter aminovorans
  misc_feature (1)..(290): tr|A0A1M6ELB7|A0A1M6ELB7_9FIRM Epoxyqueuosine reductase QueG (Queuosine biosynthesis) OS=Dethiosulfatibacter a minovorans DSM 17477 OX=1121476 GN=SAMN02745751_01235 P E=4 SV=1
MTIKDIENIFEKTSPYMYRILRTADILKWQEENSENEHIGVLDFSELEGFEGVLIAALEYNPQEPELPEGCMSISPYYYFSNRYYMKLSNDLRPAEDRGEIRILRNSPLKVLANISGLGYYGKNSIIHNGEFGSSMFLYGVGINVEENESIEWNGINNVFSDCGSCRRCIEACPTGALDESGLLNRGKCIRNYMLEGTQVPEEIGKKMGKRLLGCDVCRNVCPKNNRLSARERMPDYDREIFLIRNYLDNREKGLKRFINPLSEWIGRNYARTKRVLYQCEIIDGNDKDV

SEQ ID NO: 76324 - protein, 354 aa, Dethiosulfatibacter aminovorans
  misc_feature (1)..(354): tr|A0A1M6FBX4|A0A1M6FBX4_9FIRM Epoxyqueuosine reductase QueG (Queuosine biosynthesis) OS=Dethiosulfatibacter a minovorans DSM 17477 OX=1121476 GN=SAMN02745751_01428 P E=4 SV=1
MGRIDERDIMFARMNYEQGTAHYENYYTRNEDKKETDDDLRDKIVKNSKKTAYYNEIYSPLVDSNFRFLSDMRHLAEGPVSENRIELDRGSFSTTLKELALEFGASSCGIVRMKDYHFYTNRGRHAENYGEEIDVEKHKYGIVFTIEMDKDNVNRAPKIPSAVESTLGYAKGAMIGMMLSYYIRELGYFARNHMDGNYLVVAPAVAEDAVLGEVGRIGLLITRELGPRVRLGVVTTDLELVEDEKVDYGIRQFCRICGKCAVTCPGKAIPKDDWKPYHGIDMWKSNQESCFGIWTSLGTDCGVCMSTCPLSQDMDMEDRIKIGATHESRVEVLKKYNEKYGIRYFIKENPKWIK

SEQ ID NO: 76325 - protein, 377 aa, Devosia chinhatensis
  misc_feature (1)..(377): tr|A0A0F5FIC1|A0A0F5FIC1_9RHIZ Epoxyqueuosine reductase OS=Devosia chinhatensis OX=429727 GN=queG PE=3 SV=1
MSVPLLDPQKLIAELRSRAQALGFDAFGIARADARPDLPDKLAHALAEGWHADMDWMAETETRRADPRRLWDEARSVILLGVNYGPDTDPMTLLSQPDIGIISAYARNRDYHDIIKGRLKEVAGLLAQRAGADVKVFVDTAPLMEKPLAEAAGLGWQGKHSVLVSRDFGSWLFLGAILTSLDLPADKPGTQSCGSCTRCLDICPTNAFPAPFRLDARKCLAYYSVEHKGAIPRQFRRPMGNRVYGCDDCLAVCPWNKFASISREAKLRSRPEFERPALAELVQLDDAGFRALFSGSPVKRIGQARFLRNVLICIGNSGDAGHVPAVLDRLDDASPLVRGAAIWALRRLDPERADGLRQAHLAREGDETVRAEWDGTV

SEQ ID NO: 76326 - protein, 377 aa, Devosia elaeis
  misc_feature (1)..(377): tr|A0A178I2F1|A0A178I2F1_9RHIZ Epoxyqueuosine reductase OS=Devosia elaeis OX=1770058 GN=queG PE=3 SV=1
MENAAPDRTALLAELKARASALGFDAFGVARADSRPDLPEKLAHALAAGWHADMDWMAETEERRGDPRRLWAEARSVILLGINYGPETDPMALLAERDAGIISAYARNRDYHDIIKGRLKELAGLLARRAGAEVKVFVDTAPLMEKPLAEAAGLGWQGKHTVLVSRDFGSWLFLGAILTSADLPPDRPHAESCGTCTRCLDICPTKAFPAPFQLDARKCLAYYSVEHKGQIPQEFRVPMGNRIYGCDDCLAVCPWNKFASASREARLRSRPELERPALADLVQLDDAAFRSLFAGSPVKRIGHARFIRNVLIGIGNSANPDYIPLVRRRLGDPSPLVRGAAIWALRRLDPEGADALRQESLARENEAAVRAEWDGRV

SEQ ID NO: 76327 - protein, 379 aa, Devosia enhydra
  misc_feature (1)..(379): tr|A0A1K2I2U5|A0A1K2I2U5_9RHIZ Epoxyqueuosine reductase OS=Devosia enhydra OX=665118 GN=queG PE=3 SV=1
MQTSISEVPAKGLVSELRARALALGFEAFGIAAADARPDLPEKLAQALAAGWHGGMDWMEETAERRGSPRALWGEARSIIMLGLNYGPDSDPMALLAHKERGVISAYARNRDYHDIIKGRLKEIAGLLARRSGANVKVFVDTAPLMEKPLAEAAGLGWQGKHTVLVSRQFGSWLFLGAILTDAELPADAPHAESCGSCQRCLDICPTKAFPAPFQLDARRCLAYLNIEHKGPIPREFRAPMGNRVYGCDDCLAVCPWNKFARATAEAGLAAREALEAPSLADLLELDDAGFRALFAGSPIKRIGHARFLRNVLIAAGNSGEMGLVDAVAARLTDAAPLIRGAAIWALGRLDPLRLRAAAGLSDDPDAQVRDEWHEEMAA

SEQ ID NO: 76328 - protein, 380 aa, Devosia epidermidihirudinis
  misc_feature (1)..(380): tr|A0A0F5QAA1|A0A0F5QAA1_9RHIZ Epoxyqueuosine reductase OS=Devosia epidermidihirudinis OX=1293439 GN=queG PE=3 SV=1
MTMAAATPSPDKLVAELRARALALGFGSFGITPADARPDLPEKLATAIDAGWHGDMDWMAETAERRGSPNALWPQARSIILLGYNYGPTSDPLAILGEKSLGSISVYARNRDYHEIIKGKLKELAGLLARRSGAEVKVFVDTAPLMEKPLAEAAGLGWQGKHTVLVSREFGSWLFLGAIMTSAELPEDKPHAESCGKCTRCLDICPTKAFPAPFQLDARRCLAYLSVEHKGQIPLEFRTPMGNRIYGCDDCLAVCPWNKFASVSREAKLRAREDLERPTLADLARLDDDGFRTLFAGSPVKRIGHARFLRNVLIGIGNSGDDSLKPLVEAQLEAQDPLVRGVAIWALRRLDPARADSLALAYSARESDSSVKSEWTVDIS

SEQ ID NO: 76329 - protein, 378 aa, Devosia geojensis
  misc_feature (1)..(378): tr|A0A0F5FDR0|A0A0F5FDR0_9RHIZ Epoxyqueuosine reductase OS=Devosia geojensis OX=443610 GN=queG PE=3 SV=1
MSQSLLAELEARARALGFDAFGVARADARPDLPGKLAAALAAGWHGDMEWMEETAERRASPEGLWREARSVILLGLNYGPKDDPLALLEEKSLGTISVYARNRDYHDVIKGKLKDLAGLLARRSGEEVKVFVDTAPLMEKPLAEAAGLGWQGKHTVLVSRQFGSWLFLGAILTSAELPVSEPHEESCGSCRRCLDICPTDAFPAPFQLDARRCLAYLNIEHKGPIPLEFRAPMGNRIYGCDDCLAICPWNKFASVTREAKLAAREDLERPALADLVRLDDAGFRALFSGSPIKRIGHARFLRNVLIAIGNSGDLDLSPLAEERLADPDPLVRGAAVWAVRRLAPERSRELALAYLPEEGDTSVRQEWTQDLHIVSGFG

SEQ ID NO: 76330 - protein, 383 aa, Devosia insulae
  misc_feature (1)..(383): tr|A0A1E5XVK5|A0A1E5XVK5_9RHIZ Epoxyqueuosine reductase OS=Devosia insulae DS-56 OX=1116389 GN=queG PE=3 SV=1
MKAARDQIALLAELRHRAKALGFEAFGVARADARPDLPEKLDTALARDWHGEMAWMAETAERRGAPEALWPEVRSVIVVGMNYGPDSDPMADLEHRSLGNISVYARNRDYHDIIKGKLKELAGLLNRRTGAEVKVFVDTAPVMEKPLGEAAGIGWQGKHTVLVSREFGSWLFLGAIFTSAELPADEPHAESCGNCRRCLDVCPTNAFPAPFQLDARRCLSYLNIEHPGPIPLEFRVPMGNRIYGCDDCLAVCPWNKFASETHEMKLRARDELKSPALSDLVQLDDAGFRSLFAGSPIKRIGHARFLRNVLIAVGNSGDETLIPLAEARLADPEPLIRGAAVWAVRRLVAKARADALALAFLPDEGDISVQAEWSAAVQPARAN

SEQ ID NO: 76331 - protein, 387 aa, Devosia limi
  misc_feature (1)..(387): tr|A0A0F5L449|A0A0F5L449_9RHIZ Epoxyqueuosine reductase OS=Devosia limi DSM 17137 OX=1121477 GN=queG PE=3 SV=1
MDFRLRGNDPVKTVTPSADKLVAELRTRARALGFDSFGIAPASARPDLPAKLQAALDAGWHGDMEWMAETAERRASPTALWDEVRSIILLGYNYGPETDPLAILGERDLGSISVYARNRDYHEIIKGKLKELAGLLSRRSGEGVKVFVDTAPVMEKPLAEAAGLGWQGKHTILVSREFGSWLFLGAIFTSAELPPDQPHAESCGSCTRCLDICPTQAFPAPFQLDSRRCLAYLSVEHKGPIPLEFRVPMGNRIYGCDDCLAVCPWNKFAKVSREAKLRARADLERPTLAQLARLDDEGFRTLFAGSPVKRIGHGRFLRNVLIAIGNSGNVELAGLAEDRLDADDPLVRGAAIWALRRLTPERAQRLSLAYLAKEGDSSVRSEWTADL

SEQ ID NO: 76332 - protein, 375 aa, Devosia lucknowensis
  misc_feature (1)..(375): tr|A0A1Y6GAM8|A0A1Y6GAM8_9RHIZ Epoxyqueuosine reductase OS=Devosia lucknowensis OX=1096929 GN=queG PE=3 SV=1
MAQTQADPIVSELKARALALGFDAFGITRADARPDLPEKLATALAEGWHADMDWMAETEERRGDPLKLWGEARTAILLGVNYGPADNPMTLLDEPRVGIISAYARNRDYHDIIKGRLKELAGLLARRAGADVKVFVDTAPLMEKPLAEAAGLGWQGKHSVLVSRDFGSWLFLGAILTSADLPVDIPHQESCGSCTRCLDICPTNAFPAPFQLDARKCLAYYSVEHKGQIPRQFRRPMANRIYGCDDCLAVCPWNKFASVSREAKLRSRPELERPSLSDLVRLDDAGFRALFSGSPVKRIGHARFIRNVLIGIGNSGDLTLVPAVLDRLDSADPLIRGSAVWALRRLDPDRAEAMRLDRQARESDRTVQDEWMGEV

SEQ ID NO: 76333 - protein, 401 aa, Devosia psychrophila
  misc_feature (1)..(401): tr|A0A1I1NZ09|A0A1I1NZ09_9RHIZ Epoxyqueuosine reductase OS=Devosia psychrophila OX=728005 GN=queG PE=3 SV=1
MRISIFEDVLQLPHILICRVEVPVASSGIANTDKLVAELRTRATALGFDSFGIAPADARPDLPEKLNAALAAGWHGDMAWMEETAERRGSPNGMWPEARSVILLGINYGPESDPLAILGERSLGTISVYARNRDYHEIIKGKLKDMASLLARRSGAEVKVFVDTAPLMEKPLAEAAGLGWQGKHSVLVSREFGSWLFLGAILTSAELPADSPHQESCGTCTRCLDICPTNAFPAPFRLDARRCLAYLTVEHKGPIPLEFRAPMGNRIYGCDDCLAVCPWNKFASISREAKLRARPEFERPQLADLVQLDDDAFRSLFAGSPIKRIGQARFLRNVLIAIGNSRDDTLIPLVEARLGSEDALVRGAAVWALRKLAPERAEHLRLAYAAKESDSSVLLEWTGDI

SEQ ID NO: 76334 - protein, 375 aa, Devosia sp.
  misc_feature (1)..(375): tr|A0A087LJG5|A0A087LJG5_9RHIZ Epoxyqueuosine reductase OS=Devosia sp. 17-2-E-8 OX=1535287 GN=queG PE=3 SV=1
MADLVTEIRERALALGFDAFGIAPAEARPDLGDKLAAALAAGWHGDMDWMAETAERRASPKALWPEARSIIMLGINYGPDSDPMAMLARKSTGNISVYARNRDYHDIIKGRLKEVAGLLSRRTGAEVKVFVDTAPVMEKPLAQEAGLGWQGKHTVLVSRQFGSWLFLGAIFTSAELPVSEPMAESCGSCRRCLDICPTNAFPAPFQLDARRCLAYLNIEHKGPIPAEFRKAMGNRIYGCDDCLAVCPWNKFASETREAKLFAREDLREPPLSELLALDDAGFRALFAGSPIKRIGHGRFLRNVLIAAGNSGDAALLPAVEARLGDGDPLVRGAAVWALAQLADGERMRRGAEAHAGGERDTDVKAEWAAVLPEVV

SEQ ID NO: 76335 - protein, 374 aa, Devosia sp.
  misc_feature (1)..(374): tr|A0A1H8ZCH2|A0A1H8ZCH2_9RHIZ Epoxyqueuosine reductase OS=Devosia sp. YR412 OX=1881030 GN=queG PE=3 SV=1
MTLSPDKLVAELKARSTALGFDSFGIAPADARPDLPDKLNAALAAGWHGDMDWMAETAERRGSPQGMWPEAKSVILLGINYGPESDPLAILGERSLGSISVYARNRDYHEIIKGKLKELAGLLARRSGEAVKVFVDTAPLMEKPLAEAAGLGWQGKHSVLVSRDFGSWLFLGAILTSAELPGDSPHEESCGSCTRCLDVCPTNAFPAPFRLDARRCLAYLTVEHKGPIPLEFRVPMGNRIYGCDDCLAVCPWNKFASISREAKLRARPEFERPQLADLVQLDDEAFRTLFAGSPIKRIGQGRFLRNVLIAIGNSGNSDFIPLVEARLDAEDALVRGAAIWALRKLDPERATQLSLAYLPRESDSSVMLEWTGDI

SEQ ID NO: 76336 - protein, 296 aa, Dialister invisus
  misc_feature (1)..(296): tr|R5SJ65|R5SJ65_9FIRM Iron-sulfur cluster-binding prot ein OS=Dialister invisus CAG:218 OX=1263072 GN=BN540_01 413 PE=4 SV=1
MNSSAKNLLLEKARSLLLDAVGCMSCPIAPQLSEKLEKAGPVPFAPAEIEKRLAPEEILADTKSIAVILFPYRYPEEKNANIALYARAKDYHHVVRAYLAKIIGYMEEQYPDEKFHAITDTSPMADRWLAYQAGLGFFGRNHCLIHPKYGSYFTIGAILTTLALPPDTPLAMNCGSCTRCFAACPGKALSHERFNPWRCKSYLTQKKEVLNEEEKNILRKTPLIFGCDECQKCCPFNENAACSPLPETGADRIPRLERETLEQISNRRFTKEYGEYAFSWRGRPVLLRNMDIIEKK

SEQ ID NO: 76337 - protein, 296 aa, Dialister invisus
  misc_feature (1)..(296): tr|C9LMW6|C9LMW6_9FIRM Putative iron-sulfur cluster-bin ding protein OS=Dialister invisus DSM 15470 OX=592028 G N=GCWU000321_00878 PE=4 SV=1
MNSSAKNLLLEKARSLLLDAVGCMSCPIAPQLSEKLEKAGPVPFAPAEIEKRLAPEEILADTKSIAVILFPYRYPEEKNANIALYARAKDYHHVVRAYLAKIIGYMEEQYPNEKFHAITDTSPMADRWLAYQAGLGFFGRNHCLIHPKYGSYFTIGAILTTLALPPDTPLAMNCGSCTRCFAACPGKALSHERFNPWRCKSYLTQKKEVLNEEEKNILRKTPLIFGCDECQKCCPFNENAAYSPLPETGADRIPRLERETLEQISNRRFTKEYGEYAFSWRGRPVLLRNMDIIDKK

SEQ ID NO: 76338 - protein, 303 aa, Dialister sp.
  misc_feature (1)..(303): tr|A0A3B9DVD5|A0A3B9DVD5_9FIRM Epoxyqueuosine reductase OS=Dialister sp. OX=1955814 GN=DCG08_04255 PE=4 SV=1
MTPKSHLSQIAASLHLDACGACSASLDSTLKEQLQNAGPIPFAPSSLAERLDPSALLRDARSFFVILFPYRPAREEEGNIALYARPMDYHKVIHRYLQKIIETARPSYPGEQFLPLVDTSPMVDRWLAYAAGLGFFGRNHCLIHPAYGSFVTIGSILTTLSLTPDEPLTLHCGSCRECLIRCPGRAIGEKRLDPFRCKSYLTQKKEELSPAEMQILQRTPYIFGCDECQRFCPFNQKALPSPLPEIHEHRISALTQEEMDSYSNRAFDKAFRSYAFAWRGKKVLLRNWNIVNEKGKEDINSSR

SEQ ID NO: 76339 - protein, 297 aa, Dialister sp.
  misc_feature (1)..(297): tr|R7CSC1|R7CSC1_9FIRM Putative iron-sulfur cluster-bin ding protein OS=Dialister sp. CAG:357 OX=1262869 GN=BN6 25_00285 PE=4 SV=1
MNAKELLVKTAASLQLDACGAASVNFSEKLSERLTEAGTIPFAPADIKERIDTEALLPGSRSFFVILFPYRPSHKEEGNIALYARGLDYHKMIQSYLDRIIGVMRNAYPEARFRGLADTSPMVDRWLAYAAGLGFFGKNHCIINPKYGSFFTIGSILTTLELSPDSPLDLSCGECRECFYHCPGHVIREDSFDVWHCKSYLTQKKEALTEEEEKIIARTPLIFGCDECQLCCPFNKNAAVSPLPEIRENRFPFLTREKLESYSNRSFDKEMREYAFAWRGRKVLLRNLDLTEKDSGK

SEQ ID NO: 76340 - protein, 294 aa, Dialister succinatiphilus
  misc_feature (1)..(294): tr|H1CY35|H1CY35_9FIRM Putative iron-sulfur cluster-bin ding protein OS=Dialister succinatiphilus YIT 11850 OX= 742743 GN=HMPREF9453_00273 PE=4 SV=1
MDPKTLFLETARSLRLTACGACSIDFSKDLSQALSKAGPVPFAPAEAEKRLSPESLLPGARSFFVILFPYKTEEREMGNIALYARSEDYHRVNHRYMDRIIEVAAKAFPQARFKALTDTSPMVDRWLAYAAGLGFFGRNHCLIHPVYGSYVTIGAILTTLPLSPDTPLTLSCGDCRLCERACPGKIIGKEPFNPWHCKSYLTQKKEDLTEEEQDIIRKTPLIFGCDGCQNCCPYNRKAPPSPLPEIRENRIPFLTKEMMESMSNRAFDKTYKNYAFAWRGKKVLLRNWHIVHEK

SEQ ID NO: 76341 - protein, 361 aa, Diaphorobacter nitroreducens
  misc_feature (1)..(361): tr|A0A3N1ZLB0|A0A3N1ZLB0_9BURK Epoxyqueuosine reductase OS=Diaphorobacter nitroreducens OX=164759 GN=queG PE=3 SV=1
MVCSSQLVPQIQGWARELGFSQIKVAGVDLSSAEPGLMQWLAQGFHGEMHYMAAHGLKRARPAELVPGTVSVITARMDYLPRATALEAAEGWQAIELGRLARPTEAVVSVYARGRDYHKVLRARLQKLSDRVAEAVGPFGHRVFTDSAPVLEAELARRSGQGWRGKHTLVLSREAGSMFFLGEIYVDMPLEPTEPVTHHCGSCQACIDVCPTQAIIAPYRLDARRCISYLTIEHAGPIPLELRPLMGNRIYGCDDCQLICPWNKFAQTSSLPDFDVRAGLVGQQLVHLFTWDEETFLRMTEGGPIRRIGHERWLRNIAVALGNALRATRDSVVRAALAARADDPSPLVREHVAWALAQENE

SEQ ID NO: 76342 - protein, 360 aa, Diaphorobacter polyhydroxybutyrativorans
  misc_feature (1)..(360): tr|A0A2Z2LN34|A0A2Z2LN34_9BURK Epoxyqueuosine reductase OS=Diaphorobacter polyhydroxybutyrativorans OX=1546149 GN=queG PE=3 SV=1
MVCSSQLVPQIQGWARELGFSQIKVAGVDLSSAEPGLMQWLAQGFHGEMHYMAAHGLKRARPAELVPGTVSVITARMDYLPRATALEAAEGWQALELGRLARPTEAVVSVYARGRDYHKVLRARLQKLSDRVAEAVGPFGHRVFTDSAPVLEAELARRSGQGWRGKHTLVLSREAGSMFFLGEIYVDMPLEPTEPVTHHCGSCQACIDVCPTQAIIAPYRLDARRCISYLTIEHAGPIPLELRPLMGNRIYGCDDCQLICPWNKFAQTSSLPDFDVRAGLVGQQLVHLFTWDEETFLRMTEGGPIRRIGHERWLRNIAVALGNALRTTRDPVVRAALAARADDPSPLVREHVAWALAQEN

SEQ ID NO: 76343 - protein, 360 aa, Diaphorobacter sp.
  misc_feature (1)..(360): tr|A0A4Y8YYJ9|A0A4Y8YYJ9_9BURK Epoxyqueuosine reductase OS=Diaphorobacter sp. DS2 OX=1302548 GN=queG PE=3 SV=1
MVCSSQLVPQIQGWARELGFSQIKVAGVDLSSAEPGLMQWLAQGFHGEMHYMAAHGLKRARPAELVPGTVSVITARMDYLPRAMALDAPEGWQAIELGRLARPTEAVVSVYARGRDYHKVLRARLQKLSDRVAEAVGPFGHRVFTDSAPVLEAELARRSGQGWRGKHTLVLSREAGSMFFLGEIYVDMPLEPTEPVTHHCGSCQACIDVCPTQAIIAPYRLDARRCISYLTIEHAGPIPLELRPLMGNRIYGCDDCQLICPWNKFAQTSSLPDFDVRAGLVGQQLVHLFTWDEETFLRMTEGGPIRRIGHERWLRNIAVALGNALRATRDPVVRAALAARANDPSPLVREHVAWALAQEN

SEQ ID NO: 76344 - protein, 350 aa, Diaphorobacter sp.
  misc_feature (1)..(350): tr|A0A2S4KJ41|A0A2S4KJ41_9BURK Epoxyqueuosine reductase OS=Diaphorobacter sp. LR2014-1 OX=1933219 GN=queG PE=3 SV=1
MQGWARELGFSQIKVAGVDLSSAEPGLMQWLAQGFHGEMHYMAAHGLKRARPAELVPGTVSVITARMDYLPRAMALEASEGWQAIELGRLARPTEAVVSVYARGRDYHKVLRARLQKLSDRVAEAVGPFGHRVFTDSAPVLEAELARRSGQGWRGKHTLVLSREAGSMFFLGEIYVDMPLEPTEPVTHHCGSCQACIDVCPTQAIIAPYRLDARRCISYLTIEHAGHIPLELRPLMGNRIYGCDDCQLICPWNKFAQTSSLPDFDVRAGLVGQQLVHLFTWDEETFLRMTEGGPIRRIGHERWLRNIAVALGNALRATRDPVVRAALAARADDPSPLVREHVAWALAQEN

SEQ ID NO: 76345 - protein, 386 aa, Dichotomicrobium thermohalophilum
  misc_feature (1)..(386): tr|A0A397QDK2|A0A397QDK2_9RHIZ Epoxyqueuosine reductase OS=Dichotomicrobium thermohalophilum OX=933063 GN=queG PE=3 SV=1
MVTLAKNRPAEQGALRAQLERRAREAGFDAVGITSADAIPQAAPRLREFLAKGRHGTMSWMAETADRRQAPRALWPEARSVIMLGMNYGPDHDPLAVLEERSRGALSVYAQGRDYHDVIKGRLKQLAGWLHGATGHEVKVFVDTAPVMEKPLAEAAGIGWQGKHTNLVSRDLGSWLFLGAIFTTAELPADAPETDHCGSCRACLDICPTDAFPAPYQLDARRCISYLTIEHKGHIPAEFRAAMGNRIYGCDDCLAVCPWNKFAQEASEAKLRARDNARSPALSELLALNDAAFRARFSGSPIKRVGRDRFVRNVLIAAGNSGDQSLRPQVIGLLDDTSPLVRAMAVWALSRLSAANGDWTDWERLKAAYLPSETDAQVRAEWEAGA

SEQ ID NO: 76346 - protein, 379 aa, Dickeya aquatica
  misc_feature (1)..(379): tr|A0A375AF69|A0A375AF69_9GAMM Epoxyqueuosine reductase OS=Dickeya aquatica OX=1401087 GN=queG PE=3 SV=1
MTYPFDLDALAQHIKQWGLALGFQHVGICDTDLSHEEPRLQAWLDKQYHGEMEWMARHGMMRARPHELLPGTLRVISVRMNYLPAKAAFASTLKNPQLGYVSRYALGRDYHKLLRQRLKKLGEQIAEYCGELQFRPFVDSAPIMERPLAAKAGLGWVGKHSLILNREAGSWFFLGELLVDIPLPVDQPVEEQCGKCVACITTCPTGAIVEPYTIDARRCISYLTIELEGAIPEALRPLMGNRIYGCDDCQLICPWNRFSQLTDEPDFSPRAALHAPELLTLFGWDEAHFLRITEGSAIRRIGHLRWLRNIAVALGNAPYDAQIVLALQARLGENALLDEHIHWAIAQQQARRAQHAIDVQLPQKKRLVRAVEKGLPRDA

SEQ ID NO: 76347 - protein, 379 aa, Dickeya chrysanthemi
  misc_feature (1)..(379): tr|C6CIY9|C6CIY9_DICC1 Epoxyqueuosine reductase OS=Dick eya chrysanthemi (strain Ech1591) OX=561229 GN=queG PE= 3 SV=1
MAYPYDLNELALLIKQWGLELGFQHVGICDTDLSHEEPRLQAWLDKQYHGEMEWMARHGMMRARAHELLPGTLRVISVRMNYLPAKAAFASTLKNPHLGYVSRYALGRDYHKLLRQRLKKLGDRIQAHCGELQFRPFVDSAPIMERPLAAKAGLGWVGKHSLVLNREAGSWFFLGELLIDLPLPVDQPVEEQCGKCVACMTTCPTGAIVEPYTIDARRCISYLTIELEGAIPEGLRPLMGNRIYGCDDCQLICPWNRFSQLTDEPDFSPRAALHAPELLELFSWDEARFLRVTEGSAIRRIGHERWLRNIAVALGNAPYEDKIVLALQNRLGESVLLDEHIQWAIRQQRARREQHTVDVQLPQKKRLIRAVEKGLPRDA

SEQ ID NO: 76348 - protein, 379 aa, Dickeya dadantii
  misc_feature (1)..(379): tr|E0SH78|E0SH78_DICD3 Epoxyqueuosine reductase OS=Dick eya dadantii (strain 3937) OX=198628 GN=yjeS PE=3 SV=1
MTYPYDLNELAQLIKQWGLELGFQQVGICDTDLSHEEPRLQAWLDKQYHGEMEWMARHGMMRARPHELLPGTLRVISVRMNYLPAKAAFASTLKSPNLGYVSRYALGRDYHKLLRQRLKKLGDRIQTHCGELQFRPFVDSAPIMERPLAAKAGLGWVGKHSLVLNREAGSWFFLGELLIDLPLPVDQPVEEQCGKCVACMTTCPTGAIVEPYTVDARRCISYLTIELEGAIPEPLRPLMGNRIYGCDDCQLICPWNRFSQLTDEADFSPRAALHAPELLTLFSWDETRFLRVTEGSAIRRIGHERWLRNIAVALGNAPYEDRIILALRGRLGESALLDEHIHWAIDQQLTRRGQQSVDVQPPQKKRLIRAIEKGLPRDA

SEQ ID NO: 76349 - protein, 389 aa, Dickeya dianthicola
  misc_feature (1)..(389): tr|A0A3A4CGD0|A0A3A4CGD0_9GAMM Epoxyqueuosine reductase OS=Dickeya dianthicola OX=204039 GN=queG PE=3 SV=1
MTYPYDLNELAPLIKQWGLELGFQQVGICDTDLSHEEPRLQAWLDKQYHGEMEWMARHGMMRARPHELLPGTLRVISVRMNYLPAKAAFATTLKNPHLGYVSRYTLGRDYHKLLRQRLKKLGDRIQAHCGELQFRPFVDSAPIMERPLAAKAGLGWVGKHSLVLNREAGSWFFLGELLIDLPLPVDPPVEEQCGKCVACMTTCPTGAIVEPYTVDARRCISYLTIELEGAIPEPLRPLMGNRIYGCDDCQLICPWNRFSQLTDEPDFNPRADLHAPELLALFNWDETRFLRVTEGSAIRRIGHERWLRNIAVALGNAPYEDRIIPALQGRLGESTLLDEHIHWAIDQQLIRRGQQFIDVQPIDVQPIDIQPPQKKRLIRAIEKGLPRDA

SEQ ID NO: 76350 - protein, 384 aa, Dickeya fangzhongdai
  misc_feature (1)..(384): tr|A0A2K8QR91|A0A2K8QR91_9GAMM Epoxyqueuosine reductase OS=Dickeya fangzhongdai OX=1778540 GN=queG PE=3 SV=1
MTYPYDLNELAQLIKQWGLELGFQQVGICDTDLSHEEPRLQAWLDKQYHGEMEWMARHGMMRARPHELLPGTLRVISVRMNYLPAKAAFASTLKNPHLGYVSRYALGRDYHKLLRQRLKKLGDRIQEHCGELQFRPFVDSAPIMERPLAAKAGLGWVGKHSLVLNREAGSWFFLGELLIDLPLPVDQPVEEQCGKCVACMTTCPTGAIVEPYTIDARRCISYLTIELEGAIPEPLRPLMGNRIYGCDDCQLICPWNRFSQLTDEPDFSPRAALHTPELLALFSWDETRFLRVTEGSAIRRIGHERWLRNIAVALGNAPYEDKIILALQSRLGESALLDEHIHWAIDQQLTRRSQQSIDVQPIDVQPPQKKRLIRAIEKGLPRDA

SEQ ID NO: 76351 - protein, 379 aa, Dickeya paradisiaca
  misc_feature (1)..(379): tr|C6C8W9|C6C8W9_DICP7 Epoxyqueuosine reductase OS=Dick eya paradisiaca (strain Ech703) OX=579405 GN=queG PE=3 SV=1
MTYPYDLNELAQLIKQWGQELGFQQVGICDTDLSHEEPRLQAWLDKQYHGEMAWMARHGMMRARPHELLPGTLRVISVRMNYLPAKAAFASTLKNPLLGYVSRYALGRDYHKLLRQRLKKLGDRIQTHCGELQFRPFVDSAPIMERPLAAKAGLGWVGKHSLVMNRNAGSWFFLGELLIDLPLPTDAPVEEGCGKCVACMTTCPTGAIVAPYTIDARRCVSYLTIELEGAIPIELRPLMGNRIYGCDDCQLICPWNRFSSLTDEPDFSPRAALHTPELLELFQWNEVRFLQVTEGSAIRRIGHLRWLRNIAVALGNAPYEDHIVLALQARLGEHPLLDEHIDWALSQQWEKRSQQTIDVQPAQKKRLIRAIEKGLPRDA

SEQ ID NO: 76352 - protein, 379 aa, Dickeya solani
  misc_feature (1)..(379): tr|A0A2K8VYE9|A0A2K8VYE9_9GAMM Epoxyqueuosine reductase OS=Dickeya solani RNS 08.23.3.1.A OX=1240086 GN=queG P E=3 SV=1
MTYPYDLNELAQLIKQWGLELGFQQVGICDTDLSHEEPRLQAWLDKQYHGEMEWMVRHGMMRARPHELLPGTLRVISVRMNYLPAKAAFASTLKSPYLGYVSRYALGRDYHKLLRRRLKKLGDRIQAHCGELQFRPFVDSAPIMERPLAAKAGLGWVGKHSLVLNREAGSWFFLGELLIDLPLPVDQPVEEQCGKCVACMTTCPTGAIVEPYTIDARRCISYLTIELEGPIPETLRPLMGNRIYGCDDCQLICPWNRFSQLTDEPDFSPRAALHAPELLALFSWDETRFLRVTEGSAIRRIGHERWLRNIAVALGNAPYEDRIILALQGRLGESTLLDEHIHWAIDQQLTRRGQQSIDVQPPQKKRLIRAIEKGLPRDA

SEQ ID NO: 76353 - protein, 384 aa, Dickeya sp.
  misc_feature (1)..(384): tr|A0A454UKR6|A0A454UKR6_9GAMM Epoxyqueuosine reductase OS=Dickeya sp. FVG10-MFV-A16 OX=2487135 GN=queG PE=3 S V=1
MTYPYDLNELAQLIKQWGLELGFQQVGVCDTDLSHEEPRLQAWLDKQYHGEMEWMARHGMMRARPHELLPGTLRVISVRMNYLPAKAAFASTLKNPHLGYVSRYALGRDYHKLLRQRLKKLGDRIQAHCGELQFRPFVDSAPIMERPLAAKAGIGWVGKHSLILNREAGSWFFLGELLIDLPLPVDQPLAEQCGKCVACMTTCPTGAIVEPYTVDARRCISYLTIELEGAIPEPLRPLMGNRIYGCDDCQLICPWNRFSQLTDEPDFSPRVALHAPELLALFGWDESRFLRITEGSAIRRIGHERWLRNIAVALGNAPYEDRIVLALQGRLGESTLLDEHIYWAIDQQLTRRSQQSINVQTIDVQPPQKKRLIRAIEKGLPRDA

SEQ ID NO: 76354 - protein, 379 aa, Dickeya sp.
  misc_feature (1)..(379): tr|A0A5B8I044|A0A5B8I044_9GAMM Epoxyqueuosine reductase OS=Dickeya sp. NCPPB 569 OX=568768 GN=queG PE=3 SV=1
MTYPDDLHKLAQLIKQWGLELGFQQVGICDTDLSHEEPRLQAWLDQQYHGEMEWMARHGMMRARPHELLPGTLRVISVRMNYLPPKAAFASTLKNPHLGYVSRYALGRDYHKLLRQRLKKLGDRIQEHCGELQFRPFVDSAPIMERPLAAKAGLGWVGKHSLVLNREAGSWFFLGELLIDLPLPVDQPVEEQCGKCVACMTTCPTGAIVEPYTVDARRCISYLTIELEGPIPESLRPLMGNRIYGCDDCQLICPWNRFSQLTDEPDFSPRAALHAPELLELFSWDEARFLRVTEGSAIRRIGHERWLRNIAVALGNAPYEDRIVLALQTRLGESALLDEHIHWAISQQLVRREQYAVDIQLPQKKRLIRAVEKGLPRDA

SEQ ID NO: 76355 - protein, 379 aa, Dickeya zeae
  misc_feature (1)..(379): tr|A0A2K9QIV3|A0A2K9QIV3_9GAMM Epoxyqueuosine reductase OS=Dickeya zeae OX=204042 GN=queG PE=3 SV=1
MTYPYDLNELAQRIKLWGQELGFQHVGICDTDLSDEEPRLQAWLDKQYHGEMEWMARHGMMRARPHELLPGTLRVISVRMNYLPAKAAFASTLKNPQLGYVSRYALGRDYHKLLRQRLKKLGDQIQAHCGELQFRPFVDSAPIMERPLAAKAGLGWVGKHSLILNREAGSWFFLGELLIDLPLPVDQPVEEQCGKCVACMTTCPTGAIVEPYTVDARRCISYLTIELEGAIPEALRPLMGNRIYGCDDCQLICPWNRFSQLTDEPDFSPRAALHAPELLELFGWDEARFLRVTEGSAIRRIGHERWLRNIAVALGNAPYEDSIVLALQNRLGESALLDEHIHWAINQQLIRREQHALDVQMPQKRRLVRAIEKGLPRDA

SEQ ID NO: 76356 - protein, 379 aa, Dickeya zeae
  misc_feature (1)..(379): tr|A0A0A8FHA3|A0A0A8FHA3_9GAMM Epoxyqueuosine reductase OS=Dickeya zeae EC1 OX=1427366 GN=queG PE=3 SV=1
MTYPYDLDELAQRIKLWGQELGFQHVGICDTDLSDEEPQLQAWLDKQYHGEMEWMARHGMMRARPHELLPGTLRVISVRMNYLPAKAAFASTLKNPHLGYVSRYALGRDYHKLLRQRLKKLGDQIQAHCGELQFRPFVDSAPIMERPLAAKAGLGWVGKHSLILNREAGSWFFLGELLIDLPLPVDQPIEEQCGKCVACMTTCPTGAIVEPYTVDARRCISYLTIELEGAIPEDLRPLMGNRIYGCDDCQLICPWNRFSQLTDEPDFSPRAALHAPELLELFGWDEARFLRVTEGSAIRRIGHERWLRNIAVALGNAPYEDNIVLALQNRLGESALLDEHIHWAINQQLIRREQHALDVQMPQKRRLVRAIEKGLPRDA

SEQ ID NO: 76357 - protein, 417 aa, Dictyobacter alpinus
  misc_feature (1)..(417): tr|A0A402B311|A0A402B311_9CHLR Epoxyqueuosine reductase OS=Dictyobacter alpinus OX=2014873 GN=queG PE=4 SV=1
MTTLDTQTIKEYAYSLGFDSARITSAAPFPETKQIIQERIGRGLMDGLPWFTAERAEISCHPDALLPEAQSIITLALCYLTEQPEEPDTAVPHGRISRYSWGDDYHDLIKPKLQQFAAWLKDYAKDIGNAEVETRLFVDTGRMVDRAVAQRAGLGWYGKNTNILTKGWGSWVFLAEIVTNLPLTPDAELKANCGSCEICLHACPTGALPNPYELDSTKCISFLTIELRGSIPLEMRPLMGNLIFGCDICQEVCPVNKVAEKRLGLRDAQGKPVIALNTIKKREVTTVSSGQRAEKAFQPQPEFHMRPQVGSTPELIPLLALTEEDFRERFRHSPIKRTKRRGFLRNVCVALGNSKDSKAIPALTNALHDNEALIRSHAAWALGSIGGTDAVTALQAALVNENDEEVQKEIRCALAMR

SEQ ID NO: 76358 - protein, 415 aa, Dictyobacter aurantiacus
  misc_feature (1)..(415): tr|A0A401ZB91|A0A401ZB91_9CHLR Epoxyqueuosine reductase OS=Dictyobacter aurantiacus OX=1936993 GN=queG PE=4 SV =1
MLNAQTIKEYAYSLGFDAARITSAAAFPETKQIIQERIGRGLMDGLPWFTAERAEISCHPDALLPEAQSIITLALCYLTEQPEAPDKREPHGSISRYAWGDDYHDIIKPKLQQFASWLKDYARDQGGNEVETRLFVDTGRMVDRAVAQRAGLGWYGKNTNILTKGWGSWVFLAEIVTNLPLASDEPLKASCGSCEICLHACPTGALPNPYELDSRKCISFLTIELRGSIPVEMRPLMGNLIFGCDICQEVCPVNKVAEKRLGLRDMQGKPIIPLRTIQKHSTEPAMDRDPARKAFQPRSEFQARPTVGSTPELIPLLSLTEEEFRERFRRSPIKRTKRRGFLRNVCVALGNSKDPQAIPALTKALHDDEALVRGHAAWALGSIGGSTARQALYDARQTEQDPEVLKEIRYALSIA

SEQ ID NO: 76359 - protein, 413 aa, Dictyobacter kobayashii
  misc_feature (1)..(413): tr|A0A402AFQ2|A0A402AFQ2_9CHLR Epoxyqueuosine reductase OS=Dictyobacter kobayashii OX=2014872 GN=queG PE=4 SV= 1
MLNTQTIKEYAYSLGFDAARITSAAAFPEAKQVIQERIGRGLMDGLPWFTSERAEISCHPDALLPEAQSIITLALCYLTEQPVEADETKPHGRISRYAWGDDYHDIIKPRLQQFANWLKDYARDEWDQDIETRLFVDTGRMVDRAVAQRAGLGWYGKNTNILTKGWGSWVFLAEIVTNLPLQPDEALKANCGSCEICLHACPTGALPNPYELDSPKCISFLTIELRGSIPLEMRPLMGNLIFGCDICQEVCPVNKVAEKRLGLRDIHGKPIVPLQSIQKRTEQVADSNANKVFRPQIEFQAHPAVGSTPELIPLLSLTEEEFRERFRRSPIKRTKRRGLLRNVCVALGNSKDPQAIPALEKALHDEEALIRGHAAWALGSIGGSSAVQALQEALTTEEDVEVQKEIKYALTMA

SEQ ID NO: 76360 - protein, 415 aa, Dictyobacter sp.
  misc_feature (1)..(415): tr|A0A5A5TLC7|A0A5A5TLC7_9CHLR Epoxyqueuosine reductase OS=Dictyobacter sp. Uno17 OX=2014874 GN=queG PE=4 SV=1
MMLDVEKIKEFAYSLGFTTARITSAAAFPEAKQVIQERIARGLLDGLPWFTAERAEVSCQPDALLPEARSIITLAMCYLTEQPEEPDDTTPHGRISRYAWGDDYHDIIKPKLKQFATWLSEYAGSSQEGEFEARLFVDTGRMVDRAVAQRAGLGWYGKNTNILTKGWGSWVFLAEIVTNLALLVDEPLQTNCGSCEICLHACPTGALPNPYELDSTRCISFLTIELRGSIPVELRPLMGNLIFGCDICQEVCPVNKLAEKRLGLRQADGTPIVPLQSIKKREVSAQQQIISLPRFQPQTEFLMRPTIGSNPDLIELLSITEEDFRERFRRSPIKRTKRRGLLRNVCVALGNSNDRRAIPALIKALHDEEMLIRGHAAWALGRLGGPEARMALQEALQVEADTEVQQEIRYALAMF

SEQ ID NO: 76361 - protein, 414 aa, Dictyobacter sp.
  misc_feature (1)..(414): tr|A0A5J4KL37|A0A5J4KL37_9CHLR Epoxyqueuosine reductase OS=Dictyobacter sp. W12 OX=2607529 GN=queG PE=4 SV=1
MLDTQTIKEYAYSLGFDIARITSAAAFPEAKQVIQERIGRGLLDGLPWFTAERAEISCHPDALLPEAQSIITLALCYLTEQPEEPTSQVPHGNISRYAWGDDYHDIIKPKLQQFAEWLKDYAKTTGTEEVETRLFVDTGRMVDRAVAQRAGLGWFGKNTNILTKGWGSWVFLAEIVTNLPLEPDNALKANCGSCEICLHACPTGALPNAYELDSTRCISFLTIELRGSIPLELRPLMGNLIFGCDICQEVCPVNKVAEKRLGLRDAQGKPVIALDMIKKREPITVSDTKPVKIFQPQPEFRTRPAVGSTPELIPLLALTEEEFRERFRRSPIKRTKRRGFLRNVCVALGNSKDPQAIPALVNALHDSEALIRGHAAWALGNIGGTTVVTALQAALVTEEDEEVQKEIRYALTIG

SEQ ID NO: 76362 - protein, 321 aa, Dinghuibacter silviterrae
  misc_feature (1)..(321): tr|A0A4R8DRE6|A0A4R8DRE6_9BACT Epoxyqueuosine reductase OS=Dinghuibacter silviterrae OX=1539049 GN=queG PE=3 S V=1
MDTARHTRLIKSFASALGFDYCGIARAVRLDDDAFRLERWLTAGMHGKMGYMENYFDLRIDPTRLVPGAKSVITLLLNYFPSESQAPGAPGIAKYAFGRDYHEVIREKLRVFQHRIREEIGEVAGRGFVDSAPVLERSWAVRSGLGWIGKNGNLLHPGAGSFFFIATLIVDLPLDYDDPFAKDFCGTCTRCIDACPTEAILPDKVVDGSRCISYFTIELKDLLIPGDMEGRFQDWMFGCDTCQDVCPWNRFSKPTLEEGFRALPEVLNFTTADWEVLTEEAFREIFRESPLKRSKFKGIQRNLAFISLPSANPPTENPPTR

SEQ ID NO: 76363 - protein, 344 aa, Dinoroseobacter shibae
  misc_feature (1)..(344): tr|A8LMW5|A8LMW5_DINSH Epoxyqueuosine reductase OS=Dino roseobacter shibae (strain DSM 16493 / NCIMB 14021 / DF L 12) OX=398580 GN=queG PE=3 SV=1
MNEGLASNLKAEAARLGFVGAGICAPDAIPEAAGRLAAFVEAGRHGQMGWMAERMHWRGDPASLWPEARSVVMLAESYAPDSDPLADLAARDRGLISVYARHRDYHDVLKKKLKALGRWLLAEAGGEIKVFVDTAPVMEKPLAQAAGLGWQGKHTNLLGRGFGNWVFLGALFTTVDLPKDAAEVDHCGSCRACLDICPTDAFPAPYQLDARRCISYLTIEHKGPVDEALRPGLGNRIYGCDDCLAVCPWNKFAAEAREAKYHARDDLTLPALAELAALDDAGFRARFSGSPIKRIGRDRFVRNVCYAIGNSATPALRPAVQALCDDPDPAVADAARWAVARLGG

SEQ ID NO: 76364 - protein, 343 aa, Dinoroseobacter sp.
  misc_feature (1)..(343): tr|A0A2D8TJ57|A0A2D8TJ57_9RHOB tRNA epoxyqueuosine(34) reductase QueG OS=Dinoroseobacter sp. OX=2003366 GN=que G PE=4 SV=1
  misc_feature (37)..(37): Xaa can be any naturally occurring amino acid
  misc_feature (54)..(54): Xaa can be any naturally occurring amino acid
  misc_feature (59)..(59): Xaa can be any naturally occurring amino acid
  misc_feature (63)..(63): Xaa can be any naturally occurring amino acid
  misc_feature (98)..(98): Xaa can be any naturally occurring amino acid
  misc_feature (133)..(133): Xaa can be any naturally occurring amino acid
  misc_feature (183)..(183): Xaa can be any naturally occurring amino acid
  misc_feature (193)..(193): Xaa can be any naturally occurring amino acid
  misc_feature (196)..(196): Xaa can be any naturally occurring amino acid
  misc_feature (213)..(213): Xaa can be any naturally occurring amino acid
  misc_feature (310)..(310): Xaa can be any naturally occurring amino acid
  misc_feature (316)..(316): Xaa can be any naturally occurring amino acid
MTDLKTQLEAKALEEGFAKMRVCRPDAIPQAAARLAXYVAKGRHGQMGWIEARXGWRGXPTAXWPEARSVVMLAEPYTPEIDPLEPLKARDCGTISVXAQNRDYHDALKKRLKRVGRWLLEQAPGEEIKVFVXTAPVMEKPLGQASGLGWQGKHTNLLARDLGNWFFLGSIFTTLELPADPAXSDHCGNCTAXLDXCPTDAFPAPYQLDARRXISYLTIEHHGPVDEELRPLMGNRIFGCDDCLAICPWNKFAVEAREMRYSGRPELQGPKLAELARLDDAAFRTMFSGNPVKRIGRNRFIRNVLYAIGXSGDSGXLDTAQGLLDDPDDTVKDAARWAVERLR

SEQ ID NO: 76365 - protein, 352 aa, Dokdonella fugitiva
  misc_feature (1)..(352): tr|A0A4R2IGP4|A0A4R2IGP4_9GAMM Epoxyqueuosine reductase OS=Dokdonella fugitiva OX=328517 GN=queG PE=3 SV=1
MTDYAALASDIRRWGEELGFQKIGITGIDLTPDEAHLLDWLDAGHHGEMDYMARHGARRSRPAELQPGTVRVISARLDYAPPGLREAWNVIGDGERGYVSRYALGRDYHKVLRGRLQKLADRIAGVTGPFGHRVFTDSAPVLEKALARNAGLGWIGKHTLLLDRDAGSWFFLGEIYTDLPLPTDAPASAYCGTCSRCIDVCPTQAIVAPYRLDARRCISYLTIELRGAIPEDLRPLIGNRIFGCDDCQLVCPWNKFAQVTTVADFAPRSGLDSARLVDLFAWSEAEFLARTEGMAIRRTGYEGWSRNIAVALGNAPTRDDVVRALRSRADDPSALVREHVAWALARHASAHG

SEQ ID NO: 76366 - protein, 360 aa, Dokdonella immobilis
  misc_feature (1)..(360): tr|A0A1I4WKW7|A0A1I4WKW7_9GAMM Epoxyqueuosine reductase OS=Dokdonella immobilis OX=578942 GN=queG PE=3 SV=1
MSAVDFYNLLPELHEWAAALGFQQLGVAGVELGEDETHLLNWLRQGRHGEMDYMASHGSKRSRPQELVPGTLRVISVRMDYLPSQARPGFDVLADPQRAYVARYALGRDYHKLMRTRLQKLANRIGERVGPFGYRAFVDSAPVLERALARDAGLGWIGKHSCLINRDAGSWFFLGELYTDLPLPLDTPASAHCGTCRRCLDICPTQAIVAPYEVDARRCIAYLTIELRGPIPLELRRAMGNRVFGCDDCQLVCPWNKFATPSPEADFRPRHGLDDAALIGLFEWDEAEFLQRTEGSPIRRTGHVGWLRNIAVALGNAPYSAATVNALERRQQHPAEIVREHVAWALAEQADKRAAASRPG

SEQ ID NO: 76367 - protein, 374 aa, Dokdonella koreensis
  misc_feature (1)..(374): tr|A0A167H369|A0A167H369_9GAMM Epoxyqueuosine reductase OS=Dokdonella koreensis DS-123 OX=1300342 GN=queG PE=3 SV=1
MPAAACRNTIDFAALAAEIRQWAAELGFRDIGIAGTELGEDETHLLNWLAAGRHGEMDYMANHGVKRSRPAELQPGTLRVISVRMDYLPAGARDGWDVLGDPDAAYVARYALGRDYHKLMRNRLQKLADRIAARTGPFGYRAFVDSAPVLERALARDAGIGWIGKHTCLIDSRGGSWFFLGELFTDLPLPLGAAATAHCGTCTRCIEICPTRAILAPYQLDARRCIAYLTIESRGPIPVELRPLIGNRIFGCDDCQLVCPWNKFATPTTEPDFAPRHRLDDSRLVDLFAWTEAEFLQRTEGSPIRRTGYPGWLRNIAVALGNAPYAEPTMQALAARQDDPSELVREHVAWALAEQRRKQAAHASVSAGPAPGAG

SEQ ID NO: 76368 - protein, 374 aa, Dokdonella sp.
  misc_feature (1)..(374): tr|A0A5C7ZNP0|A0A5C7ZNP0_9GAMM Epoxyqueuosine reductase OS=Dokdonella sp. OX=2291710 GN=queG PE=3 SV=1
MLPARSVANDPGSMPGIDPTSLKARLGIWAAELGFQQLGVAGIELSEDEAYLLNWLEAGRHGSMEYMQRHGSKRSRPAELVAGTVRVISVRMDYQPAQARDSWDVLADADSGFIARYALGRDYHKLMRNRLQKLAERLASEVGPFGYRAFVDSAPVLERALARNAGLGWIGKHTCLINRQAGSWFLLGELYTDLELPLDPPASNHCGSCRRCIDVCPTQAIIGPYQVDARRCISYLTIELRESIPVELRRPMGNRIFGCDDCQLVCPWNKFAQPTRESDFMPRHGLDGRGLIELFAWTEAQFQQQTEGSPIRRAGYEGWLRNIAVALGNAPYRPETVDALRRRLDDPSAMVREHVAWALTEQEAKRDRAGQAGS

SEQ ID NO: 76369 - protein, 309 aa, Dokdonia donghaensis
  misc_feature (1)..(309): tr|A0A0A2H0D4|A0A0A2H0D4_9FLAO Epoxyqueuosine reductase OS=Dokdonia donghaensis DSW-1 OX=1300343 GN=queG PE=3 SV=1
MENRSKHTAFIKAEAQRLGFMSCGISKAGFLEEEAPRLESWLNKNMHGEMQYMENYFDKRLDPTKLVEGSKSVISLLLNYYPHELQNEESYKISKYAYGRDYHFVIKDKLKEFMHVIQEQIGEVNGRAFVDSAPILDKAWAAKSGLGWIGKHSNLLSKKAGSFYFIAELVVDLDLEYDTPVTDHCGSCTACIDACPTQAIVEPYKVDGSKCISYFTIELKNEIPEYAKSQLDDWMFGCDVCQDVCPWNRFSKAHSESLFNPNPKLLTYDKKQWEEITQEVFSEIFRKSAVKRTKFSGLKRNIDALKKQP

SEQ ID NO: 76370 - protein, 308 aa, Dokdonia pacifica
  misc_feature (1)..(308): tr|A0A238VR78|A0A238VR78_9FLAO Epoxyqueuosine reductase OS=Dokdonia pacifica OX=1627892 GN=queG PE=3 SV=1
MIENRAKYTALIKAEAKRLGFMSCGISKAGFLEEEAPRLEQWLANNMHGEMQYMENHFDKRLDPTKLVEGSKSVISLLLNYYPSEIQKADSYKISKYAYGTDYHFVIKDKLKELLHYIQAEIGEVGGRAFVDSAPVLDKAWAVKSGLGWMGKHSNVLSKKTGSFYFIAELIIDLDLEYDTPVTDHCGNCTACIDACPTQAIVEPYKVDGSKCISYFTIELKEAIPTSVKGSFDDWMFGCDVCQDVCPWNRFSTSHKEPLFNPHPKLLEYTKKDWEEITQEVFSEVFKKSAVKRTKYTGLLRNIQFLKE

SEQ ID NO: 76371 - protein, 309 aa, Dokdonia sp.
  misc_feature (1)..(309): tr|F4AVT9|F4AVT9_DOKS4 Epoxyqueuosine reductase OS=Dokd onia sp. (strain 4H-3-7-5) OX=983548 GN=queG PE=3 SV=1
MIENQVKHTAFIKAEATRLGFMSCGISKAGFLEEEAPRLESWLKQNMNGEMQYMENYFDMRLDPTKLVEGSKSVISLLLNYYPHEVQNEDSYKISKYAYGRDYHFVIKDKLKEFLHNIQEEIGDVHGRAFVDSAPVLDKAWAKKSGLGWIGKHSNLLSKKAGSFYFIAELVIDLDLEYDTPVTDHCGSCTACIDACPTGAIVEPYKVDGSKCISYFTIELKNQIPDYAKPHLDDWMFGCDVCQDVCPWNRFSKAHSEPLFDPHPELLSNSKKQWEEITQEVFSEIFRKSAVKRTKFSGLQRNIDALKRS

SEQ ID NO: 76372 - protein, 307 aa, Dokdonia sp.
  misc_feature (1)..(307): tr|A0A3M0G2S1|A0A3M0G2S1_9FLAO Epoxyqueuosine reductase OS=Dokdonia sp. SH27 OX=2479847 GN=queG PE=3 SV=1
MENKSKHTALIKAEAQRLGFMSCGISKAGFLEEEAPRLEKWLSENRNGEMHYMENYFDKRLDPTKLVEDSKSVISLLLNYYPNELQRDDTYKISKYAYGRDYHFVIKDKLKEFLHTLETEIGQVYGRAFVDSAPVLDKAWAVKSGLGWMGKHSNVLSKKTGSFYFIAELIVDLDLEYDLPVTDHCGSCTACIDACPTQAIYEPYKVDGSKCISYYTIELKNAIPEAARGLMDDWAFGCDVCQDVCPWNRFSKSHSEPLFNPHPQLLEMSKGDWEEITQEVFSEIFQKSAVKRTKYSGLRRNISFLKG

SEQ ID NO: 76373 - protein, 324 aa, Dolichospermum compactum
  misc_feature (1)..(324): tr|A0A1Z4V757|A0A1Z4V757_9CYAN Epoxyqueuosine reductase OS=Dolichospermum compactum NIES-806 OX=1973481 GN=que G PE=3 SV=1
MNEYISINSTEVKAKAKELGFQEVGIAAAGDLETTETEKLHAWLKMGYHADMEWMKNPKREDISLVMPEVRSLISVALNYYTPHQRPSGEEYGKISRYAWGRDYHKVMHKKLKELATWLESLGENVKTRYYADTGPVQDKVWAQKAGIGWIAKNGNVITRKYGSWVFLAEILTNLELESDRPSTQHCGTCTRCLQACPTGAITAPFIVDANRCIAYHTIENRAEELPANITPHLQGWIAGCDICQDICPWNQRFAQTTNVNDFQPYPGNLAPKLVELAQISNEEWDRRFTASALRRIKPEMLRRNARANLDKSRHNNDPESNNF

SEQ ID NO: 76374 - protein, 324 aa, Dolichospermum planctonicum
  misc_feature (1)..(324): tr|A0A480AB66|A0A480AB66_9CYAN Epoxyqueuosine reductase OS=Dolichospermum planctonicum OX=136072 GN=queG PE=3 SV=1
MNECTSINSIVVKAKAKELGFHEVGIAAVADLEATEIQKLRDWLKMGYHADMEWMKNPRRENISLVMPEVITLVSVALNYYTPDARPQEDEYGKISRYGWGRDYHRVMHKKLKELASWLESLGTDIKARYYADTGPIQDKLWAQKAGIGWIAKNGNVITRKYGSWVFLGEVLTNLELEKDQPSTQHCGTCTRCLQACPTGAITEPFVVDANRCIAYHTIENRDQELPADIKPHLQGWVAGCDICQDVCPWNQRFAQITDVTDFQPYPKNLHPKLVELAQISDEEWDKRFTASALRRIKPEMLRRNARANLDVSKHNNDPESNNF

SEQ ID NO: 76375 - protein, 324 aa, Dolichospermum sp.
  misc_feature (1)..(324): tr|A0A5C0DYN0|A0A5C0DYN0_9CYAN Epoxyqueuosine reductase OS=Dolichospermum sp. UHCC 0315A OX=1914871 GN=queG PE =3 SV=1
MNEYTSISSAVVKAKAKELGFHEVGIAAVGNLERTETEKLQAWLKMGYHADMEWMKNPKREDISLVMPEVRSLISVALNYYTPQERPQGDEYGKISRYAWGRDYHRVIHKKLKELAIWLESLGENVKARYYADTGPVQDKVWAQKAGIGWIAKNGNVITRKYGSWVFLAEILTNLALESDRPSTQHCGTCTRCLQACPTGAITEPFVVDANRCIAYHTIENRAEELPANITPHLQGWVAGCDICQDVCPWNQRFAQATDVTDFQPYPGNLAPKLVELAQISNEEWDKRFTASALRRIKPEMLRRNARANLDKSRHNNDPESNNF

SEQ ID NO: 76376 - protein, 391 aa, Dolosicoccus paucivorans
  misc_feature (1)..(391): tr|A0A2N6SMQ4|A0A2N6SMQ4_9LACT tRNA epoxyqueuosine(34) reductase QueG OS=Dolosicoccus paucivorans OX=84521 GN= queG PE=4 SV=1
MPTLKERIIEEAHRIGIDKIGFASAEPFDHLEASLKEQKEKGYTSGFEHPVIEERIYPEKIFAKPKSIISIALAYPSQLKNPLPQERGNRRGMFARASWGIDYHDILRERMNRLIDFIKQETQTAEFKPMVDTGELIDVAVAQRAGLGFIGRNGLLITKEFGSWVYLGEIITDLEFEYDEPVPFGCGDCYRCVTACPTDALLGDGRMNAKRCLSYQTQTKGYMPVEFRRKMTSIIYGCDICQLSCPYNKGIDWHLHEEMEPDPELVQPALKELLTLSNREFRDTFGKMAGSWRGKKPLQRNAIIALANFNDQSAIPLLIEIMEKDPREMIRGTAAWAISQIQKRYNEALNECVYEQLQKETDLETIEEMTKALEELKNKRPPRQKRNEVSR

SEQ ID NO: 76377 - protein, 378 aa, Domibacillus aminovorans
  misc_feature (1)..(378): tr|A0A177L210|A0A177L210_9BACI Epoxyqueuosine reductase OS=Domibacillus aminovorans OX=29332 GN=AWH48_15230 PE =4 SV=1
MYRQLKKELINYSKEIGIDKIGFAAADPFLELKQKLINQQELGYASGFEEKDIEKRVNPALLIDQPRSIIAIALAYPSKLENAPKGKKGERRGLFCRASWGEDYHSILRRKLAMLESFLLERLPDVQFRSMVDTGELSDRAVAARAGIGWSAKNCAIITPEFGSYVYLGEMLTNVPFEPDTPMESQCGSCTKCIDACPTSALVQGGQLNSQRCIAYLTQTKDSLPEQFRKHLGNRLYGCDTCQTVCPENKGKHVLIHEEMTPKLEQVKPLLEPILSISNKEFKERFGQMSGSWRGKKPIQRNAIIALAHFKEESSLGALIHVLETDPRPVLRGTAAYAIGQIGGTEAERALKEALSREKDEEVLFEMEKALQKLRSML

SEQ ID NO: 76378 - protein, 378 aa, Domibacillus aminovorans
  misc_feature (1)..(378): tr|A0A177LC00|A0A177LC00_9BACI Epoxyqueuosine reductase OS=Domibacillus aminovorans OX=29332 GN=queG PE=3 SV=1
MYRQLKKELINYSKEIGIDKIGFAAADPFLELKQKLINQQELGYASGFEEKDIEKRVNPALLIDQPRSIIAIALAYPSRLENAPKGKKGERRGLFCRASWGEDYHSILRRKLAMLESFLLERLPDVQFRSMVDTGELSDRAVAERAGIGWSAKNCAIITPEFGSYVYLGEMLTNVPFEPDTPMENQCGSCTKCIDACPTSALVQGGQLNSQRCIAYLTQTKDSLPEQFRKHLGNRLYGCDTCQTVCPENKGKHVLIHEEMTPKLEQVKPLLEPILSISNKEFKERFGQMSGSWRGKKPIQRNAIIALAHFKEESSLGALIHVLEEDPRPVLRGTAAYAIGQIGGVEAERALKEALSREKDEEVLFEMEKALQKLRSML

SEQ ID NO: 76379 - protein, 378 aa, Domibacillus antri
  misc_feature (1)..(378): tr|A0A1Q8Q8M7|A0A1Q8Q8M7_9BACI Epoxyqueuosine reductase OS=Domibacillus antri OX=1714264 GN=queG PE=3 SV=1
MYRQLKQELIDYSKEIGIDKIGFAAADPFLELKEKLIQHQELGYASGFEEKDIEKRVNPALLLDQPRSIIAIALAYPSKLEKAPKGKKGERRGLFCRASWGEDYHSVLRRKLAMLEAFLQEKLPDVRFKSMVDTGELSDRAVAERAGIGWSAKNCAIITPEFGSYVYLGEMITNVPFEPDTPIENQCGSCTKCIDACPTSALVQGGQLNAQRCIAYLTQTKDFLPEEFRKHLGNRLYGCDTCQTVCPENKGKHVLKHAEMTPEPEQVKPLLEPLLSISNKEFKQRFGSMSGSWRGKKPIQRNAIIALAHFKEESSLPSLVQVLNDDPRPVLRGTAAYAIGQIGGAEAKQALNLALSQEKEEDVLFEIERAIQTVHSML

SEQ ID NO: 76380 - protein, 378 aa, Domibacillus enclensis
  misc_feature (1)..(378): tr|A0A1N7B536|A0A1N7B536_9BACI Epoxyqueuosine reductase OS=Domibacillus enclensis OX=1017273 GN=queG PE=3 SV=1
MYRQLKQELIDYSKQINIDKIGFAAADPFLELKQKLQLQQELGYASGFEEKDIEKRTDPALLLDQPRSIIAIALAYPSKLEDAPKGKKGERRGLFCRASWGEDYHTVLRKKLHLLEQFLQEKLPDVQFKSMVDTGELSDRAVAERAGIGWSAKNCAIITPEFGSYVYLGEMLTNVPFEPDTPMESQCGKCTKCIDACPTNALVQGGQLNSQRCIAYLTQTKDFLPEAFRKHLGNRLYGCDTCQTVCPENKGKHTLRHEEMKPDNEQVKPLLEPLLSMSNKEFKERFGRMSGSWRGKKPIQRNALIALAHFKEESSLPILAEVLHGDPRPVIRGTAAYAIGQIGGASAKELLQKAKQEEKEEAVLDEVKKAIQSLQSVL

SEQ ID NO: 76381 - protein, 378 aa, Domibacillus epiphyticus
  misc_feature (1)..(378): tr|A0A1V2A845|A0A1V2A845_9BACI tRNA epoxyqueuosine(34) reductase QueG OS=Domibacillus epiphyticus OX=1714355 G N=BTO28_09335 PE=4 SV=1
MYRQLKQELIDYSKEIGIDKIGFAAADPFLELKQKLVQQQELGYASGFEEKDIEKRVNPALLIDQPRSIIAIALAYPSKLEGAPTGKKGERRGLFCRASWGEDYHAILRKKLALMEEFLQKKLSDVQCKSMVDTGELSDRAVAERAGIGWSAKNCAIITPEFGSYVYLGEMLTNVPFEPDTPMESQCGSCRKCIDACPTSALVQGGQLNSQRCIAYLTQTKDFLPEQFRKHLGNRLYGCDTCQTVCPENKGKHVLIHDEMTPDPEQVKPLLEPLLSISNKEFKERFGSMSGSWRGKKPIQRNAIIALAHFKEESSLPALMHVLFEDPRPVMRGTAAYAIGKIGGMEAEHALKRALIHEKESDVLAEIEKAIQTFHSVL

SEQ ID NO: 76382 - protein, 378 aa, Domibacillus iocasae
  misc_feature (1)..(378): tr|A0A1E7DLS3|A0A1E7DLS3_9BACI Epoxyqueuosine reductase OS=Domibacillus iocasae OX=1714016 GN=queG PE=3 SV=1
MYRQLKQELIDYSKDIGIDKIGFAAADPFLELKQRLIQQQELGYASGFEEKDINKRTNPALLLDQPRSIIAIALAYPSKLDGAPKGKKGERRGLFCRASWGEDYHIILRKKLHLLEQFLQEKLPDVQFKSMVDTGELSDRAVAERAGIGWSAKNCAIITPEFGSYVYLGEMLTNVPFEPDRPMESQCGTCTKCIDACPTSALVQGGQLNSQRCIAYLTQTKDVLPEPFRKHLGNRLYGCDTCQTVCPENKGKHTLRHEEMIPENEQVKPLLEPLLSMSNKEFKERFGRMSGSWRGKKPIQRNAIIALAHFKEVSSLPALANALHEDPRPVIRETAAYAIGQIGGREAEAQLHEALLREKEEAVIEELKKALQSIRSVL

SEQ ID NO: 76383 - protein, 378 aa, Domibacillus mangrovi
  misc_feature (1)..(378): tr|A0A1Q5P0V7|A0A1Q5P0V7_9BACI Epoxyqueuosine reductase OS=Domibacillus mangrovi OX=1714354 GN=queG PE=3 SV=1
MYQQLKTDLINYSKEIGIDKIGFAAADPFLELKQKLINQQELGYASGFEEKDIEKRVNPALLIDQPRSIIAIALAYPSKLENAPKGKKGERRGLFCRASWGEDYHSILRRKLAMLESFLLERLPDVQLRSMVDTGELSDRAVAERAGIGWSAKNCAIITPEFGSYVYLGEMLTNVPFEPDVPMESQCGSCTKCIDACPTSALIQGGQLNSQRCIAYLTQTKGILPEQFRKHLGNRLYGCDTCQTVCPENKGKHVLIHEEMIPEPEQVKPLLEPILSISNKEFKERFGEMSGSWRGKKPIQRNAIIALAHFKEESSIRALVHVLEEDPRPVLRGTAAYAIGQIGGAEAERALKQALSREKEEEVLFEMEKALQTLRSVL

SEQ ID NO: 76384 - protein, 346 aa, Donghicola sp.
  misc_feature (1)..(346): tr|A0A1B7YXI0|A0A1B7YXI0_9RHOB Epoxyqueuosine reductase OS=Donghicola sp. JL3646 OX=1836468 GN=queG PE=3 SV=1
MQTLISKDQLKAYAIDAGFSAMGVCRPDAVPEIADRLHVFVDEGRHGQMAWMAERMNWRGNPTALWPEAKSVIMLAEAYTPSHDPMAVVGQADKAAISVYAQNRDYHDVVKKRLKAVGRWLLSLCPGEQIKVFVDTAPVMEKPLGQAAGLGWQGKHTNLLGRELGSWFFLGAIFTTIEFEPDAAEQSHCGSCTACLRSCPTEAFPAPYQLDARRCISYLTIEHSGPVDLDLREKLGNRIYGCDDCLAACPWNKFAVEAREVKYAAREDLIAPDLAELVLLDDAEFRAKFSGSPIKRIGRNRFVRNVLYAIGNTENAAYIPSVTPLCSDPDATVSDAAKWAMDRISR

SEQ ID NO: 76385 - protein, 361 aa, Donghicola sp.
  misc_feature (1)..(361): tr|A0A1M4N2Z1|A0A1M4N2Z1_9RHOB Epoxyqueuosine reductase OS=Donghicola sp. KarMa OX=1779855 GN=queG PE=3 SV=1
MATRGPAPAPPGYLGKKEMTDALKARLVAQARAEGFSEVRVCRPWDVPEVPARLEAFVAQGFHGQMGWMEERMSWRGDPAALWPEARSVIVLGESYTPEDNPMDVVGLPDRGAISVYARGKDYHDLVKKRLKRLARWLIAEGGGEVKVFVDTAPVPEKPLGQAAGLGWQGKHTNLVSRQMGNWFFIGSVFTTLDLPVDEPEVDHCGRCDRCLRACPTDAFVAPYQMDARRCISYLTIEHKGPVDEALRGRLGNRIYGCDDCLAACPWNKFAVAASDMRYAAREGTVAPELRELAALDDAAFRERFSGSPIKRIGRDRFVRNVLYAIGNSGDASLKEVATALFTDPDEGVADAARWAALQLG

SEQ ID NO: 76386 - protein, 344 aa, Donghicola tyrosinivorans
  misc_feature (1)..(344): tr|A0A2T0WYJ1|A0A2T0WYJ1_9RHOB Epoxyqueuosine reductase OS=Donghicola tyrosinivorans OX=1652492 GN=queG PE=3 S V=1
MNGAALKEALVAAALAEGFSSVRVCRPWDVPEVPARLEAFVSAGYHGQMGWMEERMSWRGDPSALWPEARSVIVLGESYTPEEDPMDVVGLPDRAAISVYARGKDYHDLVKKRLKRLARWLISEAGGEVKVFVDTAPVPEKALGQAAGLGWQGKHTNLVSREMGNWFFIGSVFSTLELPVDGPEVDHCGSCSRCLQACPTEAFVAPYQMDARRCISYLTIEHKGPVPLELRERLGNRIYGCDDCLAACPWNKFAVEAREMRYAAREGTIAPPLAELAALDDAAFRERFSGSPIKRIGRGRFVRNVLYAIGNSGDPSLGKVATALVEDPDEDVADAARWASLRLG

SEQ ID NO: 76387 - protein, 381 aa, Dongia mobilis
  misc_feature (1)..(381): tr|A0A4R6WXN9|A0A4R6WXN9_9PROT Epoxyqueuosine reductase OS=Dongia mobilis OX=578943 GN=queG PE=3 SV=1
MPVPGQAAGSSRDPAAIRAALRAQALAEGFDAVGFAPAALADATRENLAQFLKEGRHGGMGWLAEKADRRGDPRVLWPDARSIMVLGLNYGPDEDPLSVLAQKDRAGISVYARHRDYHDVVKKKLKRLGRWVAETYATEIKVFVDTAPVMEKPLAQAGGIGWQGKHTNLVSRELGSWLFLGEIYLALDLPSDAPEIDHCGSCRACLDACPTGAFPAPYQLDARRCISYLTIEHAGPIPRDFRRAMGNRIYGCDDCLAVCPWNKFAAIASEAQLAARDDLRAPALADLVALDDAGFRALFSGSPIKRIGRDRFIRNVLIAIANSGEPALLPAVERLLGDASPIVRGAAIWALRQLAPARWSAMAQAAIPFEHDSSARSEWLA

SEQ ID NO: 76388 - protein, 228 aa, Dorea longicatena
  misc_feature (1)..(228): tr|A0A174HP03|A0A174HP03_9FIRM Epoxyqueuosine reductase OS=Dorea longicatena OX=88431 GN=queG PE=4 SV=1
MNPTKEFRDYMISQGAALVGIGDLTAVPSSDYPVGIAVAIPLPKHVIKDLQLAPTREYYKLYTTLNDKLNAIVTAGEKYLTGRGYQAYAQTTDRITVDSDNRSPLPHKTVATRAGLGWIGKNCLLVTPQYGSAVRISSLLTDAPLTCDAPVTRSQCGACHACVRYCPAHALKNTLWRSGMPREDIVSVSACYKKQREIMRKSTGIDTDLCGKCFAVCTYTKQYLKQKQ

SEQ ID NO: 76389 - protein, 230 aa, Dorea longicatena
  misc_feature (1)..(230): tr|A0A174NYF6|A0A174NYF6_9FIRM Epoxyqueuosine reductase OS=Dorea longicatena OX=88431 GN=queG PE=4 SV=1
MNPTKEFRDYLISQGAALVGIGDLTAVPSSDYPVGIAVAIPLPKHVIKGLQLAPTREYYELYNSLSDKLNTIVTAGAKYLTDKGYHAYARTTDQKMTDSDNCIPLSHQTIATRAGLGWIGKNNRLVTPQYGSAVRLSSLLTDAPLTCDTPVTHSQCGACHACVRSCPAHALKNTLWRPGISCENIIAISTCHKKCREIMQKSTGIDADLCGKCFAVCTYTRQYLKQCRDV

SEQ ID NO: 76390 - protein, 307 aa, Draconibacterium orientale
  misc_feature (1)..(307): tr|X5DFV9|X5DFV9_9BACT Epoxyqueuosine reductase OS=Drac onibacterium orientale OX=1168034 GN=queG PE=3 SV=1
MQQQLKQKIQSLGFLNHAILPVSFLEEEEPRLKTWLENNMHGEMGYMNRNIDKRLNPSLLVENAKTIIVVLLNYFPESTQEDPTAPVLSKYAYGTDYHFVMKDKLKDLLQFIQEEIAPCSGRPFVDSAPVLERSWAKKAGLGWVGKNSNLISPEHGSFFFIGELLIDIELPYDDPKLVRDHCGRCTKCIDACPTKAIVAERVVDARRCISYQTIEVRGEMDAGLKGQFENRVFGCDICQDVCPWNLKSEPHNEAGLKPHPKLLTLQKQDWETMERPLFNELFKNSAVKRTGYKGLLRNLKFLKDPGS

SEQ ID NO: 76391 - protein, 308 aa, Draconibacterium sediminis
  misc_feature (1)..(308): tr|A0A0D8JDI0|A0A0D8JDI0_9BACT Epoxyqueuosine reductase OS=Draconibacterium sediminis OX=1544798 GN=queG PE=3 SV=1
MLQQLKQKIQSLGFLDHAILPVSFLEEEETRLKTWLENDMHGEMGYMNRNIDKRLNPSLLVENAKTIIVVLLNYFPETTQDDPAAPVLSKYAYGTDYHFVMKDKLKELLQFIQEEIAPCSGRPFVDSAPVLERAWARKAGLGWVGKNSNLISPEHGSFFFIGELIIDTELPYDDPKLVRDHCGRCTKCIDSCPTKAIVAERVVDARKCISYQTIEVRGEMDSNLKGQFENRVFGCDICQDVCPWNLKSEPHNEAGLKPHPKLLTLQKQDWENMERPLFNELFKNSAVKRTGYKGLQRNLRFLGNDEEI

SEQ ID NO: 76392 - protein, 316 aa, Draconibacterium sp.
  misc_feature (1)..(316): tr|A0A2G6R9N9|A0A2G6R9N9_9BACT Epoxyqueuosine reductase OS=Draconibacterium sp. OX=1965318 GN=queG PE=3 SV=1
MQKAENTGQIIKNKARELGFCDCAILPVDVLTDEKSAYFNWLESGMQGEMSYMERNIDKRFDPALLFENAKTIIVALYNYFPGSRQDDEKAPIISKYAYGIDYHYVLKEKLGQLLTFIQTEIIECVGRPFADSAPVLERAWAKKAGLGWIGKNSNLINLKQGSFIFICELLLDVELPYDEPKEVTDHCGNCTRCIDACPTKAIVADRVVDARKCISYQTIEKRGELDKELLGKFENRVFGCDICQDVCPWNLKAKPTQEPGFNPGKELMSLTRQQWMNMDKDQFNRLFKKSAVKRAGYKGLKRNIEFISTWRVPSD

SEQ ID NO: 76393 - protein, 362 aa, Duganella phyllosphaerae
  misc_feature (1)..(362): tr|A0A1E7X613|A0A1E7X613_9BURK Epoxyqueuosine reductase OS=Duganella phyllosphaerae OX=762836 GN=queG PE=3 SV= 1
MSLSESNLAELAQRIKHWGVALGFAEIRITDIDLSHAEAGLQAWLDAGMHGEMDYMATHGMLRARPAELVPGTVRVISARMNYLPRDTENDWREREARRLADPGAAVISVYARGRDYHKVLRARLQQLADKVKAEIGDFGYRVFTDSAPLMELPLAEKAGLGWRGKHTLLLSRTAGSMFFMGEFLVDLPLPVDAPTSGHCGQCQACIVTCPTQAILGPGRLDARRCISYLTIELKNAIPLELRPLIGNRVYGCDDCQTACPWNKFAERAVLPDFDQRHGLGDASMIELFGWSAEEFNRKMEGSPIRRIGHERWLRNLAVGLGNAAAAGAKGDAAIVAALEARRDDPSPLVREHVQWALACHA

SEQ ID NO: 76394 - protein, 369 aa, Duganella sacchari
  misc_feature (1)..(369): tr|A0A1M7R8E2|A0A1M7R8E2_9BURK Epoxyqueuosine reductase OS=Duganella sacchari OX=551987 GN=queG PE=3 SV=1
MSLSETNLAELALSIKRWGVALGFAEIRITDVDLSHAEAGLQAWLDAGMHGEMDYMASHGMLRARPAELVPGTVRVVSARMNYLPRDTQTSGEHDWRAREAARLADPDAAVISVYARGRDYHKVLRARLQQLADKVKAEIGEFGYRVFTDSAPVMELPLAEKAGLGWRGKHTLLLSRTAGSMFFMGEFLVDLPLPIDEPTGAHCGQCSSCIMACPTQAILGPGRLDARRCISYLTIELKNAIPLEMRPLIGNRVYGCDDCQTACPWNKFAQPAVLPDFDERHGLGQASMVELFAWTDEEFNRKMEGSPIRRIGHERWLRNIAVGLGNAAAAGAKGDAAIVAALAARREHPSELVREHVEWALAQHRSAA

SEQ ID NO: 76395 - protein, 366 aa, Duganella sp.
  misc_feature (1)..(366): tr|A0A3E1RSD8|A0A3E1RSD8_9BURK Epoxyqueuosine reductase OS=Duganella sp. BJB475 OX=2233914 GN=queG PE=3 SV=1
MSLPVTNLAELALSIKRWGVELGFAEIRITDIDLSHAEAGLQAWLDAGMHGEMDYMATHGMMRARPAELVPGTIRVISARMNYLPRDTETGGDNDWREREARRLADPGAAVISVYARGRDYHKVLRARLQQLADKVKAEIGDFGYRVFTDSAPVMELPLAEKAGLGWRGKHTLLLSRTAGSMFFMGEFLVDLPLPVDEPTGRHCGQCSACIDICPTQAILGPGKLDARRCVSYLTIELKSAIPLEMRPLIGNRVYGCDDCQTACPWNKFAQRAVLPDFDERHGLGSASMVELFAWSEEEFNRKMEGSPIRRIGHERWLRNIAVGLGNAAAAGAKGDAAVVAALMARREHPSELVREHVEWALACHA

SEQ ID NO: 76396 - protein, 380 aa, Duganella sp.
  misc_feature (1)..(380): tr|A0A0Q8QHI8|A0A0Q8QHI8_9BURK Epoxyqueuosine reductase OS=Duganella sp. Root198D2 OX=1736489 GN=queG PE=3 SV= 1
MVWISPHCKAVSLSQANLDELASRIKAWGLELGFAEVRIADIDLSAAEAGLQAWLDAGMHGDMDYMASHGMKRARPAELVPGTVRVITARMNYLPGAADEGWRERETARLADPAQAVISVYARGRDYHKVLRARLQQLADKVSAAVGEFGYRVFTDSAPVMELPLAEKSGLGWRGKHTLLINRSAGSMFFMGEILVDLPLPVDEPTGAHCGQCTACIDICPTQAILGPGKLDARRCISYLTIEHKGAIPEELRPLLGNRVYGCDDCQTVCPWNKFAQRATLPDFDERHALGSAGMIELFAWTEEEFNRRMEGSPIRRIGHERWLRNLAVGLGNAARMGAKGDPAILAALQARCAHPSELVREHVKWAVLQHQQAGTEACS

SEQ ID NO: 76397 - protein, 334 aa, Duncaniella muris
  misc_feature (1)..(334): tr|A0A2V1ILI4|A0A2V1ILI4_9BACT tRNA epoxyqueuosine(34) reductase QueG OS=Duncaniella muris OX=2094150 GN=queG PE=4 SV=1
MTKAEIKELLAGAGVFRSAVAQVCQVDEASADDYRAWISEGKHGEMAYLEKYDDLRSDPRRLLDGARSVISCAFNYHWGNGGATADSSGGDLDGSRVMRPLLWAEYALGDDYHDVVRKRLSEVAEKISSATGAECRVCVDTAPLRERYWAVKTGLGFIGLNNQLILPGAGSRFFLGEILTTLPLEPDEPAAPGSCEGCGRCLKSCPGKALSAGADGRVTLDARRCLSYLTIEYRGELPEDVRLGRHVYGCDECQRVCPHNRVSPLSEIVEFRPREAVVALSAERIAEMTQEEFSAIFRRSAIKRTKLSGLQRNALRIIEEETRRRSREDDGQEG

SEQ ID NO: 76398 - protein, 334 aa, Duncaniella sp.
  misc_feature (1)..(334): tr|A0A4V1D275|A0A4V1D275_9BACT tRNA epoxyqueuosine(34) reductase QueG OS=Duncaniella sp. C9 OX=2530392 GN=queG PE=4 SV=1
MTKAEIKELLAGAGVFRSAVAQVCQVDEASADDYRAWISEGKHGEMAYLEKYDDLRSDPRRLLDGARSVISCAFNYHWGNGGATADSSGGDLDGSGVMRPLLWAEYALGDDYHDEVRKRLSEVAEKISSATGAECRVCVDTAPLRERYWAVKAGLGFIGLNNQLILPGAGSRFFLGEILTTLPLEPDEPAAPGSCEGCGCCLKACPGKALSAGADGRVTLDARRCLSYLTIEYRGELPEDVRLGRHVYGCDECQRVCPHNRVSPLSEIVEFRPREAVVALSAERIAEMTQEEFSAIFRRSAIKRTKLSGLQRNALRIIEEETRRRSREDDGQEE

SEQ ID NO: 76399 - protein, 300 aa, Duncaniella sp.
  misc_feature (1)..(300): tr|A0A4Z0V8B4|A0A4Z0V8B4_9BACT tRNA epoxyqueuosine(34) reductase QueG OS=Duncaniella sp. TLL-A3 OX=2530391 GN= queG PE=4 SV=1
MDSEDIKRLVTGTGAVAVGIAATAPVGLDAESLYLQWIAAGKHGGMSYLEKYQDVRRDPRLLLEGAESIIVAAFNYYNRDNGKLRWARYALGRDYHEEIRERLDAVATAITITSGAQCRVTVDTAPLRERYWAERAGVGFIGINNQLIVPGAGSWCVLGSIITTLPLDADTPSGRSCDGCMRCVRACPGRALDGKGGMDACKCLSYLTIEHRGEYDATPDRIYGCDVCQEVCPHNATAIPTEIGGFSPRAEILGLGCKDILEMEQSEFSRIFTHSAIKRTKLAGLQRNARMLNQGETQPE

SEQ ID NO: 76400 - protein, 315 aa, Dyadobacter fermentans
  misc_feature (1)..(315): tr|C6W6W4|C6W6W4_DYAFD Epoxyqueuosine reductase OS=Dyad obacter fermentans (strain ATCC 700827 / DSM 18053 / NS 114) OX=471854 GN=queG PE=3 SV=1
MTTADIVAQERSLFIKAKALEHGFDFCGISKAGFLENEAPRLEKWLSLNHHGAMGYMANHFDKRLDPTKLVEGAKSVISVLLNYYPEERLPEGDDDLKLSKYAYGTDYHYILKEKLAALLASIQEEVGEVNGRIFVDSAPVMDKVWAAKSGLGWVGKHSNLLNREMGSFFFIGEIICDLDLAPDSATGDYCGTCTKCIDACPTDAITGPFVVDGSKCISYFTIELKDAIPEEVQGKFSNWIFGCDICQDVCPWNRFARPHTTPEFNLPKQLSGFSNGNWQEITEEVFREIFRKSPVKRAKYAGLKRNIEFVISGE

SEQ ID NO: 76401 - protein, 313 aa, Dyadobacter jejuensis
  misc_feature (1)..(313): tr|A0A316B3J8|A0A316B3J8_9BACT Epoxyqueuosine reductase OS=Dyadobacter jejuensis OX=1082580 GN=queG PE=3 SV=1
MTHPDIVRQERSRIVKQKAQEIGFDFCGISKAEFLEQEAPRLEQWLDRAAHGQMHYMANHFDKRLDPRKLVDGARSVISVLLNYYPEHVRSEGPEDLKISKYAYGVDYHYVLKEKMAQLVEAIEVEIGEVQGRVFVDSAPVMDKAWAAKSGLGWIGKNANLINRSMGSFFFIGEIICDLELEPDGAIRDYCGNCTRCLDACPTDAISEPYVVDGNKCISYYTIELKEAIPEDAKGKFENWIFGCDVCQDVCPWNRFSSPHQTPGFTPSIAFMELTDADFIEITSEVFSKVFKNSPIKRTKFSGLKRNIGFVRD

SEQ ID NO: 76402 - protein, 315 aa, Dyadobacter jiangsuensis
  misc_feature (1)..(315): tr|A0A2P8G3Q1|A0A2P8G3Q1_9BACT Epoxyqueuosine reductase OS=Dyadobacter jiangsuensis OX=1591085 GN=queG PE=3 SV =1
MTAADIVRQERSRFIKAKALENGFDFCGISKAEFLESEAPRLEKWLSLNHHGAMAYMANHFDKRLDPTKLVEGAKSVISVLLNYYPEERLPEGDDDLKLSKYAYGTDYHYVLKEKLGALLTAIQDEVGEVNGRIFVDSAPVMDKVWAAKSGLGWIGKHSNLLNREMGSFFFIGEIICDLDLAPDSATGDYCGTCTKCIDACPTDAITGPFVVDGSKCISYYTIELKDAIPEDVRGKFSNWIFGCDVCQDVCPWNRFARPHTTPQFNLPQELAGFSNGDWQEITEEVFREIFRRSPVKRAKYAGLKRNIEFVISDG

SEQ ID NO: 76403 - protein, 315 aa, Dyadobacter koreensis
  misc_feature (1)..(315): tr|A0A1H6TDF9|A0A1H6TDF9_9BACT Epoxyqueuosine reductase OS=Dyadobacter koreensis OX=408657 GN=queG PE=3 SV=1
MTTEDLVRAERSQFIKSKAAEIGFDFCGISKAEFLEEEAPRLENWLNRNNHGAMSYMANHFDKRLDPRKLVEGAECVISVLLNYYPSERLPEGADDLKLSKYAYGKDYHFVLKEKLQLLLEAIQEEIGEVNGRIFVDSAPVMDKVWAAKSGLGWVGRHSNLLNRDMGSFFFIGEIICDLKLAYDGAIKDYCGTCTRCIDACPTDAITEPYVVDGSKCISYYTIELKDAIPEDVKGKFNNWIFGCDICQDVCPWNRFSQPTKIPEFSLSQELGAFKKNDWEEITEEIFRELFRRSPLKRTKYDGLKRNIDFLKPLQ

SEQ ID NO: 76404 - protein, 315 aa, Dyadobacter psychrophilus
  misc_feature (1)..(315): tr|A0A1T5C701|A0A1T5C701_9BACT Epoxyqueuosine reductase OS=Dyadobacter psychrophilus OX=651661 GN=queG PE=3 SV =1
MTTEDLVRQQRSQFIKARALENGFDFCGISKADFLEAEAPRLENWLNKNHHGAMGYMANHFDKRLDPRKLVDGAKSVISVLLNYYPEEKLPEGPDDLKLSKYAYGTDYHYVLKEKLGALLQAIQEEIGEVSGRIFVDSAPVMDKVWAAKSGLGWVGKHSNLLNRDMGSFFFIGEIICDLDLAYDGAVQDYCGTCTRCLDACPTDAITEPFVVDGSKCISYYTIELKEAIPQEAQGKFDNWIFGCDICQDVCPWNRFSKPHTTKEFTLPESLAGFTNNDWQEITEEVFRELFRRSPIKRTKFDGLKRNIEFVRSSK

SEQ ID NO: 76405 - protein, 315 aa, Dyadobacter soli
  misc_feature (1)..(315): tr|A0A1G7HA50|A0A1G7HA50_9BACT Epoxyqueuosine reductase OS=Dyadobacter soli OX=659014 GN=queG PE=3 SV=1
MTASDIVRQERSRFIKAKALECGFDFCGISKAEFLESEAPRLEKWLSLNHHGAMAYMANHFDKRLDPTKLVEGAKSVISVLLNYYPEERLPEGEDDLKLSKYAYGTDYHYILKEKLGALLTAIQEEVGEVNGRIFVDSAPVMDKVWAAKSGLGWIGKHSNLLNREMGSFFFIGEIICDLDLAPDSATGDYCGTCTKCIDACPTDAITGPFVVDGSKCISYYTIELKDAIPEDVKGKFNNWIFGCDVCQDVCPWNRFARPHTTEQFNLPKGLAGFSNGDWREITEEIFREIFRRSPVKRAKYAGLKRNIEFVITDE

SEQ ID NO: 76406 - protein, 315 aa, Dyadobacter sp.
  misc_feature (1)..(315): tr|A0A1Q3PFA8|A0A1Q3PFA8_9BACT Epoxyqueuosine reductase OS=Dyadobacter sp. 50-39 OX=1895756 GN=queG PE=3 SV=1
MTAADIVRQERSRFIKAKAIESGFDFCGISKAEFLESEAPRLEKWLSLNHHGAMAYMANHFDKRLDPTKLVEGVKSVISVLLNYYPEERLPEGDSDLKLSKYAYGTDYHYILKEKLGTLLTAIQQEIGEVNGRIFVDSAPVMDKVWAAKSGLGWVGKHSNLLNREMGSFFFIGEIICDLELAPDSATGDYCGTCTKCIDACPTDAITGPFVVDGSKCISYYTIELKDAIPEEVRGKFDNWIFGCDICQDVCPWNRFARPHTSPEFNLPAELKGFSNGDWREITEEVFREIFRRSPVKRAKYAGLKRNIEFVTTVE

SEQ ID NO: 76407 - protein, 315 aa, Dyadobacter sp.
  misc_feature (1)..(315): tr|A0A5B0FGC9|A0A5B0FGC9_9BACT Epoxyqueuosine reductase OS=Dyadobacter sp. UC 10 OX=2605428 GN=queG PE=3 SV=1
MTTADLVCQERSQFVKMKAREAGFDFCGISKAEFLKDEAPRLENWLKKGSNGAMGYMANHFDKRLDPTKLVEGAKSVISVLLNYYPEKRLPEGEEDLKISKYAYGTDYHIVLKEKLAALMLGISEEVGEVNGRVFTDSAPVMDKVWAAKSGLGWVGKHSNLLNRETGSFFFIGEIICDLELAPDGPVQDYCGTCTRCIDACPTDAITEPFVVDGSKCISYYTIELKDAIPEDVRGKFDNWIFGCDICQDVCPWNRFSRPHATPEFNLSETLSAFSKSDWQEITEEVFREIFKRSPVKRAKFDGLKRNIDFVISSK

SEQ ID NO: 76408 - protein, 356 aa, Dyella japonica
  misc_feature (1)..(356): tr|A0A075K9N7|A0A075K9N7_9GAMM Epoxyqueuosine reductase OS=Dyella japonica A8 OX=1217721 GN=queG PE=3 SV=1
MSSVSTSPADYATLALDIKRWARELGFADCGIAGTDLGEDELHLKRWLDDGHHGEMDYMARHGDKRSRPAELEPGTLRVISVRMDYIPPGTRNAWNVLHDAEAGYVARYALGRDYHKVMRNRLQKLAERIHGAIGDFGYRAFVDSAPVLEKALARNAGLGWIGKHTVLIHRSAGSYFFLGELYTNLPLPIDAPASAHCGSCRRCIDICPTQAIVAPYKLDARRCISYLTIELRGSIPEELREPMGNRIFGCDDCQLICPWNKFAQDATEPDFAPRHRLDGAKLVELFGWSEQEFLQRTEGMAIRRTGYEGWLRNIAVALGNAPHSDEVRQALQARADHPSAIVREHVAWALARQSA

SEQ ID NO: 76409 - protein, 356 aa, Dyella japonica
  misc_feature (1)..(356): tr|A0A0G9H7G2|A0A0G9H7G2_9GAMM Epoxyqueuosine reductase OS=Dyella japonica DSM 16301 OX=1440762 GN=queG PE=3 S V=1
MSSVAAPPADYAALALDIKRWALELGFADCGIAGTELGEDEVHLKRWLDDGHHGEMDYMARHGDKRSRPAELEPGTLRVVSVRMDYIPPGTRNAWNVLHDADAGYVARYALGRDYHKLMRNRLQKLAERIHGAIGDFGYRAFVDSAPVLEKALARNAGLGWIGKHTVLINRSAGSYFFLGELYTNLPLPVDAPASAHCGSCRRCIDICPTQAIVAPYKLDARRCISYLTIELRGSIPEELREPIGNRIFGCDDCQLICPWNKFAQDATEPDFAPRHRLDGAKLVELFGWSEQEFLQRTEGMAIRRTGYEGWLRNIAVALGNAPHSDEVRKALLARSDHPSEIVREHVAWALAKHPA

SEQ ID NO: 76410 - protein, 356 aa, Dyella jiangningensis
  misc_feature (1)..(356): tr|A0A328P4R9|A0A328P4R9_9GAMM Epoxyqueuosine reductase OS=Dyella jiangningensis OX=1379159 GN=queG PE=3 SV=1
MTAAPTTSTDYAALARDIKRWARELGFADVGIAGTDLGDDELHLKRWLDAGHHGEMDYMARHGDKRSRPGELEPGTVRVITVRMDYVPPGTRNAWNVLEDAEAGYVARYALGRDYHKLMRHRLQKLATRIHDAIGDFGYRAFVDSAPVLEKALARNAGLGWIGKHTVLINRRAGSYFFLGELYTDLPLPIDEPASAHCGSCRRCIDICPTQAIIAPYKLDARRCISYLTIELRGSIPEELRAPMGNRIFGCDDCQLICPWNKFAQDATEPDFAPRHQLDGAKLVELFAWSEQAFLQRTEGMAIRRTGYEGWLRNIAVALGNAPTSPDVLASLQSRANDASPIVREHVAWALARHNG

SEQ ID NO: 76411 - protein, 356 aa, Dyella jiangningensis
  misc_feature (1)..(356): tr|A0A023NPD6|A0A023NPD6_9GAMM Epoxyqueuosine reductase OS=Dyella jiangningensis OX=1379159 GN=queG PE=3 SV=1
MPASPTTSTDYAALARDIKRWARELGFADAGIAGTDLGDDELHLKRWLDAGYHGEMDYMARHGDKRSRPGELEPGTVRVITVRMDYVPPGTRNAWNVLEDAEAGYVARYALGRDYHKLMRNRLQKLATRIHDAIGDFGYRAFVDSAPVLEKALARNAGLGWIGKHTVLINRRAGSYFFLGELYTDLPLPIDEPASAHCGTCRRCIDICPTQAIIAPYKLDARRCISYLTIELRGSIPEELRAPMGNRIFGCDDCQLVCPWNKFAQDATEPDFAPRHQLDGAKLVELFAWSEQEFLQRTEGMAIRRTGYEGWLRNIAVALGNAPTSPDVMESLQSRANDASPIVREHVAWALARHIG

SEQ ID NO: 76412 - protein, 360 aa, Dyella marensis
  misc_feature (1)..(360): tr|A0A1I2CKB1|A0A1I2CKB1_9GAMM Epoxyqueuosine reductase OS=Dyella marensis OX=500610 GN=queG PE=3 SV=1
MTVMSSSSALAHDYAALAADIKRWARELGFADAGIAGIELGEDEQHLQRWLDDGHHGEMDYMARHGTKRSRPAELEPGTLRVISVRMDYIPPGTRNAWAVLEDADAGYVARYALGRDYHKLMRNRLQKLAERIHAQVGDFGYRAYVDSAPVLEKALGRNAGLGWIGKHTVLINRSAGSYFFLGELYTDLPLPVDEAATAHCGTCRRCIDICPTQAIVAPYRLDARRCISYLTIELKGSIPEALRAPMGNRIFGCDDCQLICPWNKFARDAAEPDFAPRHSLDGARLVELFAWSEEEFLRRTEGMAIRRTGYEGWLRNIAVALGNAPDSSEVIDALRSRAAHPSEVVREHVAWALARHQAT

SEQ ID NO: 76413 - protein, 357 aa, Dyella soli
  misc_feature (1)..(357): tr|A0A4R0YVL0|A0A4R0YVL0_9GAMM Epoxyqueuosine reductase OS=Dyella soli OX=522319 GN=queG PE=3 SV=1
MTAAPPAHDYAALARDIKRWARELGFADAGIAGTDLGEDEGHLKRWLDDGLHGEMDYMARHGTKRSRPAELEPGTARVISVRMDYVPPGTRNAWDVLDHPEEGYVARYALGRDYHKLMRNRLQKLAERIHAQVGDFGYRAYVDSAPVLEKALARNAGMGWIGKHTVLINRRAGSYFFLGELYTDLPLPIDEPASAHCGTCRKCIDICPTQAIVAPYRLDARRCISYLTIELKGSIPEDLRAPMGNRIFGCDDCQLICPWNKFAQDAQEPDFAPRHSLDGARLVELFAWSEEEFLRRTEGMAIRRTGYEGWLRNIAVALGNAPSGDAIIAALQARADSPSDVVSEHVAWALRRHGAAA

SEQ ID NO: 76414 - protein, 356 aa, Dyella soli
  misc_feature (1)..(356): tr|A0A4R0YUR4|A0A4R0YUR4_9GAMM Epoxyqueuosine reductase OS=Dyella soli OX=522319 GN=queG PE=3 SV=1
MPTAAHHATDYAALAADIRRWARELGFADAGIAGTDLTQDELHLKRWLDDGHHGEMEYMARHGDKRSRPAELEPGTLRVISVRMDYIPPGTRNAWNVLEDAEAGYVARYALGRDYHKLMRNRLQKLAERIHGAIGDFGYRAFVDSAPVLEKALARNAGLGWIGKHTVLINRHAGSYFFLGELYTDLPLPIDEPASAHCGSCRRCIDICPTQAIVGPYQLDARRCISYLTIELRGSIPEELRAPMGNRIFGCDDCQLICPWNKFAQDASEPDFAPRHSLDGARLVELFGWSEQEFLQRTEGMAIRRTGYEGWLRNIAVALGNAPPSDDVRQALLARADHPSAIVREHVAWALARHPS

SEQ ID NO: 76415 - protein, 356 aa, Dyella sp.
  misc_feature (1)..(356): tr|A0A1G7YTS3|A0A1G7YTS3_9GAMM Epoxyqueuosine reductase OS=Dyella sp. 333MFSha OX=1798240 GN=queG PE=3 SV=1
MPATTDTDYAALATDIKRWARELGFADVGIAGTDLGHDEAYLERWLADGHHGEMDYMARHGTRRSRPAELEPGTLRVVSVRMDYIPPGTANAWDVIHDGEKAYVARYALGRDYHKVMRNRLQKLAAKIGERIGDFGYRAYVDSAPVLEKALARNAGLGWIGKHTVLINKRAGSYFFLGELYTDLPLPVDEPASAHCGSCRRCIDICPTQAIVAPYRLDARKCISYLTIELKGSIPEELRAPIGNRVFGCDDCQLICPWNKFAQEATEPDFAPRHSLDGPRLIDLFAWSEQEFLSRTEGMAIRRTGYEGWLRNLAVGLGNAPTTDEVVAALRARTGDPSPVVREHVAWALGRHASAT

SEQ ID NO: 76416 - protein, 356 aa, Dyella sp.
  misc_feature (1)..(356): tr|A0A3M0FB93|A0A3M0FB93_9GAMM Epoxyqueuosine reductase OS=Dyella sp. YR388 OX=2135665 GN=queG PE=3 SV=1
MSSVAAPPADYAALALDIKRWAQELGFADCGIAGTELGEDEVHLKRWLDDGHHGEMDYMARHGDKRSRPAELEPGTLRVVSVRMDYIPPGTRNAWNVLGDAEAGYVARYALGRDYHKLMRNRLQKLAERIHGAIGDFGYRAFVDSAPVLEKALARNAGLGWIGKHTVLINRSAGSYFFLGELYTNLPLPVDAPASAHCGSCRRCIDICPTQAIVAPYKLDARRCISYLTIELRGSIPEELREPIGNRIFGCDDCQLICPWNKFAQDATEPDFAPRHRLDGAKLVELFGWSEQEFLQRTEGMAIRRTGYEGWLRNIAVALGNAPPSDEVRHALLARSDHPSEIVREHVAWALAKHPA

SEQ ID NO: 76417 - protein, 357 aa, Dyella thiooxydans
  misc_feature (1)..(357): tr|A0A160MZD2|A0A160MZD2_9GAMM Epoxyqueuosine reductase OS=Dyella thiooxydans OX=445710 GN=queG PE=3 SV=1
MQSPAPAIDYALLARSIKRWARDLGFADVGISGVDLAQDETHLQRWLADGHHGEMDYMARHGAKRSRPDELEPGTQRVISVRMDYAPPDIDRAWSVIEDGELGYISRYTLGRDYHKLLRQRLQRLADRIRAEIGDFGYRAYVDSAPVLEKALARNAGLGWIGKHTVLIHRRAGSYFFLGELYTDLPLPVDTPASEHCGSCRRCLDVCPTQAIVAPYRLDARRCISYLTIELKGSIPEELRAPMGNRIFGCDDCQLVCPWNKFAQATTEPDFAPRHQLDGSKLVELFAWTEEEFLQRTEGMAIRRTGYEGWLRNIAVALGNAPRSDAVRAALLARADHPSDLVREHVAWALTRQDEMR

SEQ ID NO: 76418 - protein, 310 aa, Dysgonamonadaceae bacterium
  misc_feature (1)..(310): tr|A0A2N4S6F8|A0A2N4S6F8_9BACT tRNA epoxyqueuosine(34) reductase QueG OS=Dysgonamonadaceae bacterium OX=206518 9 GN=queG PE=4 SV=1
MNFSDEIKQQALAIGFDACGICRAQDSEQGTYYRQWLSAGYQAGMDYLERNVDKRIDPRLLVPGAKSIVSVALNYFPSKFLPDDVPQFAYYAYGRDYHEVVRNKLALLFDFIRQYYPEVNGRFFCDSAPVLERYWAAKAGIGFIGKNTLLIIPGKGSYFFLGELILDLELEYDTPIPQNCGSCRRCIDACPTKAIEQPYVLNAGKCISYQTIENKGDIDAAIQPLLSNNVYGCDICQKVCPWNRFAKPNQTPDFLPSEEFLSLDLAKLQAMDEDSYRHIFCRSAVKRAKFSGLKRNVEAISKTRDNSLLL

SEQ ID NO: 76419 - protein, 274 aa, Dysgonomonas alginatilytica
  misc_feature (1)..(274): tr|A0A2V3PI17|A0A2V3PI17_9BACT Epoxyqueuosine reductase QueG OS=Dysgonomonas alginatilytica OX=1605892 GN=CLV6 2_1405 PE=4 SV=1
MEKKQTNANLKKQIVRKVKQSGIDVIGFATVDRWEQFGETPQSYFPQSIFPFSKTVIVLGLQIMIPILDTTPSIVYSELYNTTNRLLDDVSYQLSALLNRKGHRAVFFPRDAYGDISVLVKKPEAAFSHVLAAKYAGLGTIGYNHTLLTKEFGPRVRLVSILTDAEIEPDNMLEKELCIKCELCKKCCPTSAFTTTDNLIADMDKYKCAAYHKTLKDDYHYPCGVCIKVCPIGKDRKLYGMTTKKYLNEKEALEKNPQNEQYSSWVHLRSFGSK

SEQ ID NO: 76420 - protein, 220 aa, Dysgonomonas alginatilytica
  misc_feature (1)..(220): tr|A0A2V3PKN5|A0A2V3PKN5_9BACT Epoxyqueuosine reductase QueG OS=Dysgonomonas alginatilytica OX=1605892 GN=CLV6 2_14016 PE=4 SV=1
MDKKTVKELAKSLGADLVGVAATDRFVDSPAGHSPVDKFPVCKSVIVLGCTFPQETLKLDTVSYTTVRNRMVEKLDSLAEQLATELKKRKIRTKAIKSASGRFVDGGFYGTISLKHAGELAGLGIIGRNYLLCNEKYGNLLWLGAVLTDLELESDSLLNYNFCGNCSLCIDTCPSSAIDGKGNIDQNACRRTCYIVTKGVLDLKCWRCREVCPHKFGFKQ

SEQ ID NO: 76421 - protein, 312 aa, Dysgonomonas capnocytophagoides
  misc_feature (1)..(312): tr|A0A4Y8L6M0|A0A4Y8L6M0_9BACT Epoxyqueuosine reductase OS=Dysgonomonas capnocytophagoides OX=45254 GN=queG PE =3 SV=1
MSAEISYSDKIKEHALSLGFDACGVCRAEPVENEEKVRLERWIADGYQADMDYLARNTEKRIDPTKLVEGARSIISLALNYYPQERQAEDAPQFAFYAYGKDYHEVMKEKLNQLFDFIKTLVPDVQGRVFSDTAPVMERYWAVKAGLGFIGKNTLLIIPKKGSYFFLGEIMIDRELDYDSPLSLSCGKCTRCLDACPTNALEKPHLLNANKCISYQTIENKGEIAESIKPLLNNRMYGCDICQLVCPWNRYARPHRTEEFNPKAEFLSLDYDSMANMQVEDYQRIFKGSAVKRAKYSGLMRNIKALANNKKL

SEQ ID NO: 76422 - protein, 307 aa, Dysgonomonas gadei
  misc_feature (1)..(307): tr|F5J0Y2|F5J0Y2_9BACT Uncharacterized protein OS=Dysgo nomonas gadei ATCC BAA-286 OX=742766 GN=HMPREF9455_0299 9 PE=4 SV=1
MITSAQIKEYALTLGFDACGICRAEEVDLENQEGYKNWIDNSFYAGMDYMARNEDKRCNPALLVEDARSIVCVALNYYPGTKSPEENPQFAYYAYGKDYHDVVKAKLQQLFDFIKSLNPSAEGRSFVDTAPVLERYWAAKAGLGFIGKNSLLIIPKRGSYFFLGELILNLDLEYDKPLSLSCGNCTRCLDACPTKAIVAPRVVDANKCISYQTIENKGEIDETIVPNLNNRFYGCDICQQVCPWNRYSRPHKTEEFNPSQAFLDLSLERLDNLNVEEYQIIFKGSAVKRAKYSGLKRNLEALKRSKK

SEQ ID NO: 76423 - protein, 312 aa, Dysgonomonas macrotermitis
  misc_feature (1)..(312): tr|A0A1M5CB79|A0A1M5CB79_9BACT Epoxyqueuosine reductase OS=Dysgonomonas macrotermitis OX=1346286 GN=queG PE=3 SV=1
MNKAAYSTEIKEYALSLGFDACGICRAEPIGDTDKSHLDKWIEDGYQADMDYLAHNTDKRINPTLLVDGAKSIISVALNYYPHERQSEAAPQFAYYAYGKDYHDVMKDKLGKLFSFIKSLLPDTQGRIFCDTAPVMERYWAAKAGLGFIGKNTLLIIPKKGSYFFLGEVILDQELEYDKPLDLSCGKCTRCLEACPTGAIEKPHLLNARKCISYQTIENKGEIDDTIKPLLNNRMYGCDICQQVCPWNRYSKPHRTEEFTPHPEFLAMDYKSLQEMEVGDYQRIFKGSAVKRAKYNGLIRNIKALTENRDQI

SEQ ID NO: 76424 - protein, 311 aa, Dysgonomonas mossii
  misc_feature (1)..(311): tr|A0A4Y9IQ71|A0A4Y9IQ71_9BACT Epoxyqueuosine reductase OS=Dysgonomonas mossii OX=163665 GN=queG PE=3 SV=1
MLANKDISLQIKDYAYSLGFDACGICKAEPIEVEEQQHFKDWLSHSYHADMDYMARNTEKRCNPTLLVEGSCSVISVALNYYPETKQPQENPQFAYYAYGKDYHDVVKSKLQMLLDYIKSLEPAAEGRAFVDTAPILERYWAAKAGLGFIGKNSLLIIPKKGSYFFLGELIINLELTYDTPLNLSCGNCTRCLDACPTSAIVKPRVVNASKCISYQTIENRGEIDEQVIPKMNNRFYGCDICQQVCPWNRYSRPHQTAEFNPSQSFLDLSFDRLDNLSVEDYQKIFKGSAVKRAKFTGLKRNLEALRQNLK

SEQ ID NO: 76425 - protein, 311 aa, Dysgonomonas mossii
  misc_feature (1)..(311): tr|F8WY27|F8WY27_9BACT Epoxyqueuosine reductase OS=Dysg onomonas mossii DSM 22836 OX=742767 GN=queG PE=3 SV=1
MLATQDISRQIKDYAYSLGFDACGICKAEPIEVEEQQHFKDWISDSYHADMDYMARNTEKRCDPTLLVEGSRSVISVALNYYPETKQPQENPQFAYYAYGKDYHDVVKSKLQTLLDYIKSLEPTTEGRAFVDTAPILERYWAAKAGLGFIGKNSLLIIPKKGSYFFLGELIINLELTYDTPLDLSCGNCTRCLDACPTAAIVKPRVVNASKCISYQTIENRGEIDEQVIPKMNNRFYGCDICQQVCPWNRYSQPHQTEEFNPSQAFLDLSFDRLDKLSVEDYQKIFKGSAVKRAKFTGLKRNLEALRQNMK

SEQ ID NO: 76426 - protein, 308 aa, Dysgonomonas sp.
  misc_feature (1)..(308): tr|A0A3D3TIK4|A0A3D3TIK4_9BACT tRNA epoxyqueuosine(34) reductase QueG OS=Dysgonomonas sp. OX=1891233 GN=queG P E=4 SV=1
MSLSEQIKQYAFSVGFDAVGICRMEEVDSLTGSHLRGWLKKGYQADMDYLSRNVDKRLNPGLLVEGAKSVICIALNYYPAEKQPETVPQFAYYAYGKDYHEVVKNKLYRLYDFIQSICPQAEGRVFVDTAPVLERYWAAKAGIGFIGKNTMLIMPGKGSFYFLGEIIVNIELEYDKPLSVSCGKCERCQTACPTGAFDTAYCLNSHKCISYQTIENKGDIYKNIIPYMGNNFYGCDICQKVCPFNRFAAPNKVEEFSPSDEFLSLDQNAVGNMTEEDYRRIFKGSAVKRAKFSGLMRNLKALNSKRID

SEQ ID NO: 76427 - protein, 311 aa, Dysgonomonas sp.
  misc_feature (1)..(311): tr|A0A1M3L4A5|A0A1M3L4A5_9BACT Epoxyqueuosine reductase OS=Dysgonomonas sp. 37-18 OX=1895907 GN=queG PE=3 SV=1
MLANEDISRKIKDYAYSLGFDACGICKAEPIEVEEQQHFKDWINHSYHADMDYMARNTEKRCNPTLLVEGSRSVISVALNYYPEAKQPQENPQFAYYAYGKDYHDVVKNKLQMLLDYIKSLEPTTEGRAFVDTAPILERYWAAKAGLGFIGKNSLLIIPKKGSYFFLGELIINLELTYDTPLNLSCGNCTRCLDACPTSAIVKPGVVNASKCISYQTIENRGEIDEHVIPKMNNRFYGCDICQQVCPWNRYSRPHRTAEFNPSQSFLDLSFDRLDNLSVEDYQKIFKGSAVKRAKFTGLKRNLEALRQNLK

SEQ ID NO: 76428 - protein, 325 aa, Echinicola sp.
  misc_feature (1)..(325): tr|A0A514CEQ8|A0A514CEQ8_9BACT Epoxyqueuosine reductase OS=Echinicola sp. LN3S3 OX=2591634 GN=queG PE=3 SV=1
MSAMIQEDKHAAIIKRLARELGFDFCGIAKAGFLEEEAPRLEAWLNNHYHGKMAYMANHFDKRLDPTKLVEGATIVVSLIYNYFPEKKLPEGEKDYKIAKYAYGKDYHFVIKDKLKEYLYRLKEEVGDVEGRAFVDSAPVMERQWAEKAGLGWRGKNSLLLNRNMGSFFFIAELIIDLKATPDDPVTKDYCGSCTRCMDACPTDAIVQPGVVDGSSCISYFTIELKDELPSSMKDKFANWMFGCDICQDVCPWNRFSRPHQEPEFLPHPEMEEMSKRDWEEITQETFSKVFQKSAVKRTKLTGLRRNVRFLKESNKEITNGQVED

SEQ ID NO: 76429 - protein, 313 aa, Echinicola strongylocentroti
  misc_feature (1)..(313): tr|A0A2Z4IJ32|A0A2Z4IJ32_9BACT Epoxyqueuosine reductase OS=Echinicola strongylocentroti OX=1795355 GN=queG PE= 3 SV=1
MMQEDNNAATIKQLAQELGFEFCGIAEAGFLEEEAPRLEAWLNRNYHGEMAYMANHFDKRLDPTKLVDGAKTVVSLVYNYYPEKKLPEGDKELKIAKYAYGKDYHFVIKDKLKSFLNRLKEEIGDVGGRAFVDSAPVMERQWAQKSGLGWQGKNSLLLNRKMGSFFFLAELIIDLKATPDNPVTKDYCGSCTRCIDACPTDAIVQPGVVDGSRCISYFTIELKEELPTSMKGKFENWMFGCDICQDVCPWNRFSQPHQEPEFLPHPELEEMTRRDWEEITQETFSKVFQKSAVKRTKLKGLQRNIRFLNDDNT

SEQ ID NO: 76430 - protein, 319 aa, Echinicola vietnamensis
  misc_feature (1)..(319): tr|L0FUX8|L0FUX8_ECHVK Epoxyqueuosine reductase OS=Echi nicola vietnamensis (strain DSM 17526 / LMG 23754 / KMM 6221) OX=926556 GN=queG PE=3 SV=1
MSAMIQKDKHAAIIKRLASALGFTYCGIAKAGFLEEEAPRLEAWLNSKYHGEMAYMANHFDKRLDPTKLVEGAKTVVSLIYNYYPEKKLPEGADDYKIAKYAYGKDYHFVIKDKLKEFLYRLREAVGDVEGRAFVDSAPVMERQWAEKAGLGWRGKNSLLLNRDMGSFFFLAELIIDLEATADDPVTKDYCGTCTRCMDACPTDAIVQPGVVDGSRCISYFTIELKDELPASMKGKFANWMFGCDICQDVCPWNRFSTPHQEPQFQPNPEIAEMTKRDWEEITQETFSKVFQKSAVKRTKLSGLKRNIRFLDDAEGNKE

SEQ ID NO: 76431 - protein, 376 aa, Ectothiorhodosinus mongolicus
  misc_feature (1)..(376): tr|A0A1R3W3I1|A0A1R3W3I1_9GAMM Epoxyqueuosine reductase OS=Ectothiorhodosinus mongolicus OX=233100 GN=queG PE= 3 SV=1
MQHAHNTQDMQALAEQIRQWGRELGFDAVGFCDTDLSAHEQHLLNWLDQGRHGDMQYMARHGTKRSRPEELIPGTLRIISLRMQYFPTAAREPWSVIEDSELAFVSRYALGRDYHKLMRQRLQQLADRIEAVVGPFGYRAFVDSGPVLEKALAEKAGLGWIGKHTNLLSREWGSWFFLGELFTDLPLPLDPAGTEHCGTCNACIEICPTQAIVAPFELDARRCISYLTIENRGSIPEALRPMMGNRIYGCDDCQLVCPWNRRAKLGVEPSFQARHGLDDVALIDLFAWDEATFLKRTEGSAIRRIGHECWLRNIAVALGNAPSTPAVIAALRSRQDHPSELVREHVAWALARHEASADAHSGASSGPDSGTAQASG

SEQ ID NO: 76432 - protein, 354 aa, Ectothiorhodospira haloalkaliphila
  misc_feature (1)..(354): tr|W8KS74|W8KS74_9GAMM Epoxyqueuosine reductase OS=Ecto thiorhodospira haloalkaliphila OX=421628 GN=queG PE=3 S V=1
MPLPPHISPQSLANQIRNWGQALGFDAVGISDTALGEHETHLINWLERGRHGTMDYMQRHGTLRSRPAELVPGTLRIISVRMQYLPARARDAWEVLEQPEAAFITRYALGRDYHKLMRRRLQTLATRIEEAIGPFGYRAFVDSAPVLEKALAEKAGLGWIGKHTNLLSREAGSWFFLGELYTDLPLPVDPPGSEHCGRCRACMDACPTGAIVAPFELDARLCISYLTIEHSGSIPEPLRPLLGNRIYGCDDCQLVCPWNRRAALGVEPDFEARHGLDDVSLVDLFAWDEATFLKRTEGSAIRRIGHERWLRNLAVALGNAGPSGEVVAALEARAGHPSELVREHVAWGLERQAK

SEQ ID NO: 76433 - protein, 374 aa, Ectothiorhodospira magna
  misc_feature (1)..(374): tr|A0A1H9F4Z5|A0A1H9F4Z5_9GAMM Epoxyqueuosine reductase OS=Ectothiorhodospira magna OX=867345 GN=queG PE=3 SV= 1
MFRGRRHKNRAACAAPADLPARVGEGSRGFLLSQRIKTWALELGFDRAGICDTDLTTHEAHLLRWLDQGRHGEMDYMARHGTRRSRPEALVPGTLRIISVRMAYWPPQTRDAGSVLHDSESAFITRYALGRDYHKVMRKRLQTLAERIESVTGPFGYRAFVDSAPVLEKALAEKAGLGWIGKHTNLLSRHHGSWYFLGELYTDLPLPLDTPERSHCGRCRACLDACPTGAIVAPYELDARRCISYLTIEHPGSIPEPLRPLMGNRIYGCDDCQRVCPWNRRAKVAVEPDFRARHGLDDVSLVTLFHWDEPTFLRLTEGSVIRRIGHERWLRNLAVGLGNARPSPTIREALMKQLEHPSTWVREHVRWALDRQGQ

SEQ ID NO: 76434 - protein, 354 aa, Ectothiorhodospira marina
  misc_feature (1)..(354): tr|A0A1H7PSS1|A0A1H7PSS1_9GAMM Epoxyqueuosine reductase OS=Ectothiorhodospira marina OX=1396821 GN=queG PE=3 S V=1
MPIPPHLSPQTLADQVKTWGQALGFDAVGITDTDLSAHEAHLLNWLAQGRHGTMNYMERHGTLRARPPELVPGTLRIISVRMPYLPAGARDAWEVLEQSEAAFITRYALGRDYHKLMRRRLQSLATRMEEAIGPFGYRAFVDSAPVLEKALAEKAGLGWIGKHTNLLSREAGSWFFLGELYTDLPLPVDPPGAEHCGRCRACMDVCPTGAIVAPFELDARLCISYLTIEHPGPIPEPLRPLMGNRIYGCDDCQLVCPWNRRAALGAEPDFEARHGLDDVSLVELFAWDEATFLKRTEGSAIRRIGHERWLRNLAVALGNAGPSREVTAALEARAGHPSELVREHVRWALERLAK

SEQ ID NO: 76435 - protein, 354 aa, Ectothiorhodospira mobilis
  misc_feature (1)..(354): tr|A0A1I4QSJ0|A0A1I4QSJ0_ECTMO Epoxyqueuosine reductase OS=Ectothiorhodospira mobilis OX=195064 GN=queG PE=3 S V=1
MDTPDPALQQLAHDIKAWGAELGFDQVGITDTDLAEDEAHLLRWLQAGRHGDMDYMARHGSKRSRPGELVPGTRRIISVRMQYLPPRARDARAVMHDPGAAFLSRYALGRDYHKVLRKRLQTLATRMEAAIGPFGYRAFVDSAPVLEKALAQKAGLGWIGKHTNLLSRRWGSWYFLGELYTDLPLPVDPPGSAHCGSCRACLDACPTGAIVAPWELDARRCISYLTIEHPGPIPEDLRPLMGNRIYGCDDCQLVCPWNRRAAHTRERDFCVRHGLDDPEAIALFAWDEATFLERTAGTVIRRLGHERWLRNLAVALGNAPTGPEVIRALEARRHHPSPLVREHVHWALWRHGAG

SEQ ID NO: 76436 - protein, 354 aa, Ectothiorhodospira sp.
  misc_feature (1)..(354): tr|A0A161HFK2|A0A161HFK2_9GAMM Epoxyqueuosine reductase OS=Ectothiorhodospira sp. BSL-9 OX=1442136 GN=queG PE= 3 SV=1
MPLPPHISPQSLATQIRNWGRAMGFDAVGISDTDLGEHETHLINWLEQGRHGTMEYMERHGTLRSRPEELVPGTLRIISVRMQYLPARARDAWEVLERPEAAFITRYALGRDYHKLMRRRLQTLASHIEETIGPFGYRAFVDSAPVLEKALAEKAGLGWIGKHTNLLSREAGSWFFLGELYTDLPLPVDPPGSEHCGRCRACMDVCPTGAIVAPFELDARLCISYLTIEHAGSIPEPLRPLLGNRIYGCDDCQLVCPWNRRAALGVEPDFEARHGLDDVSLVDLFAWDEATFLKRTEGSAIRRIGHERWLRNLAVALGNAAPSGEVVTALEARAGHPSERVREHVRWALERQTK

SEQ ID NO: 76437 - protein, 351 aa, Ectothiorhodospira sp.
  misc_feature (1)..(351): tr|H1FZX2|H1FZX2_9GAMM Epoxyqueuosine reductase OS=Ecto thiorhodospira sp. PHS-1 OX=519989 GN=queG PE=3 SV=1
MTTTDLLALTQRIKTWALELGFDRAGICDTDLAVHEAHLLRWLDQGRHGEMDYMARHGTRRSRPEALVPGTLRIISVRMAYWPPRTRDAGSVLDDPEAAFISRYALGRDYHKVIRKRLQTLAERIESVTGPFGYRAFVDSAPVLEKALAEKAGLGWIGKHTNLLSRHHGSWYFLGELYTDLPLPLDEPERSHCGRCRACLDVCPTAAIVAPYELDARRCISYLTIEHPGNIPEPLRPLMGNRIYGCDDCQLVCPWNRRAGVAVEPDFRARHGLDDIDLVTLFDWDEPTFLRLTEGSVIRRIGHERWLRNLAVGLGNARPSPTVREALTRRLEHPSACVREHVRWALDRHGQ

SEQ ID NO: 76438 - protein, 361 aa, Ectothiorhodospiraceae bacterium
  misc_feature (1)..(361): tr|A0A2A4WV30|A0A2A4WV30_9GAMM Epoxyqueuosine reductase OS=Ectothiorhodospiraceae bacterium OX=2026737 GN=queG PE=3 SV=1
  misc_feature (170)..(170): Xaa can be any naturally occurring amino acid
MTNIAKKTPNWANLAADILQWGQELGFQKLGISDTHLDEAEAHLLNWLREGKHGRMDYMARHGTKRSRPDELEPGTVSVISARLDYLPPQSADPDAILADPDKAYISRYALGRDYHKVLRHRMQKLATRIEQAIGPFGYRVFTDSAPVLEKALAEKAGLGWIGKHSNLLXEQTGSWFFLGEIYTDLPLPTSLPANTKTTNHCGTCTACIDACPTRAIIAPYKVDARLCISYLTIELREAIPVELRPLIGNRIYGCDDCQLVCPWNRFAQPTPETDFLPRHALDDISLLELFAWSEAQFLKRTEGSPIRRIGHECWMRNIAVALGNAPRSEAVITALKNQQQHASPLVREHVIWALEQQSNK

SEQ ID NO: 76439 - protein, 361 aa, Ectothiorhodospiraceae bacterium
  misc_feature (1)..(361): tr|A0A2A4Y4B6|A0A2A4Y4B6_9GAMM Epoxyqueuosine reductase OS=Ectothiorhodospiraceae bacterium OX=2026737 GN=queG PE=3 SV=1
MTNIAKKTPNWANLAADILQWGQELGFQKLGISDTHLDEAEAHLLNWLREGKHGRMDYMARHGTKRSRPDELEPGTVSVISARLDYLPPQSADPDAILADPDKAYISRYALGRDYHKVLRHRMQKLATRIEQAIGPFGYRVFTDSAPVLEKALAEKAGLGWIGKHSNLLAEQTGSWFFLGEIYTDLPLPTSLPANTKTTNHCGTCTACIDACPTRAIIAPYKVDARLCISYLTIELREAIPVELRPLIGNRIYGCDDCQLVCPWNRFAQPTPETDFLPRHALDDISLLELFAWSEAQFLKRTEGSPIRRIGHECWMRNIAVALGNAPRSEAVITALKNQQQHASPLVREHVIWALEQQSNK

SEQ ID NO: 76440 - protein, 384 aa, Edaphobacillus lindanitolerans
  misc_feature (1)..(384): tr|A0A1U7PQ20|A0A1U7PQ20_9BACI Epoxyqueuosine reductase OS=Edaphobacillus lindanitolerans OX=550447 GN=SAMN054 28946_2502 PE=4 SV=1
METAQLQREIREFAVSAGIDKIGFTTADPFLEMKNRLRRQQESGFQSGFEKGTPDERTDPSMLMDRPESIIAIAVAYPSKMDNPPKGKKGGRRGMFCRASWGQDYHDVLREKLALLESFILERCPGARLKSMVDTGELVDRAVAERAGIGWSGKNCSIITPEFGSYVYLGEMITNIPFAPDEPIEDGCGDCTLCLDICPTGALIEGGRLNAQRCIAFLTQTKGSLPEEFRTEIGNRVYGCDTCQTICPKNKGRHNRFHAAFEPEPELAKPLLTPLLSLSNREFKERFGHMSGSWRGKNPIQRNAIYALGHFREEAAVPELVRILREDARPYMRGAAAYALGKIASDEAITALGHAETAETDAEALEEIRAAIRNIEDMQKEVPK

SEQ ID NO: 76441 - protein, 373 aa, Edaphobacter aggregans
  misc_feature (1)..(373): tr|A0A428MNT9|A0A428MNT9_9BACT Epoxyqueuosine reductase OS=Edaphobacter aggregans OX=570835 GN=EDE15_4114 PE=4 SV=1
MSGEWTPEGEAWMRELAMEVGFDAAGVAPIIGTSDGERLDAVRFEAWVEGGRAGEMEYLKRRDERGVLLRSGVQVAMPWARSVIVCALNYNSAAPLSIDGAEDGTGWIARYAWSGKDSESGLLPTDYHNELLGRLRSVEDALRQRYDCETRCYVDTGPLVERSVAAKAGVGWIGKNICLLNQELGSWLLLGVIVTSLRVGEGTNFEVAADRCGSCTRCIDACPTGALVAPREMDATRCIAYLTIEKKGAIPEDLREGMGRQVFGCDICQDVCPWNRRAPVAVKEGMLARPELVNPELEWLAGMDAAEFKRWFKGSPIERTRKKRLHRNVAIAMGNSRDERFLSQLEVWSTCEDPVLAESAVWAIGQILHRDGA

SEQ ID NO: 76442 - protein, 386 aa, Edaphobacter dinghuensis
  misc_feature (1)..(386): tr|A0A495BQI8|A0A495BQI8_9BACT Epoxyqueuosine reductase OS=Edaphobacter dinghuensis OX=1560005 GN=C8E94_0784 P E=4 SV=1
MGECVTGLWATGFRDWVKARAVEAGFDTAGVAPVYGAQSEMGRVDAERFEDWVDAGRAGEMEYLKRRNEQGILLRSGVEVAMPWARSVVVCAVNYNGDGPLSVEPAKKDAGWIARYAWSGRTVGDHLMPSDYHDEMLGRLRGVEAALQERYACETKCYVDTGPLVERAAAAKAGVGWIGKNTCVLNQRLGSWLLLGVIVTSLEVREGEELQVAADRCGSCTRCIDACPTNALVGPREMDASRCIAYLTIEKKGAITEELREGMGRQVFGCDICQDVCPWNRKAPVAGKEGMLTRREMVNPALEWLAGMDAAEFRRWFKGSPVERTRRKRLHRNVAIAMGNSGEARFVPQLEIWSAGEDEVLAESAGWALGRIRVLAEERKEKAGLC

SEQ ID NO: 76443 - protein, 376 aa, Edaphobacter modestus
  misc_feature (1)..(376): tr|A0A4Q7YQT0|A0A4Q7YQT0_9BACT Epoxyqueuosine reductase OS=Edaphobacter modestus OX=388466 GN=BDD14_1442 PE=4 SV=1
MSVAWTPELAAWIEKQALETGFDAAGVAPVPEAGSAVAERDAGRFSSWVEAGRAGEMEYLKRRGEDGILVRSAVRAAMPWARSVIVCALNYNAAAPPSIAPAPTGAGWIARYAWSGRTLDNGETVPTDYHEELLGRLHKLEALLKERIPAETRCYVDTGPLVERSMAAHSGLGWIGKNTCVIHQQLGSWLLLGVIVTSISVAPHAVPELATDRCGTCTRCIDACPTEALVAPREMDASRCIAYLTIEKKGEIPEALRAGVGRQVFGCDICQDVCPWNRRAPIAVKQGMEARPELVNPALQWLASLDAAGFRKSFKGSPLERTRRKRLHRNVAIAMGNSHDKSFLSQLEAWTLSEDEVLAEGARWAIRQITESALHD

SEQ ID NO: 76444 - protein, 379 aa, Edwardsiella anguillarum
  misc_feature (1)..(379): tr|A0A076LJ26|A0A076LJ26_9GAMM Epoxyqueuosine reductase OS=Edwardsiella anguillarum ET080813 OX=667120 GN=queG PE=3 SV=1
MTHPLDLHQLAQHIKQWGLSLGFQQVGIGDTDLRAEEAPLQAWLDSGYHGDMAWMARHGMMRARPAELLPGTLRVISVRMNYLPPSAAFASTLKDPTLGYISRYALGRDYHKVLRARLKKLGEMIQAYCGELHFRPFVDSAPLLERPLAAKAGLGWTGKHSLLLNPQAGSWFFLGELLIDLPLPVDTPQAAQCGRCVACITTCPTDAIVAPYKVDARRCISYLTIELEGAIPEALRPLLGNRIYGCDDCQMICPWNRLAPLSEEADFLPRAALHAPSLTALFAWDETTFLRMTEGSPIRRIGYQRWLRNLSVALGNAPYDAHIVALLQQRLGISALLDDHIHWALAQQLQKRAAQAVEVVSSQQRRLIRAVEKGLPRDA

SEQ ID NO: 76445 - protein, 380 aa, Edwardsiella hoshinae
  misc_feature (1)..(380): tr|A0A376DLV1|A0A376DLV1_9GAMM Epoxyqueuosine reductase OS=Edwardsiella hoshinae OX=93378 GN=queG PE=3 SV=1
MTHPLDLHQLAQHIKQWGLSLGFQQVGIADTDLRVEEDRLQAWLDQGYHGEMAWMARHGMMRARPAELLPGTLRVISVRMNYLPPNAAFASTLNDPTRGYISRYALGRDYHKVLRGRLKQLGAMIQAHCGGALGFRPFVDSAPLLERPLAAKAGLGWNGKHSLLINPQAGSWFFLGELLVDLPLPVDTPQEAQCGRCVACMTTCPTGAIVAPYTVDARRCISYLTIEAEGAIPEALRPLLGNRIYGCDDCQMICPWNRLAPLSTEADFQPRAALHAATLTTLFAWDEATFLRMTEGSAIRRIGYQRWLRNLSVALGNAPYAAEIVELLTGRLGISPLIDEHIHWALAQQLAKRNALTVEVISNQQRRLIRAVEKGLPRDA

SEQ ID NO: 76446 - protein, 379 aa, Edwardsiella ictaluri
  misc_feature (1)..(379): tr|C5BDM5|C5BDM5_EDWI9 Epoxyqueuosine reductase OS=Edwa rdsiella ictaluri (strain 93-146) OX=634503 GN=queG PE= 3 SV=1
MTHPLDLHQLAQHIKQWGLSLGFQQVGIGDTDLRAEEAPLQAWLDSGYHGDMAWMARHGMMRARPAELLPGTLRVISVRMNYLPPSAAFASTLKDPTLGYISRYALGRDYHKVLRARLKKLGEMIQAYCGELRFRPFVDSAPLLERPLAAKAGLGWTGKHSLLLNPQAGSWFFLGELLIDLPLPVDTPQTAQCGRCVACITTCPTDAIVAPYKVDARRCISYLTIELEGAIPEALRPLLGNRIYGCDDCQMICPWNRLAPLSEEADFLPRAALHAPPLTILFAWDETTFLRMTEGSPIRRIGYQRWLRNLSVALGNAPYDAHIVTLLQQRLGVSALLDEHIHWALAQQLQKRAAQAVEVVSSQQRRLIRAVEKGLPRDA

SEQ ID NO: 76447 - protein, 379 aa, Edwardsiella piscicida; identical to SEQ ID NO: 76444
  misc_feature (1)..(379): tr|A0A034SZS5|A0A034SZS5_9GAMM Epoxyqueuosine reductase OS=Edwardsiella piscicida OX=1263550 GN=queG PE=3 SV=1

SEQ ID NO: 76448 - protein, 379 aa, Edwardsiella piscicida
  misc_feature (1)..(379): tr|A0A411H1E9|A0A411H1E9_9GAMM Epoxyqueuosine reductase OS=Edwardsiella piscicida OX=1263550 GN=queG PE=3 SV=1
MTHPLDLHQLAQHIKQWGLSLGFQQVGISDTDLRAEEAPLQAWLDSGYHGEMEWMARHGMMRARPDELLPGTLRVISVRMNYLPPSAAFASTLKDPTLGYISRYALGRDYHKVLRARLKKLGEMIQAYCGELHFRPFVDSAPLLERPLAAKAGLGWTGKHSLLLNPQAGSWFFLGELLIDLPLPVDTPQTAQCGRCVACITTCPTDAIVAPYKVDARRCISYLTIELEGPIPEALRPLLGNRIYGCDDCQMICPWNRLAPLSEEADFLPRAALHAPALTTLFAWDESTFLRMTEGSPIRRIGYQRWLRNLSVALGNAPYDAHIVTLLQQRLGISALLDEHIHWALAQQRQKRAAQAVEVISSQQRRLIRAVDKGLPRDA

SEQ ID NO: 76449 - protein, 380 aa, Edwardsiella tarda
  misc_feature (1)..(380): tr|A0A2A7U637|A0A2A7U637_EDWTA Epoxyqueuosine reductase OS=Edwardsiella tarda OX=636 GN=queG PE=3 SV=1
MTHPLDLHQLAQHIKQWGLSLGFQQVGIADTDLRLEEARLQAWLDQGYHGEMAWMARHGMMRARPAELLPGTLRVISVRMNYLPPHAAFASTLNDPMRGYISRYALGRDYHKVLRGRLKRLGEMIQAHCGGTLGFRPFVDSAPLLERPLAAKAGLGWSGKHSLLINPQAGSWFFLGELLVDLPLPIDTAQEAQCGRCVACMTTCPTGAIVAPYTVDARRCISYLTIEAEGAIPEDLRPLLGNRIYGCDDCQMICPWNRQAPLSEEADFRPRTALHAPALTTLFTWDEATFLRMTEGSPIRRIGYQRWLRNLSVALGNAPYTAEIVELLTRRLGISALIDEHIHWALAQQLAKRDAHNVEVISNQQRRLIRAVEKGLPRDA

SEQ ID NO: 76450 - protein, 380 aa, Edwardsiella tarda; identical to SEQ ID NO: 76449
  misc_feature (1)..(380): tr|D4F0L3|D4F0L3_EDWTA Epoxyqueuosine reductase OS=Edwa rdsiella tarda ATCC 23685 OX=500638 GN=queG PE=3 SV=1

SEQ ID NO: 76451 - protein, 390 aa, Effusibacillus lacus
  misc_feature (1)..(390): tr|A0A292YPS4|A0A292YPS4_9BACL tRNA epoxyqueuosine(34) reductase QueG OS=Effusibacillus lacus OX=1348429 GN=EF BL_3639 PE=4 SV=1
MPATTIQTAQWELTRQDMEEIREKLGIDMIGTTTAEPFHDVVETLKMYREKGYESGFEHPVIEERIDPEALVPGARSIVAIAMAYHTEQHAELKRPKGIRGALSKYAWGLDYHHVLRDKLNALAAEIGQRIGRPIAYNTSVDTGPMVDRSVANRAGLGWFGKHCSIITEKHGSWVFLGQLVTDVAIEPSPPAPTSLCGDCDLCIRACPTGALVDPYTTDSSKCLSYITQMKGFVPEEFRTRFGTRIWGCDTCQIVCPSNKGVEAGTHEGFLPDQDLSYPDLLELLKMSNREFKRIFGKTAAAWRGLTVMKRNAIIALGNIKDKRATPILIELLKDERPEIRGTAAWALGKIGGEEARRSVEKALSSETDRQVRHEMRWVNGDHVSGGNIL

SEQ ID NO: 76452 - protein, 368 aa, Effusibacillus lacus
  misc_feature (1)..(368): tr|A0A292YS28|A0A292YS28_9BACL Epoxyqueuosine reductase OS=Effusibacillus lacus OX=1348429 GN=EFBL_2951 PE=4 S V=1
MEPAALSLQQAAEERGFTVGWAPVDLPPSVLNRYHQWIVNGRQAGMGQLARNVEVRLAPRTRLAWARSVLVLAASHAFPDPGKPRGGMRIGRVGRVFWIREQDYIQRRVQPHLEELKEICHHLGGRCRDYVEQGPLSFRSYGELAGLGWIGRNGMLIHPQRGSFFTLAVLLTSFDVEAAPEHPFRCGHCINCISQCPTGALLEDGVVDANRCVSYWTTQHLDLIPVEVWEGMGRWVAGCDECQDVCPWTPKERKFWEGYEPDPELAYPDLSDFLTLSTQHFLNKYAQSAFERVGRPRMARNALIVLANTRDSSYLPLVRQGCVDPSPLVRATTARALVRIGGRKEVERLLSDPEPLVCEEARQALEYE

SEQ ID NO: 76453 - protein, 216 aa, Eggerthellaceae bacterium
  misc_feature (1)..(216): tr|A0A3C1DBN7|A0A3C1DBN7_9ACTN PBS lyase (Fragment) OS= Eggerthellaceae bacterium OX=1972561 GN=DCP91_05655 PE= 4 SV=1
QLVDRAIAARAGLVTYGRNNFAYADELGSFIVFVTIPVDAELECEVHEPRRGCPEGCRKCIDACPTHAMDDDGALDPTRCVLYSNFRPGERKDPAVTALIGQRVHGCDACQVACPRNAHVLAAPKAPDPYLDWLAGSFSLEDMLFCDEGYYEACIRPVMFNYIRDVDIFRQNAAIAMGNSGDARHLPALRRAVAEGSEQVRRFAQIAIEQIGQRMA

SEQ ID NO: 76454 - protein, 364 aa, Eilatimonas milleporae
  misc_feature (1)..(364): tr|A0A3M0BXW2|A0A3M0BXW2_9PROT Epoxyqueuosine reductase OS=Eilatimonas milleporae OX=911205 GN=queG PE=3 SV=1
MSHAAAPEQTHMPQAVHIRHKALALGFDDVGITRPDAISHAAEGLDAFLADGHHGSMEWMEARADQRANPTVLWPDARSVIVVAMNYGPDTDPRTLLTEKDHAVISVYARGKDYHDVLKKRLKALGRWMAAEFGCALKVFVDTAPVMEKPLAAAAGLGWQGKHTNLVSRSYGSWLFLGVIYTDMPLTGDTPHADRCGACRACLDSCPTKAFPAPYRLDARRCISYLTIEHKGPIPLEFRKAMGNRIYGCDDCLAACPWNKFARTANEAAFHARVELDAPRLDSLMMLDDAGFRQVFSGSPIKRIGRNRFVRNVLIAVGNSGDTSFLPKLEPLLTDDDPVVRETAVWARDQLLQTWSEAQNNESA

SEQ ID NO: 76455 - protein, 282 aa, Eisenbergiella tayi
  misc_feature (1)..(282): tr|A0A1E3ABT0|A0A1E3ABT0_9FIRM Epoxyqueuosine reductase OS=Eisenbergiella tayi OX=1432052 GN=queG PE=4 SV=1
MEITKKEIKERLYELGADLCGIAGVDRFGEAPEGYHPLDVLPSCQSVIVFACRFPAGTLACKTGVPYTVVRNILSDKMDKMAVQFCADMEKFHVLAVPLRTNGSEMDEKTGRWRSIVSAKHAAQAAGLGTIGRNTLLLTPEYGSMVWLSVILTELALEADELKADICNNCNLCVEICPVNALESPEMNQNACWDYAFGEVKGDWRISCHRCRDICPFLLGTENKAMNRENRSNCETDGKRIPVPSIYNAAEKICSLFPQISSLSSNLVNPYFSYNPFSPLTR

SEQ ID NO: 76456 - protein, 246 aa, Eisenbergiella tayi
  misc_feature (1)..(246): tr|A0A1E3AVG8|A0A1E3AVG8_9FIRM Epoxyqueuosine reductase OS=Eisenbergiella tayi OX=1432052 GN=queG PE=4 SV=1
MEITKKEIKERLYELGADLCGIAGVDRFGEAPEGYHPLDVLPSCQSVIVFACRFPAGTLACKTGVPYTVVRNILSDKMDKMAVQFCAEMEKFHVLAVPLRTNGSEMDEKTGRWRSIVSAKHAAQAAGLGTIGRNTLLLTLEYGSMVWLSVILTELALEADELKADICNNCNLCVEICPVNALESPEMNQNACWDYAFGEVKGDWRISCHRCRDICPFLLGTENKAMNRENRSNCETDGKRIPVPSI

SEQ ID NO: 76457 - protein, 304 aa, Ekhidna lutea
  misc_feature (1)..(304): tr|A0A239IXS6|A0A239IXS6_9BACT Epoxyqueuosine reductase OS=Ekhidna lutea OX=447679 GN=queG PE=3 SV=1
MNRKNLIKKLSSDLGFSFCGISKAEFLKEEAPKLEEWLNRGYQGKMGYLENHFDKRLDPTKLVPGAKSVVSLVYNYYPETNYSTKTPKFAKYAYGQDYHFIIKDKLKTFMSQIQEEIGEVNGRVFVDSAPVHERAWAAKSGIGWIGKNSLLLNREMGSFFFLAELIIDLELEPDGPMKDYCGTCTACQDACPTDAIPEPYVVDGSRCISYLTIELKDEIPNEFKSKMEGWAFGCDICQDVCPWNRFSKPHSEPAFKPQGWEELSKQDWQEMTKEVFQKVFKKSAVKRTKFEGLKRNLKFIQIGD

SEQ ID NO: 76458 - protein, 349 aa, Elioraea sp.
  misc_feature (1)..(349): tr|A0A541C5I8|A0A541C5I8_9PROT Epoxyqueuosine reductase OS=Elioraea sp. Yellowstone OX=2592070 GN=queG PE=3 SV =1
MAAADAKALIRAEAARLGFDAVGFTRASLPTEMRARLDAFLAAGRHGTMRWLAERAAQRAHPQALWPEAVSVIALGLSYAPARDPMETLARREVGTISVYARGRDYHDVVKGRLKQLGQFLHARFGADLKVFVDTAPVMEKPLAAQAGIGWQGKHTNLVSRRHGSWLFLGEIYTTLDLPPDPPHPDRCGSCRRCLDICPTDAFPAPYQLDATRCISYLTIEHDGPIPEGLRAAIGNRIYGCDDCLAVCPWNRFATAAREAKLHAREELNAPRLADLARLDDAAFRALFAGSPIKRSGRGRFVRNVLIAIGNSGDPALRPIAQDLAQDPDPVVAEAARWAAMRLAPETVP

SEQ ID NO: 76459 - protein, 311 aa, Elizabethkingia anophelis
  misc_feature (1)..(311): tr|X5K6F5|X5K6F5_9FLAO Epoxyqueuosine reductase OS=Eliz abethkingia anophelis OX=1117645 GN=queG PE=3 SV=1
MNLAEKNTAIIKQKAKDFGFLACGISKAEFLEEEARSLENWLTRNLNGEMRYMENYFDKRLDPRLLVEGSKSVISFSYNYFPRKVLNTDDNFKISKYAYGKDYHEVIKEILGEFVAELQQEIGEFGFRVFVDSAPVLERAWAKKSGIGWVGKNANLITKGEGSFYFLAEIICELELVPDTPVTDHCGKCRKCIEACPTDAILDNQIIDGSKCISYATIELKEEIPEHFHGKMQNWMFGCDICQDVCPWNRFSKPHQQPLFDPNESLQNFSKKEWKELTQEIFSEIFRKSPVKRTKYAGLKRNIDFLSDKNP

SEQ ID NO: 76460 - protein, 311 aa, Elizabethkingia anophelis
  misc_feature (1)..(311): tr|A0A290N8C8|A0A290N8C8_9FLAO Epoxyqueuosine reductase OS=Elizabethkingia anophelis R26 OX=1246994 GN=queG PE =3 SV=1
MNLAEKNTAIIKQKAKDFGFLACGISKAEFLEEEARSLENWLTRNLNGEMRYMENYFDKRLDPRLLVEGSKSVISFSYNYFPRKVLNTDDNFKISKYAYGKDYHEVIKEILGEFVAELQEEIGEFGFRVFVDSAPVLERAWAKKSGIGWVGKNANLITKGEGSFYFLAEIICELELVPDTPVTDHCGKCRKCIEACPTDAILDNQIIDGSKCISYATIELKEEIPEHFHGKMQNWMFGCDICQDVCPWNRFSKPHQQPLFDPNESLQNFSKKEWKELTQEIFSEIFRKSPVKRTKYAGLKRNIDFLSDKNP

SEQ ID NO: 76461 - protein, 311 aa, Elizabethkingia bruuniana
  misc_feature (1)..(311): tr|A0A5E8D067|A0A5E8D067_9FLAO Epoxyqueuosine reductase OS=Elizabethkingia bruuniana OX=1756149 GN=queG PE=3 S V=1
MNLAEKNTAIIKQKAKDFGFLACGISQAEFLEDEARSLENWLTRNLNGEMRYMENYFDKRLDPRLLVEGSKSVISFSYNYFPRKVLNTDDSFKISKYAYGKDYHEVIKEILGEFVAELQEEIGEFGFRVFVDSAPVLERAWAKKSGIGWVGKNANLITKGEGSFYFLAEIICELELVPDTPVTDHCGKCRKCIEACPTDAILDNQIIDGSKCISYATIELKDEIPEHFHGKMQNWMFGCDICQDVCPWNRFSKPHQQPLFDPNESLQNFSKKEWKELTQEIFSEIFRKSPVKRTKYAGLKRNIDFLSDKNP

SEQ ID NO: 76462 - protein, 311 aa, Elizabethkingia meningoseptica
  misc_feature (1)..(311): tr|A0A1V3U2T2|A0A1V3U2T2_ELIME Epoxyqueuosine reductase OS=Elizabethkingia meningoseptica OX=238 GN=queG PE=3 SV=1
MNLAEKNTALIKQKAEAFGFLACGISKAEFLENEARSLENWLTQNLHGEMRYMENYFDKRLDPRLLVEGSKSVISFAYNYFPRKVLNRNDNFKISKYAYGKDYHEVIKEILAEFVAELQDEIGEFGFRVFVDSAPVLERAWAKKSGIGWVGKNANLITKGEGSFYFLAEIICELELVEDAPVTDHCGKCRKCIEACPTGAILDNQIIDGSKCISYATIELKDDIPAHFHGKMQNWMFGCDVCQDVCPWNRFSKPHQQPLFDPNDSLQNFSRKEWKELTQEVFSEIFRKSPVKRAKYAGLKRNIDFLSDENP

SEQ ID NO: 76463 - protein, 311 aa, Elizabethkingia meningoseptica; identical to SEQ ID NO: 76459
  misc_feature (1)..(311): tr|A0A376EKE4|A0A376EKE4_ELIME Epoxyqueuosine reductase OS=Elizabethkingia meningoseptica OX=238 GN=queG PE=3 SV=1

SEQ ID NO: 76464 - protein, 311 aa, Elizabethkingia miricola
  misc_feature (1)..(311): tr|A0A0W8ETV3|A0A0W8ETV3_ELIMR Epoxyqueuosine reductase OS=Elizabethkingia miricola OX=172045 GN=queG PE=3 SV= 1
MNLAEKNTAIIKQKAKDFGFLACGISKAEFLEEEARSLENWLTRNLNGEMRYMENYFDKRLDPRLLVEGSKSVISFSYNYFPRKVLNTDDNFKISKYAYGKDYHEVIKEILGEFVAELQEEIGEFGFRVFVDSAPVLERAWAKKSGIGWVGKNANLITKGEGSFYFLAEIICELELVPDAPVTDHCGKCRKCIEACPTDAILDNQIIDGSKCISYATIELKEEIPEHFHGKMQNWMFGCDICQDVCPWNRFSKPHQQPLFDPNESLQNFSKKEWKELTQEIFSEIFRKSPVKRTKYAGLKRNIDFLSDKNP

SEQ ID NO: 76465 - protein, 311 aa, Elizabethkingia miricola
  misc_feature (1)..(311): tr|A0A0D5BM80|A0A0D5BM80_ELIMR Epoxyqueuosine reductase OS=Elizabethkingia miricola OX=172045 GN=queG PE=3 SV= 1
MNLAEKNTAIIKQKAKDFGFLACGISKAEFLEDEARSLENWLTRNLNGEMRYMENYFDKRLDPRLLVEGSKSVISFSYNYFPRKVLNTDDGFKISKYAYGKDYHEVIKEILGEFVAELQEEIGEFGFRVFVDSAPVLERAWAKKSGIGWVGKNANLITKGEGSFYFLAEIICELELVPDNPVTDHCGKCRKCIEACPTDAILDNQIIDGSKCISYATIELKEEIPEHFHGKMQNWMFGCDICQDVCPWNRFSKPHQQPLFDPNESLQNFSKKEWKELTQEIFSEIFRKSPVKRTKYAGLKRNIDFLSDKNP

SEQ ID NO: 76466 - protein, 311 aa, Elizabethkingia occulta
  misc_feature (1)..(311): tr|A0A1T3MYS1|A0A1T3MYS1_9FLAO Epoxyqueuosine reductase OS=Elizabethkingia occulta OX=1867263 GN=queG PE=3 SV= 1
MNLAEKNTAIIKQKAKDFGFLACGISKAEFLEDEARSLENWLTRNLNGEMRYMENYFDKRLDPRLLVEGSKSVISFSYNYFPRKVLNTDDNFKISKYAYGKDYHEVIKEILGEFVAELQEEIGEFGFRVFVDSAPVLERAWAKKSGIGWVGKNANLITKGEGSFYFLAEIICELELVPDIQVTDHCGKCRKCIEACPTDAILDNQIIDGSKCISYATIELKEDIPEHFHGKMQNWMFGCDICQDVCPWNRFSKPHQQPLFDPNESLQNFSKKEWKELTQEVFSEIFRKSPVKRTKYAGLKRNIDFLSDKNP

SEQ ID NO: 76467 - protein, 311 aa, Elizabethkingia sp.
  misc_feature (1)..(311): tr|A0A4P8E461|A0A4P8E461_9FLAO Epoxyqueuosine reductase OS=Elizabethkingia sp. 2-6 OX=2575699 GN=queG PE=3 SV= 1
MNLAEKNTAIIKQKAKDFGFLACGISKAEFLEEEARSLENWLTRNLNGEMRYMENYFDKRLDPRLLVEGSKSVISFSYNYFPRKVLNTDDNFKISKYAYGKDYHEVIKEILGEFVAELQEEIGEFGFRVFVDSAPVLERAWAKKSGIGWVGKNANLITKGEGSFYFLAEIICELELVSDAPVTDHCGKCRKCIEACPTDAILDNQIIDGSKCISYATIELKEEIPEHFHGKMQNWMFGCDICQDVCPWNRFSKPHQQPLFDPNESLQNFSKKEWKELTQEIFSEIFRKSPVKRTKYAGLKRNIDFLSDKNP

SEQ ID NO: 76468 - protein, 311 aa, Elizabethkingia sp.
  misc_feature (1)..(311): tr|A0A2T5RU24|A0A2T5RU24_9FLAO Epoxyqueuosine reductase OS=Elizabethkingia sp. YR191 OX=2135666 GN=queG PE=3 S V=1
MNLAEKNTAIIKQKAKDFGFLACGVSKAEFLEDEARFLENWLTRNLNGEMRYMENYFDKRLDPRLLVEGSKSVISFSYNYFPRKVLNTDDSFKISKYAYGKDYHEVIKEILGDFVAELQEEVGEFGFRVFVDSAPVLERAWAKKSGIGWVGKNANLITKGEGSFYFLAEIICELELVPDTPVTDHCGKCRKCIEACPTDAILDNQIIDGSKCISYATIELKEEIPEHFHGKMQNWMFGCDICQDVCPWNRFSKPHQQPLFDPNESLQNFSKKEWKELTQEIFSEIFRKSPVKRTKYAGLKRNIDFLSDKNP

SEQ ID NO: 76469 - protein, 311 aa, Elizabethkingia ursingii
  misc_feature (1)..(311): tr|A0A1T3FEG2|A0A1T3FEG2_9FLAO Epoxyqueuosine reductase OS=Elizabethkingia ursingii OX=1756150 GN=queG PE=3 SV =1
MNLAEKNTAIIKQKAKDFGFLACGISKAEFLEDEARSLENWLTRNLNGEMRYMENYFDKRLDPRLLVEGSKSVISFSYNYFPRKLLDTDDGFKISKYAYGKDYHEVIKEILGEFVAELQEEIGEFGFRVFVDSAPVLERAWAKKSGIGWVGKNANLITKGEGSFYFLAEIICELELVSDTTVTDHCGKCRKCIEACPTDAILDNQIIDGSKCISYATIELKEEIPEHFHGKMQNWMFGCDICQDVCPWNRFSKPHQQPLFDPNESLQNFSKKEWKELTQEIFSEIFRKSPVKRTKYAGLKRNIDFLSDKNP

SEQ ID NO: 76470 - protein, 388 aa, Elstera cyanobacteriorum
  misc_feature (1)..(388): tr|A0A255XRU7|A0A255XRU7_9PROT Epoxyqueuosine reductase OS=Elstera cyanobacteriorum OX=2022747 GN=queG PE=3 SV =1
MPSSPPSPSPSDHLRARLRAEALALGFDAVGFAPASVPQRAAEGLRMFLAEGRHGDMGWMEAHADRRADPQTLWPDARSILVVGQNYAPAHDPMGLLDQPDRGAISAYARNKDYHDLMKARLRTLAGVAVAEAAKLGLPQEVKLFVDTAPVLEKPLAVQAGLGWQGKHTNMVSRRFGSWLFLGELFLAADLAPETAEPDHCGRCSRCLTVCPTAAFPAPYQLDARRCIAYLTIEHKGVIPAEFRPLIGNRVYGCDDCLAVCPWNKFASATREAAFFPRIELTAPRLADLAELDDADFRALFAGSPIKRIGRARFIRNVLIALGNSGEPRFAPVVEARLSDDSPLVRGMAVWALGRLAPERLAALDGPEEDEGVRAEWALARQNQPVII

SEQ ID NO: 76471 - protein, 282 aa, Elusimicrobia bacterium
  misc_feature (1)..(282): tr|A0A539EKG6|A0A539EKG6_9BACT Uncharacterized protein OS=Elusimicrobia bacterium OX=2030800 GN=FD126_1801 PE= 4 SV=1
MHGVMGYMARAPQDRPFITRWFPAARSVVVCAFSYHDGSKAPSPDASSGRLARYSLPPDYHPELKARMKALLAWYKERVPGGRGKVFVDTSPVLERLYARYAGVGWVGKNAMLLSRDIGSFFLIAGVALDAELELGEPVPEHCGTCTRCLDACPTDAFPAPRVLDASRCIAYFTVEQSRGPIPEAFRQGHGDWLFGCDVCQDVCPWNKFAVRARVFSPALPPTLDLGELAALSPEAFEEKYRGTPLHRTGWTALVLERYAAHPDPVLAEQASWSLSLLDSPG

SEQ ID NO: 76472 - protein, 341 aa, Elusimicrobia bacterium
  misc_feature (1)..(341): tr|A0A1F9YFU5|A0A1F9YFU5_9BACT tRNA epoxyqueuosine(34) reductase QueG OS=Elusimicrobia bacterium RIFOXYD12_FUL L_66_9 OX=1797972 GN=A2506_10760 PE=4 SV=1
MSPAELAAALKKRALEDGADLAGIAAAGPSPGSAAYDEWVSKGMNATMDYLARNMSSRHDIRAWFPPARSVLMCGFSYGQSSTPARTTAGSGRLARYAVREDYHPLLKAKMSSLLDWLRTIVPDVHGLPFCDTSPLLERSYALSAGLGWQGKSAMMIAPRLGTYFLIAGLALDLELPQDTASRDHCGSCRLCLDACPTDAFAGPRVLDAAKCVAYLTIENRGPVPEALRPGVGDRVFGCDICQEVCPWNRFEKPGRLLPEPREPLDIPLEELAALDAAAFRSRFRDLPVSRAKRRGLLRNVLLSMGNSGLARLRPLLEGFAADPDDMIAEVARWSLARLPG

SEQ ID NO: 76473 - protein, 371 aa, Emcibacter congregatus
  misc_feature (1)..(371): tr|A0A2G4YRH6|A0A2G4YRH6_9PROT Epoxyqueuosine reductase OS=Emcibacter congregatus OX=2043170 GN=queG PE=3 SV=1
MTDPAAAKTHIIDTAKAAGFDVVRITGPDGLDPNAAHFFEFLDLERHGEMAWMRDKADRRSDPRTLWPDVKSIILLAMNYSPAQNPLDTLAHKDRGNISVYARGKDYHDVVKKKLKQVARDLHRQFDAEVKVFVDTAPVMEKPLAAKSGLGWQGKHTNLVSREFGSWLFLGSIFTTLDLPADPPGRDSCGSCRACLDICPTKAFPAPNQLDARRCISYLTIEYKGHIAEEFRKPMGNRIYGCDDCLAVCPWNKYAKKLVEPAYLPRLELAFPALSDLVELDDAGFRQVFSGSPIKRIGRTWFIRNVLIAIGNSADRTLIPKVEQQLTDPSPHIRAMAVWALRQLCDQDQWRAHRERSINQETDPDVRLEWH

SEQ ID NO: 76474 - protein, 369 aa, Emcibacter nanhaiensis
  misc_feature (1)..(369): tr|A0A501PCP0|A0A501PCP0_9PROT Epoxyqueuosine reductase OS=Emcibacter nanhaiensis OX=1505037 GN=queG PE=3 SV=1
MEQPESHISRLARDAGFDTVAITTPDGMARAAGHFDQFLKAGRHGVMAWMADKADRRKSPLTLWPDVRSIIMLGMNYGPAHDPLERLDRRETGNISVYAKGHDYHDIIKKKLKQVARQIHRTYDAEVKVFVDTAPVLEKPLAAKAGLGWQGKHTNLVSRSHGSWLFLGSIFTTLDLKADNPEKDHCGSCRNCLDSCPTGAFPAPYQLDARRCISYLTIEYKGHIPAEFREAMGNRIYGCDDCLAVCPWNKFARRARENRLFPRPELEAPDLADLVELEDQDFREIFSGSPIKRIGRDYFIRNVLIAIGNSGNSACLPQIERKLAEQNAVIRSAAVWALRRLAEEETFAALRQQYMDREEDGIVREEWQK

SEQ ID NO: 76475 - protein, 315 aa, Empedobacter brevis
  misc_feature (1)..(315): tr|A0A511NFF9|A0A511NFF9_9FLAO Epoxyqueuosine reductase OS=Empedobacter brevis NBRC 14943 = ATCC 43319 OX=1218 108 GN=queG PE=3 SV=1
MHLPTEEHIKIKWSQRIKDKAEALGFISCGIAKANFLEDEAPHLESWLHNNYQGEMHYMENHFDMRLDPRLLVEGAKSVISLAYNYYQNLNRNPNSYKVAMYAQGEDYHFVVKEKVRELLDFIQDEIGEVNGRAFADSAPILEHAWARKAGIGWVGKNSLTLSKQKGSFFFLSELIVDLDLAYDSPIETDHCGKCTRCIDACPTEAILPNKTVNGSQCISYFTIELKEQIPAEMKGKFDDWIFGCDVCQEVCPWNRFSLPTQENRFTGHRKINEFSKKDWEEITEDVFREVFRKSPVKRTKYDGLKRNIDFIKSL

SEQ ID NO: 76476 - protein, 315 aa, Empedobacter falsenii
  misc_feature (1)..(315): tr|A0A376GKE0|A0A376GKE0_9FLAO Epoxyqueuosine reductase OS=Empedobacter falsenii OX=343874 GN=queG PE=3 SV=1
MLLQTEEHIKIKWSQCIKEKAEALGFISCGIAKADFLEEEAPHLEAWLKNDFHGEMQYMENHFDMRLDPRILVEGAKSVISLAYNYYQNLDRNPNSYKVAMYAQGEDYHFVVKEKVRELLDFIQEEIGEVSGRAFTDSAPILEHAWAKKAGIGWVGKNSLTLSKQKGSFFFLSELIIDLDLAYDSPIETDHCGKCTRCIDACPTEAILPNKTVNGSQCISYFTIELKDQIPTEMKGKFDDWIFGCDVCQEVCPWNRFSLPMKETRFVGHDKINQFSKKDWEEITEVVFREIFKKSPVKRTKFDGLKRNIDFVKSL

SEQ ID NO: 76477 - protein, 313 aa, Empedobacter falsenii
  misc_feature (1)..(313): tr|A0A3R8US53|A0A3R8US53_9FLAO Epoxyqueuosine reductase OS=Empedobacter falsenii OX=343874 GN=queG PE=3 SV=1
MLLQTEEHIKIKWSQRIKEKAEALGFISCGIAKADFLEEEAPHLEAWLKNDFHGEMQYMENHFDMRLDPRILVEGAKSVISLAYNYYQNLDRNPNSYKVAMYAQGEDYHFVVKEKVRELLDFIQEEIGEVNGRAFTDSAPILEHAWARKAGIGWVGKNSLTLSKQKGSFFFLSELIIDLDLAYDSPIETDHCGKCTRCIDACPTEAILPNKTVNGSQCISYFTIELKDQIPTEMKGKFDDWIFGCDVCQEVCPWNRFSLQTKETRFVGNEKINQFSKKDWEEITEDVFRKIFNKSPVKRTKFDGLKRNIDFVK

SEQ ID NO: 76478 - protein, 380 aa, Empedobacter haloabium
  misc_feature (1)..(380): tr|A0A5C7BZY4|A0A5C7BZY4_9FLAO Epoxyqueuosine reductase OS=Empedobacter haloabium OX=592317 GN=queG PE=3 SV=1
MSPSPEELTALAAAIKAWGQELGFAEVRIADIDLAAAEAGLQAWLDAGMHGEMDYMATHGMKRARPAELVPGTVRVITARMNYLPESAGAGWRERERARLADPQAAVISVYARGRDYHKVLRARLQQLADRIQGAIGAFGYRVFTDSAPVMELPLAEKSGLGWRGKHTLLLNRAAGSMFFMGEILVDLPLPIDAPTEAHCGQCSACITACPTQAILGPGRLDARRCISYLTIELKGAIPEELRPLLGNRVYGCDDCQTACPWNKFAQRATLPDFDERHGLGSASMLALFAWSEEEFNRNMEGSPIRRIGHERWLRNLAVGLGNAADAGARGDAAIVAGLLARAEHPSALVREHVAWALARHGVDATRGVRHLSGGVAAPG

SEQ ID NO: 76479 - protein, 315 aa, Empedobacter sp.
  misc_feature (1)..(315): tr|A0A4Z1BUI6|A0A4Z1BUI6_9FLAO Epoxyqueuosine reductase OS=Empedobacter sp. MRS2 OX=2491114 GN=queG PE=3 SV=1
MLLQTEEHIKIKWSQCIKEKAEALGFISCGIAKADFLEEEAPHLEAWLKNNYHGEMQYMENHFDMRLDPRLLVEEAKSVISLAYNYYQNLDRNPNSYKVAMYAQGEDYHFVVKEKVRELLDFIQEEIGEVSGRAFTDSAPILEHAWAKKAGIGWVGKNSLTLSKQKGSFFFLSELIIDLDLAYDSPIETDHCGKCTRCIDACPTEAILPNKTVNGSQCISYFTIELKDQIPIEMKGKFDDWIFGCDVCQEVCPWNRFSLPTKETRFIGHEKINQFSKKDWEEITEDVFREIFKKSPVKRTKFDGLKRNIDFVKSL

SEQ ID NO: 76480 - protein, 312 aa, Emticicia sp.
  misc_feature (1)..(312): tr|A0A4Q5M2N7|A0A4Q5M2N7_9BACT Epoxyqueuosine reductase OS=Emticicia sp. 17J42-9 OX=2492393 GN=queG PE=3 SV=1
MLQSYAVKYANLIKTKARELGFDYCGISKAEFLEEEAPRLEAWLSKNYHGKMAYMANYFDKRLDPRLLVEGAKSVITLILNYYPEKTLPQAPENLKLSKYAYGKDYHFVMKDKLKDLMEAISEEIGEVNGRVFVDSAPVMDKAWAKKSGAGWLGKHTNLINREIGSFFFIGEIICDLEIQPDGAIKDYCGTCTRCIDACPTDAIVEPYVVDGSKCISYYTIELKEAIPDEVKGKMENWIFGCDICQDVCPWNSFARPHSTPEFNLNPQLAEFTKKDWEEITEELFQEIFRRSAVKRTKLEGLKRNIDFVREE

SEQ ID NO: 76481 - protein, 312 aa, Emticicia sp.
  misc_feature (1)..(312): tr|A0A2N4X9L7|A0A2N4X9L7_9BACT Epoxyqueuosine reductase OS=Emticicia sp. TH156 OX=2067454 GN=queG PE=3 SV=1
MFQSYAVKYANLIKTKATELGFDFCGISKAEFLEEEAPRLEAWLNKNYHGKMAYMANHFDKRLDPRKLVDGAKSVITLILNYYPEQTLSESASDLKLSKYAYGTDYHFVMKDKLKDLVEAIADEIGEVNGRVFVDSAPVMDKVWAKKSGVGWVGKHTNLINREIGSFFFIGEIICDLELEPDGPIKDYCGTCTRCIDACPTDAITEPYVVNGSKCISYFTIELKEAIPEEMKGKFNNWMFGCDICQDVCPWNSFARPHKTAQFEVNPQLKEFTRKDWEEITEELFQEIFRRSAVKRTKLEGLRRNITFLKTD

SEQ ID NO: 76482 - protein, 358 aa, Escarpia spicata
  misc_feature (1)..(358): tr|A0A370DT67|A0A370DT67_9GAMM Epoxyqueuosine reductase OS=endosymbiont of Escarpia spicata OX=2200908 GN=queG PE=3 SV=1
MDRAPIPNHQQLAANIKIWGAELGFQQVGITDTELSLAEARFNDWLQKGFHGEMSYMARHGNKRSRPAELEPGTRRIISVRLDYLPEPTRKSREILESPAQAFISRYALGRDYHKLMRKRLQKLAQKISGEIGDFGYRVYVDSAPVLEKPLAEKAGLGWIGKHSNLINRKAGSWFFLGEIYTDLPLPIDQPASNHCGSCRACLDICPTQAIVEPYVVDARRCISYLTIEQHGPIPESLRSRIGNRIYGCDDCQQVCPWNRFAKLGREQDFAPRNGLGNATLTELFEWDETNFLKRTEGSAIRRIGHQSWLRNIAVALGNAPHSENIEAILKVREHDPAELVREHVRWALARQRSKSPD

SEQ ID NO: 76483 - protein, 356 aa, Unknown
  misc_feature (1)..(356): tr|S6BI27|S6BI27_9GAMM Epoxyqueuosine reductase OS=endo symbiont of unidentified scaly snail isolate Monju OX=1 248727 GN=queG PE=3 SV=1
MSKGGDIDYAQLSRRIKQWGHELGFGAVGICDTDLTEAEHHLHSWLAKGYHGTMDYMHRHGSKRTRPAELVPGTLRIISVRLDYRPPEPDPGSVLRDPAAAFISRYALGRDYHKVLRARLKKLAQRIADEIGDFGYRVFTDSAPVMEKAIAQKAGLGWVGKHSNILSRDAGSWFFLGELYTDLPLPVDSPVSDHCGECTACIDVCPTRAIVAPYQVDARRCISYLTIELHGPIPEALRPLMGNRIYGCDDCQLCCPWNRFANDTTEADFLPRHGLDTATLVELFAWDEATFLKRTEGSAIRRIGHERWLRNIAVALGNSGEAAAESALRARTDHPSELVREHVAWALTRLRALLRP

SEQ ID NO: 76484 - protein, 357 aa, Endozoicomonadaceae bacterium
  misc_feature (1)..(357): tr|A0A3S3TTH9|A0A3S3TTH9_9GAMM Epoxyqueuosine reductase OS=Endozoicomonadaceae bacterium GTF-13 OX=2506149 GN= queG PE=3 SV=1
MPNKPDIDYQQLAADIHRWGRELGFQQIGIGPVELDEHEQHLQHWLEQGYHGEMDYLARHGNLRSRPAELLPGTLRVISARIDYLPPETDCIRILNNPEKAYLSRYALGRDYHKLVRKRLTQLGKQIEAVVGQHGYRAFVDSAPVLERALGSRSGLGWIGKNTMLINRQAGSWFFLGELFTDLPLPLDSADDADHCGRCSRCLEVCPTRAFVNAHQLDARRCISYLTIELKGAIPMELREAMGNRVFGCDDCQLVCPWNRFAKASPESDFRPRHQLDSSDLADLFGWSETEFLDRTAGSPIRRSGYSGWLRNLAVGLGNAPSSPRVIEALRARRHYPEPMVREHIQWALARHGITPD

SEQ ID NO: 76485 - protein, 350 aa, Endozoicomonas elysicola
  misc_feature (1)..(350): tr|A0A081K771|A0A081K771_9GAMM Epoxyqueuosine reductase OS=Endozoicomonas elysicola OX=305900 GN=queG PE=3 SV= 1
MENLVDKIRIWARELGFQEIGIAEAKVPESDIHHLSNWLEKGYHGDMTYMAQHKELRAKPDQLHPGSLRVISARMDYLPADTETVKLLSEPDKAYISRYALGRDYHKLVRKRLTQLGKQIESAVGEHGYRAFVDSAPIMERPLAQQAGLGWMGKHSLILNRQAGSFFFLGELFTNLPLPVDKPYESNHCGRCTSCIDKCPTQAIVAPYQVDARRCISYLTIENKGPIPEELRPLMGNRIYGCDDCQLACPWNRFAKPTQESDFQPRHHLDASDLIDLFNWSEEQFLERTAGSPIRRAGYDSWLRNIAVALGNAPTDETIIAALQNRLNYPSELVHEHIQWALRQHINGTY

SEQ ID NO: 76486 - protein, 349 aa, Endozoicomonas montiporae
  misc_feature (1)..(349): tr|A0A081MZF4|A0A081MZF4_9GAMM Epoxyqueuosine reductase OS=Endozoicomonas montiporae OX=1027273 GN=queG PE=3 S V=1
MDFAQLAEDIRQWARELGFQAIGISEGKVPEQDQQHFKEWLAMGFNGDLDYMERNQDLRFNPEALHPGMIRIISARMDYLPADTETVKILGEPEKAYVSRYALGRDYHKLIRKRLTQLGKKIESAVGDHGYRAFVDSAPVMERPLAQQAGLGWMGKHSLIINRQAGSFFFLGELFTNLPLPVDEPYDKNHCGRCSSCMDKCPTGAIVEPYRVDARKCISYLTIENSGSIPVELRSLMGNRIFGCDDCQLACPWNRFAKPTQESDFRPRHSLDAVDLADLFLWTEEEFLERTAGSAIRRAGFECWLRNIAVGLGNAPASDKVIQALKTRENDPSELVQEHVQWALDQHMK

SEQ ID NO: 76487 - protein, 381 aa, Endozoicomonas montiporae
  misc_feature (1)..(381): tr|A0A142B7L4|A0A142B7L4_9GAMM Epoxyqueuosine reductase OS=Endozoicomonas montiporae CL-33 OX=570277 GN=queG P E=3 SV=1
MLLNRLYPQESVSKNPTNPEFTEHFTEPASAKIDFAQLAEDIRQWARELGFQAIGISEGKVPEQDQQHFKEWLAMGFNGDLDYMERNQDLRFNPEALHPGMIRIISARMDYLPADTETVKILGEPEKAYVSRYALGRDYHKLIRKRLTQLGKKIESAVGDHGYRAFVDSAPVMERPLAQQAGLGWMGKHSLIINRQAGSFFFLGELFTNLPLPVDEPYDKNHCGRCSSCMDKCPTGAIVEPYRVDARKCISYLTIENSGSIPVELRSLMGNRIFGCDDCQLACPWNRFAKPTQESDFRPRHSLDAVDLADLFLWTEEEFLERTAGSAIRRAGFECWLRNIAVGLGNAPASDKVIQALKTRENDPSELVQEHVQWALDQHMK

SEQ ID NO: 76488 - protein, 363 aa, Endozoicomonas numazuensis
  misc_feature (1)..(363): tr|A0A081NIH4|A0A081NIH4_9GAMM Epoxyqueuosine reductase OS=Endozoicomonas numazuensis OX=1137799 GN=queG PE=3 SV=1
MSNTNTSPESLDYQKLADDIRLWARELGFQAVGITEARIPEQDKKHFQEWLDQGLHGDLEYMERHKELRCHPEKLHEGVIRIISARMDYLPAETETIKILQEPEKAYISRYALGRDYHKLIRKRLTRLGKKIEEVTGEHGYRAFVDSAPVMERPLAQQAGLGWMGKHSLIINRQAGSFFFLGELFTNLPLPTDDPYDKNHCGRCSACIDICPTSAIVEPFKVDARKCISYLTIENSGPIPVELRSKMGNRVFGCDDCQLTCPWNRFAKHTQESDFQPRHHLDNSDLADLFLWTEEEFLERTAGSPIRRAGFECWLRNLAVGLGNAPTTEKVLAALHQRKDYPSELVKEHVDWALKQHSPQRDN

SEQ ID NO: 76489 - protein, 347 aa, Endozoicomonas sp.
  misc_feature (1)..(347): tr|A0A1D2X652|A0A1D2X652_9GAMM Epoxyqueuosine reductase OS=Endozoicomonas sp. (ex Bugula neritina AB1) OX=1868 284 GN=queG PE=3 SV=1
MDELAKNIRQWSRELGFQDMGITEAKVPEQEMKRFQQWLDNGFNGDLDYMARNVDLRANPAALHEGTVRVISVRMDYLPENTETVKILNEPNKAYISRYALGRDYHKLIRKRLTQLGKKIEEATGDHGYRAFVDSAPVMERPLAQQAGLGWVGKHSLIINRQAGSLFFLGELFTNLPLPVDNPYEDSHCGRCTSCLTKCPTQAIVAPYQVDARRCISYLTIENSGPIPEELRPMIGNRVFGCDDCQLVCPWNRFAKPTLESDFKPRHHLDDCNLAEIFLWTEEQFLDRTAGSAIRRAGFECWLRNLAVALGNASSSDIVIDALKARADHSSELVREHVLWALAQHHA

SEQ ID NO: 76490 - protein, 357 aa, Endozoicomonas sp.; identical to SEQ ID NO: 76484
  misc_feature (1)..(357): tr|A0A3P3VHX7|A0A3P3VHX7_9GAMM Epoxyqueuosine reductase OS=Endozoicomonas sp. GTF13 OX=2528527 GN=queG PE=3 SV =1

SEQ ID NO: 76491 - protein, 392 aa, Enhydrobacter aerosaccus
  misc_feature (1)..(392): tr|A0A1T4STY2|A0A1T4STY2_9PROT Epoxyqueuosine reductase OS=Enhydrobacter aerosaccus OX=225324 GN=queG PE=3 SV= 1
MAARPPIPKRAPRPAGPSELRQAIRDEALRLGFDAVGFAPATAGTEARRERLQHLATYVAQGFHGDMGWLSERTEQRADPSTLWPEARTVVSLALNYAPPDDPRLVQESPDRAAISVYAHGRDYHDVVKSKLKALGRFVWDIYRHEIKVFVDTAPLMEKPAAQAAGLGWQGKHTNLVSRAFGSWLFLGELLLSVELPCDTPEQDHCGHCRACLDACPTGAFPAPHRLEARRCISYLTIEHKGPIAPELRPLLGNRIYGCDDCLAVCPWNKFAQEARETTLRPHPAQAAPLLTDLAQLDDAAFRRKFSGSAIKRIGRDRFVRNVAYALGNSGKADTALPAVERLLDDPSPLVRGAAVWALSQLAPQEFERRRTGAQDANESVRREWERPSAAP

SEQ ID NO: 76492 - protein, 386 aa, Enhydrobacter sp.
  misc_feature (1)..(386): tr|A0A5C8P843|A0A5C8P843_9PROT Epoxyqueuosine reductase OS=Enhydrobacter sp. CC-CFT640 OX=2586908 GN=queG PE=3 SV=1
MTVHPAPGLKRRAPSDPHAIREEIRAEALRLGFDAVGFTPAQAPPEQREALVAFVRSGWHGTMDWLAQDIDRRADPARLWPGARTLIALGLRYTPEGDPLAVLAQRDRAAISVYAQGRDYHLVVKSRLKALGLWMWNRWGRDLKVFVDTAPVMERPAAARAGLGWQGKHTNLVSRAHGSWLFLGEILTTLALPPDAPEHDHCGTCQACLDICPTAAFPAPGRLDARRCISYLTIEHPGPIPHELRAAMGNRVYGCDDCLAVCPWNKFAQAAREAAFAPRPGLATPRLTDLAALDDAAFRTLFAGTAVKRIGRDRFVRNVAIALGNSGDAEGSLPAVRRLLDDASPLVRGAAVWALARLSPAAFAGERASRLPAEADADVRAEWAAV

SEQ ID NO: 76493 - protein, 375 aa, Enhydrobacter sp.
  misc_feature (1)..(375): tr|A0A1V2GNP3|A0A1V2GNP3_9PROT tRNA epoxyqueuosine(34) reductase QueG OS=Enhydrobacter sp. H5 OX=1907940 GN=BK E17_08645 PE=4 SV=1
MLDTTNELNALKGWIKAQAKALGFADCGFVHPANPIFVKQLDALQTWLAQGKHGDMLFFEDNHDKRANPALLVDKTQSIISVRLDYLVTPPPKRSVPDNERPNSAIIARYARGRDYHKTMRGLLKTLARLIQDKLTTDYPQYANDFVFRPFSDSAPIFERALAEQAGLGWTGKHTLLIHPQAGSFFVLGELFTSLPLAEDKKQIETISSHCGSCRACIHVCPTHAIRKTPTGHYDVDARLCISYLTIELDGKIPVELRPKIGNRIFGCDDCQLICPWNKFARLATIEDFNPRHRLDEVSLLELWAWDAQDFLTKTEGSPIRRTGYDNFMRNVAVALGNAPFSQAIIDKLQQKRPMLGENTQEHIDWAIQQQLNKS

SEQ ID NO: 76494 - protein, 362 aa, Enhygromyxa salina
  misc_feature (1)..(362): tr|A0A2S9XBC4|A0A2S9XBC4_9DELT Epoxyqueuosine reductase OS=Enhygromyxa salina OX=215803 GN=queG PE=4 SV=1
MLTLDDDDLAALTERAEALGLLRLGAVNLDHSGFEPARAALAEYLDRGAEGEMAFMSRTRAVRMDPGQMLDGARSALVAVVPYEGEAGPIARYAQWVDYHFELHRRFAELSEALRERVPKVESLACVDTKPVLERAVAVLAGLGFLGKNGCLIVPGLGSYVLIGVLLTTARFVGRDRAPEHASAQATGGPWDVCGSCRLCLDHCPTEAFEAPGKLEPRRCIAYLTIEHRGPIPESLAPHMGQRVAGCDVCQEVCPYNRSSTRAQRIPLVARLEQPPGRARTPDLPRLANIGSNQYRQFVKHTALNRIPRRALRRNAILAIGNGEQAVSEAEREALARAARDPSPELAALAHWAARRRGLDLS

SEQ ID NO: 76495 - protein, 367 aa, Enhygromyxa salina
  misc_feature (1)..(367): tr|A0A2S9YU13|A0A2S9YU13_9DELT Epoxyqueuosine reductase OS=Enhygromyxa salina OX=215803 GN=queG PE=4 SV=1
MTPRPDPLLDDDELAALAELAADLGLLRLGAVSLDHPGFAPARATLADYLDRSAEGEMAFLSRTRAVRMDPAQMLPGARSALVAVVPYAGEPGPVARYAQWSDYHTEIHRRLERLSEHLHARVPDIESLICVDTKPVLERAVAVLAGLGFLGKNGCLIVPGLGSYVLIAVLLTTAQWTGTDRSPTYAHDHSHPPWDACGSCRLCLEHCPTDAFDSPGKLDPRRCISYLTIEHRGPIPEALATRMGQRIAGCDVCQEVCPYNRSSTREDRVPASAWLDPPPGHARVPDLPRLANVGNNQHRQFVKQTALNRIPRAALRRNAILALGNGDGPANEHEAEALRLAMADPSPELAALARWAAARRCVESPE

SEQ ID NO: 76496 - protein, 390 aa, Ensifer adhaerens
  misc_feature (1)..(390): tr|A0A2V4Y8V0|A0A2V4Y8V0_ENSAD Epoxyqueuosine reductase OS=Ensifer adhaerens OX=106592 GN=queG PE=3 SV=1
MPGIDAKADSEERRRLKLTAFLKAEAADKGFDLCRITRPDAIPQAPARLRDFLDESFHGTMDWLEETAERRSDPRTLWSEVRSVVMFAMNYGPEHDPRGILERTDRGAISVYAQNRDYHDIIKGKLKEVATRFAARAGEYVKVFVDTAPVMEKPLAEQSGLGWQGKHTNLVSREFGSWLFLGSLFTTADLAFDEAERDHCGSCRACLDACPTDAFPATYRIDARRCISYLTIEHKGPIDPEFRPLIGNRIYGCDDCLAACPWNKFAQAASEMKLRARDDLKAPSLETLLDLDDPSFRSLFSGSPVKRIGRDRFVRNVLIAAGNSGSQALVPAVKARVNDTSAVVRAMAVWALSRLVAPAALAEFAEQCEPETDEDVLNEWQIAGVSRCMS

SEQ ID NO: 76497 - protein, 390 aa, Ensifer adhaerens
  misc_feature (1)..(390): tr|W8I7K1|W8I7K1_ENSAD Epoxyqueuosine reductase OS=Ensi fer adhaerens OV14 OX=1416753 GN=queG PE=3 SV=1
MPGSAAKAENQERRRQKLTEFLKAEAADKGFDVCRITRPDAIPEAPARLVEFLDEGFHGTMEWLAETAERRSDPRTLWSNVRSVVMFGMNYGPEEDPRGILDQPDRGAISVYAQNRDYHDIIKGRLKEVATRFAARAGEDVKVFVDTAPVMEKPLAEKAGIGWQGKHTNLVSREFGSWLFLGSLFTTAELAFDAAERDHCGSCRACVNACPTAAFPAPYRIDARRCISYLTIEHKGPIDPTLRPLIGNRIYGCDDCLAACPWNKFAQQASEMKLKARDDLKAPSLAFLLTLDDPTFRTFFSGSPVKRIGRDRFVRNVLIAAGNSGDDSLVAACKTLTSDTSPMVRAMAVWALSLLISPDALAAHERQCGAESDEEVLSEWQMAGVSRCMS

SEQ ID NO: 76498 - protein, 390 aa, Ensifer alkalisoli
  misc_feature (1)..(390): tr|A0A1E3VAZ6|A0A1E3VAZ6_9RHIZ Epoxyqueuosine reductase OS=Ensifer alkalisoli OX=1752398 GN=queG PE=3 SV=1
MPGNAQRAENQDRKRRTLTAFLKEEAAAKGFDICRITRPDAIPRAPEQLKAFLSAGRHGTMEWLAETAERRSDPRVLWGEVRSIALLGMNYGPNADPRDILGKRDRGAISVYAQNRDYHDVVKGRLKEIATRFAARCSEDVKVFVDTAPVMEKPLAEKAGLGWQGKHTNLVSRDFGSWLFLGSLFTTADLEIDAPEHDHCGSCRACLDACPTGAFPAPYQIDARRCISYLTIEYKGRIEPELRPLIGNRIYGCDDCLAACPWNKFAREACEMKLKAREDLKQPELAFLLTLDDAAFRAFFSGSPVKRIGRDRFVRNVLIAAGNSGEEDLVSACKGLASDASPTVRAMAVWALSRLMPKGEFIAFAGKCPPETDEEVVSEWKMAGVSRCMS

SEQ ID NO: 76499 - protein, 390 aa, Ensifer glycinis
  misc_feature (1)..(390): tr|A0A178Y2K1|A0A178Y2K1_9RHIZ Epoxyqueuosine reductase OS=Ensifer glycinis OX=1472378 GN=queG PE=3 SV=1
MPGDAAKAGNQDRKRRTLTAFLKEEAAAKGFDLCRMTRPDAIPEAPGRLRQFLEAGCHGTMEWLSETAERRSDPRVLWSEVRSIVLFGMNYGPDTDPLAILAKRDRGAISVYAQNRDYHDVVKGRLKEIATRFAARAGEDVKVFVDTAPVMEKPLAEKAGIGWQGKHTNLVSREFGSWLFLGSLFTTADLDIDVPERDHCGSCRACLDACPTGAFPAPYQIDARRCISYLTIEHKGPIDPELRPLIGNRIYGCDDCLAVCPWNKFARSASEMKLTAREDLKEPELAALLTLDDAAFRSLFSGSPVKRIGRDRFVRNVLIAAGNSGEERFVPACKALARDASPTVRAMAVWALSRLMAADELAAFASECEQESDDEVLAEWQMAGVSRCMS

SEQ ID NO: 76500 - protein, 390 aa, Ensifer sojae
  misc_feature (1)..(390): tr|A0A249PH05|A0A249PH05_9RHIZ Epoxyqueuosine reductase OS=Ensifer sojae CCBAU 05684 OX=716928 GN=queG PE=3 SV =1
MPGNAQQAENQDRKRRTLTAFLKEEAAAKGFDICRITRSDAIPHAPERLQAFLAAGCHGTMGWLAETAERRADPRVLWGEVRSIALFGMNYGPDTDPRDILAMRDRGAISVYAQNRDYHDVVKGRLKEIATRFGARAGEDVKVFVDTAPVMEKPLAEKAGLGWQGKHTNLVSRDFGSWLFLGSLFTTADLEVDAPERDHCGSCRACLDACPTGAFPAPYQIDARRCISYLTIEHKGPIEPELRPLIGNRIYGCDDCLAACPWNKFAREASEMKLKAREDLKQPELALLLTLDDAAFRAFFSGSPVKRIGRDRFVRNCLIAAGNSGEEALVPACMALTRDPSPPVRGMAVWALSRLMPQEELIAFARECPPETDEEVVSEWIMAGVSRCMS

SEQ ID NO: 76501 - protein, 390 aa, Ensifer sp.
  misc_feature (1)..(390): tr|A0A2V4ZLP7|A0A2V4ZLP7_9RHIZ Epoxyqueuosine reductase OS=Ensifer sp. AP48 OX=2135475 GN=queG PE=3 SV=1
MPGIAAKADNGDRRRLKLTEFLKAEAADKGFDLCRITRPDAIPEAPARLQDFLDDGFHGTMDWLAETAERRSDPRTLWSDVRSVVMFAMNYGPEDDPRGILEKTDRGAISVYAQNRDYHDIIKGKLKEVATRFAARAGEDVKVFVDTAPVMEKPLSEKAGLGWQGKHTNLVSREFGSWLFLGSLFTTADLVIDEPERDHCGSCRACLDACPTGAFPAPYQIDARRCISYLTIEHKGPIDPELRPLMGNRIYGCDDCLAACPWNKFAQAASEMKLKAREDLKAPSLEALLGLDDPAFRSLFSGSPVKRIGRDRFVRNVLIAAGNSGDQALVPAVRARIGDTSPVVRAMAVWALSRLVAPAALAEFAEQCEPETDEDVLNEWQMAGVSRCKS

SEQ ID NO: 76502 - protein, 390 aa, Ensifer sp.
  misc_feature (1)..(390): tr|A0A1G9RXA5|A0A1G9RXA5_9RHIZ Epoxyqueuosine reductase OS=Ensifer sp. YR511 OX=1855294 GN=queG PE=3 SV=1
MPGIDAKADSEERRRLKLTAFLKAEAADKGFDLCRITRPDAIPQAPARLRDFLDESFHGTMDWLEETAERRSDPRTLWSEVRSVVMFAMNYGPEHDPRGILERTDRGAISVYAQNRDYHDIIKGKLKEVATRFAARAGEYVKVFVDTAPVMEKPLAEQSGLGWQGKHTNLVSREFGSWLFLGSLFTTADLAFDEAERDHCGSCRACLDACPTDAFPAPYRIDARRCISYLTIEHKGPIDPEFRPLIGNRIYGCDDCLAACPWNKFAQAASEMKLRARDDLKAPSLETLLDLDDPSFRSLFSGSPVKRIGRDRFVRNVLIAAGNSGSQALVPAVKARVNDTSAVVRAMAVWALSRLVAPAALAEFAEQCEPETDEDVLNEWQIAGVSRCMS

SEQ ID NO: 76503 - protein, 379 aa, Enterobacillus tribolii
  misc_feature (1)..(379): tr|A0A370R117|A0A370R117_9ENTR Epoxyqueuosine reductase OS=Enterobacillus tribolii OX=1487935 GN=queG PE=3 SV= 1
MSYPLDLNQLAQHIKQWGQSLGFQQVGICDTDLSAEEPRLQEWLDKQYHGEMAWMARHGMMRARPHELLPGTLRVISVRMNYLPAKAAFASTLKNPRLGYISRYALGRDYHKLLRNRLKKLGEMIQEHCTDTNFRPFVDSAPLLERPLAAKAGLGWVGKHSLLLNRDAGSWFFLGELLIDLPLPVDSPQGEQCGRCVACMTTCPTGAIVEPYVVDARRCISYLTIELDGAIPEEFRPLMGNRIYGCDDCQMICPWNRFSQLTDEEDFSPRRQLHTPELLTLFAWDEATFLKVTEGSAIRRIGYARWLRNISVALGNAPYEEQIFVALRARLGISAMLDEHIIWAMEQQKIKRAAQGIEVLNSQQNRLVRAVEKGLPRDA

SEQ ID NO: 76504 - protein, 379 aa, Enterobacter agglomerans
  misc_feature (1)..(379): tr|A0A4V5UJG8|A0A4V5UJG8_ENTAG Epoxyqueuosine reductase OS=Enterobacter agglomerans OX=549 GN=queG PE=3 SV=1
MSYPLDLHQFAQQIKQWGLDLGFQQVGITDTDLSAEEPRLQAWLDKQYHGEMEWMARHGMMRARPHELLPGTLRVISVRMNYLPAKAAFASTLKNPQLGYVSRYALGRDYHKVLRNRLKKLGEMIQQQCGELNFRPFVDSAPLLERPLAAKAGLGWTGKHSLILNREAGSWFFLGELLIDIPLPVDTPQQEQCGRCVACMTICPTSAIVEPYVVDARRCISYLTIELEGAIPEEFRPLMGNRIYGCDDCQLICPWNRYGQLSDESDFSPRAALHAPELIDLFQWDEAKFLRITEGSAIRRIGHLRWLRNIAVALGNAPWSPEIVQVLEQRLGESDLLDEHILWAITQQQQKREQLVVEVQPAQQKRLVRAVEKGLPRDA

SEQ ID NO: 76505 - protein, 361 aa, Enterobacter agglomerans
  misc_feature (1)..(361): tr|A0A379AB65|A0A379AB65_ENTAG Epoxyqueuosine reductase OS=Enterobacter agglomerans OX=549 GN=queG PE=3 SV=1
MDLGFQQVGITDTDLSAEEPRLQAWLDKQYHGEMEWMARHGMMRARPHELLPGTLRVISVRMNYLPAKAAFASTLKNPQLGYVSRYALGRDYHKVLRNRLKKLGEMIQQHCGELNFRPFVDSAPLLERPLAAKAGLGWTGKHSLILNREAGSWFFLGELLIDIPLPVDTPQQEQCGRCVACMTICPTSAIVEPYVVDARRCISYLTIELEGAIPEEFRPLMGNRIYGCDDCQLICPWNRYGQLSDESDFSPRAALHAPELIDLFQWDEAKFLRITEGSAIRRIGHLRWLRNIAVALGNAPWSPEIVQVLEQRLGESDLLDEHILWAITQQQQKREQLVVEVQPAQQKRLVRAVEKGLPRDA

SEQ ID NO: 76506 - protein, 379 aa, Enterobacter asburiae
  misc_feature (1)..(379): tr|A0A263VQB4|A0A263VQB4_ENTAS Epoxyqueuosine reductase OS=Enterobacter asburiae OX=61645 GN=queG PE=3 SV=1
MSQPLDLNELAQKIKQWGAELGFQKVGITDTDLSASEPKLQAWLDKQYHGEMEWMARHGMMRARPHELLPGTLRVISVRMNYLPANAAFARTLKNPSLGYVSRYALGRDYHKLLRNRLKKLGETIQQHCVSLNFRPFVDSAPILERPIAEKAGLGWTGKHSLILSRDAGSFFFLGELLIDLPLPVDGPVEEGCGRCVACMTICPTGAIVEPYTVDARRCISYLTIELEGDIPEEFRPLIGNRIYGCDDCQLICPWNRYSQLTDEEDFSPRKALHAPQLVELFAWTEAWFLKVTEGSAIRRIGHLRWLRNVAVALGNAPWDEANIQALESRKGEHPLLDEHIEWAIAQQIEKRNACTIEVQQPKKQRLVRVIEKGLTRDA

SEQ ID NO: 76507 - protein, 379 aa, Enterobacter asburiae
  misc_feature (1)..(379): tr|A0A5D1YN82|A0A5D1YN82_ENTAS Epoxyqueuosine reductase OS=Enterobacter asburiae OX=61645 GN=queG PE=3 SV=1
MSQPLDLNELAQKIKQWGAELGFQKVGITDTDLSASEPKLQAWLDKQYHGEMEWMARHGMMRARPHELLPGTLRVISVRMNYLPANAAFARTLKNPSLGYVSRYAMGRDYHKLLRNRLKKLGETIQQHCVSLNFRPFVDSAPILERPIAEKAGLGWTGKHSLILSRDAGSFFFLGELLIDLPLPVDGPVEEGCGRCVACMTICPTGAIVEPYTVDARRCISYLTIELEGAIPEEFRPLIGNRIYGCDDCQLICPWNRYSQLTDEEDFSPRKALHAPQLVELFAWTEAWFLKVTEGSAIRRIGHLRWLRNVAVALGNAPWDEANIRALESRRGEHPLLDEHIEWAIAQQIEKRNACAIEVQLPKKQRLVRVIEKGLPRDA

SEQ ID NO: 76508 - protein, 379 aa, Enterobacter bugandensis
  misc_feature (1)..(379): tr|A0A4S3SLU6|A0A4S3SLU6_9ENTR Epoxyqueuosine reductase OS=Enterobacter bugandensis OX=881260 GN=queG PE=3 SV= 1
MSQPLDLNELAQKIKQWGAELGFQKVGITDTDLSASEPKLQAWLDKQYHGEMEWMARHGMMRARPHELLPGTLRVISVRMNYLPANAAFARTLKNPSLGYVSRYALGRDYHKLLRNRLKKLGETVQQHCDSLNFRPFVDSAPVLERPIAEKAGLGWTGKHSLILSRDAGSFFFLGELLIDLPLPVDGPVEEGCGRCVACMTICPTGAIVEPYTVDARRCISYLTIELEGAIPEEFRPLIGNRIYGCDDCQLICPWNRYSQLTDEEDFSPRKALHAPQLIELFAWTEAWFLKVTEGSAIRRIGHLRWLRNVAVALGNAPWDEANIQALESRRGEHPLLDEHIEWAIAQQIEKRNACVVEVQLPKKQRLVRVIEKGLTRDA

SEQ ID NO: 76509 - protein, 379 aa, Enterobacter bugandensis
  misc_feature (1)..(379): tr|A0A167JNJ7|A0A167JNJ7_9ENTR Epoxyqueuosine reductase OS=Enterobacter bugandensis OX=881260 GN=queG PE=3 SV= 1
MSQPLDLNELAQKIKQWGAELGFQKVGITDTDLSASEPKLQAWLDKQYHGEMEWMARHGMMRARPHELLPGTLRVISVRMNYLPANAAFARTLKNPSLGYVSRYALGRDYHKLLRNRLKKLGETIQQHCDSLNFRPFVDSAPVLERPIAEKAGLGWTGKHSLILSRDAGSFFFLGELLIDLPLPVDGPVEEGCGRCVACMTICPTGAIVEPYTVDARRCISYLTIELEGAIPEEFRPLIGNRIYGCDDCQLICPWNRYSQLTDEEDFSPRKALHAPQLIELFAWTEAWFLKVTEGSAIRRIGHLRWLRNVAVALGNAPWDEANIQALESRRGEHPLLDEHIEWAIAQQIEKRNACVVEVQLPKKQRLVRVIEKGLARDA

SEQ ID NO: 76510 - protein, 379 aa, Enterobacter cancerogenus
  misc_feature (1)..(379): tr|A0A484XY30|A0A484XY30_9ENTR Epoxyqueuosine reductase OS=Enterobacter cancerogenus OX=69218 GN=yjeS PE=3 SV= 1
MSQPLDLNQLAQKIKQWGAELGFQKVGITDTDLSASEPKLQAWLDKQYHGEMEWMARHGMMRARPHELLPGTLRVISVRMNYLPANAAFARTLKNPSLGYVSRYALGRDYHKLLRNRLKKLGETIQQHCVSLNFRPFVDSAPILERPIAEKAGLGWTGKHSLILSRDAGSFFFLGELLIDLPLPIDGPVEEGCGRCVACMTICPTGAIVEPYVVDARRCISYLTIELEGAIPEAFRPLIGNRIYGCDDCQLICPWNRYSQLTEEEDFSPRKALHAPQLIELFAWTEAWFLKVTEGSAIRRIGHLRWLRNVAVALGNAPWDEANIQALERRRGEHPLLDEHIEWAIAQQIEKRNACVVEVQLPKKQRLVRVIEKGLIRDA

SEQ ID NO: 76511 - protein, 379 aa, Enterobacter cancerogenus
  misc_feature (1)..(379): tr|D2ZLI7|D2ZLI7_9ENTR Epoxyqueuosine reductase OS=Ente robacter cancerogenus ATCC 35316 OX=500639 GN=queG PE=3 SV=1
MSQPLDLNQLAQKIKQWGAELGFQKVGITDTDLSASEPKLQAWLDKQYHGEMEWMARHGMMRARPHELLPGTLRVISVRMNYLPANAAFARTLKNPSLGYVSRYALGRDYHKLLRNRLKKLGETIQQHCVSLNFRPFVDSAPILERPIAEKAGLGWTGKHSLILSRDAGSFFFLGELLIDLPLPIDGPVEEGCGRCVACMTICPTGAIVEPYVVDARRCISYLTIELEGAIPEAFRPLIGNRIYGCDDCQLVCPWNRYSQLTEEEDFSPRKALHAPQLIELFAWTEAWFLKVTEGSAIRRIGHLRWLRNVAVALGNAPWDEANIQALESRRGEHPLLDEHIEWAIAQQIEKRNACVVEVQLPKKQRLVRVIEKGLIRDA

SEQ ID NO: 76512 - protein, 379 aa, Enterobacter chengduensis
  misc_feature (1)..(379): tr|A0A0F4AZ12|A0A0F4AZ12_9ENTR Epoxyqueuosine reductase OS=Enterobacter chengduensis OX=2494701 GN=queG PE=3 S V=1
MSQPLDLNELAQKIKQWGAELGFQKVGITDTDLSASEPKLQAWLDKQYHGEMEWMARHGMMRARPHELLPGTLRVISVRMNYLPANAAFARTLKDPSLGYVSRYALGRDYHKLLRNRLKKLGETIQQHCVSLNFRPFVDSAPILERPIAEKAGLGWTGKHSLILSRDAGSFFFLGELLIDLPLPIDGPVEEGCGRCVACMTICPTGAIVEPYTVDARRCISYLTIELEGAIPEEFRPLIGNRIYGCDDCQLICPWNRYSQLTDEEDFSPRKALHAPQLVELFAWTEAWFLKVTEGSAIRRIGHLRWLRNVAVALGNAPWDEANLRALESRRGEHPLLDEHIEWAIAQQIEKRNACVVEVQLPKKQRLVRVIEKGLTRDA

SEQ ID NO: 76513 - protein, 379 aa, Enterobacter chuandaensis
  misc_feature (1)..(379): tr|A0A3A3ZCG1|A0A3A3ZCG1_9ENTR Epoxyqueuosine reductase OS=Enterobacter chuandaensis OX=2497875 GN=queG PE=3 S V=1
MSQPLDLNELAQKIKQWGAELGFQKVGITDTNLSASEPKLQAWLDKQYHGEMEWMARHGMMRARPHELLPGTLRVISVRMNYLPANAAFARTLKNPSLGYVSRYALGRDYHKLLRNRLKKLGETIQQHCVSLNFRPFVDSAPILERPIAEKAGLGWTGKHSLILSRDAGSFFFLGELLIDLPLPVDGPVEEGCGRCVACMTICPTGAIVEPYTVDARRCISYLTIELEGAIPEEFRPLIGNRIYGCDDCQLICPWNRYSQLTDEEDFSPRKALHAPQLIELFAWSEAWFLKVTEGSAIRRIGHLRWLRNVAVALGNAPWDVANIQALESRRGEHPLLDEHIEWAIAQQIEKRNACVVEVQLPKKQRLVRVIEKGLTRDA

SEQ ID NO: 76514 - protein, 379 aa, Enterobacter cloacae
  misc_feature (1)..(379): tr|A0A2T4Y494|A0A2T4Y494_ENTCL Epoxyqueuosine reductase OS=Enterobacter cloacae OX=550 GN=queG PE=3 SV=1
MSQPLDLNQLAQKIKQWGAELGFQKVGITDTDLSASEPKLQAWLDKQYHGEMEWMARHGMMRARPHELLPGTLRVISVRMNYLPANAAFARTLKNPSLGYVSRYALGRDYHKLLRNRLKKLGETIQQHCVSLNFRPFVDSAPILERPIAEKAGLGWTGKHSLILSRDAGSFFFLGELLIDLPLPVDGPVEEGCGRCVACMTICPTGAIVEPYTVDARRCISYLTIELEGAIPEEFRPLIGNRIYGCDDCQLICPWNRYSQLTDEEDFSPRKALHAPQLVELFAWSEAWFLKVTEGSAIRRIGHLRWLRNVAVALGNAPWDEANIQALESRRGEHPLLDEHIEWAVAQQIEKRNACVVEVQLPKKQRLVRVIEKGLTRDA

SEQ ID NO: 76515 - protein, 379 aa, Enterobacter cloacae
  misc_feature (1)..(379): tr|A0A0H3CFT0|A0A0H3CFT0_ENTCC Epoxyqueuosine reductase OS=Enterobacter cloacae subsp. cloacae (strain ATCC 13 047 / DSM 30054 / NBRC 13535 / NCDC 279-56) OX=716541 G N=queG PE=3 SV=1
MSQPLDLNQLAQKIKQWGAELGFQKVGITDTDLSASEPKLQAWLDKQYHGEMEWMARHGMMRARPHELLPGTLRVISVRMNYLPANAAFARTLKNPSLGYVSRYALGRDYHKLLRNRLKKLGETIQQHCVSLNFRPFVDSAPVLERPIAEKAGLGWTGKHSLILSRDAGSFFFLGELLIDLPLPVDGPVEEGCGRCVACMTICPTGAIVEPYTVDARRCISYLTIELEGAIPEEFRPLIGNRIYGCDDCQLICPWNRYSQLTDEEDFSPRKALHAPQLIELFAWSEAWFLKVTEGSAIRRIGHLRWLRNVAVALGNAPWDEANIRALESRRGEHPLLDEHIEWAIAQQIEKRNACVVEVQPPQKQRLVRVIEKGLPRDA

SEQ ID NO: 76516 - protein, 379 aa, Enterobacter genomosp.
  misc_feature (1)..(379): tr|A0A0X4EL00|A0A0X4EL00_9ENTR Epoxyqueuosine reductase OS=Enterobacter genomosp. O OX=2364150 GN=queG PE=3 SV =1
MSQPLDLNQLAQKIKQWGAELGFQKVGITDTDLSASEPKLQDWLDKQYHGEMEWMARHGMMRARPHELLPGTLRVISVRMNYLPANAAFARTLKNPSLGYVSRYALGRDYHKLLRNRLKKLGETIQQHCVSLNFRPFVDSAPIIERPIAEKAGLGWTGKHSLILSRDAGSFFFLGELLIDLPLPVDGPVEEGCGRCVACMTICPTGAIVEPYTVDARRCISYLTIELEGAIPEEFRPLIGNRIYGCDDCQLICPWNRYSQLTDEEDFSPRKALHAPQLIELFAWTEAWFLKVTEGSAIRRIGHLRWLRNIAVALGNAPWEEANIRALESRRGEHPLLDEHIEWAIAQQIEKRNACVVEVQLPKKQRLVRVIEKGLTRDA

SEQ ID NO: 76517 - protein, 379 aa, Enterobacter hormaechei
  misc_feature (1)..(379): tr|A0A2J0PYQ0|A0A2J0PYQ0_9ENTR Epoxyqueuosine reductase OS=Enterobacter hormaechei OX=158836 GN=queG PE=3 SV=1
MSQPLDLNELAQKIKQWGAELGFQKVGITDTDLSASEPKLQAWLDKQYHGEMEWMARHGMMRARPHELLPGTLRVISVRMNYLPANAAFARTLKNPSLGYVSRYALGRDYHKLLRNRLKKLGETIQQHCVSLNFRPFVDSAPILERPIAEKAGLGWTGKHSLILSRDAGSFFFLGELLIDLPLPVDGPVEEGCGRCVACMTICPTGAIVEPYTVDARRCISYLTIELEGAIPEEFRPLIGNRIYGCDDCQLICPWNRYSQLTDEEDFSPRKALHAPQLIELFAWSEAWFLKVTEGSAIRRIGHLRWLRNVAVALGNAPWDEANLQALESRRGEHPLLDEHIEWAIAQQIEKRNAGVVEVQLPKKQRLVRVIEKGLPRDV

SEQ ID NO: 76518 - protein, 379 aa, Enterobacter hormaechei
  misc_feature (1)..(379): tr|A0A4V7S4W5|A0A4V7S4W5_9ENTR Epoxyqueuosine reductase OS=Enterobacter hormaechei subsp. xiangfangensis OX=12 96536 GN=queG PE=3 SV=1
MSQPLDLNELAQKIKQWGAELGFQKVGITDTDLSASEPKLQAWLDKQYHGEMEWMARHGMMRARPHELLPGTLRVISVRMNYLPANAAFARTLKNPSLGYVSRYALGRDYHKLLRNRLKKLGETIQQHCVSLNFRPFVDSAPILERPIAEKAGLGWTGKHSLILSRDAGSFFFLGELLIDLPLPVDSPVEEGCGRCVACMTICPTGAIVEPYTVDARRCISYLTIELEGAIPEEFRPLIGNRIYGCDDCQLICPWNRYSQLTDEEDFSPRKALHASQLIELFAWSEAWFLKVTEGSAIRRIGHLRWLRNVAVALGNAPWDEANLQALESRRGEHPLLDEHIEWAIAQQIEKRNAGIVEVQLPKKQRLVRVIEKGLPRDV

SEQ ID NO: 76519 - protein, 379 aa, Enterobacter huaxiensis
  misc_feature (1)..(379): tr|A0A3R9W232|A0A3R9W232_9ENTR Epoxyqueuosine reductase OS=Enterobacter huaxiensis OX=2494702 GN=queG PE=3 SV= 1
MSQPLDLNQLAQNIKQWGAELGFQKVGITDTDLSASEPKLQAWLDKQYHGEMEWMARHGMMRARPHELLPGTLRVISVRMNYLPANAAFARTLKNPSLGYVSRYALGRDYHKLLRNRLKKLGETIQQHCVSLNFRPFVDSAPILERPIAEKAGLGWTGKHSLILSRDAGSFFFLGELLIDLPLPIDGPVEEGCGRCVACMTICPTGAIVEPYTVDARRCISYLTIELEGAIPEEFRPLIGNRIYGCDDCQLICPWNRYSQLTEEEDFSPRKALHAPQLVELFAWTEAWFLKVTEGSAIRRIGHLRWLRNVAVALGNAPWDEANIQALESRRGEHPLLDEHIEWAIAQQIEKRNACVVEVQLPKKQRLVRVIEKGLTRDA

SEQ ID NO: 76520 - protein, 379 aa, Enterobacter kobei
  misc_feature (1)..(379): tr|A0A5A9B5U4|A0A5A9B5U4_9ENTR Epoxyqueuosine reductase OS=Enterobacter kobei OX=208224 GN=queG PE=3 SV=1
MSQPLDLNELAQKIKQWGTELGFQKVGITDTDLSASEPKLQAWLDKQYHGEMEWMARHGMMRARPHELLPGTLRVISVRMNYLPANAAFARTLKNPSLGYVSRYALGRDYHKLLRNRLKKLGETIQQHCVSLNFRPFVDSAPILERPIAEKAGLGWTGKHSLILSRDAGSFFFLGELLIDLPLPIDGPVEEGCGRCVACMTICPTGAIVEPYTVDARRCISYLTIELEGAIPEEFRPLIGNRIYGCDDCQLICPWNRYSQLTDEEDFSPRKALHAPQLIELFAWSEAWFLKVTEGSAIRRIGHLRWLRNVAVALGNAPWDEANIQALESRRGEHPLLDEHIEWAIAQQIEKRNACVVEVQLPKKQRLVRVIEKGLTRDA

SEQ ID NO: 76521 - protein, 379 aa, Enterobacter kobei
  misc_feature (1)..(379): tr|A0A144XXB1|A0A144XXB1_9ENTR Epoxyqueuosine reductase OS=Enterobacter kobei OX=208224 GN=queG PE=3 SV=1
MSQPLDLNELAQKIKQWGAELGFQKVGITDTDLSASEPKLQAWLDKQYHGEMEWMARHGMMRARPHELLPGTLRVISVRMNYLPANAAFARTLKNPSLGYVSRYALGRDYHKLLRNRLKKLGETIQQHCVSLNFRPFVDSAPILERPIAEKAGLGWTGKHSLILSRDAGSFFFLGELLIDLPLPIDGPVEEGCGRCVACMTICPTGAIVEPYTVDARRCISYLTIELEGAIPEEFRPLIGNRIYGCDDCQLICPWNRYSQLTDEEDFSPRKALHAPQLIELFAWSEAWFLKVTEGSAIRRIGHLRWLRNVAVALGNAPWDEANIQALESRRGEHPLLDEHIEWAIAQQIEKRNACVVEVQLPKKQRLVRVIEKGLTRDA

SEQ ID NO: 76522 - protein, 379 aa, Enterobacter lignolyticus
  misc_feature (1)..(379): tr|E3GDC4|E3GDC4_ENTLS Epoxyqueuosine reductase OS=Ente robacter lignolyticus (strain SCF1) OX=701347 GN=queG P E=3 SV=1
MSQPLDLNQLAQQIKQWGTELGFQQVGIADTDLSASEPKLQAWLDKQYHGEMEWMARHGMMRARPHELLPGTLRVISVRMNYLPANAAFARTLKNPALGYVSRYALGRDYHKLLRNRLKKLGEMIQEQYASLNFRPFVDSAPVLERPLAEKAGLGWTGKHSLILSRDAGSFFFLGELLIDLPLPVDSPVEEGCGRCVACMTICPTGAIVEPYTVDARRCISYLTIELEGAIPEEFRPLIGNRIYGCDDCQLICPWNRYSQLTDEDDFAPRKALHAPALIELFSWSEAWFLKVTEGSAIRRIGHLRWLRNIAVALGNAPWDDANIQALESRKGEHPLLDEHIDWALAQQIEKRNACVVEVQLPQKQRLVRVIEKGLPRDA

SEQ ID NO: 76523 - protein, 395 aa, Enterobacter ludwigii
  misc_feature (1)..(395): tr|G8LII2|G8LII2_9ENTR Epoxyqueuosine reductase OS=Ente robacter ludwigii OX=299767 GN=yjeS PE=3 SV=1
MECGILSGFFFTVWSVMSQPLDLNELAQKIKQWGAELGFQKVGITDTDLSASEPKLQAWLDKQYHGEMEWMARHGMMRARPHELLPGTLRVISVRMNYLPANAAFARTLKNPALGYVSRYALGRDYHKLLRNRLKKLGETIQQHCVSLNFRPFVDSAPVLERPIAEKAGLGWTGKHSLILSRDAGSFFFLGELLIDLPLPVDGPVEEGCGRCVACMTICPTGAIVEPYTVDARRCISYLTIELEGAIPEEFRPLIGNRIYGCDDCQLICPWNRYSQLTDEDDFSPRKALHAPQLIELFAWSEAWFLKVTEGSAIRRIGHLRWLRNVAVALGNAPWDEANIQALESRRGEHPLLDEHIEWAIAQQIEKRNACVVEVQLPKKQRLVRVIEKGLVRDA

SEQ ID NO: 76524 - protein, 379 aa, Enterobacter ludwigii
  misc_feature (1)..(379): tr|A0A5A9AQM6|A0A5A9AQM6_9ENTR Epoxyqueuosine reductase OS=Enterobacter ludwigii OX=299767 GN=queG PE=3 SV=1
MSQPLDLNELAQKIKQWGAELGFQKVGITDTDLSASEPKLQAWLDKQYHGEMEWMARHGMMRARPHELLPGTLRVISVRMNYLPANAAFARTLKNPALGYVSRYALGRDYHKLLRNRLKKLGETIQQHCVSLNFRPFVDSAPVLERPIAEKAGLGWTGKHSLILSRDAGSFFFLGELLIDLPLPVDGPVEEGCGRCVACMTICPTGAIVEPYTVDARRCISYLTIELEGAIPEEFRPLIGNRIYGCDDCQLICPWNRYSQLTDEDDFSPRKALHAPQLIELFAWSEAWFLKVTEGSAIRRIGHLRWLRNVAVALGNAPWDEANIQALESRRGEHPLLDEHIEWAIAQQIEKRNACVVEVQLPKKQRLVRVIEKGLVRDA

SEQ ID NO: 76525 - protein, 379 aa, Enterobacter mori
  misc_feature (1)..(379): tr|A0A2J0NW88|A0A2J0NW88_9ENTR Epoxyqueuosine reductase OS=Enterobacter mori OX=539813 GN=queG PE=3 SV=1
MSQPLDLNQLAQNIKQWGAELGFQKVGITDTDLSASEPKLQAWLDKQYHGEMEWMARHGMMRARPHELLPGTLRVISVRMNYLPANAAFARTLKNPSLGYVSRYALGRDYHKLLRNRLKKLGEMIQQHCVSLNFRPFVDSAPILERPIAEKAGLGWTGKHSLILSRDAGSFFFLGELLIDLPLPVDGPVEEGCGRCVACMTICPTGAIVEPYTVDARRCISYLTIELEGAIPEEFRPLIGNRIYGCDDCQLICPWNRYSQLTDEEDFSPRKALHAPPLIELFAWTEAWFLKVTEGSAIRRIGHLRWLRNVAVALGNAPWDEANIQALESRRGEHPLLDEHIEWAVAQQIEKRNACVVEVQLPKKQRLVRVIEKGLTRDA

SEQ ID NO: 76526 - protein, 78 aa, Enterobacter mori
  misc_feature (1)..(78): tr|A0A2U2NDN3|A0A2U2NDN3_9ENTR Epoxyqueuosine reductase (Fragment) OS=Enterobacter mori OX=539813 GN=DEM28_295 20 PE=4 SV=1
MITNIPFEPDVPIEDMCGSCTKCLDACPTGALVNPGQLNAQRCISFLTQTKGFLPDEFRTKIGNRLYGCDTCQTVCPL

SEQ ID NO: 76527 - protein, 379 aa, Enterobacter roggenkampii
  misc_feature (1)..(379): tr|A0A384GMW0|A0A384GMW0_9ENTR Epoxyqueuosine reductase OS=Enterobacter roggenkampii OX=1812935 GN=queG PE=3 S V=1
MSQPLDLNELAQKIKQWGAELGFQKVGITDTDLSASEPKLQAWLDKQYHGEMEWMARHGMMRARPHELLPGTLRVISVRMNYLPANAAFARTLKDPSLGYVSRYALGRDYHKLLRNRLKKLGETIQQHCVSLNFRPFVDSAPILERPIAEKAGLGWTGKHSLILSRDAGSFFFLGELLIDLPLPVDGPVEEGCGRCVACMAICPTGAIVEPYTVDARRCISYLTIELEGAIPEEFRPLIGNRIYGCDDCQLICPWNRYSQLTDEEDFSPRKALHAPPLAELFAWTEAWFLKVTEGSAIRRIGHLRWLRNVAVALGNAPWDEANIRALESRRGEHPLLDEHIEWAIAQQVEKRNACVVEVQLPKKQRLVRVIEKGLPRDA

SEQ ID NO: 76528 - protein, 379 aa, Enterobacter roggenkampii
  misc_feature (1)..(379): tr|A0A0F1DA05|A0A0F1DA05_9ENTR Epoxyqueuosine reductase OS=Enterobacter roggenkampii OX=1812935 GN=queG PE=3 S V=1
MSQPLDLNELAQKIKQWGAELGFQKVGITDTDLSASEPKLQAWLDKQYHGEMEWMARHGMMRARPHELLPGTLRVISVRMNYLPANAAFARTLKDPSLGYVSRYALGRDYHKLLRNRLKKLGETIQQHCVSLNFRPFVDSAPILERPIAEKAGLGWTGKHSLILSRDAGSFFFLGELLIDLPLPVDGPVEEGCGRCVACMTICPTGAIVEPYTVDARRCISYLTIELEGAIPEEFRPLIGNRIYGCDDCQLICPWNRYSQLTDEEDFSPRKALHAPPLAELFAWTEAWFLKVTEGSAIRRIGHLRWLRNVAVALGNAPWDEANIRALESRRGEHPLLDEHIEWAIAQQVEKRNACVVEVQLPKKQRLVRVIEKGLPRDA

SEQ ID NO: 76529 - protein, 379 aa, Enterobacter sichuanensis
  misc_feature (1)..(379): tr|A0A0F1BEA6|A0A0F1BEA6_9ENTR Epoxyqueuosine reductase OS=Enterobacter sichuanensis OX=2071710 GN=queG PE=3 S V=1
MSQPLDLNQLAQKIKQWGAELGFQKVGITDTDLSASEPKLQAWLDKQYHGEMEWMARHGMMRARPHELLPGTLRVISVRMNYLPANAAFARTLKNPSLGYVSRYALGRDYHKLLRNRLKKLGETIQQHCVSLNFRPFVDSAPILERPIAEKAGLGWTGKHSLILSRDAGSFFFLGELLIDLPLPVDGPVEEGCGRCVACMTICPTGAIVEPYTVDARRCISYLTIELEGAIPEEFRPLIGNRIYGCDDCQLICPWNRYSQLTDEEDFSPRKALHAPQLIELFAWTEAWFLKVTEGSAIRRIGHLRWLRNVAVALGNAPWDEANIRALESRRGEHPLLDEHIDWAIAQQIEKRNACVVEVQLPQKQRLVRVIEKGLTRDA

SEQ ID NO: 76530 - protein, 379 aa, Enterobacter soli
  misc_feature (1)..(379): tr|A0A198GUJ1|A0A198GUJ1_9ENTR Epoxyqueuosine reductase OS=Enterobacter soli ATCC BAA-2102 OX=1354262 GN=queG PE=3 SV=1
MSQPLDLNQLAQKIKQWGAELGFQKVGITDTDLSASEPKLQAWLDKQYHGEMEWMARHGMMRARPHELLPGTLRVISVRMNYLPANAAFARTLKNPSLGYVSRYALGRDYHKLLRNRLKKLGETIQQHCVSLNFRPFVDSAPILERPIAEKAGLGWTGKHSLILSRDAGSFFFLGELLIDLPLPVDGPVEEGCGRCVACMTICPTGAIVEPYTVDARRCISYLTIELEGAIPEEFRPLIGNRIYGCDDCQLICPWNRYSQLTDEEDFSPRKALHAPQLIELFAWTEAWFLKVTEGSAIRRIGHLRWLRNVAVALGNAPWDEANVQALESRRGEHPLLDEHIEWAIAQQIEKRNACVVEVQLPKKQRLVRVIEKGLTRDA

SEQ ID NO: 76531 - protein, 55 aa, Enterobacter sp.
  misc_feature (1)..(55): tr|A0A3D2B3I6|A0A3D2B3I6_9ENTR tRNA epoxyqueuosine(34) reductase QueG (Fragment) OS=Enterobacter sp. OX=42895 GN=DE191_02385 PE=4 SV=1
MSQPLDLNQLAQNIKQWGAELGFQHVGITDTDLSASEPKLQAWLDNQYHGEMEWM

SEQ ID NO: 76532 - protein, 369 aa, Enterobacter sp.
  misc_feature (1)..(369): tr|A0A4S5BUA5|A0A4S5BUA5_9ENTR Epoxyqueuosine reductase OS=Enterobacter sp. Z1 OX=2561927 GN=queG PE=3 SV=1
MASSTPSEKSLDKIELQQLDPQELKTWIKAQALDLGFSDCVIAKPDAQDQMPHFKEYLERGYHADMHYLEENLEKRANPTLLVPGTKSIICVRMNYLVASPQPRYVPFEPNSAIIARYARGRDYHKVMRGRLKTLASQIKEKVGDFESRPFADSAPIFEKSLAESAGMGWTGKHTLLIHKKSGSFFVLGELFTSLELPFDQPATAHCGSCTACIDICPTQAIVEPYMLDARKCIAYLTIEYKGIIPEELRQGIGNRIFGCDDCQLICPWNSFAKMATIPDFDARHGLDNISLLDIWQWDEATFLANTEGSPIRRTGYQSFKRNIAIGLGNAPYSVDVVTQLQEAKPLHDEIVNVHIDWAIEQQLQRANV

SEQ ID NO: 76533 - protein, 395 aa, Enterobacterales bacterium
  misc_feature (1)..(395): tr|A0A389M7S8|A0A389M7S8_9GAMM Epoxyqueuosine reductase OS=Enterobacterales bacterium OX=1993870 GN=queG PE=3 SV=1
MTLPLDLIQLAQLIKQWGQSFGFQQVGICDTDLSAEEPKLQAWLDNQYHGEMEWMARHGMLRARPHELLPGTLRVISVRMNYLPAKAAFAKTLNNPELGYVSRYALGRDYHKLLRQRLKKLGDKIQAYCTEHTDSQTIDGQEKHGTEITFRPFVDSAPIMERPLAAKAGIGWVGKHSLILNREAGSWFFLGELLIDLPLPVDQPQEEKCGKCVACITTCPTGAIVAPYTVDARRCISYLTIELEGAIPEEFRPLMGNRIYGCDDCQLICPWNRYSQLTDEADFSPRDALHAPELIELFAWSEEKFLRITEGSPIRRIGHLRWLRNISIALGNAPYAENVLLALQRRQGENSLLDEHIEWAIAEQRKRRDENRVEVQSSQTKRLIRAVEKGLPRDA

SEQ ID NO: 76534 - protein, 379 aa, Enterobacterales bacterium
  misc_feature (1)..(379): tr|A0A2I0FVI5|A0A2I0FVI5_9GAMM Epoxyqueuosine reductase OS=Enterobacterales bacterium CwR94 OX=2025587 GN=queG PE=3 SV=1
MSHPLDLISLATQIKQWGQELGFQQVGICDTDLSLEEPKLQAWLDKQYHGEMDWMARHGMMRARPHELLPGTLRVISVRMNYLPAKAAFASTLKNARLGYVSRYALGRDYHKVLRNRLKQLGDRIRDHCGALNYRPFVDSAPLLERPLAQKAGLGWTGKHSLILNRDAGSWFFLGELLIDLPLPVDTPQEEQCGRCVACLTICPTGAIVEPYVVDARRCISYLTIELEGAIPEALRPLIGNRIYGCDDCQLICPWNRYSQLSDEDDFSPRRVLHAPELTELFSWDEARFLKVTEGSAIRRIGHLRWLRNIAVAMGNAPWDSTIFEALHRRLGEHPLLDEHIHWAIAQQQQRRSDSAIEVQQAQQKRLIRAVEKGLPRDA

SEQ ID NO: 76535 - protein, 175 aa, Enterobacteriaceae bacterium
  misc_feature (1)..(175): tr|A0A3C0H0N5|A0A3C0H0N5_9ENTR tRNA epoxyqueuosine(34) reductase QueG (Fragment) OS=Enterobacteriaceae bacteri um OX=1849603 GN=queG PE=4 SV=1
MSQPLDLTLLAQKIKQWGTELGFQHVGITDTDLSPHEPALQAWLDKQYHGEMEWMARHGMMRARPHELLPGTLRVISVRMNYLPADAAFARTLKDPSLGYISRYALGRDYHKLMRNRLKKLGETIQAQYASLNFRPFVDSAPVLERPLAAKAGLGWTGKHSLILDRNAGSFFFLG

SEQ ID NO: 76536 - protein, 379 aa, Enterobacteriaceae bacterium
  misc_feature (1)..(379): tr|A0A2S0VEF0|A0A2S0VEF0_9ENTR Epoxyqueuosine reductase OS=Enterobacteriaceae bacterium S05 OX=2052938 GN=queG PE=3 SV=1
MSQPLDLVQLAQQIKQWGTELGFQQVGIADTDLSASEPKLQAWLDKQYHGEMEWMARHGMMRARPHELLPGTLRVISVRMNYLPANAAFARTLKDPALGYVSRYALGRDYHKLLRNRLKKLGEKIQEQCASLNFRPFVDSAPILERPIAEKAGLGWTGKHSLILSRDAGSFFFLGELLIDLPLPVDSPVAEECGRCVACMTICPTGAIVEPYTVDARRCISYLTIELEGAIPEEFRPLIGNRIYGCDDCQLICPWNRFSQLTDEEDFSPRQALHAPPLVELFAWSEAWFLKVTEGSAIRRIGHLRWLRNIAVALGNAPWDEAHLRALESRLGEHPLLDEHIEWAMAQQLKKRSADAVEVQLPKKLRLVRVVEKGLPRDA

SEQ ID NO: 76537 - protein, 388 aa, Enterococcus aquimarinus
  misc_feature (1)..(388): tr|A0A1L8QXQ6|A0A1L8QXQ6_9ENTE Iron-sulfur cluster-bind ing protein OS=Enterococcus aquimarinus OX=328396 GN=RU 93_GL000195 PE=4 SV=1
MLDLLSLKEKIIQKSKELGIDKIGFATAEPFDHLKESLMEQKEKGFTSGFEHQNIDERLYPELTFEQPKSIISIALAYPNKFHGEVPRDVKRGQFARASWGEDYHSILQDRLKKLVAYIESEASSEEEKNKWRFSPQVDTGEYVDVAVAQRAGLGFIGLNGLLITKEFGSFVYLGEITTNIQFEPDEPVPNGCGDCTRCITACPTKALLGDGRMNAKLCLSYQTQTKGMMPREFRKKTRNVLYGCDICQLVCPYNQGIDSHFHPEMEPIVDEVFPKLEPILTLSNREFKAQFGRLAGSWRGKKPLQRNALIALANLGGRESLPAIINCLDDPRPVIRGTAVWAITELTKRDPKETIGLFEQLQVKETDPEVLLEITEAFETFKNPRRK

SEQ ID NO: 76538 - protein, 384 aa, Enterococcus asini
  misc_feature (1)..(384): tr|A0A413AKI4|A0A413AKI4_9ENTE tRNA epoxyqueuosine(34) reductase QueG OS=Enterococcus asini OX=57732 GN=queG P E=4 SV=1
MTSLKEQIIAESRRLGIDKIGFTTAMPFTELEEPLNRQRELGHNSGFEHQNIPERIYPELTFEGPQSIIAIALAYPTKIREEIPKDEKRGMFARASWGVDYHQILAEKMQQLVAFIETLQAPDEETWRFAPQVDTGEFVDVAVAQRAGLGFVGRNGLLITKEYGSFVYLGEIVTNIALEPDEPGVFGCGDCTRCIKACPTQALLGDGSMNAQRCLSYQTQTKGVMPEEYRKKIRNVIYGCDICQLVCPYNQDKDFHFHQEMEPAVDEVYPKLRPMLKLSNKEFKQQFGHLAGAWRGKKPLQRNAIIALANTGDKESLPLLWELVQEDPRPVIRATALWSISRLGKKDAALWQERLAQQQAQEKDPEVLQAYQEALAVFEKKLRP

SEQ ID NO: 76539 - protein, 386 aa, Enterococcus asini
  misc_feature (1)..(386): tr|R2PIE3|R2PIE3_9ENTE Iron-sulfur cluster-binding prot ein OS=Enterococcus asini ATCC 700915 OX=1158606 GN=UAS _02472 PE=4 SV=1
MALQTLKEQIIAESRRLGIDKIGFTTAMPFTELEEPLNRQRELGHNSGFEHQNIPERIYPELTFEGPQSIIAIALAYPTKIREEIPKDEKRGMFARASWGVDYHQILAEKMQQLVAFIETLQAPDAETWRFAPQVDTGEFVDVAVAQRAGLGFVGRNGLLITKEYGSFVYLGEIVTNIALEPDEPGVFGCGDCTRCIKACPTQALLGDGSMNAQRCLSYQTQTKGVMPEEYRKKIRNVIYGCDICQLVCPYNQDKDFHFHQEMEPAVDEVYPKLRPMLKLSNKEFKQQFGHLAGAWRGKKPLQRNAIIALANTGDKESLPLLWELVQEDPRPVIRATALWSISRLGKKDAALWQERLTQRQAQEKDPEVLQAYQEALAVFEKKLHP

SEQ ID NO: 76540 - protein, 380 aa, Enterococcus avium
  misc_feature (1)..(380): tr|A0A564T764|A0A564T764_ENTAV Epoxyqueuosine reductase OS=Enterococcus avium OX=33945 GN=queG PE=3 SV=1
MQTLKERIIAESKQLGIDKIGFTTADSFDYMEESLLEQRALGHTSGFEHQNIKERLYPEETFENPKSIIAIALAYPTKIHDKVPRDEKRGQFARASWGTDYHFILEERLTRLIDFIKEQAETEQVQAQWRFAPQVDTGELVDVAVAQRAGLGFIGRNGLLITEEYGSFVYLGEIITNIQFEPDQPVPNGCGDCTRCITGCPTGALLGDGRMNAKKCLSYQTQTKGMMPEQYRKKMRNVIYGCDICQLVCPYNRGKDFHFHEEMEPKVDEVHPKLAPLLSISNREFKEQFGHLAGSWRGKKPLQRNALIALANLGGKEALPEIQACLQDQRPVIRGTAVWALGQLTKKAPEETIGLLQELKDTETDSEVLTEIANVLEKLG

SEQ ID NO: 76541 - protein, 380 aa, Enterococcus avium
  misc_feature (1)..(380): tr|S0SG85|S0SG85_ENTAV Epoxyqueuosine reductase OS=Ente rococcus avium ATCC 14025 OX=1140002 GN=queG PE=3 SV=1
MQTLKERIIAESKQLGIDKIGFTTADPFDYMEESLLEQRALGHTSGFEHQNIKERLYPEETFEDPKSIIAIALAYPTKIHDKVPRDEKRGQFARASWGTDYHFILEERLTRLIDFIKEQAETEQVQAQWRFAPQVDTGELVDVAVAQRAGLGFIGRNGLLITEEYGSFVYLGEIITNIQFEPDQPVPNGCGDCTRCITGCPTGALLGDGRMNAKKCLSYQTQTKGMMPEQYRKKMRNVIYGCDICQLVCPYNRGKDFHFHEEMEPKVDEVHPKLAPLLSISNREFKEQFGHLAGSWRGKKPLQRNALIALANLGGKEALPEIQACLQDQRPVIRGTAVWALGQLTKKAPEETIGLLQELKETETDSEVLTEIANVLERLS

SEQ ID NO: 76542 - protein, 381 aa, Enterococcus caccae
  misc_feature (1)..(381): tr|R3WS13|R3WS13_9ENTE Iron-sulfur cluster binding prot ein OS=Enterococcus caccae ATCC BAA-1240 OX=1158612 GN= UC7_02158 PE=4 SV=1
MTLKQKIIAESKRLGIDKIGFASAEPFYELEDSLKEQRERGFNSGFEHQVIEERVYPEKTFENPKTIISIALAYPTKIEGKVPRDEKRGMFARASWGIDYHDVLRDRLAKLIEFIQSQAQSLEETEAWRFAPQVDTGELVDVAVAQRAGLGFIGRNGLLITEEFGSFVYLGEIVTNIDFEVDKPVPFGCGDCTRCVTACPTQALLGNGSMNAKKCLSYQTQTKDMMPEEYRKKMHNVIYGCDICQLVCPYNRGKDFHFHQEMEPEVDTVYPKLKPMLSISNKEFKETFGHLSGSWRGKKPLQRNALIALANLGDRSALPEIYVCATEDVRPVIRGTAAWAIGKLGNKEAEKWLGVLNELLKVEPEEEVLEEIRNAIKQLEK

SEQ ID NO: 76543 - protein, 348 aa, Enterococcus canis
  misc_feature (1)..(348): tr|A0A1L8RE33|A0A1L8RE33_9ENTE Iron-sulfur cluster-bind ing protein OS=Enterococcus canis OX=214095 GN=RU97_GL0 02067 PE=4 SV=1
MEDSLKEQKAAGHTSGFEHQVLEERLYPEKIFSQPRTIIAIALAYPTKLSQPVKKGRVKRGQFARASWGLDYHTILREKMAELITAIKELVPETTFKPMVDTGELIDVAVAQRAGLGFIGRNGLLITPEFGSYVYLGEIITNLALPPDEPQENQCGTCTRCIDFCPPQALLGDGRLNAPRCLSYQTQTKGFMAEEFRPMIKNVIYGCDICQQVCPFNKGKDFHFHPEMEPVVEEVMPELQPLLTISNREFKERFGRLAGSWRGKKPLQRNAIIALANTRDRSAIPALLAAMEDTRPVIRGTAAWAIATITRQSNQELVTFMAEKLQQETDEEAAQEISQALARLKETL

SEQ ID NO: 76544 - protein, 391 aa, Enterococcus casseliflavus
  misc_feature (1)..(391): tr|A0A377KZ00|A0A377KZ00_ENTCA Iron-sulfur cluster-bind ing protein OS=Enterococcus casseliflavus OX=37734 GN=q ueG PE=4 SV=1
MSLKEKIIAESKRLGIDKIGFASAEPFLALEPSLREQKAKGHTSGFEHPVIEERIYPERTFENPQTIIAIALAYPTKIKEKVPRDEKRGMFARASWGIDYHDILRERLDRLIAFIKEQAQTMEEQVKWRFAPQVDTGELVDVAAAQRAGLGFIGRNGLLITEEFGSFVYLGEIVTNISLEPDEEVPFGCGDCMRCVTACPTKALLGDGRMNAQRCLSYQTQTKGMMPEEYRKKMHNVIYGCDICQLVCPYNRGKDFHFHQEMEPEVDTVYPKLQPMLSLSNKAFKEQFGHLSGSWRGKKPLQRNAIIALANVGDRSALPAIWRCATEDVRPVIRGTAYWAIGQLGVKEPEMWLERLQRCAELEPEEEAQQELQPAIERLQAVITKKQEKEL

SEQ ID NO: 76545 - protein, 391 aa, Enterococcus casseliflavus
  misc_feature (1)..(391): tr|C9ABH3|C9ABH3_ENTCA Iron-sulfur cluster-binding prot ein OS=Enterococcus casseliflavus EC20 OX=565655 GN=ECB G_02501 PE=4 SV=1
MSLKEKIIAESKRLGIDKIGFASAEPFLALEPSLREQKAKGHTSGFEHPVIEERIYPERTFENPQTIIAIALAYPTKIKEKVPRDEKRGMFARASWGIDYHDILRERLDRLIAFIKEQAQTMEEQVEWRFAPQVDTGELVDVAAAQRAGLGFIGRNGLLITEEFGSFVYLGEIVTNISLEPDEEVPFGCGDCMRCVTACPTKALLGDGRMNAQRCLSYQTQTKGMMPEEYRKKMHNVIYGCDICQLVCPYNRGKDFHFHQEMEPEVDTVYPKLQPMLSLSNKAFKEQFGHLSGSWRGKKPLQRNAIIALANVGDRSALPAIWRCATEDVRPVIRGTAYWAIGQLGVKEPEMWVERLQRCAELEPEEEAQQELQPAIERLQAVITKKQEKEL

SEQ ID NO: 76546 - protein, 391 aa, Enterococcus durans
  misc_feature (1)..(391): tr|A0A367CI64|A0A367CI64_9ENTE Epoxyqueuosine reductase OS=Enterococcus durans OX=53345 GN=EA71_00512 PE=4 SV= 1
MTKTLKDEIIEESKRLGIDKIGFTTAEPFDHLKESLESQKAAGHTSGFEHPVIDERLYIEKTFESPQSIISIALAYPTKIHEEVPKDEKRGQFARASWGVDYHDILRDRLNKLIDFIKTRAAVWQQEDAWRFAPQVDTGELIDVAVAQRAGLGFIGRNGLLITEEYGSFVYLGEVVTNIQFEPDEPGVFGCGDCTRCITACPTKALLGDGRMNAQRCLSYQTQTKGLMPEEYRKKMRNVIYGCDICQLVCPYNRGKDFHFHDEMEPKVDEVYPKLKPMLQLSNKEFNAQFGHLAGSWRGKKPLQRNALIALANLGDTSALPEIEKCLTDIRPVIRATAAWAIGRLGRKEPKKWIETLEVVDQKEDNEEVSIEIAQAITMLQKKNKEKRPNS

SEQ ID NO: 76547 - protein, 391 aa, Enterococcus durans
  misc_feature (1)..(391): tr|A0A377KKL3|A0A377KKL3_9ENTE Iron-sulfur cluster-bind ing protein OS=Enterococcus durans OX=53345 GN=queG PE= 4 SV=1
MTKTLKDEIIEESNRLGIDKIGFTTAEPFDHLKESLESQKAAGHTSGFEHPVIDERLYIEKTFESPQSIISIALAYPTKIHEEVPKDEKRGQFARASWGVDYHDILRDRLNKLIDFIKTRAAVWQQEDAWRFAPQVDTGELIDVAVAQRAGLGFIGRNGLLITEEYGSFVYLGEVVTNIQFEPDEPGVFGCSDCTRCITACPTKALLGDGRMNAQRCLSYQTQTKGLMPEEYRKKMRNVIYGCDICQLVCPYNRGKDFHFHDEMEPKVDEVYPKLKPMLQLSNKEFNAQFGHLAGSWRGKKPLQRNALIALANLGDTSALPEIEKCLTDVRPVIRATAAWAIGRLGRKEPKKWIETLEVVDQKEDNEEVSIEIAQAITMLQKKNKEKRPNS

SEQ ID NO: 76548 - protein, 389 aa, Enterococcus faecalis
  misc_feature (1)..(389): sp|Q834R1|QUEG_ENTFA Epoxyqueuosine reductase OS=Entero coccus faecalis (strain ATCC 700802 / V583) OX=226185 G N=queG PE=3 SV=1
MPTLKEKIIQESQRLGIDKIGFTHAEPFIELEDSLHEQRERGYNSGFEHQNVEERIYPEKTFEHPKSIISIALAYPTKAQEKMPRDEKRGQFARASWGIDYHHILQDRLQKLIAFIEEQAATEAEKEHWRFRPQVDTGEYVDTAVAQRAGLGFIGKNGLLITEEFGSFVYLGEVTTNIQFEPDEPVPNGCGDCTRCITGCPTGALLGDGRMNAQKCLSYQTQTKGMMPEDYRKKMRNVIYGCDICQLVCPYNKGKDFHFHEEMEPKIEEVYPKLAPLLTISNKEFKQQFGHLAGSWRGKKPLQRNALIALANLGGREAIPQIILCLNDQRPVIRGTAAWSLGQLAKREPEQSLEALNYLLSVETEEEVIEEAQKAIHLLTSKKGSRSTE

SEQ ID NO: 76549 - protein, 389 aa, Enterococcus faecalis
  misc_feature (1)..(389): tr|S4FCB8|S4FCB8_ENTFL Epoxyqueuosine reductase OS=Ente rococcus faecalis WKS-26-18-2 OX=1244144 GN=queG PE=3 S V=1
MPTLKEKIIQESQRLGIDKIGFTHAEPFIELEDSLHEQRERGYNSGFEHQNVEERIYPEKTFEHPKSIISIALAYPTKAQEKMPRDEKRGQFARASWGIDYHHILQDRLQKLIAFIEEQAATEAEKEHWRFRPQVDTGEYVDTAVAQRAGLGFIGKNGLLITEEFGSFVYLGEVTTNIQFEPDEPVPNGCGDCTRCITGCPTGALLGDGRMNAQKCLSYQTQTKGMMPEEYRKKMRNVIYGCDICQLVCPYNKGKDFHFHEEMEPKIEEVYPKLAPLLTISNKEFKQQFGHLAGSWRGKKPLQRNALIALANLGGREAIPQIILCLNDQRPVIRGTAAWSLGQLAKREPEQSLEALNYLLSVETEEEVIEEAQKAIHLLTSKKGSRSTE

SEQ ID NO: 76550 - protein, 383 aa, Enterococcus faecium
  misc_feature (1)..(383): tr|Q3Y2A2|Q3Y2A2_ENTFD 4Fe-4S cluster-binding protein O S=Enterococcus faecium (strain ATCC BAA-472 / TX0016 / DO) OX=333849 GN=HMPREF0351_10502 PE=4 SV=1
MTLKEEIIQESKRLGIDKIGFTTAEPFDSLKESLEEQKAAGHTSGFEHPNIDERLYPEMTFDQPKSIISIALAYPTRIHEEVPRDEKRGQFARASWGIDYHDILRDRLNRLIEFIQTRAEKWQKEEEWRLAPQVDTGELIDVAVAQRAGLGFIGRNGLLITEEFGSFVYLGEIVTNIVFEPDKPGEFGCGDCMRCVTACPTKALLGDGRMNAQRCLSYQTQTKGMMPEEYRKKMRNVIYGCDICQLVCPYNQGKDFHFHEEMEPKVDEIYPKLKPMLSMSNKDFKQQFGHLAGSWRGKKPLQRNALIALANLGDRTALPEISECLTDVRPVIRGTAAWAIGRLGTKEPEKWLDVLDEILAKETEEVVINELEHAQKLLRRKLK

SEQ ID NO: 76551 - protein, 383 aa, Enterococcus faecium
  misc_feature (1)..(383): tr|J9A935|J9A935_ENTFC Putative iron-sulfur cluster-bin ding protein OS=Enterococcus faecium TX1337RF OX=113480 2 GN=HMPREF1345_00035 PE=4 SV=1
MTLKEEIIQESKRLGIDKIGFTTAEPFDSLKESLEEQKAAGHTSGFEHPNIDERLYPEMTFDQPKSIISIALAYPTRIHEEVPRDEKRGQFARASWGIDYHDILRDRLNRLIEFIQTRAEKWQKEEEWRLAPQVDTGELIDVAVAQRAGLGFIGRNGLLITEEFGSFVYLGEIVTNIVFEPDKPGEFGCGDCMRCVTACPTKALLGDGRMNAQRCLSYQTQTKGMMPEEYRKKMRNVIYGCDICQLVCPYNQGKDFHFHEEMEPKIDEVYPKLKPMLSMSNKNFKQQFGHLAGSWRGKKPLQRNALIALANLGDRTALPEISECLTDVRPVIRGTAAWAIGRLGTKEPEKWLDVLDETLAKESEEVVINELEHAQKLLRRKLK

SEQ ID NO: 76552 - protein, 380 aa, Enterococcus florum
  misc_feature (1)..(380): tr|A0A4P5PBY9|A0A4P5PBY9_9ENTE Epoxyqueuosine reductase OS=Enterococcus florum OX=2480627 GN=NRIC_31670 PE=4 S V=1
MSLKERIIAESQRLGIDKIGFASAEPFTELEASLREQKARGYTSGFEHPVIEERIYPEKTFEQPKTIISIALAYPTKARETVPKDEKRGMFARASWGIDYHDILRDRLNRLIDFIQTEAKTRQESENWRFAPQVDTGELLDVSVAQRAGLGFIGRNGLLITEEFGSFVYLGEIITNIEFEVDDPIPFGCGDCMRCINGCPTKALLGDGRMNAQRCLSYQTQTKGMMPDEYRKKMRNVIYGCDICQLVCPYNQGKDVHFHEEMEPEIDTVYPKLKPMLQLSNKEFNKQFGHLAGSWRGKKPLQRNAIIALANLGDRSALSEIFQVAKDDVRPVLRGTAAWAIGRLGKKEAEKWLASLQELKEQEQDEAALLEIEKALEMLE

SEQ ID NO: 76553 - protein, 396 aa, Enterococcus gallinarum
  misc_feature (1)..(396): tr|A0A366U3Q2|A0A366U3Q2_ENTGA Epoxyqueuosine reductase OS=Enterococcus gallinarum OX=1353 GN=queG PE=4 SV=1
MSLKEKIIAESKRLGIDKIGFASAEPFYELESSLREQRAKGHTSGFEHQVIEERIYPERTFENPQTIIAIALAYPTKIKEKVPRDEKRGMFARASWGIDYHDILRDRLEKLIQFIKAQAENLEEAESWRFAPQVDTGELVDVAVAQRAGLGFIGRNGLLITEEFGSFVYLGEIVTNISFETDEAVPFGCGDCMRCVTACPTKALLGDGRMNAQRCLSYQTQTKGMMPEEYRKKMHNVIYGCDICQLVCPYNRGKDFHFHQEMEPEVETVYPKLQPMLSLSNKAFKNQFGHLSGSWRGKKPLQRNAIIALANLGDRTALPAIWRCATEDVRPVIRGTAYWAIGQLGIKEPEQWLERLQQCEELEPEEEARVELQAAIERLKTIVASSGADRKNKSVD

SEQ ID NO: 76554 - protein, 396 aa, Enterococcus gallinarum; identical to SEQ ID NO: 76553
  misc_feature (1)..(396): tr|C9A361|C9A361_ENTGE Iron-sulfur cluster-binding prot ein OS=Enterococcus gallinarum (strain EG2) OX=565653 G N=EGBG_02630 PE=4 SV=1

SEQ ID NO: 76555 - protein, 380 aa, Enterococcus gilvus
  misc_feature (1)..(380): tr|A0A345FWV0|A0A345FWV0_9ENTE tRNA epoxyqueuosine(34) reductase QueG OS=Enterococcus gilvus OX=160453 GN=queG PE=4 SV=1
MQTLKERIIAESKQLGIDKIGFTTAEPFDYLEESLLEQRSLGHTSGFEHQNIKERLYPEETFEDPKSIIAIALAYPTKIHEKVPRDEKRGQFARASWGTDYHFILEERLTKLIAFIKEQAETEQLQAEWRFAPQVDTGELVDVAVSQRAGLGFIGRNGLLITEEYGSFVYLGEIITNIQFEPDQPVPNGCGDCTRCITGCPTGALLGDGRMNAKKCLSYQTQTKGMMPEQYRKKMRNVIYGCDICQLVCPYNRGKDFHFHEEMEPKVDEVYPKLTPLLTISNREFKEQFGHLAGSWRGKKPLQRNALIALANLGGREALPEIRDCLQDQRPVIRGTAVWALGQLTKKAPDETIRLLQELKETETDSEVLTEIADVLERLG

SEQ ID NO: 76556 - protein, 380 aa, Enterococcus gilvus
  misc_feature (1)..(380): tr|R2XU96|R2XU96_9ENTE Epoxyqueuosine reductase OS=Ente rococcus gilvus ATCC BAA-350 OX=1158614 GN=queG PE=3 SV =1
MQTLKERIIAESKQLGIDKIGFTTAEPFDYLEESLLEQRSLGHTSGFEHQNIKERLYPEETFEDPKSIIAIALAYPTKIHEKVPRDEKRGQFARASWGTDYHFILEERLTKLIAFIKEQAETEQLQAEWRFAPQVDTGELMDVAVAQRAGLGFIGRNGLLITEEYGSFVYLGEIITNIQFEPDQPVPNGCGDCTRCITGCPTGALLGDGRMNAKKCLSYQTQTKGMMPEQYRKKMRNVIYGCDICQLVCPYNRGKDFHFHEEMEPKVDEVYPKLTPLLTISNREFNEQFGHLAGSWRGKKPLQRNALIALANLGGREALPEIRDCLKDQRPVIRGTAVWALGQLTKKAPDETIRLLQELKETETDAEVLTEIADVLERLG

SEQ ID NO: 76557 - protein, 381 aa, Enterococcus haemoperoxidus
  misc_feature (1)..(381): tr|R2QDR8|R2QDR8_9ENTE Iron-sulfur cluster binding prot ein OS=Enterococcus haemoperoxidus ATCC BAA-382 OX=1158 608 GN=UAW_02293 PE=4 SV=1
MTLKQKIIEESKRLGIDKIGFASAEPFYELEDSLKEQKELGFNSGFEHQVIEERIYPEKTFENPKTIISIALAYPTKIEGKVPRDEKRGMFARASWGIDYHDVLRDRLGKLIEFIHSQAQNLEETESWRFAPQVDTGELVDVAVAQRAGLGFIGRNGLLITEEFGSFVYLGEIVTNIDFEVDKPVPFGCGDCTRCVTACPTQALLGNGSMNAKKCLSYQTQTKEMMPEEYRKKMHNVIYGCDICQLVCPYNRGKDFHFHKEMEPEVETVYPKLKPMLSMSNKEFKTQFGHLSGSWRGKKPLQRNALIALANLGDRSALPEILVCAKEDVRPVIRGTAAWAIGKLGNKEAEKWLNVLNELLEIEPEEEVLVEIKNAIKQLEK

SEQ ID NO: 76558 - protein, 387 aa, Enterococcus hermanniensis
  misc_feature (1)..(387): tr|A0A1L8T9M7|A0A1L8T9M7_9ENTE Iron-sulfur cluster-bind ing protein OS=Enterococcus hermanniensis OX=249189 GN= RV04_GL001228 PE=4 SV=1
MTLKEKIIAESQRLGIDKIGFASAEPFDHLENSLREQKERGYTSGFEHPVIEERIYPERTFEGPKTIISIALAYPTKIHEEIPKDEKRGMFARASWGVDYHDILRDRLNQLIAFIQSEAASEAGADEWRFRPQVDTGELVDVSVAQRAGLGFIGRNGLLITEEFGSFVYLGEIVTNIAFEVDEAVPFGCGECTRCIKACPTKALLGDGRMNAQRCLSYQTQTKTLMPEEYRKKMSNVIYGCDICQLVCPYNQGKDFHFHQEMEPQVDTVYPKLKPMLSLSNKEFKAQFGHLSGAWRGKKPLQRNAIIALANLGDRTALPDLYQIAQQDVRPVIRGTAFWAIGRLGNKEPELWIERLTELLEKESDPEALQELTHAVEQLEKKKKRKR

SEQ ID NO: 76559 - protein, 383 aa, Enterococcus hirae; identical to SEQ ID NO: 76550
  misc_feature (1)..(383): tr|A0A4U9QD30|A0A4U9QD30_ENTHR Iron-sulfur cluster-bind ing protein OS=Enterococcus hirae OX=1354 GN=queG PE=4 SV=1

SEQ ID NO: 76560 - protein, 390 aa, Enterococcus hirae
  misc_feature (1)..(390): tr|I6T6G8|I6T6G8_ENTHA Iron-sulfur cluster-binding prot ein OS=Enterococcus hirae (strain ATCC 9790 / DSM 20160 / JCM 8729 / LMG 6399 / NBRC 3181 / NCIMB 6459 / NCDO 1258) OX=768486 GN=EHR_06925 PE=4 SV=1
MTKTLKEEIIEESKRLGIDKIGFTTAEPFDYLKESLEEQKAAGHTSGFEHPVIEERLYLEKTFDRPQSIIAIALAYPTKIHEEVPKDEKRGQFARASWGIDYHDILRDRLNQLITFIQSRASVWQQEEAWRFAPQVDTGELVDVAVAQRAGLGFIGRNGLLITEEYGSFVYLGEIVTNIVFEPDEPGVFGCGDCTRCVTACPTKALLGDGRMNAQRCLSYQTQTKGLMPNEYRKKMRNVIYGCDICQLVCPYNQGKDFHFHEEMEPKVEEVYPKLKPMLSLSNKEFKQQFGHLAGSWRGKKPLQRNALIALANLGDTSALPEIESCLSDVRPVIRATAAWSIGRLGRKEPEKWLETLEQMKQREEDQEVITEIIEAQEMLAKKTKRKKRT

SEQ ID NO: 76561 - protein, 382 aa, Enterococcus italicus
  misc_feature (1)..(382): tr|E6LG47|E6LG47_ENTI1 Putative iron-sulfur cluster-bin ding protein OS=Enterococcus italicus (strain DSM 15952 / LMG 22039 / TP 1.5) OX=888064 GN=HMPREF9088_1337 PE= 4 SV=1
MTDLLTLKEKIIAESKRIGIDKIGFTTADPFIELKDSLEEQKAAGHTSGFEHPNIDERIYPERTFDNPKSIIAIALAYPTRIHERMPRDQRRGQFARVSWGIDYHDVLNEKLQQLIAFIQAETAGVDSHFKPQVDTGEFVDVAVAQRAGLGFIGKNGLLITEEFGSFVYLGEIVTNLSLEPDEPVANGCGDCTRCITGCPTTALLGDGRMNAKRCLSYQTQTKGIMPNEFRKKMHTVIYGCDICQLVCPYNRGKDFHFHEEMEPKTDEVYPPLVPLLSISNKEFKKQYGHLSGSWRGKKPLQRNALIALVNLGARENLPEIMRCLKDPRPVIRATAVWATAELTKKEPAETIALFEELLLEESDEEVQAEIKKNLHYLAKIS

SEQ ID NO: 76562 - protein, 381 aa, Enterococcus moraviensis
  misc_feature (1)..(381): tr|R2TIQ4|R2TIQ4_9ENTE Iron-sulfur cluster binding prot ein OS=Enterococcus moraviensis ATCC BAA-383 OX=1158609 GN=UAY_00360 PE=4 SV=1
MTLKQKIIAESKRLGIDKIGFASAAPFYELEESLIEQKERGFNSGFEHQVIEERIYPEKTFENPKTIISIALAYPTKIEGKVPRDEKRGMFARASWGIDYHDVLRDRLAKLIDFIQSQAKDLEETQEWRFAPQVDTGELVDVAVAQRAGLGFIGRNGLLITEEFGSFVYLGEIVTNIDFEVDKPVPFGCGDCTRCVTACPTQALLGNGSMNAKKCLSYQTQTKGMMPEEYRKKMHNVIYGCDICQLVCPYNKGKDFHFHKEMEPEVDTVYPKLKPMLSISNKEFKETFGHLSGSWRGKKPLQRNALIALANLGDRSALPEIHRCATEDVRPVIRGTAVWAIGKLGNKDSEKWLDVLNELLEVEPEEEVLEEVRKAIKQLEK

SEQ ID NO: 76563 - protein, 388 aa, Enterococcus mundtii
  misc_feature (1)..(388): tr|A0A2T5DFX1|A0A2T5DFX1_ENTMU tRNA epoxyqueuosine(34) reductase QueG OS=Enterococcus mundtii OX=53346 GN=queG PE=4 SV=1
MALTLKEEIIQESKRIGIDKIGFTTAEPFDHLKESLVEQKAAGHTSGFEHPNIDERLYPEMTFDRPKSIIAIALAYPTKIHEKMPRDEKRGQFARASWGIDYHDVLRDRLQQLISFIESRATHWQKEEEWRLAPQVDTGELIDVAVAQRAGLGFIGRNGLLITEEFGSFVYLGEIVTNIDLEPDAPGVFGCGECTRCVTACPTDALLGDGRMNAKRCLSYQTQTKGMMPEEYRKKMSNVIYGCDICQLVCPYNRGKDFHFHPEMEPKVDEVYPKLTPMLTISNKEFKQQYGHLAGSWRGRKPLQRNALIALANLGERAALPHIEECLSDVRPVIRGTAAWAIGKLGIKDPEKWQEVLSCALEKETDEEAIHEMDQAIQLLQKKKSPKK

SEQ ID NO: 76564 - protein, 388 aa, Enterococcus mundtii
  misc_feature (1)..(388): tr|V5XM37|V5XM37_ENTMU 4Fe-4S binding protein OS=Entero coccus mundtii QU 25 OX=1300150 GN=EMQU_0561 PE=4 SV=1
MALTLKEEIIQESKRIGIDKIGFTTAEPFDHLKESLVEQKAAGHTSGFEHPNIDERLYPEMTFDRPKSIIAIALAYPTKIHEKMPRDEKRGQFARASWGIDYHDVLRDRLQQLISFIESRATHWQKEEEWRLAPQVDTGELIDVAVAQRAGLGFIGRNGLLITEEFGSFVYLGEIVTNIDLEPDTPGVFGCGECTRCVTACPTDALLGDGRMNAKCCLSYQTQTKGMMPEEYRKKMSNVIYGCDICQLVCPYNRGKDFHFHPEMEPKVDEVYPKLTPMLTISNKEFKQQYGHLAGSWRGRKPLQRNALIALANLGERAALPHIEECLSDVRPVIRGTAAWAIGKLGIKDPEKWQEVLSCALEKETDEEAIHEMNQAIQLLQKKKTPKK

SEQ ID NO: 76565 - protein, 380 aa, Enterococcus phoeniculicola
  misc_feature (1)..(380): tr|R3TLV1|R3TLV1_9ENTE Iron-sulfur cluster-binding prot ein OS=Enterococcus phoeniculicola ATCC BAA-412 OX=1158 610 GN=UC3_02811 PE=4 SV=1
MNLKEKIIAQSKLLGIDKIGFASAEPFDYLEDSLREQKDKGHTSGFEHPVIEDRLYLERTFENPQTIISIALAYPTKARDKVPRDEKRGQFARASWGIDYHEILRDRLGKLIEFIKEEAKNDQEAEQWRFAPQVDTGELIDVAVAQRAGLGFIGRNGLLITEEFGSFVYLGEIITNITFTPDEPVPFGCGDCTRCITACPTSALLGDGRMNAKRCLSYQTQTKGMMPEEYRKKMHNVIYGCDICQLVCPYNKGKNIHFHEEMEPDIETVYPKLKPMLSMSNKEFNEKFGHLAGSWRGKKPLQRNAIIALANLGDRSALPEIWMAAHDIRPVIRGTAAWAIGKLGKKEVDLWQPRLSSWLEEEPEEEVIREIKKALEMFEG

SEQ ID NO: 76566 - protein, 382 aa, Enterococcus plantarum
  misc_feature (1)..(382): tr|A0A2W3ZLQ3|A0A2W3ZLQ3_9ENTE tRNA epoxyqueuosine(34) reductase QueG OS=Enterococcus plantarum OX=1077675 GN= queG PE=4 SV=1
MTLKEKIIEESKRLGIDKIGFASAEPFYELEDSLIEQRELGYNSGFEHQVIEERIYPEKTFENPKTIISIALAYPTKIEGKVPRDEKRGMFARASWGIDYHDVLRDRLSKLIAFIQSQTQGLEETGEWRFAPQVDTGELVDVAVAQRAGLGFIGRNGLLITEEFGSFVYLGEIVTNIDFEVDEPIPFGCGDCTRCVTACPTQALLGNGSMNAKKCLSYQTQTKDMMPEEYRRKMHNVIYGCDICQLVCPYNRGKDFHFHKEMEPEVDTVYPKLKPMLSLSNKEFKTQFGHLSGSWRGKKPLQRNALIALANLGDRSALPDIVVCAKEDVRPVIRGTAAWAIGKLGNKEAEKWIDFLTELLEVETEEEVLIEIKNAIKQLEKT

SEQ ID NO: 76567 - protein, 397 aa, Enterococcus pseudoavium
  misc_feature (1)..(397): tr|A0A3D8ZZP9|A0A3D8ZZP9_9ENTE tRNA epoxyqueuosine(34) reductase QueG OS=Enterococcus pseudoavium OX=44007 GN= queG PE=4 SV=1
MQSLKEKIIVESKRIGIDKIGFASAEPFYELESSLQEQRARGYNSGFEHQVVEERIYPEKTFENPQTIIAIALAYPTKMREEVPKDEKRGMFARASWGIDYHEILRDRLEKLIAFIKAQAANLQQENEWRFAPQVDTGELVDVAVAQRAGLGFIGRNGLLITEEYGSFVYLGEIITNIQFETDEAVPFGCGDCTRCVTACPTKTLLGDGRMNAQRCLSYQTQTKGMMPEEYRKKMRNVIYGCDICQLVCPYNKGKDFHFHAEMEPQVDEVYPKLKPMLSLSNKQFKAQFSHLAGSWRGKKPLQRNALIALANVGDRTALPDILVCAQEDVRPVIRGTAAWAIGRLGKSEPEQWLAHLAELKNKETDSEALAEIEQAITELQQRVAKVRKRKRSTEEK

SEQ ID NO: 76568 - protein, 381 aa, Enterococcus quebecensis
  misc_feature (1)..(381): tr|A0A1E5GSX0|A0A1E5GSX0_9ENTE tRNA epoxyqueuosine(34) reductase QueG OS=Enterococcus quebecensis OX=903983 GN =BCR23_10880 PE=4 SV=1
MTLKQRIIAESKRLGIDKIGFASAEPFYELEDSLRRQKELGFNSGFEHQVIEERIYPEKTFENPKTIISIALAYPTKIEEKVPRDEKRGMFSRASWGIDYHDILRDRLTKLIDFIQSQAKSLEETEKWRFAPQVDTGELVDVAVAQRAGLGFIGRNGLLITEEFGSFVYLGEIVTNIDFEVDEPVPFGCGDCTRCVTACPTQALLGDGSMNAQKCLAYQTQTKGMVPEEYRKKMSNVIYGCDICQLVCPYNKGKNFHFHKEMEPEVDTVYPKLKPMLSISNKEFKETFGHLSGSWRGKKPLQRNALIALANLGDRSALPEILVCAKEDVRPVIRGTAAWAIGKLGNREAEKWLGILTELLEKEQDEEVIVEITNAIERLEK

SEQ ID NO: 76569 - protein, 380 aa, Enterococcus raffinosus
  misc_feature (1)..(380): tr|A0A1L8WXF4|A0A1L8WXF4_9ENTE Epoxyqueuosine reductase OS=Enterococcus raffinosus OX=71452 GN=queG PE=3 SV=1
MQTLKERIIAESKQLGIDKIGFTTAEPFDYLEESLIEQRSLGHTSGFEHQNIKERLYPEETFEDPKSIIAIALAYPTKIHEKVPRDEKRGQFARASWGTDYHFILEERLKKLIAFIKEQAETEQVQAEWRFAPQVDTGELVDVAVAQRAGLGFIGRNGLLITEEYGSFVYLGEIITNIQFEPDQPVSNGCGDCTRCIIGCPTGALLGDGRMNAKKCLSYQTQTKGMMPEQYRKKMRNVIYGCDICQLVCPYNRGKDFHFHEEMEPKVDEVHPKLAPLLSISNREFKEQFGHLAGSWRGKKPLQRNALIALANLGGKEALPEIKACLQDQRPVIRGTAVWALGQLTKKAPEETISLLQDLEKTETDSEVLTEIANVLERLS

SEQ ID NO: 76570 - protein, 380 aa, Enterococcus raffinosus
  misc_feature (1)..(380): tr|R2RPR2|R2RPR2_9ENTE Epoxyqueuosine reductase OS=Ente rococcus raffinosus ATCC 49464 OX=1158602 GN=queG PE=3 SV=1
MQTLKERIIAESKQLGIDKIGFTTAEPFDYLEESLIEQRSLGHTSGFEHQNIKERLYPEETFEDPKSIIAIALAYPTKIHEKVPRDEKRGQFARASWGTDYHFILEERLKKLIAFIKEQAETEQVQAEWCFAPQVDTGELVDVAVAQRAGLGFIGRNGLLITEEYGSFVYLGEIITNIQFEPDQPVPNGCGDCTRCITGCPTGALLGDGRMNAKKCLSYQTQTKGMMPEQYRKKMRNVIYGCDICQLVCPYNRGKDFHFHEEMEPKVDEVYPKMTPLLSISNREFKEQFGHLAGSWRGKKPLQRNALIALANLGGKEALPEIRACLQDQRPVIRGTAVWALGQLTKKSPEDTIRLLKELEKTETDPEVLTEIADVLERLS

SEQ ID NO: 76571 - protein, 399 aa, Enterococcus ratti
  misc_feature (1)..(399): tr|A0A1L8WHK5|A0A1L8WHK5_9ENTE Iron-sulfur cluster-bind ing protein OS=Enterococcus ratti OX=150033 GN=RV14_GL0 00565 PE=4 SV=1
MSRIGEKMAKTLKDEIIEESKRLGIDKIGFTTAEPFDYLKESLEEQKAAGHTSGFEHPIIEERLHLEKTFDHPQSIISIALAYPTKIQEEIPKDEKRGQFARASWGIDYHEILRERLNQLIVFIQSRACKWQQEEKWRFAPQVDTGELVDVAVAQRAGLGFVGRNGLLITKEYGSFVYLGEIVTNIVFEPDKPEIFGCGDCMRCITACPTKALLGDGKMNAQRCLSYQTQTKGLMPNEYRKKIRNVIYGCDICQLVCPYNRGKDFHFHKEMEPKIEEVCPKLKPMLSLSNKEFNAQFGHLAGSWRGKKPLQRNALIALANLGDTSALSEVKVCLSDVRPVIRATAAWTIGCLGRKEPEKWLKILEKRQNIEENSEVIIEIKQAQDMLRKKKHKSNQFLP

SEQ ID NO: 76572 - protein, 382 aa, Enterococcus rivorum
  misc_feature (1)..(382): tr|A0A1E5L0W3|A0A1E5L0W3_9ENTE tRNA epoxyqueuosine(34) reductase QueG OS=Enterococcus rivorum OX=762845 GN=BCR 26_08065 PE=4 SV=1
MTLKEKIIAESKKLGIDKIGFASAEPFSDLEASLREQKDRGFTSGFEHPVIEERIYPEKTFENPKTIISIALAYPTRIKEKVPRDEKRGQFARASWGIDYHDILKERLEKLIAFIRQQAESLEEIAQWRFAPQVDTGELVDVAVAQRAGLGFVGRNGLLITEEFGSFVYLGEIITNIEFEVDQPVAFGCGDCTRCVKACPTEALLGDGRMNAKRCLSYQTQTKGFMPEEYRKKMHNVIYGCDICQLVCPYNKGKDNHFHKEMEPEVEIVYPKLKPMLAITNKEFKATFGHLSGAWRGKKPIQRNALIALANLGDRSALPDILECTKDVRPVIRGTAIWAIGKLGNREPEKWLSILSDLQKSETDVEVQNEIQLAEKHLANKK

SEQ ID NO: 76573 - protein, 381 aa, Enterococcus rotai
  misc_feature (1)..(381): tr|A0A0U2VUM9|A0A0U2VUM9_9ENTE Epoxyqueuosine reductase OS=Enterococcus rotai OX=118060 GN=ATZ35_07495 PE=4 SV =1
MSLKQKIVAESKRLGIDKIGFASAQPFYELEESLKEQRELGFNSGFEHQVIEERIYPEKTFENPKTIISIALAYPTKIEGKVPRDEKRGMFARASWGIDYHDVLRDRLAKLIAFIQSQAESLEETEAWRFAPQVDTGELVDVAVAQRAGLGFIGRNGLLITEEFGSFVYLGEIVTNIDFEVDEPVAFGCGDCTRCVTACPTQALLGNGSMNAKKCLSYQTQTKEMMPEEYRKKMHNVIYGCDICQLVCPYNRGKDFHFHKEMEPEVDTVYPKLKPMLSISNKEFKETFGHLSGSWRGKKPLQRNALIALANLGDRSALPEIYRCATEDVRPVIRGTAIWAIGKLGNKEAEKWLGVLNELLEVEPEEEVLVEIRNAIKRLES

SEQ ID NO: 76574 - protein, 396 aa, Enterococcus saccharolyticus; identical to SEQ ID NO: 76553
  misc_feature (1)..(396): tr|A0A449ETY2|A0A449ETY2_9ENTE Iron-sulfur cluster-bind ing protein OS=Enterococcus saccharolyticus OX=41997 GN =queG PE=4 SV=1

SEQ ID NO: 76575 - protein, 387 aa, Enterococcus saccharolyticus
  misc_feature (1)..(387): tr|S0NWU2|S0NWU2_9ENTE Iron-sulfur cluster-binding prot ein OS=Enterococcus saccharolyticus subsp. saccharolyti cus ATCC 43076 OX=1139996 GN=OMQ_01116 PE=4 SV=1
MLTLKEKIIAESKKIGIDKIGFTTAEPFDYLKDSLIEQREAGHTSGFEHQVIDERIYPEKTFENPKSIIAIALAYPTRIHEEVPRDEKRGQFARASWGIDYHNILKDRLERLIDFIQTEATSEQEAEQWRFAPQVDTGELVDVAVAQRAGLGFIGKNGLLITEEYGSFVYLGEIITNIQFEPDKPVPNGCGDCTRCITGCPTGALLGDGRMNAKKCLSYQTQTKGMMPKEYRRKIRNTIYGCDICQLVCPYNKGKDFHFHQEMEPKPDEVFPKLVPMLSISNKEFKAQFGHLAGSWRGKKPLQRNALIALANLGGREALPDIAKCLDDQRPVIRGTAVWAIGQLTKRNPEQYLERLQAMQEKETDEDVLLELEETITFLTDPTKKKA

SEQ ID NO: 76576 - protein, 381 aa, Enterococcus silesiacus
  misc_feature (1)..(381): tr|A0A0S3KEU7|A0A0S3KEU7_9ENTE Epoxyqueuosine reductase OS=Enterococcus silesiacus OX=332949 GN=ATZ33_15800 PE =4 SV=1
MTLKEKIIAESKRLGIDKIGFASAEPFFELEDSLKEQRERGFNSGFEHQVIEERIYPEKTFENPKTIIAIALAYPTKIEGKVPRDEKRGMFARASWGIDYHDVLRDRLSKLIDFIQSQTQNLEETESWRFAPQVDTGELVDVAVAQRAGLGFIGRNGLLITEEFGSFVYLGEIVTNIDFEVDQPVPFGCGDCTRCVTACPTQALLGNGSMNAKKCLSYQTQTKGMMPEEYRKKMHNVIYGCDICQLVCPYNRGKDFHFHKEMEPEVDTVYPKLKPMLSISNKDFKETFGHLSGSWRGKKPLQRNALIALANLGDRSALPEIFVCATEDVRPVIRGTAVWAIGKLGNKEAEKWLDVLRELLEVEPEEEVLEEIRNAIKRLEK

SEQ ID NO: 76577 - protein, 388 aa, Enterococcus sp.
  misc_feature (1)..(388): tr|A0A3D1J947|A0A3D1J947_ENTSX tRNA epoxyqueuosine(34) reductase QueG OS=Enterococcus sp. OX=35783 GN=queG PE= 4 SV=1
MSLKEKIIAESKRLGIDKIGFASAEPFTYLEESLREQKAKGHTSGFEHPVIEERIYPERTFENPQTIIAIALAYPTKIKEKVPRDEKRGMFARASWGIDYHDVLRDRLDKLIAFIQAQAASMEAAEDWRFAPQVDTGELVDVAAAQRAGLGFIGRNGLLITEEFGSFVYLGEIVTNITLAPDEEVPFGCGECTRCITACPTKALLGDGRMNAQRCLSYQTQTKGMMPEEYRKKMHNVIYGCDICQLVCPYNRGKDFHFHAEMEPEVETVYPKLKPMLSLSNKDFKAQFGHLSGSWRGKKPLQRNAIIALANVGDRSALPDIWRCATEDVRPVIRGTAYWAIGQLGVKEPALWLARLQECQSLDPEEEAQQELGPAIARLQAVLDKQAP

SEQ ID NO: 76578 - protein, 391 aa, Enterococcus sp.
  misc_feature (1)..(391): tr|A0A4U4EK04|A0A4U4EK04_9ENTE tRNA epoxyqueuosine(34) reductase QueG OS=Enterococcus sp. VV15 OX=2233541 GN=q ueG PE=4 SV=1
MTKTLKDEIIEESKRLGIDKIGFTTAEPFDHLKESLESQKAAGHTSGFEHPVIDERLYIEKTFESPQSIISIALAYPTKIHEEVPKDEKRGQFARASWGVDYHDILRDRLNKLIDFIKTRAVVWQQEDAWRFAPQVDTGELIDVAVAQRAGLGFIGRNGLLITEEYGSFVYLGEVVTNIQFEPDEPGVFGCGDCTRCITACPTKALLGDGRMNAQRCLSYQTQTKGLMPEEYRKKMRNVIYGCDICQLVCPYNRGKDFHFHDEMEPKVDEVYPKLKPMLQLSNKEFNAQFGHLAGSWRGKKPLQRNALIALANLGDTSALPEIEKCLTDVRPVIRATAAWAIGRLGRKEPKKWIETLEVVDQKEDNEEVSIEIAQAITMLQKKNKEKRPNS

SEQ ID NO: 76579 - protein, 386 aa, Enterococcus sulfureus
  misc_feature (1)..(386): tr|S0L898|S0L898_9ENTE Iron-sulfur cluster-binding prot ein OS=Enterococcus sulfureus ATCC 49903 OX=1140003 GN= I573_01578 PE=4 SV=1
MTTLKERIITESKRIGIDKIGFTTAEPFTEYKESLYAQKEAGHTSGFEHPNIEERIDPALTFSQPKSIISIALAYPTRLHEEPDRKEKRGQFARASWGIDYHDVLKSRLNKLIDFIKQEASQEDPRFKAEVDTGEFIDVAVAQRAGLGFIGKNGLLITEEFGSFVYLGEIVTNLEFEADTPIANGCGECTRCITGCPTNALLGNGQMNAKKCLSYQTQTKDMMPLDYRKKIRNIIYGCDICQLVCPYNQGKDFHFHQEMEPKIDEAFPKLAPMLQLSNKEFKEQFGHLAGSWRGKKPLQRNAIMALANLGAKEHLPEIMSCLKDPRPVIRATAIWAIGELTKRYPEDTILLFEEFRERESEPLVLDELEQTIARLKQPKLKRRTST

SEQ ID NO: 76580 - protein, 381 aa, Enterococcus termitis
  misc_feature (1)..(381): tr|A0A242LH84|A0A242LH84_9ENTE Epoxyqueuosine reductase OS=Enterococcus termitis OX=332950 GN=A5881_001210 PE= 4 SV=1
MSLKQKIIAESRRLGIDKIGFASAEPFYELEESLKEQRERGFNSGFEHQVIEERIYPERTFENPKTIISIALAYPTKIDGKVPRDEKRGMFARASWGIDYHDVLRDRLSKLIAFIQTQAQGLEETESWRFAPQVDTGELVDVAVAQRAGLGFIGRNGLLITEEFGSFVYLGEIVTNIAFEVDKPVPFGCGDCTRCVTACPTQALLGNGSMNAKKCLSYQTQTKDMMPEEYRKKMHNVIYGCDICQLVCPYNRGKDFHFHKEMEPEVDTVYPKLKPMLSISNKEFKETFGHLSGSWRGKKPLQRNALIALANLGDRSALPEIYKCAIEDVRPVIRGTAVWAIGKLGNKEAEKWLGILYDLLKVEPEEEVLEEIKNAIKQLEK

SEQ ID NO: 76581 - protein, 384 aa, Enterococcus termitis
  misc_feature (1)..(384): tr|A0A1E5H4F3|A0A1E5H4F3_9ENTE tRNA epoxyqueuosine(34) reductase QueG OS=Enterococcus termitis OX=332950 GN=BC R25_14810 PE=4 SV=1
MSLKQKIIAESKRLGIDKIGFASAEPFYELEASLNEQREKGFNSGFEHQVIEERIYPEKTFENPKTIISIALAYPTKISEKVPRDEKRGMFARASWGIDYHDVLKDRLAKLIDFIQSQAKSLEEAEAWRFAPQVDTGELVDVAVAQRAGLGFIGRNGLLITEEFGSFVYLGEIVTNIDFEVDEPVPFGCGDCTRCVTACPTQALLGNGSMNAKKCLSYQTQTKEMMPEEYRKKMHNVIYGCDICQLVCPYNRGKDFHFHEEMEPEVDTVYPKLKPMLHLSNKEFKEQFGHLSGSWRGKKPLQRNALIALANLGDRSALPEIFACAKEDVRPVIRATAAWAIGKLGNKEAEKWLSVLHELLEKEKDEEVINEIEKAIKRLETKIQ

SEQ ID NO: 76582 - protein, 387 aa, Enterococcus thailandicus
  misc_feature (1)..(387): tr|A0A510W9Y4|A0A510W9Y4_ENTTH Epoxyqueuosine reductase OS=Enterococcus thailandicus OX=417368 GN=ETH01_03150 PE=4 SV=1
MTLKEEIIRESKRLGIDKIGFTTAEPFDDLRESLEEQKAAGHTSGFEHPVIEERLYPEKTFDQPQSIISIALAYPTKIHEEIPKDEKRGQFARASWGIDYHDILRDRLNRLIEFITTRGKQWQAEEEWRFAPQVDTGELIDVAVAQRAGLGFIGRNGLLITEEFGSFVYLGEIVTNIVFEPDEPGVFGCGDCTRCIDGCPTKALLGDGRMNAQRCLSYQTQTKGLMPEEYRKKMRNVIYGCDICQLVCPYNKGKDFHFHEEMEPKVDEVYPKLKPMLSISNKEFKQQFGHLAGSWRGKKPLQRNALIALANLGDRDSLPEIAACLKDVRPVIRGTAAWAIGRLGAKAPEEWLTVLQDSLAKETDEEAKLEFEKAIEILQTKQRKKQK

SEQ ID NO: 76583 - protein, 387 aa, Enterococcus thailandicus
  misc_feature (1)..(387): tr|A0A179ENW7|A0A179ENW7_ENTTH tRNA epoxyqueuosine(34) reductase QueG OS=Enterococcus thailandicus OX=417368 G N=queG PE=4 SV=1
MTLKEEIIRESKRLGIDKIGFTTSEPFDHLRESLEEQKAAGHTSGFEHPVIEERLYPEKTFDQPQSIISIALAYPTKIHEEIPKDEKRGQFARASWGIDYHDILRDRLNRLIEFITTRGKQWQAEEEWRFAPQVDTGELIDVAVAQRAGLGFIGRNGLLITEEFGSFVYLGEIVTNIVFEPDEPGVFGCGDCTRCIDGCPTKALLGDGRMNAQRCLSYQTQTKGLMPEEYRKKMRNVIYGCDICQLVCPYNKGKDFHFHEEMEPKVDEVYPKLKPMLSISNKEFKQQFGHLAGSWRGKKPLQRNALIALANLGDRDSLPEIAACLKDVRPVIRGTAAWAIGRLGAKAPEEWLTVLQDSLAKETDEEAKLEFEKAIEILQTKQRKKQK

SEQ ID NO: 76584 - protein, 381 aa, Enterococcus ureasiticus
  misc_feature (1)..(381): tr|A0A1E5G7F2|A0A1E5G7F2_9ENTE tRNA epoxyqueuosine(34) reductase QueG OS=Enterococcus ureasiticus OX=903984 GN =BCR21_16055 PE=4 SV=1
MTLKQKIIEESKRLGIDKIGFASAEPFYELEDSLKEQRKLGYNSGFEHQVIEERIYPEKTFENPKTIISIALAYPTKIGGKVPRDEKRGMFARASWGIDYHDVLRDRLSKLIDFIHSQAQSLEESGEWRFAPQVDTGELVDVAVAQRAGLGFIGRNGLLITEEFGSFVYLGEIVTNIDFEVDEPVPFGCGDCTRCVTACPTQALLGNGSMNAKKCLSYQTQTKDMMPEEYRRKMHNVIYGCDICQLVCPYNRGKDFHFHKEMEPEVDTVYPKLKPMLSMSNKEFKTQFGHLSGSWRGKKPLQRNALIALANLGDRSALPEILVCAKEDVRPVIRGTAAWAIGKLGNKEAEKWIDVLTELLEVEPETEVLKEIQNAIKQLKK

SEQ ID NO: 76585 - protein, 381 aa, Enterococcus ureilyticus
  misc_feature (1)..(381): tr|A0A1E5H5I3|A0A1E5H5I3_9ENTE tRNA epoxyqueuosine(34) reductase QueG OS=Enterococcus ureilyticus OX=1131292 G N=BCR24_09875 PE=4 SV=1
MSLKQKIIAESKRLGIDKIGFASAEPFYELEDSLKEQKARGFNSGFEHQVIEERIYPEKTFENPKTIISIALAYPTKIEGKVPRDEKRGMFARASWGIDYHDVLRDRLSKLIEYIQSQAQSQKEAEAWRFAPQVDTGELVDVAAAQRAGLGFIGRNGLLITEEFGSFVYLGEIVTNIDFEADKPVPFGCGDCTRCVTACPTQALLGNGSMNAKKCLSYQTQTKEMMPEEYRKKMHNVIYGCDICQLVCPYNRGKNFHFHEEMEPEVDTVYPKLKPMLSLSNKEFKETFGHLSGSWRGKKPLQRNALIALANLGDRSALPEILVCATEDVRPVIRGTAAWAIGKLGNKEAEKWLGILNELLEVEPEEEVLVEIKNAIKRLEK

SEQ ID NO: 76586 - protein, 389 aa, Enterococcus villorum
  misc_feature (1)..(389): tr|A0A1V8YDJ3|A0A1V8YDJ3_9ENTE tRNA epoxyqueuosine(34) reductase QueG OS=Enterococcus villorum OX=112904 GN=BH 747_04570 PE=4 SV=1
MVKTLKEEIIEESKRLGIDKIGFTTAEPFDYLKESLEEQKAAGHTSGFEHPVIEERIYIEKTFEEPQSIISIALAYPTKIQEEVPKDEKRGQFARASWGIDYHDILRDRLNQLITFIQSRADKWQQEEQWRFAPQVDTGELVDVAVAQRAGLGFIGRNGLLITEEFGSFVYLGEIVTNIVFEPDEPGVFGCGDCTRCISACPTKALLGDGRMNAQKCLSYQTQTKGIMPNEYRKKMRNVIYGCDICQLVCPYNRGKDFHFHKEMEPQVDEVYPKLKPMLSLTNKEFKEQFGHLAGSWRGKKPLQRNALIALANLGDTSALPEIEDCLNDVRPVIRATAAWAIGRLGRKEPDIWIETLEKRQKIEEDQEVIIEIQQAKKMLARKKKPKRE

SEQ ID NO: 76587 - protein, 389 aa, Enterococcus villorum
  misc_feature (1)..(389): tr|A0A511J1Y5|A0A511J1Y5_9ENTE Epoxyqueuosine reductase OS=Enterococcus villorum OX=112904 GN=EVI01_13490 PE=4 SV=1
MVKTLKEEIIEESKRLGIDKIGFTTAEPFDYLKESLEEQKAAGHTSGFEHPVIEERLYIEKTFEDPQSIISIALAYPTKIQEEVPKDEKRGQFARASWGIDYHDILRDRLNQLITFIQSRADKWQQEEQWRFAPQVDTGELVDVAVAQRAGLGFIGRNGLLITEEFGSFVYLGEIVTNIVFEPDEPGVFGCGDCTRCISACPTKALLGDGRMNAQKCLSYQTQTKGIMPNEYRKKMRNVIYGCDICQLVCPYNRGKDFHFHKEMEPQVDEVYPKLKPMLSLTNKEFKEQFGHLAGSWRGKKPLQRNALIALANLGDTSALPEIEDCLNDVRPVIRATAAWAIGRLGRKEPDIWIETLEKRQKIEEDQEVIIEIQQAKKMLVRKTQPKRE

SEQ ID NO: 76588 - protein, 384 aa, Enterovibrio coralii
  misc_feature (1)..(384): tr|A0A135I455|A0A135I455_9GAMM Epoxyqueuosine reductase OS=Enterovibrio coralii OX=294935 GN=queG PE=3 SV=1
MSDSRSTSSFNLNHLVENIRQWGHELGFQHIGIADVDLRQHEALLQRWLDEGYHGDMDWMARHGMMRARPQELVEGTVRVISARMDYLPPHAGFAKTLGNPDIAYISRYALGRDYHKLVRNRLKKLGERIEEEVGKFGYRPFVDSAPVLERPLAEKAGLGWTGKHSLLLDKNAGSWFFLGELLIDLPLPVDQPVENQCGKCVACMTSCPTGAIVGETIVDARRCISYLTIELDGPIPEAFRKPMGNRIYGCDDCQLVCPFNRESDLTKESDFYARPSLAQQSLKTLFSWDEVTFLKETEGSAIRRIGHEKWRRNLSVAMGNAPYDPEIVALLQSAQGSSAMLDQHIDWAITQQLKSKEALAIDVLPASTKRLVRIVKKGLPRDA

SEQ ID NO: 76589 - protein, 384 aa, Enterovibrio nigricans
  misc_feature (1)..(384): tr|A0A1T4UT23|A0A1T4UT23_9GAMM Epoxyqueuosine reductase OS=Enterovibrio nigricans DSM 22720 OX=1121868 GN=queG PE=3 SV=1
MPDSRSTSSINLHHLVESIRQWGDELGFQHIGIADIDLRQHEALLQRWLDAGYHGDMDWMARHGMMRARPSELVEGTVRVISARMDYLPPHAGFAQTLDNPEIAYISRYALGRDYHKLVRNRLKKLGERIEQEVGKFGYRPFVDSAPVLERPLAEKAGLGWTGKHSLLLDKNAGSWFFLGELLIDLPLPVDQPVENQCGKCVACMTSCPTGAIVGETIVDARRCISYLTIELDGAIPEEYRKAMGNRIYGCDDCQLVCPFNRESEVTLESDFYARPSLTQQPLKTLFLWDEPTFLKETEGSAIRRIGHEKWQRNLSVAMGNAPYDPEIIELLQAAKGFSAMLDQHIDWALAQQLASKDALTTNVQPSSTRRLVRIVKKGLPRDA

SEQ ID NO: 76590 - protein, 391 aa, Enterovibrio norvegicus
  misc_feature (1)..(391): tr|A0A2N7LD10|A0A2N7LD10_9GAMM Epoxyqueuosine reductase OS=Enterovibrio norvegicus OX=188144 GN=queG PE=3 SV=1
MFCCSDLMSNSRSSSSINLNQLAENIRLWGRELGFQHIGIADIDLRQHEAQLQRWLDAGYHGDMDWMARHGMMRARPQELVEGTIRVISARMDYLPPNAGFAKTLDDPTLAYISRYALGRDYHKLIRNRLKKLGERIEQEVGQFGYRPFVDSAPVLERPLAEKAGLGWTGKHSLLLNEGTGSWFFLGELLIDLQLPVDEAKENQCGKCVACMTSCPTDAIVEEGVIDARRCISYLTIELDGAIPVAFRQAIGNRIYGCDDCQLVCPYNREAELTHESDFHGRASLVQQPLTTLFTWDEKTFLKETEGSAIRRIGHEKWRRNLSVAMGNAPYNEEIVDLLQAAKGSSAMLDEHLDWAIEQQLSRRQNASVDVLPASTKRLVRIVQKGLPRDA

SEQ ID NO: 76591 - protein, 384 aa, Enterovibrio norvegicus
  misc_feature (1)..(384): tr|A0A1E5C515|A0A1E5C515_9GAMM Epoxyqueuosine reductase OS=Enterovibrio norvegicus FF-454 OX=1185651 GN=queG P E=3 SV=1
MSDSRSLSSINFNQLAENIRQWGRELGFQHIGITDIDLRQHEAQLQRWLGAGYHGEMDWMARHGMMRARPQELVEGTIRVISARMDYLPPNAGFAKTLDDPSLAYISRYALGRDYHKLIRNRLKKLGDRISQEVGPFGYRPFVDSAPVLERPLAEKAGLGWTGKHSLLLSKEAGSWFFLGELLVDLPLPVDAPQDNLCGKCVACMTSCPTNAIVDNTVVDARRCISYLTIELDGPIPEEFRVAMGNRIYGCDDCQLVCPYNREAELTQEADFHGRPSLVQQSLKTLFSWDEYTFLKETEGSAIRRIGHEKWRRNLSVAMGNAPYDPEIIELLQAAKSFSAMLDEHLDWAIAQQVERKKEAAISVQPASTKRLVRIVQKGLPRDA

SEQ ID NO: 76592 - protein, 384 aa, Enterovibrio pacificus
  misc_feature (1)..(384): tr|A0A1C3ED34|A0A1C3ED34_9GAMM Epoxyqueuosine reductase OS=Enterovibrio pacificus OX=1080227 GN=queG PE=3 SV=1
MSLQHYQITPDFNQLAEKIRKWGAELGFQHVGITDIDLSDHEAQLQKWLDHGYHGDMDWMERHGMMRARPAELVPGTIRVISVRMNYLPPKAGFATSLNAPEQAYISRYALGRDYHKLIRNRLKQLGKRIEDEVGVYGYRPFVDSAPVLERPLAEKAGLGWTGKHSLLLDQEAGSWFFLGELLVDLPLPVDSPKENQCGKCVACMTSCPTGAIVAEGVIDARKCISYLTIELDGTIPTEFRSLIGNRIYGCDDCQLVCPWNRESEITDESDFHGRPQLVNQSLTTLFSWSEEEFLKKTEGSPIRRIGHEKWRRNIAVAMGNAPYDPTILDLLTDSKGSSAMLDEHISWAIEQQISKRNDAVVNVLPSSTKRLIRIVEKGLSRDA

SEQ ID NO: 76593 - protein, 347 aa, Epibacterium mobile
  misc_feature (1)..(347): tr|A0A1H2U4V0|A0A1H2U4V0_9RHOB Epoxyqueuosine reductase OS=Epibacterium mobile OX=379347 GN=queG PE=3 SV=1
MKAAGDIKARLIAQARAEGFVSTRICRPWDVPEVPERLRAFLDAGYHGQMAWMAERVNWRENPAALWPEARSVIMLAESYTPDENPMAVVGLPDRAAISVYARGKDYHDLVKKRLKRLARWLISEAGDEAEVKVFVDTAPVPEKALGQAAGLGWQGKHTNLVSRDWGNWAFLGSIFTTLELPVDPVEPDHCGSCRACLTACPTDAFPAPYQLDARRCISYLTIEHKGPIEEELRAKLGNRIYGCDDCLAACPWNKFAVEASDMRYAAREGTVAPPLAELSQLNDAAFRERFSGSPIKRIGRDRFVRNVLYAIGNSREAKLRPYAMQLCDDPDPTVAEAARWAVMRLP

SEQ ID NO: 76594 - protein, 347 aa, Epibacterium mobile
  misc_feature (1)..(347): tr|A0A1B1A5K8|A0A1B1A5K8_9RHOB Epoxyqueuosine reductase OS=Epibacterium mobile F1926 OX=1265309 GN=queG PE=3 S V=1
MKAAGDIKARLIAQARAEGFVSTRICRPWDVPEVPDRLRAFLDAGYHGQMGWMAERVNWRENPAALWPEARSVIMLAESYTPEENPMAVVGLPDRAAISVYARGKDYHDLVKKRLKRLARWLISEAGDEAEVKVFVDTAPVPEKALGQAAGLGWQGKHTNLVSRDWGNWAFLGSIFTTLDLPVDPVEPDHCGSCRACLTACPTDAFPAPYQLDARRCISYLTIEHKGPIEEELRPKLGNRIYGCDDCLAACPWNKFAVEASDMRYAAREGTVAPPLAELSQLNDAAFRERFSGSPIKRIGRDRFVRNVLYAIGNSREVKLRPYAMQLCDDPDPTVADAARWAVMQLS

SEQ ID NO: 76595 - protein, 345 aa, Epibacterium multivorans
  misc_feature (1)..(345): tr|A0A0P1GVG7|A0A0P1GVG7_9RHOB Epoxyqueuosine reductase OS=Epibacterium multivorans OX=928856 GN=queG PE=3 SV= 1
MLEPEDLKARLVKQALAEGFVSARICRPWDVPEVPDRLRAYLEAGYHGQMGWMEERVNWRENPAALWPEARSVLMLAESYTPDENPMDVVGLPDRAAISVYARGKDYHDLVKKRLKRLARWLIAEAEGEVKVFVDTAPVPEKALGQAAGLGWQGKHSNLVSRDWGNWAFLGSVFTTLELPADTAEPDRCGSCRSCLTACPTDAFPAPYQVDARRCISYLTIEHKGPIDLELRAKLGNRIYGCDDCLAACPWNKFAVASSDIRYAARDGLIAPPLAELAALDDAGFREKFSGSPIKRIGRDRFVRNVLYAIGNSAQADLRPVAQALCDDPDPTVAEAAQWAAQRLA

SEQ ID NO: 76596 - protein, 348 aa, Epibacterium scottomollicae
  misc_feature (1)..(348): tr|A0A2T1ADN9|A0A2T1ADN9_9RHOB Epoxyqueuosine reductase OS=Epibacterium scottomollicae OX=483013 GN=queG PE=3 SV=1
MNDVGDIKSRLVEQARAEGFVSARICRPWDVPQVPERLRAFLDAGYHGQMGWMADRVNWRENPAALWPEARSVIMLAESYMPDENPMSVVGLPDRAAISVYARGKDYHDLVKKRLKRLARWMIAEAGDETQVKVFVDTAPVPEKALGQASGLGWQGKHTNLLSRDWGNWAFLGSVFTTLELPIDPAEPDHCGSCKACLTACPTDAFPAPYQLDARRCISYLTIEYKGPIDEELRGKLGNRIYGCDDCLAACPWNKFAVEASDIRYAAREGTIAPPLSELAQLDDADFRARFSGSPIKRIGRDRFVRNVLYAIGNSGDPGLLSDAQRLCEDPDPTVADAARWAVMRLQE

SEQ ID NO: 76597 - protein, 351 aa, Epibacterium ulvae
  misc_feature (1)..(351): tr|A0A1G5QW56|A0A1G5QW56_9RHOB Epoxyqueuosine reductase OS=Epibacterium ulvae OX=1156985 GN=queG PE=3 SV=1
MTDTADLKTRLIEQALAEGFVACRICRPWDVPEVPGRLQAFLDAGYHGQMGWMADRTAWRGDPAQLWPEARSVIMLAESYTPDADPMAVVGQSDLGAISVYARNKDYHDLVKKRLKRLARWLIAETGDDTAVKVFVDTAPVPEKPLAQAAGLGWQGKHTNLVSRDFGNWAFIGSVFTTLELPADTRERDHCGSCRSCLTACPTDAFPAPYQLDARRCISYLTIEHKGPVDMDLRSKLGNRIYGCDDCLAACPWNKFAVAASDLRYGAREELNAPKLVELAALDDAGFRAFFSGSPIKRIGRDRFVRNVMYAIGNSGDASLCPAAQDLVEDPDPTVAEAARWAVDRLQGDVT

SEQ ID NO: 76598 - protein, 266 aa, Epulopiscium sp.
  misc_feature (1)..(266): tr|A0A1S9C3A6|A0A1S9C3A6_9FIRM 4Fe-4S ferredoxin-type d omain-containing protein OS=Epulopiscium sp. AS2M-Bin00 2 OX=1764959 GN=ATN32_02640 PE=4 SV=1
MCKLTEQLNENILTSTIDFCRKLNLDTLSWCEWDNQSILAIAFPYYDFKSNNNGFSIYAQRLDYHKVVRSYLDRIRYYLETKGYTSEAYVDNNTLPERDIATLAGIGFIGKNNLLITKKYGSFVFLGEIVLNKLTDFNLKNNHSENDNCKSCTKCIDSCPTNSLGEKNINICLSYLSQQKTLTPDDEALLKRYKNIFGCDICQLCCPHNKNVVPSSLEEFKTIDMDKDPLVFANMTNKYFKDNIKPTSAGWRGKNVVKRNAIFSLS

SEQ ID NO: 76599 - protein, 266 aa, Epulopiscium sp.
  misc_feature (1)..(266): tr|A0A1V2MCT7|A0A1V2MCT7_9FIRM 4Fe-4S ferredoxin-type d omain-containing protein OS=Epulopiscium sp. SCG-D08WGA -EpuloA1 OX=1712377 GN=AN640_03710 PE=4 SV=1
MCKLTEQLNENILTSTIDFCRKLNLDTLGWCEWDNQSILAIAFPYYDFKSNNNGFSIYAQRLDYHKVVRSYLDRIRYYLETKGYTSEAYVDNNTLPERDIATLAGIGFIGKNNLLITKKYGSFVFLGEIVLNKLTDFNLKNNHSENDNCKSCTKCIDSCPTNSLGEKNINICLSYLSQQKTLTPDDEALLKRYKNIFGCDICQLCCPHNKNVVPSSLEEFKTIDMDKDPLVFANMTNKYFKDNIKPTSAGWRGKNVVKRNAIFSLS

SEQ ID NO: 76600 - protein, 380 aa, Ereboglobus luteus
  misc_feature (1)..(380): tr|A0A2U8E5U0|A0A2U8E5U0_9BACT tRNA epoxyqueuosine(34) reductase QueG OS=Ereboglobus luteus OX=1796921 GN=queG PE=4 SV=1
MIEPAELRKRLLALGFDVARFASIPARDDGGALPEVNALRKWLDAGYQADMHWIERGFAKRASPTLVLSEAGSVIMLGVNYFQGAAGASSDSQHPRWARYALYSDYHDTIKPALEKAGRVLEETLGITSADYRYYVDTGPVLERAWASRAGAGFAGKNAMLVSRDFGNWLFLAAIFVRAKIKADEPLPARSHCGKCTRCIDACPTGAIVSPGTVDSRLCISYQTIENKGAIPRGLRAKIGARIYGCDACAEACPWNRFAQASRGLLLEARPEIGQLSLGELLALTPESFAAHFRKTAIKRIKLAGLLRNACIVAGNTGARAAEHLPQLARLAAHESPLVRAHAVWAVQRIADGEQATRLLAEARNAEKDASVLDEHGAQP

SEQ ID NO: 76601 - protein, 392 aa, Eremococcus coleocola
  misc_feature (1)..(392): tr|E4KQ67|E4KQ67_9LACT Putative iron-sulfur cluster-bin ding protein OS=Eremococcus coleocola ACS-139-V-Col8 OX =908337 GN=HMPREF9257_1666 PE=4 SV=1
MAMNAALKTKIIAAAHEIGIDKIGFTTAEPFDYLEDSLKEQKAKGHTSGFEHPVIEERLYPDKIFHQPKSIISIALAYPSEIQNPLKSERDNRRGLFARASWGLDYHDILREKMDRLIAYIKTEATTATFKPMVDTGELIDVATAQRAGLGFIGKNGLLITEEFGSWVYLGEIITDIEFEADQPGVSACGDCTRCIDACPTNALLGDGRMNAQLCLSFQTQTKGYMAQEFRRPMTHVIYGCDICQYVCPFNQDKSVHLHPEMEPDPEVVQPALKPLLTISNKDFKEKYGPLAGSWRGKKPLQRNAIIALANMRDQTAIPLLLQLMEEDPRPVIRGTSAWALSVIQRFQNPAMVKAIAAQLAKETDPETVTEMTQAIEKLKDKRPPRSIKTQS

SEQ ID NO: 76602 - protein, 379 aa, Erwinia aphidicola
  misc_feature (1)..(379): tr|A0A4R6PI44|A0A4R6PI44_ERWAP Epoxyqueuosine reductase OS=Erwinia aphidicola OX=68334 GN=queG PE=3 SV=1
MSHPLDFNQLALDIKQWGLALGFQQVGICDTDLTLEEPRLQAWLDKQYHGEMDWMARHGMMRARPHELLPGTLRVISVRMNYLPAKAAFASTLKNPRLGYVSRYALGRDYHKVLRNRLKKLGDMIREHCEQAEFRPFVDSAPLLERPLAAKAGLGWTGKHSLILNREAGSWFFLGELLVNLPLPVDQPVEENCGRCVACITTCPTGAIVEPYTVDARRCISYLTIELEGAIPEEFRPLIGNRIYGCDDCQLICPWNRYGQLTDEDDFSPRAVLHAPPLTDLFAWDEAKFLRVTEGSAIRRIGHLRWLRNIAVALGNAPWDQAHLSALQARLGENSMLDEHIHWAIACQLARRDENTIEVQSSQQKRLVRVVEKGLPRDA

SEQ ID NO: 76603 - protein, 378 aa, Erwinia billingiae
  misc_feature (1)..(378): tr|A0A5J6M0N2|A0A5J6M0N2_9GAMM tRNA epoxyqueuosine(34) reductase QueG OS=Erwinia billingiae OX=182337 GN=queG PE=4 SV=1
MSLPLDLHQLALDIKRWGQELGFQQVGICDTDLSAEEPRLQAWLDKQYHGEMEWMARHGMMRARPHELLPGTLRVISVRMNYLPAKAAFASTLKNPQLGYVSRYTLGRDYHKVLRNRLKKLGDLIRARCEEVQFRPFVDSAPILERPIAVKAGLGWTGKHSLVLNREAGSWFFLGELLIDLPLPVDQPQEEQCGRCVACMTICPTGAIVEPYTVDARRCISYLTIELEGAIPEEFRPLIGNRIYGCDDCQLICPWNRYGQLTDEDDFSPRAVLHAPPLNELFAWDEAKFLRVTEGSAIRRIGHLRWLRNVAVALGNAPWSADNVAALEARQGENAMLDEHINWALARQLANRSEHAVEIQGQQKRLVRAVEKGLPRDA

SEQ ID NO: 76604 - protein, 378 aa, Erwinia billingiae
  misc_feature (1)..(378): tr|D8MM93|D8MM93_ERWBE Epoxyqueuosine reductase OS=Erwi nia billingiae (strain Eb661) OX=634500 GN=queG PE=3 SV =1
MSLPLDLHQLALDIKRWGQELGFQQVGICDTDLSAEEPRLQAWLDKQYHGEMEWMARHGMMRARPHELLPGTLRVISVRMNYLPAKAAFASTLKNPQLGYVSRYALGRDYHKVLRNRLKKLGDLIRARCEEVQFRPFVDSAPILERPIAVKAGLGWTGKHSLVLNREAGSWFFLGELLIDLPLPVDQPQEEQCGRCVACMTICPTGAIVEPYTVDARRCISYLTIELEGAIPEEFRPLIGNRIYGCDDCQLICPWNRYGQLTDEDDFSPRAVLHAPPLNELFAWDEAKFLRVTEGSAIRRIGHLRWLRNVAVALGNAPWSADNVAALEARQGENAMLDEHINWALARQLANRSEHAVEIQGQQKRLVRAVEKGLPRDA

SEQ ID NO: 76605 - protein, 379 aa, Erwinia citreus
  misc_feature (1)..(379): tr|A0A358L906|A0A358L906_ERWCI Epoxyqueuosine reductase OS=Erwinia citreus OX=558 GN=queG PE=3 SV=1
MSHPLDLSQFALEIKQWGLELGFQQVGICDTDLSPEEPRLQAWLDKQYHGEMEWMARHGMMRARPHELQPGTLRVISVRMNYLPAKAAFASTLKNPQLGYVSRYALGRDYHKVLRNRLKKLGDRIRERCEAAEFRPFVDSAPVMERPLAVKAGLGWTGKHSLVLNRESGSWFFLGELLINLPLPIDTPQQEQCGRCVACLTTCPTGAIVEPYVVDARRCISYLTIELEGAIPEAYRPLIGNRIYGCDDCQLICPWNRYGQLTDEDDFSPRAVLHAPPLTELFAWDEATFLRVTEGSAIRRIGHLRWLRNVAVALGNAPWSEENVVVLQSRQGENPMLDEHITWALTRQLARREENAIEVQSGQQKRLVRVIEKGLPRDA

SEQ ID NO: 76606 - protein, 379 aa, Erwinia gerundensis
  misc_feature (1)..(379): tr|A0A0U5L3G1|A0A0U5L3G1_9GAMM Epoxyqueuosine reductase OS=Erwinia gerundensis OX=1619313 GN=queG PE=3 SV=1
MSHPLDLQQLALDIKQWGLSLGFQQVGICDTDLSAEEPKLQAWLDKQYHGEMAWMERHGMMRARPHELQPGTLRVISVRMNYLPAKAAFASTLKNPQLGYVSRYALGRDYHKVLRNRLKKLGEMIRERCESLNFRPFVDSAPLLERPLAEKAGLGWTGKHSLILNREAGSWFFLGELLIDLPLPTDEPQPENCGRCVACITTCPTGAIVEPYVVDARRCISYLTIELEGAIPEEYRPLIGNRIYGCDDCQLICPWNRFGQLTDEDDFSPRAVLHAPPLVELFAWDEARFLKVTEGSAIRRIGHLRWLRNVAVALGNAPWHDDHYAVLASRLGENAMLDEHIHWAMAQQREKRAKNAIDVQLPQQKRLVRAVEKGLPRDA

SEQ ID NO: 76607 - protein, 379 aa, Erwinia iniecta
  misc_feature (1)..(379): tr|A0A0L7TCK7|A0A0L7TCK7_9GAMM Epoxyqueuosine reductase OS=Erwinia iniecta OX=1560201 GN=queG PE=3 SV=1
MSHPLDLHQLAQDIKQWGLSLGFQQVGICDTDLTPEEPRLQAWLDKQYHGEMDWMARHGMMRARPHELLPGTLRVISVRMNYLPAKAAFASTLKNPRLGYVSRYALGRDYHKVLRNRLKKLGDMIRERCSDTQYRPFVDSAPLLERPLAVKAGLGWTGKHSLILNREAGSWFFLGELLIDIPLPVDQPQEENCGRCVACITTCPTGAIVEPYVVDARRCISYLTIELEGAIPEEFRPLIGNRIYGCDDCQLICPWNRYGRLTDEDDFSPRAVLHAPPLNELFAWDEAKFLRITEGSAIRRIGHLRWLRNIAVAMGNAPWDTEIVAALTAREGENAMLDEHIHWALAQQQSKRAEQVIEVQRPQQKRLVRAIEKGLPRDA

SEQ ID NO: 76608 - protein, 379 aa, Erwinia mallotivora
  misc_feature (1)..(379): tr|A0A014LXK9|A0A014LXK9_9GAMM Epoxyqueuosine reductase OS=Erwinia mallotivora OX=69222 GN=queG PE=3 SV=1
MSHPLDLHQLARNIKQWGQQLGFQQVGICDTDLSLEEPRLQAWLEKQYHGEMAWMARHGMMRARPHELQPGTLRVISVRMNYLPAKAAFARTLKNPQLGYVSRYALGRDYHKVLRNRLKKLGDLIREHCENAEFRPFVDSAPVMERPLAVKAGLGWTGKHSLVLNREAGSWFFLGELLINLPLPVDTPQQEQCGRCVACITTCPTGAIVEPYVIDARRCISYLTIELEGSIPQEFRPLIGNRIYGCDDCQLICPWNRYGQLTDEDDFSPRAVLHSPPLTELFAWDEATFLRVTEGSAIRRIGHLRWLRNVAVALGNAPWSVENIAVLNSRLGENAMLDEHILWALARQKAARAENAIEMQSGQQKRLVRAIEKGLTRDA

SEQ ID NO: 76609 - protein, 379 aa, Erwinia persicina
  misc_feature (1)..(379): tr|A0A3Q8H8L7|A0A3Q8H8L7_9GAMM Epoxyqueuosine reductase OS=Erwinia persicina OX=55211 GN=queG PE=3 SV=1
MSHPLDFHQLARDIKQWGLALGFQQVGICDTDLTLEEPRLQAWLDKQYHGEMDWMARHGMMRARPHELLPGTLRVISVRMNYLPAKAAFASTLKNPRLGYVSRYALGRDYHKVLRNRLKKLGDMIREHCSDAQFRPFVDSAPLLERPLAAKAGLGWTGKHSLILNREAGSWFFLGELLIDLPLPVDSPVEENCGRCVACITTCPTGAIVEPYTVDARRCISYLTIELEGAIPEAFRPLIGNRIYGCDDCQLICPWNRYGQLTDEDDFSPRAILHAPPLTELFAWDEAKFLRITEGSAIRRIGHLRWLRNIAVALGNAPWDENHLKALEARRGEHAMLDEHIDWAIARQLVRRDEHTIEVQSSQQKRLVRTIEKGLPRDA

SEQ ID NO: 76610 - protein, 379 aa, Erwinia persicina
  misc_feature (1)..(379): tr|A0A4U3FDH8|A0A4U3FDH8_9GAMM Epoxyqueuosine reductase OS=Erwinia persicina OX=55211 GN=queG PE=3 SV=1
MSHPLDFHQLARDIKQWGLALGFQQVGICDTDLTLEEPRLQAWLDKQYHGEMDWMARHGMMRARPHELLPGTLRVISVRMNYLPAKAAFASTLKNPRLGYVSRYALGRDYHKVLRNRLKKLGDMIREHCSDAQFRPFVDSAPLLERPLAAKAGLGWTGKHSLILNREAGSWFFLGELLIDLPLPVDSPVEENCGRCVACITTCPTGAIVEPYTVDARRCISYLTIELEGAIPEAFRPLIGNRIYGCDDCQLICPWNRYGQLTDEDDFSPRAILHAPPLTELFAWDEAKFLRITEGSAIRRIGHLRWLRNIAVALGNAPWDENHLKALEARRGEHAMLDEHIDWAIARQLARRDEHTIEVQSSQQKRLVRTIEKGLPRDA

SEQ ID NO: 76611 - protein, 379 aa, Erwinia rhapontici
  misc_feature (1)..(379): tr|A0A4R7GUH7|A0A4R7GUH7_ERWRD Epoxyqueuosine reductase OS=Erwinia rhapontici OX=55212 GN=queG PE=3 SV=1
MSHPLDFHQLALDIKQWGLDLGFQQVGICDTDLTLEEPRLQAWLDKQYHGEMDWMARHGMMRARPHELLPGTLRVISVRMNYLPAKAAFASTLKNPRLGYVSRYALGRDYHKVLRNRLKKLGDKIREHCSEAQFRPFVDSAPLLERPLAAKAGLGWTGKHSLILNREAGSWFFLGELLIDLPLPVDQTVEENCGRCVACITTCPTGAIVEPYTVDARRCISYLTIELEGAIPEEFRPLIGNRIYGCDDCQLICPWNRYGQLTDEDDFSPRAVLHAPPLIELFAWDEAKFLRITEGSAIRRIGHLRWLRNIAVALGNAPWDEKHLAALETRRGENNMLDEHIDWAIGCQLARREENRVDVQNNQQKRLVRVIEKGLPRDA

SEQ ID NO: 76612 - protein, 379 aa, Erwinia sp.
  misc_feature (1)..(379): tr|A0A427K3Y0|A0A427K3Y0_9GAMM Epoxyqueuosine reductase OS=Erwinia sp. 198 OX=2022746 GN=queG PE=3 SV=1
MSHPLDLSQFALQIKQWGLELGFQQVGICDTDLSLEEPRLQAWLDKQYHGEMDWMARHGMMRARPHELQPGTLRVISVRMNYLPAKAAFASTLKNPQLGYVSRYALGRDYHKVLRNRLKKLGDRIRERCEEAEFRPFVDSAPVLERPLAAKAGLGWTGKHSLILNREAGSWFFLGELLINLPLPVDSPQQEQCGRCVACLTTCPTGAIVEPYVVDARRCISYLTIELEGAIPEEFRPLIGNRIYGCDDCQLICPWNRYGQLTDEDDFSPRAVLHAPPLSELFAWDEAKFLRVTEGSAIRRIGHLRWLRNVAVALGNAPWSAENVAALQNRQGENSLLDEHITWALARQLARRAENAIEVQSGQQKRLVRVIEKGLPRDA

SEQ ID NO: 76613 - protein, 379 aa, Erwinia sp.; identical to SEQ ID NO: 74888
  misc_feature (1)..(379): tr|A0A2G8DBQ0|A0A2G8DBQ0_9GAMM Epoxyqueuosine reductase OS=Erwinia sp. OLMDLW33 OX=1928656 GN=queG PE=3 SV=1

SEQ ID NO: 76614 - protein, 378 aa, Erwinia typographi
  misc_feature (1)..(378): tr|A0A0A3Z9S1|A0A0A3Z9S1_9GAMM Epoxyqueuosine reductase OS=Erwinia typographi OX=371042 GN=queG PE=3 SV=1
MSLPLDLHQLALDIKKWGQDLGFQQVGISDTDLSLEEPRLQAWLDNQYHGEMAWMARHGMMRARPHELLPGTLRVISVRMNYLPAKAAFASTLKNPQLGYVSRYALGRDYHKVLRNRLKKLGETIRERCSEAQFRPFVDSAPVLERPLAVKAGLGWTGKHSLVLNQQAGSWFFLGELLIDLPLPVDTPQDEQCGRCVACLTICPTNAIVEPYKVDARRCISYLTIELEGVIPEEFRPLIGNRIYGCDDCQLICPWNRYSQLTDEDDFSPRAVLHAPPLTELFAWDEAKFLRVTEGSAIRRIGHLRWLRNVAVAIGNAPWSAENVAVLEARRGENEMLDEHIVWALARQLARRSEHAIEMQGQQKRLVRAVEKGLPRDA

SEQ ID NO: 76615 - protein, 379 aa, Erwiniaceae bacterium
  misc_feature (1)..(379): tr|A0A3D5MA11|A0A3D5MA11_9GAMM Epoxyqueuosine reductase OS=Erwiniaceae bacterium OX=2053552 GN=queG PE=3 SV=1
MSHPLDLQQLAQDIKQWGLSLGFQQVGICDTDLSVEEPRLQAWLDKQYHGEMEWMARHGMMRARPHELLPGTLRVISVRMNYLPAKAAFASTLKNPRLGYVSRYALGRDYHKVLRNRLKKLGDLIRERCEAANFRPFVDSAPLLERPLAAKAGLGWTGKHSLILNREAGSWFFLGELLINLPLPVDQPQEEQCGRCVACLTTCPTGAIVEPYVVDARRCISYLTIELEGAIPEAFRPLIGNRIYGCDDCQLICPWNRFGQLTDEDDFSPRAALHAPPLTELFMWDEAKFLRITEGSAIRRIGHLRWLRNVAVALGNAPWDEENIAVLNRRLGENAMLDEHIEWAIAQQKLRRAENAIEVQRPQQKRLVRAVEKGLPRDA

SEQ ID NO: 76616 - protein, 353 aa, Erythrobacter aquimixticola
  misc_feature (1)..(353): tr|A0A419RUM8|A0A419RUM8_9SPHN Epoxyqueuosine reductase OS=Erythrobacter aquimixticola OX=1958945 GN=queG PE=3 SV=1
MVNSPDSQSLEHALREKARELGFAAFGIAPAEDNPEQARRLQEWLAAGYHGTMGWMEDRADVRQGPNAMWPEAKSVIALGMSYAPDVDPLALEGDAERARISVYAQGRDYHDTLKKAAKALARWLVEREPGTQLKVFVDTAPVMEKPLGEAAGLGWQGKHTNLVSREYGSWLFLGAIYTTLALKPDAPHSDRCGSCRDCQDACPTDAFPAPYRLDARRCISYLTIEHKGPIPDEFREAIGNRIYGCDDCLAVCPWNKFAQSAARHRAFAPQEDLVAPRLDALLTLDDAAFRAKFSGSPIKRIGRNRFVRNCLTAAGNSGNRGLEPIVRTLTRDPDDVVAEAARWALSRLSEGP

SEQ ID NO: 76617 - protein, 357 aa, Erythrobacter atlanticus
  misc_feature (1)..(357): tr|A0A0H4V939|A0A0H4V939_9SPHN Epoxyqueuosine reductase OS=Erythrobacter atlanticus OX=1648404 GN=queG PE=3 SV =1
MVNMADTRLIEHRFETRLRNKARELGFASVGIAPAADDPLRAERLHAWLDSGFHGAMGWMEDRADVRQGPQSMWPAAKSVIALGMSYAPEIDPLALEGDAEKARISVYAQGRDYHDVLKKALKALARWLCEEVPETQLKVFVDTAPVMEKPLGEAAGLGWQGKHTNLVSREHGSWLFLGAIYTTIELTPDGDHADLCGSCRACQDACPTNAFPQPYQLDARRCISYLTIEHKGPIPEEFRSAIGNRIYGCDDCLAVCPWNKFADTAARHLAFVPRGELAAPELAQLLALDDVAFRAKFSGSPIKRIGRNRFVRNCLIAAGNSGNNALLDQVAELRSDPDPVVSEAADWALSRLSAAP

SEQ ID NO: 76618 - protein, 346 aa, Erythrobacter citreus
  misc_feature (1)..(346): tr|A0A0L1K9T6|A0A0L1K9T6_9SPHN Epoxyqueuosine reductase OS=Erythrobacter citreus LAMA 915 OX=1306953 GN=queG P E=3 SV=1
MVNGELQAELREEAERLGFVACGFASAAPDPQRAARLEQFLGEGRHGSMEWMEARKTQRASPQGLWPEANSVIALGMSYAPDIDPLALADAAEKARVSVYAQGRDYHDVVKKALKALARWLIAREPTSELKVFVDTAPVMEKPLGQAAGIGWQGKHTNLVSRSHGSWLFLGAIYSTLEFGPDLSHPDRCGNCRACQDACPTDAFPAPYQLDARRCISYLTIEHKGPIPEEFREALGNRIYGCDDCLAVCPWNKFADTAHRHLKLAPREELMAPDLASFLTFDDAGFRQFFSGSPIKRVGRDRFVRNCLYAAGNSGSAALAPLVEGLRGDPDPAVSEAADWAARRLG

SEQ ID NO: 76619 - protein, 348 aa, Erythrobacter flavus
  misc_feature (1)..(348): tr|A0A3T1CFA7|A0A3T1CFA7_9SPHN Epoxyqueuosine reductase OS=Erythrobacter flavus OX=192812 GN=queG PE=3 SV=1
MVNAELQAELRAEATRLGFATCGFTAATPDAQRAERLERFLGEGRHGSMEWMEARKTQRASPQGLWPEASSVIALGMSYAPDIDPLALAEDPEKARISVYAQGRDYHDVVKKALKALARWLIEREPASELKVFVDTAPVMEKPLGEAAGIGWQGKHTNLVSRSHGSWLFLGAIYSALRFEPDAPHADRCGQCRACQDACPTDAFPAPYQLDARRCISYLTIEHKGPIPEQFRGALGNRIYGCDDCLAVCPWNKFADTAHRHIKLAPRAELEAPELAEFLQFDDAGFRQFFSGSPIKRIGRDRFVRNCLYAAGNSGAAQLLPLVSGLCSDPDSVVADAARWAAQRLTAA

SEQ ID NO: 76620 - protein, 348 aa, Erythrobacter flavus
  misc_feature (1)..(348): tr|A0A222EQQ9|A0A222EQQ9_9SPHN Epoxyqueuosine reductase OS=Erythrobacter flavus OX=192812 GN=queG PE=3 SV=1
MVNAELQAELRAEATRLGFATCGFTAATPDAQRAERLERFLGEGRHGSMEWMEARKTQRASPQGLWPEASSVIALGMSYAPDIDPLALAEDPEKARISVYAQGRDYHDVVKKALKALARWLIEREPASELKVFVDTAPVMEKPLGEAAGIGWQGKHTNLVSRSHGSWLFLGAIYSTLRFEPDAPHADRCGQCRACQDACPTDAFPAPYQLDARRCISYLTIEHTGPIPEQFRGALGNRIYGCDDCLAVCPWNKFADTAHRHIKLAPRAELEAPELAQFLQFDDAGFRQFFSGSPIKRIGRDRFVRNCLYAAGNSGAAQLLPLVSGLCSDPDSVVADAARWAAHRLTAA

SEQ ID NO: 76621 - protein, 349 aa, Erythrobacter gangjinensis
  misc_feature (1)..(349): tr|A0A0G9ML84|A0A0G9ML84_9SPHN Epoxyqueuosine reductase OS=Erythrobacter gangjinensis OX=502682 GN=queG PE=3 S V=1
MVNAADTSSLEDALKAKARELGFAAIGIAPATDDPTRAARLHEWLDAGHHGEMAWMADRADVRQGPQSMWADARSVIALGMSYAPDVDPLAPADAKISVYAQGRDYHDVVKKALKVLARWLVEREPEMQLKVFVDTAPVMEKPLGEAAGIGWQGKHTNLVSREHGNWLFLGAIYTTLELSADEPHTDRCGSCRACQDACPTDAFPAPYQLDARRCISYLTIEHKGPIPLEFREAIGNRIYGCDDCLAVCPWNKFADVSARAQKLAPREELIDPPLADLLALDDARFRAKFSGSPIKRVGRDRFVRNCLIAAGNSADAGLLPQVHALRDDPDAIVAEAADWAHARLTSSP

SEQ ID NO: 76622 - protein, 357 aa, Erythrobacter litoralis
  misc_feature (1)..(357): tr|A0A074MNB0|A0A074MNB0_9SPHN Epoxyqueuosine reductase OS=Erythrobacter litoralis OX=39960 GN=queG PE=3 SV=1
MVNAPVSTSGDAPLEERIAERAHELGFAACGFASAEEDPVRARRLEEWLGEGHHATMEWMETRFHHRRSPQGLWPQAKSVIALGMSYAPANDPFALEHVRDHARISVYAQGKDYHDVVKKRLKALARWLVAEEEGAEVKVFVDTAPVMEKPLGEAAGIGWQGKHTNLVSREHGSWLFLGAIYTTLDLAPADPHRDQCGSCRACLDVCPTDAFPAPYRLDARRCISYLTIEHKGPVPEDLREGLGNRIYGCDDCLAVCPWNKFASQARAMKEFLPRPELVAPRLAELLGLDDAGFRALFSGSPIKRIGRDRFVRNCLYAAGNSGEAALSGPCKALQDDPDPVVAEAARWALGKLRQAP

SEQ ID NO: 76623 - protein, 350 aa, Erythrobacter litoralis
  misc_feature (1)..(350): tr|Q2N6W3|Q2N6W3_ERYLH Epoxyqueuosine reductase OS=Eryt hrobacter litoralis (strain HTCC2594) OX=314225 GN=queG PE=3 SV=1
MVNAAATADLQKRLIAEAKRLGFAQIGFAAATDDPKRAERLHDWIEAGYYGSMGWMQTHADVRQGPQSMWPAAKSVIALGMAYTPSTDPMALDKHPDRARISVYAQGRDYHDTVKKALKALARWLVAEAPETELKVFVDTAPVMEKPLGEAAGLGWQGKHTNLVSREHGSWLFLGCIYCTLDFAPDAPHSDRCGSCNACQTACPTDAFPQPYVLDARRCISYLTIEHSGPIPEEFRAPMGNRIYGCDDCLAVCPWNKFADSAARHKAFLPRAELVAPKLAHFLALDDAGFRQLFSGSPIKRIGRNRFVRNCLIAAGNSGDAALREPVDALLADPDPVVAEAAQWAKARLV

SEQ ID NO: 76624 - protein, 350 aa, Erythrobacter longus
  misc_feature (1)..(350): tr|A0A074M801|A0A074M801_ERYLO Epoxyqueuosine reductase OS=Erythrobacter longus OX=1044 GN=queG PE=3 SV=1
MVNGPATSGLEERIGAKAKELGFASVGFTTAAEDPLRAKRLEEWLGEGRHATMEWMENRLHHRRSPQGLWPEAKSVIALGMSYAPALDPLALEEAGTRARISVYAQGKDYHDVVKKRLKALARWLVDAVPGTELKVFVDTAPVMEKPLGEASGIGWQGKHTNLVSPDHGSWLFLGAIYTTLELQPSTPHRDQCGSCRACLDSCPTDAFPNAYTIDAGRCISYLTIEHKGPIAEEFRAPLGNRIYGCDDCLAVCPWNKFASEAYAASEFLPRAELTAPRLAELLALDDAGFRALFSGSPIKRIGRDRFVRNCLYAAGNSGEPSLLTQVEPLIKDADPVVAEAAAWARAQLT

SEQ ID NO: 76625 - protein, 349 aa, Erythrobacter luteus
  misc_feature (1)..(349): tr|A0A0G9MZX7|A0A0G9MZX7_9SPHN Epoxyqueuosine reductase OS=Erythrobacter luteus OX=1581420 GN=queG PE=3 SV=1
MVNSPDTLPFEARLEAKARELGFVAFGIASAEDDAVRAGRLHDWLGEGHHGTMGWMEDRAEVRQGPQSMWPEARSVIALGMSYAPDVDPLRPQQAKVSVYAQGRDYHDVLKKAAKALARWMVEERPGTELKVFTDTAPVMEKPLGEAAGLGWQGKHTNLVSREHGSWLFLAAIYTTLELSLNASHPDRCGSCRACQHACPTDAFPAPYRLDARRCISYLTIEHKGPIPHEFREAMGARIYGCDDCLAVCPWNKFADTAARHQAFVPREDLLAPRLAELLALDDTAFRAKFSGSPIKRIGRDRFVRNCLIAAGNSGDAALAEQVDALRADPDPVVAEAADWALGRLTPSP

SEQ ID NO: 76626 - protein, 363 aa, Erythrobacter lutimaris
  misc_feature (1)..(363): tr|A0A395LIN9|A0A395LIN9_9SPHN Epoxyqueuosine reductase OS=Erythrobacter lutimaris OX=1538146 GN=queG PE=3 SV= 1
MSEAGKIDRLQADLVEKARDLGFASVRFADAHDDPAMAERLRSWLEAGYHGSMGWMERDPSVRAGPQGMWPEARSVIALGANYAPAQDPLEAAEPKDQARISVYAQGQDYHVVLKKALKALARWLVAEAETRGLGEARMKLFVDTAPVMEKPLAQRAGVGWQGKHTNLVSMEHGSWLFLGAVYCTLPFVADGPHEDRCGSCRACQDACPTNAFPRAYTIDARRCISYLTIEHDGPIPHEFREAIGNRIYGCDDCLAVCPWNKFAESAAANRAFLPRAELVRPRLADLLQLDDVGFRKLFSGSPIKRIGRDRFVRNCLIAAGNSGEPGLLDQVEPLLADPDPVVAEAAQWAAERLNLPSPSPEA

SEQ ID NO: 76627 - protein, 351 aa, Erythrobacter marinus
  misc_feature (1)..(351): tr|A0A0H0XRN9|A0A0H0XRN9_9SPHN Epoxyqueuosine reductase OS=Erythrobacter marinus OX=874156 GN=queG PE=3 SV=1
MVNNPETMSIEHRLKAKARELGFVAVGIAPAQDDPLRTRRLHEWLDEGFHGEMGWMEDRADVRQGPQSMWPETRSVIALGMSYAPDVDPLALEGDAEAARISVYAQGRDYHDVLKKALKALARWMCAEIPETQLKVFVDTAPVMEKPLGEVAGIGWQGKHTNLVSTDHGSWMFLGAIYTTLELTPDTPHTDRCGSCNACQDACPTDAFPEAYRLDARRCISYLTIEHKGPIPEEFREAIGNRIYGCDDCLAVCPWNKFAEVAARHLAFAPRAELIAPRLDELLALDDTGFRAKFSGSPIKRIGRDRFVRNCLIAAGNSGNAALLPQVEQLTGDPDEVVAEAARWARARLSA

SEQ ID NO: 76628 - protein, 353 aa, Erythrobacter nanhaisediminis
  misc_feature (1)..(353): tr|A0A1I5KQ58|A0A1I5KQ58_9SPHN Epoxyqueuosine reductase OS=Erythrobacter nanhaisediminis OX=604088 GN=queG PE= 3 SV=1
MVKNPSLKALQEDLRKEARALGFAACGFTSAGEDRTRTERLEEWLGEGRHGSMEWMEARKEQRAFPQGLWSEARSVIALGMSYAPDVDPLALEGNPDKARISVYAQGRDYHDVVKKALKALARWLIEQEPDSELKVFVDTAPVMEKPLGEAAGIGWQGKHTNLVSREHGSWLFLGAIYSTLPFEPDAPGRDVCGSCRACQDACPTAAFPSPYRLDARRCISYLTIEHKGPIAEEFREALGNRIYGCDDCLAVCPWNKFADSAHRHLKLAPREELQAPDLARFLAFDDAGFRQFFSGSPIKRIGRDRFVRNCLYAAGNSGSAWLAPLVEALRGDPDPAVSDAADWAAARLRAFP

SEQ ID NO: 76629 - protein, 302 aa, Erythrobacter sp.
  misc_feature (1)..(302): tr|A0A3D2LL55|A0A3D2LL55_9SPHN tRNA epoxyqueuosine(34) reductase QueG (Fragment) OS=Erythrobacter sp. OX=1042 GN=queG PE=4 SV=1
MVNGELQAELREEAERLGFVACGFASAAPDPQRAARLEQFLGEGRHGSMEWMEARKTQRASPQGLWPEANSVIALGMSYAPDVDPLALADAAEKARVSVYAQGRDYHDVVKKALKALARWLIAREPTSELKVFVDTAPVMEKPLGQAAGIGWQGKHTNLVSRSHGSWLFLGAIYSTLEFAPDLSHPDRCGNCRACQDACPTDAFPAPYQLDARRCISYLTIEHKGPIPEEFREALGNRIYGCDDCLAVCPWNKFADTAHRHLKLAPREELMAPDLASFLTFDDAGFRQFFSGSPIKRVGRDR

SEQ ID NO: 76630 - protein, 357 aa, Erythrobacter sp.
  misc_feature (1)..(357): tr|A0A109LPP3|A0A109LPP3_9SPHN Epoxyqueuosine reductase OS=Erythrobacter sp. YT30 OX=1735012 GN=queG PE=3 SV=1
MVNSGLTNGVEETLETRISKAALDLGFVSCGITSAREDPVRAERLEQWLGDNHHGTMEWMETRAHHRRSPQALWPEARSVIALGMSYAPSADPMRLEDYPAHARISVYAQGKDYHDTVKKRLKALARWLVAEELGAEVKVFVDTAPVMEKPLGEAAGIGWQGKHTNLVSPDHGSWLFLGAIYTTLELEPSDPQRDQCGTCRACLDSCPTDAFPSAYRLDARRCISYLTIEHKGPIAEEFRTALGNRIYGCDDCLAVCPWNKFASTAHAMREFLPRAELASPRLGELLALDDAGFREVFSGSPIKRIGRGRFVRNCLYAAGNSGDAALLGACEKLKNDPDTVVADAAHWAAARLTSSL

SEQ ID NO: 76631 - protein, 352 aa, Erythrobacter xanthus
  misc_feature (1)..(352): tr|A0A3A1P4E9|A0A3A1P4E9_9SPHN Epoxyqueuosine reductase OS=Erythrobacter xanthus OX=1784712 GN=queG PE=3 SV=1
MVNLAEATLQDRLREKARELGFAAIGFAPAEDDPVRSARLHEWIAAGYHGDMQWMADRADVRQGPQSMWPVARSVIALGMSYAPEVDPLALEGDAEKARISVYAHGRDYHDVVKKALKALARWLVEQAPETELKVFVDTAPVMEKPLGQVAGLGWQGKHTNLVSREHGSWLFLGAIYTTAEFVPDKPQADHCGSCRACQQACPTEAFVSPYKLDARRCISYLTIEYAGPIPEEFREAIGNRIYGCDDCLAVCPWNKFADTAARHKAFAAREELIEPIVAELLTLDDAAFRAKFSGSPIKRIGRNRFVRNCLIAAGNSGNAELIAPVRTLIDDPDPVVAEAARWALDKLTSVP

SEQ ID NO: 76632 - protein, 357 aa, Erythrobacter zhengii
  misc_feature (1)..(357): tr|A0A418NNM7|A0A418NNM7_9SPHN Epoxyqueuosine reductase OS=Erythrobacter zhengii OX=2307003 GN=queG PE=3 SV=1
MVNCRDTISLEQALKAKARELGFAAVGITHAQDDPLRAERLHAWLGAGCHGDMAWMQDRADVRQGPKSMWPEAKSVIALGMSYAPEEDPLAEGEAKISVYARGRDYHDVVKKALKALARWLVEERPGTQLKVFVDTAPVMEKPLGEAAGIGWQGKHTNLVSREHGSWLFLGAIYTTLELSPDVPHDDRCGSCRACQDACPTNAFPQPYRLDARRCISYLTIEHKGPIPYEFREAIGNRIYGCDDCLAVCPWNKFADTAARHMKLAPREDLVDPPLADLLALDDAAFRARFSGSPIKRVGRDRFVRNCLIAAGNSADAALVPQVQALAKDPDPVVAEAAQWALSRLDRQFPIGSFDRV

SEQ ID NO: 76633 - protein, 319 aa, Erythrobacteraceae bacterium
  misc_feature (1)..(319): tr|A0A2D6NKJ8|A0A2D6NKJ8_9SPHN tRNA epoxyqueuosine(34) reductase QueG (Fragment) OS=Erythrobacteraceae bacteri um OX=2026738 GN=queG PE=3 SV=1
MVNAELQDDLRKEAQRLGFVACGFTSAAPDPQRAARLEEYLGEGRHGSMEWMEARKAQRASPQGLWPEARSVIALGMSYAPDIDPLALESHPEKARVSVYAQGRDYHDVVKKALKALARWLIERAPESELKVFVDTAPVMEKPLGEAAGIGWQGKHTNVVSRNHGSWLFLGAIYSTLDFATDTPGRDLCGSCRACQDACPTDAFPSPYKLDARRCISYLTIEHKGEVEEDLRPLLGNRIYGCDDCLAVCPWNKFADAAHRHLKLAPRQELAAPDLAAFLQFDDAGFRQFFSGSPIKRIGRNRFVRNCLYAAGNSGSASL

SEQ ID NO: 76634 - protein, 357 aa, Erythrobacteraceae bacterium
  misc_feature (1)..(357): tr|A0A0P7VNF2|A0A0P7VNF2_9SPHN Epoxyqueuosine reductase OS=Erythrobacteraceae bacterium HL-111 OX=1666908 GN=q ueG PE=3 SV=1
MVKPPVSTIAPETLESRIAAKARELGFVACGFAGAEEDPVRAARLEQWLGEGLHGTMEWMETRLHHRRSPRALWPQARSVIALGMSYAPGHDPFALEDVGDRARVSVYAQGKDYHDIVKKRLKALARWLVAEEEGCEVKVFVDTAPVMEKPLGEAAGIGWQGKHTNLVSREHGSWLFLGAIYTTLDLAPAEPHRDSCGSCRACLDVCPTGAFPAPYRLDARRCISYLTIEHKGPVPEDLREGMGNRIYGCDDCLAVCPWNKFASQAAAMREFLPRPELVAPRLAELLALDDAGFRALFSGSPIKRIGRDRFVRNCLYAAGNSGDAALADPCEALTEDPDPVVAEAARWALRKLRAGP

SEQ ID NO: 76635 - protein, 379 aa, Escherichia albertii
  misc_feature (1)..(379): tr|A0A2S6P6Z3|A0A2S6P6Z3_9ESCH Epoxyqueuosine reductase OS=Escherichia albertii OX=208962 GN=queG PE=3 SV=1
MSEPLDLNQLAQNIKQWGLELGFQQVGITDTDLSESEPKLQAWLDKQYHGEMDWMARHSMLRARPHELLPGTLRVISVRMNYLPANAAFASTLKNPKLGYVSRYALGRDYHKLLRNRLKKLGEMIQQHCVSLNFRPFVDSAPILERPLAEKAGLGWTGKHSLILNREAGSFFFLGELLVDIPLPVDQPLEEGCGKCVACMTICPTGAIVEPYTVDARRCISYLTIELEGAIPEELRPLMGNRIYGCDDCQLICPWNRYSQLTTEDDFSPRKPLHAPELIELFAWSEETFLKVTEGSAIRRIGHLRWLRNIAVALGNAPWDETILTALESRKGEHPLLDEHIAWAIAQQIERRNACVVEVQLPKKQRLVRVIEKGLPRDA

SEQ ID NO: 76636 - protein, 379 aa, Escherichia albertii
  misc_feature (1)..(379): tr|W0ATP7|W0ATP7_9ESCH Epoxyqueuosine reductase OS=Esch erichia albertii KF1 OX=1440052 GN=queG PE=3 SV=1
MSEPLDLNQLAQKIKQWGLELGFQQVGITDTDLSESEPKLQAWLDKQYHGEMDWMARHGMLRARPHELLPGTLRVISVRMNYLPANAAFASTLKNPKLGYVSRYALGRDYHKLLRNRLKKLGEMIQQHCVSLNFRPFVDSAPILERPLAEKAGLGWTGKHSLILNREAGSFFFLGELLVDIPLPVDQPVEEGCGKCVACMTICPTGAIVEPYTVDARRCISYLTIELEGAIPEELRPLMGNRIYGCDDCQLICPWNRYSQLTTEDDFSPRKPLHAPELIELFAWSEETFLKVTEGSAIRRIGHLRWLRNIAVALGNAPWDETILTALESRKGEHPLLDEHIAWAIAQQIERRNACVVEVQLPKKQRLVRVIEKGLPRDA

SEQ ID NO: 76637 - protein, 379 aa, Escherichia fergusonii
  misc_feature (1)..(379): tr|A0A564UZ15|A0A564UZ15_ESCFE Epoxyqueuosine reductase OS=Escherichia fergusonii OX=564 GN=queG PE=3 SV=1
MSEPLDLNQLAQKIKQWGLELGFQQVGITDTDLSESEPKLQAWLDKQYHGEMDWMARHGMLRARPHELLPGTLRVISVRMNYLPANAAFASTLKNPKLGYVSRYALGRDYHKLLRNRLKKLGEMIQQHCVSLNFRPFVDSAPILERPLAEKAGLGWTGKHSLILNREAGSFFFLGELLVDIPLPVDQPVEEGCGKCVACMTICPTGAIVEPYTVDARRCISYLTIELEGAIPEELRPLMGNRIYGCDDCQLICPWNRYSQLTTEEDFSPRKPLHAPELIELFAWSEEKFLKVTEGSAIRRIGHLRWLRNIAVALGNAPWDETILAALESRKGEHPLLDEHIAWAMAQQIERRNACIVEVQLPKKQRLVRVIEKGLPRDA

SEQ ID NO: 76638 - protein, 379 aa, Escherichia fergusonii
  misc_feature (1)..(379): tr|F0JNX7|F0JNX7_ESCFE Epoxyqueuosine reductase OS=Esch erichia fergusonii ECD227 OX=981367 GN=yjeS PE=3 SV=1
MSEPLDLNQLAQKIKQWGLELGFQQVGITDTDLSASEPKLQAWLDKQYHGEMDWMARHGMLRARPHELLPGTLRVISVRMNYLPANAAFASTLKNPKLGYVSRYALGRDYHKLLRNRLKKLGEMIQQHCVSLNFRPFVDSAPILERPLAEKAGLGWTGKHSLILNREAGSFFFLGELLVDIPLPVDQPVEEGCGKCVACMTICPTGAIVEPYTVDARRCISYLTIELEGAIPEELRPLMGNRIYGCDDCQLICPWNRYSQLTKEDDFSPRKPLHAPELIELFAWSEEKFLKVTEGSAIRRIGHLRWLRNIAVALGNAPWDKTILTALESRKGEHPLLDEHIAWAIAQQIERRNACVVEVQLPKKQRLVRVIEKGLPRDA

SEQ ID NO: 76639 - protein, 379 aa, Escherichia marmotae
  misc_feature (1)..(379): tr|A0A2B7LJL7|A0A2B7LJL7_9ESCH Epoxyqueuosine reductase OS=Escherichia marmotae OX=1499973 GN=queG PE=3 SV=1
MSEPLDLNQLAQKIKQWGLELGFQQVGITDTDLSESEPKLQAWLDKQYHGEMDWMARHGMLRARPHELLPGTLRVISVRMNYLPANAAFASTLKNPKLGYVSRYALGRDYHKLLRNRLKKLGEMIQQHCVSLNFRPFVDSAPILERPLAEKAGLGWTGKHSLILNREAGSFFFLGELLVDIPLPVDQPVEEGCGKCVACMTICPTGAIVEPYTVDARRCISYLTIELEGAIPEELRPLMGNRIYGCDDCQLICPWNRYSQLTTEDDFSPRKPLHAPELIELFAWSEEKFLKVTEGSAIRRIGHLRWLRNIAVALGNAPWDEAILAALNSRKGEHPLLDEHIEWAIAQQIERRNACVVEVQLPKKQRLVRVIEKGLPRDA

SEQ ID NO: 76640 - protein, 379 aa, Escherichia sp.
  misc_feature (1)..(379): tr|A0A352MQ03|A0A352MQ03_9ESCH Epoxyqueuosine reductase OS=Escherichia sp. OX=1884818 GN=queG PE=3 SV=1
MSQPLDLNQLAQNIKQWGTELGFQQVGITDTDLSASEPKLQAWLDKQYHGEMAWMARHGMMRARPHELLPGTLRVISVRMNYLPANAAFASTLKNPALGYVSRYALGRDYHKLLRNRLKKLGETIQQHCVSLNFRPFVDSAPLLERPLAEKAGLGWTGKHSLILNQEAGSFFFLGELLIDLPLPIDQPVEEKCGKCVACMTICPTGAIVEPYTVDARRCISYLTIELEGSIPPEFRPLIGNRIYGCDDCQLICPWNRFSQLTDEEDFSPRKALHAPELIALFGWSEAHFLKVTEGSAIRRIGHLRWLRNVAVALGNAPWDEANIQALEQRRGEHPLLDEHIEWAIAQQIEKRNACVVEVQLPQKLRLVRVVEKGLPRDA

SEQ ID NO: 76641 - protein, 379 aa, Escherichia sp.
  misc_feature (1)..(379): tr|A0A4U6CRE6|A0A4U6CRE6_9ESCH Epoxyqueuosine reductase OS=Escherichia sp. MR OX=2575922 GN=queG PE=3 SV=1
MSEPLDLNQLAQKIKQWGLELGFQQVGITDTDLSESEPKLQAWLDKQYHGEMDWMARHGMLRARPHELLPGTLRVISVRMNYLPANAAFASTLKNPKLGYVSRYALGRDYHKLLRNRLKKLGEMIQQHCVSLNFRPFVDSAPVLERPLAEKAGLGWTGKHSLILNREAGSFFFLGELLVDIPLPVDQPVEEGCGKCVACMTICPTGAIVEPYTVDARRCISYLTIELEGAIPKELRPLMGNRIYGCDDCQLICPWNRYSQLTTEDDFNPRKPLHAPELIELFAWSEEKFLKITEGSAIRRIGHLRWLRNIAVALGNAPWDEAILTALESRKGEHPLLDEHIAWAITQQIERRNACVVEVQLPKKQRLVRVIEKGLPRDA

SEQ ID NO: 76642 - protein, 320 aa, Estrella lausannensis
  misc_feature (1)..(320): tr|A0A0H5DSJ3|A0A0H5DSJ3_9BACT Uncharacterized protein OS=Estrella lausannensis OX=483423 GN=ELAC_1949 PE=4 SV =1
MDEISFAEIHEAALRSGFHDCGICDPEIPKEDADAYDTWLKDGLNAHLAYMENRIRIDPKSLFADLKSVIMFVTHYKQEKLPFEEGKGLIASYARGRDYHRIHKKQLKEFICWLEKRSGKEGIARGFSDSFPLLEKALAAKAGLGFVGKNTLLIHPKFGTFVLISGILTSLDLPRTASKARMPRCGSCTKCLDACPTSAIIAPYRVDAAKCLSSLLIESKGPLENPEKVRNPGYIFGCDICQDVCPHNVRKPLSLHTEFSQEKGQGAYITRDRLEALLTMPEELYGSPTFGSPLNRRGALGLKANAETLPWALEAAHELK

SEQ ID NO: 76643 - protein, 309 aa, Ethanoligenens harbinense
  misc_feature (1)..(309): tr|A0A386XT22|A0A386XT22_9FIRM 4Fe-4S ferredoxin-type d omain-containing protein OS=Ethanoligenens harbinense O X=253239 GN=CN246_09210 PE=4 SV=1
MHVLRQAAEVFEQAGCKTKWLTLAHIDETVWETYDLFHSGKLGPAFSARYQHKFRLDWQPSGPTIRSAILLAVPVHMLLLRFHYHGAQREIAVPPGYACSDTESRIWKLAETAFGEAGHDFQWLRGVPLKLLAVRSGLCLYGRNNITYCEELGSFIELYGFVTDMDAPKQIPWYPSAQMPECAACTVCAQACPSACIDLHSPIIHAERCLTYLNENGGDFPAWLKPSAHHTAVGCMICQRACPKNRGHLSVQTVESAFDKDEIDAICAGGEFHDLPEKTQKTLKSFDLDDYWPKQALSRNIRALLAKNE

SEQ ID NO: 76644 - protein, 313 aa, Eubacteriaceae bacterium
  misc_feature (1)..(313): tr|A0A425W803|A0A425W803_9FIRM tRNA epoxyqueuosine(34) reductase QueG OS=Eubacteriaceae bacterium OX=2049045 G N=queG PE=4 SV=1
MIQNNEPLTEDAIRRLAEKIDIPILGITDAEPITEMLPYEKQRRQENNGLIPFVRTKPERRIDFKSVMPEVKSVIVIGIPYPLFPQKIEDFTTYGYFSSVTCGKDYHKVVMEKMDALCARIQSELSAEIQVKKFVDNSRLMDKASAWKAGLGFFGKNNLLIHPQFGSAWNIGQILIDKAIVHKAITPMANQCGKCQRCIEACPGHALGDQGYQLFYERCISYLTQKRKLTEAEEKRIRYFLYGCDICQWVCPFNNREGKKPELDSAVKLDEILNLSESEIKSKFADRALSWLPPSVLVRNAGILKNRSKTSFK

SEQ ID NO: 76645 - protein, 275 aa, Eubacteriaceae bacterium
  misc_feature (1)..(275): tr|A0A143ZSU0|A0A143ZSU0_9FIRM Epoxyqueuosine reductase OS=Eubacteriaceae bacterium CHKCI005 OX=1780381 GN=que G PE=4 SV=1
MIQFDAIVPLLQEAGTDIWGCCAFEKIADRLIPCRARKRLMDGAQSILVGLFPYLVRQEEGNLCRYARVPDYHCVVGDVLEGLQKRLKEAYPSFSFESFVDNSPIPEVQAAALAGLGTVGDSGLLLHPEYGSWCFIGEIVTDLPVKPTGKELVRCIHCGACRRACPGRTLGKENFVRTNCVSDITQKKKDLTEEEEEKIAQNGLCWGCDTCQLVCPYNREVTIRPLQAFAEHYVPSYPPEQGDDLPRAWEWRGEAVIQRNLRIILGKKGHTKPAK

SEQ ID NO: 76646 - protein, 317 aa, Eubacterium aggregans
  misc_feature (1)..(317): tr|A0A1H4A4Z4|A0A1H4A4Z4_9FIRM Epoxyqueuosine reductase OS=Eubacterium aggregans OX=81409 GN=SAMN04515656_1079 5 PE=4 SV=1
MLRLKMARAMLEEAEIRRVAASLGIPIIGFTEATPLLEIKPHLEARHTTNGPTPFVGVSPDKRVDYRQAYGDVAAVIVIGLPYTLKMSPPKSTQGKGRLSAFCRGEDYHLRLSRTMEALMVALKANHPQLDYRLFVDNGKLVDRGSAWRAGLGFYGKNNTLIHPQYGSGVFIGQILVNTPIAFVPVTPLKSQCGSCRRCLDACPQGALKSGFSLDASRCISYLTQKKKLSEEEEQRVQYFVYGCDLCQLACPYNAHLPEVRWEDGPLNAAWPELQALSEMDEATFDAAFAGSALHWRGCQTLVRNSKLLLKFQEKEC

SEQ ID NO: 76647 - protein, 317 aa, Eubacterium barkeri
  misc_feature (1)..(317): tr|A0A1H3D9R2|A0A1H3D9R2_EUBBA Epoxyqueuosine reductase OS=Eubacterium barkeri OX=1528 GN=SAMN04488579_104121 PE=4 SV=1
MPRLKMARAMLEEAEVRRVAASLGIPIIGFTEATPLLEIKPHLEARQTTNGPTPFVGVPPDKRVDYRQAYGDAAAVIVIGLPYTLKMSPPKNTQGKGRLSAFCRGEDYHLRLSRKMEALMAALKVKHPQLDYRLFVDNGKLVDRGSAWRAGLGFYGKNNTLIHPQYGSGFFIGQILVSTPIAFVPAIPLKSLCGSCRRCLDACPHGALESGFSLDASRCISYLTQKKKLSEVEAQRVQYFVYGCDLCQLACPYNAHLPEECWEDGPMDAAWPELKALSKMDEATFDAVFTGSALHWRGCQTLVRNSKLLLKFLEKEC

SEQ ID NO: 76648 - protein, 236 aa, Eubacterium barkeri
  misc_feature (1)..(236): tr|A0A1H3DZG3|A0A1H3DZG3_EUBBA Epoxyqueuosine reductase QueG (Queuosine biosynthesis) OS=Eubacterium barkeri O X=1528 GN=SAMN04488579_10633 PE=4 SV=1
MNGIKEKIRQKALEMGAVDVGWADLEAASVSAPDDFKQALCIVVPLNRGVISHIQETPTHAYYAHYVSVNRLIDDITLQLALLLEAQGYPAQAIPAGPPMLSDDTVLHGLFQHKTTAVLSGMGWIGKSALFLHQEYGSGVRLGSVLTTTELPIENKPMESQCGGCRICTRVCPSGAIKGEKWALGMERDTLFDALKCDAYINTHHEEIAHQMVCGLCMAHCPFTKGTRKIDESLRN

SEQ ID NO: 76649 - protein, 315 aa, Eubacterium callanderi; identical to SEQ ID NO: 75327
  misc_feature (1)..(315): tr|E3GFZ7|E3GFZ7_9FIRM 4Fe-4S ferredoxin-type domain-co ntaining protein OS=Eubacterium callanderi OX=53442 GN= ELI_3522 PE=4 SV=1

SEQ ID NO: 76650 - protein, 315 aa, Eubacterium callanderi
  misc_feature (1)..(315): tr|A0A1I5KS50|A0A1I5KS50_9FIRM Epoxyqueuosine reductase OS=Eubacterium callanderi OX=53442 GN=SAMN04487888_105 302 PE=4 SV=1
MLKEEKIREAARAAGIEMIGFAEPHPLTEWLEILEKRREQGRITSFERTPPSRRVDYSQAFPKVKGIIVIGVPYCTELPEPEDNTAHGSMASVAWGQDYHEVVTEKMNGLMALLKETAPSLEYRSYVDNSRLLDRATAWRAGLGFFGKNNTLINPEYGSFFFIGQILVSSFIDFKHAVPLKSQCGTCQRCLMACPNQALGEGYTLEPERCVSYLTQKKKLTPEEERLLGVTYLYGCDDCQRACPWNIKSSDGGQAWPDIVPESIYPGLDETEAISEADFEEKFGKTAAAWRGKDVLARNARIIKNNLKNHAKDKN

SEQ ID NO: 76651 - protein, 230 aa, Eubacterium limosum
  misc_feature (1)..(230): tr|A0A317RQ45|A0A317RQ45_EUBLI Epoxyqueuosine reductase QueG OS=Eubacterium limosum OX=1736 GN=C7955_104213 PE =4 SV=1
MNPLNEKIEALGKGLGAAQVGFADLSGLPDGLNMGYPGAVSVVVRLSKGILAQIEDAPTATYFSHYRIVNRLIDEITLRVALALEEEGAMAVAVPASQSLPSVKGENPYRGLFAHKTAAVIAGMGWIGKSALFIHRDYGPAVRLGTVLTDAPLDTVAALAESECGSCQACVQACPSMSIEGTLWEPGMERSYLLDAHSCSEYMKEAYQHIGRGSVCGLCMVSCPHFRKNL

SEQ ID NO: 76652 - protein, 315 aa, Eubacterium limosum
  misc_feature (1)..(315): tr|A0A317RX92|A0A317RX92_EUBLI Epoxyqueuosine reductase OS=Eubacterium limosum OX=1736 GN=C7955_102339 PE=4 SV =1
MLKEEKIREAARAAGIKMIGFGEPHPLTEWLEPLEKRREQGRVTSFERTPPARRVDYSQAFPEVKGIIVIGVPYCSELPKPEDNTPRGKIASVAWGQDYHEVVTGKMDALMALLKETDPSLDYRGYVDNSRLLDRATAWRAGLGFFGKNNTLINPEYGSFFFIGQILVNSSIDFEPAETLKSRCGTCRRCLVACPNHALGEGYTLEPERCISYLTQKKKLTAEEERLLGITYLYGCDDCQRVCPWNIRRSDSRPDWPGIGPESVYPGLDETEAISGLDFEEKFGKTAAAWRGRDVIARNARIIKNNLKNHAKDKN

SEQ ID NO: 76653 - protein, 315 aa, Eubacterium maltosivorans
  misc_feature (1)..(315): tr|A0A4P9CC92|A0A4P9CC92_9FIRM tRNA epoxyqueuosine(34) reductase QueG OS=Eubacterium maltosivorans OX=2041044 GN=queG PE=4 SV=1
MLKEKNIREAARAAGIKMIGFAEPHPLTEWLEPLEKRRKQGRVTSFERTPPARRIDYAQAFPEVKGIIVIGVPYSAELPEPEDDADRGKIASVAWGQDYHEVVTEKMDSLMALLKEAEPSLACRTYVDNSRLLDRATAWRAGLGFFGKNNTLIHPEYGSFFFIGQILINRSINFDPVKPLKSRCGACQRCLMACPNQALGEGYTLEPEKCVSYLTQKKKLTAEEERLLGDVYLYGCDDCQRACPWNKRSLECRVDWPGVEPESVYPGLDETEAISEPDFEKKFGKTAAAWRGKDVLSRNARIIKNNLKNHAKDKN

SEQ ID NO: 76654 - protein, 312 aa, Eubacterium pyruvativorans
  misc_feature (1)..(312): tr|A0A1I7HMS1|A0A1I7HMS1_9FIRM Epoxyqueuosine reductase QueG (Queuosine biosynthesis) OS=Eubacterium pyruvativ orans OX=155865 GN=SAMN05216508_12018 PE=4 SV=1
MGLAGEIYSAALQCGYDNCGIILPEDVKGASDFLQKRMEDVPSSISFYKGIFSNYISIKERYPWAKAIIVLTSEHGKYRYPAELRKRYAKAFFLSPEEGNTDAYDHVRFENWLQEQDIRWEHGRIPLRYAAMKAGLGIIRKNNFFYTEHGSFVGLTAYIIDQECSLHQDVSPRPCSDACTLCQKACRSRSLLAPYTMDPMKCISFWTTFGKGNVPPFLEESMFEEWICGCDNCQDACPYNRKHDWDKGEAFSNLEEIAKDMVPEKLIYQTDDFLKREVIAKTDQHLDPEDTNVLRTNAKRAIRNAQSNTGEH

SEQ ID NO: 76655 - protein, 315 aa, Eubacterium sp.; identical to SEQ ID NO: 76653
  misc_feature (1)..(315): tr|A0A415Z8T8|A0A415Z8T8_9FIRM tRNA epoxyqueuosine(34) reductase QueG OS=Eubacterium sp. AM05-23 OX=2292043 GN =queG PE=4 SV=1

SEQ ID NO: 76656 - protein, 280 aa, Eubacterium sp.
  misc_feature (1)..(280): tr|R7FZM5|R7FZM5_9FIRM Uncharacterized protein OS=Eubac terium sp. CAG:841 OX=1262894 GN=BN797_01069 PE=4 SV=1
MNSSLYDVFSAENIECFAPVPIEKCRLRRPDLLERAGLPANEAKTVIMFLIPYYDDDGDGNISLYARPMDYHLYCDGLFPRLCGKLCEKFGGKFVGFADKSPIEEADAACRAGLGVIGDSYVIINEKYGSFVFIAEVFTDIESERFGCDKNGEYPLSYCVHCGACKRACPMILEGMDCLSAVTQKKGELSEKEKEYIIKYKSAWGCDICQLACPMVQKAIKNGARTPISFFRENRIKNLTTEELCGMSDEEFRKRAFSWRGKATIKRNIDLLCGKGGAHE

SEQ ID NO: 76657 - protein, 305 aa, [Eubacterium] yurii
  misc_feature (1)..(305): tr|A0A1T5JTT7|A0A1T5JTT7_9FIRM Epoxyqueuosine reductase QueG (Queuosine biosynthesis) OS=[Eubacterium] yurii O X=39498 GN=SAMN02745115_01408 PE=4 SV=1
MGIIDEAIKSLGLGYEIEYSVVNLMDENFTCLQEDFLKFLEKRKNEGKISPLESSDIEKRVFPQKTLEGAKSVVTFLFPYMTPYHKDGNLSYYCMGLDYHIGVKDYLSKIKEYIAQCHKDASFYIQSDIGDLAEKFFAYNSGLGILGLNSLIISPLYGSYVNIGVIVSNLEIESKTSEKKTCDMCMKCQKACPGNAINGDFTIDSQNCASYISQKKGELSKDEVNILKKSAKIFGCDICQKVCHFNNNVKKISSTYDIINIIEKEDLQISNKEFKSKYGDRAFSFRGKNVLSRNLDLINIGEEIE

SEQ ID NO: 76658 - protein, 305 aa, [Eubacterium] yurii
  misc_feature (1)..(305): tr|E0QHZ5|E0QHZ5_9FIRM Putative iron-sulfur cluster-bin ding protein OS=[Eubacterium] yurii subsp. margaretiae ATCC 43715 OX=864565 GN=HMPREF0379_0678 PE=4 SV=1
MSIIDEAIKSLDLEYEIEYSTVSLIDENFICLQEDFLKFLEKRKRDGKISQLESSDIEKRAFPQKILQGAKTVITFLFPYMTSFHKDGNLSYYCMGLDYHIGVKNSLNKIAEYIGQYHKDAKFYIQSDIGELDEKFFAYNSGLGILGLNSLIISPLYGTYVNIGVIVTDLEIKPKIAEKKICDMCMKCQNSCPGKAINGDFTIESQKCASYITQKKGELSKDEIEILKKSGKIFGCDICQKVCHFNKNVKKISSTYDIINSIEKDDLQISNKEFKLKYGDRAFSFRGKSVLSRNIDLINIGEEIE

SEQ ID NO: 76659 - protein, 315 aa, Euhalothece natronophila
  misc_feature (1)..(315): tr|A0A5B8NQF1|A0A5B8NQF1_9CHRO Epoxyqueuosine reductase OS=Euhalothece natronophila Z-M001 OX=522448 GN=queG P E=3 SV=1
MVLTSTEIKEKAKSLGFHLVGIAEAKNDEQTVAQTRLKNWLASGYHADMDWINNPKRFDLEACLSGVKSVIAVALNYYTPYEQPDDAETGKVSRYAWGRDYHKVMKKKLKALSQWLEDQDETIKTRYYCDTGPLQDKFWAQQAGLGWIAKNSNVITRDYGSWVFLGEVLTTLELTPDTPHTEHCGTCTRCLEACPTNAFPQPFVVDANKCIAYHTIENRSENLPENITLDGWVAGCDICQEVCPWNQQFAKETDCDDFQPRPDNFAPNLIELSQLKEQDWDEKTRGSALRRIKPAMWRRNARVNLEEDGDRNPND

SEQ ID NO: 76660 - protein, 310 aa, Euhalothece sp.
  misc_feature (1)..(310): tr|A0A2K3A8X2|A0A2K3A8X2_9CHRO Epoxyqueuosine reductase OS=Euhalothece sp. KZN 001 OX=1884791 GN=queG PE=3 SV= 1
MVLTSQEIKAKAKRLGFHLVGVAVAENDEQVLAQQRLQNWLNSGYHADMEWMNNPKRFDLQKCLPNVKSVIAVALNYYTPEQQSEDPEKGKISRYAWGRDYHKVMTKKLKALACWLEEQEETIQARFYCDTGPIQDKFWAQQAGLGWIAKNGNLITREYGSWVFLGEVLTTLELTPDTPHTEHCGTCTRCLDACPTDAFPQPFVVNAKRCIAYQTIENRAAELPKEINLNNWVAGCDICQEVCPWNQRFAKETDCDDFQPRPENIAPNLIELAQLRDESWDQKTRGSALRRIKPAMWRRNARANLEKDRD

SEQ ID NO: 76661 - protein, 307 aa, Euzebyella marina
  misc_feature (1)..(307): tr|A0A3G2L2V4|A0A3G2L2V4_9FLAO Epoxyqueuosine reductase OS=Euzebyella marina OX=1761453 GN=queG PE=3 SV=1
MYNKSRYSELIKQEAARLGFLSCGISKAEFLEAEAPRLEKWLNNQMHGEMGYMANHFDKRLDPRLLVDGAKSVISLLLNYYPEEEQKSSTYKISKYAYGQDYHHVIKSKLRELHNFIVEEIGEVNGRAFVDSAPVLDKAWAAKSGLGWIGKNSNLLTQQVGSFYFIAELIVDLELDYDTPVTDHCGTCTACIDACPTNAIVEPYVVDGSKCISYFTIELKNEIPDEFQGKFDDWAFGCDLCQDVCPWNRFSKPHRELLFDPHPDLLNMSKKDWEEMTEDVFKKVFKKSAVKRTKFSGLKRNIDFLKK

SEQ ID NO: 76662 - protein, 286 aa, Evtepia gabavorous
  misc_feature (1)..(286): tr|A0A3E2B2B6|A0A3E2B2B6_9FIRM Epoxyqueuosine reductase OS=Evtepia gabavorous OX=2211183 GN=DV520_09140 PE=4 S V=1
MNQLWKAAGAAAWGAAALGGLQPFLGPEAAEQLHTLCPGAQTVLVGAFPYYAGQAPGNLSLYCRGEDYHLVLGRRLEQVCAGLRARHPSHTFVAGADNSPVPELAAAELAGVGCRGRHGLRIVPPYGSYVFLGTILTDLVLPSTGPSAETLCPPHCRACQAACPTGALTEQGCEVTRCLSDLTQRKGPLPPEAAEQVRRSPTVWGCDLCQKACPHNQAAALTPLPEFREDLLCSLTLAELEPLSNKAFRRQYARRAFSWRGIGPLRRNLALKEETAPAEEEDRPSS

SEQ ID NO: 76663 - protein, 236 aa, Ewingella americana
  misc_feature (1)..(236): tr|A0A377NGU6|A0A377NGU6_9GAMM Epoxyqueuosine reductase OS=Ewingella americana OX=41202 GN=queG_2 PE=4 SV=1
MERPLAEKAGLGWVGKHSLILNREAGSWFFLGELLIDLSLPVDKPQEEQCGRCVACMTICPTQAIVAPYTVDARRCISYLTIELEGAIPEEFRPLMGNRIYGCDDCQLICPWNRYSQLTDEDDFSPRAALHAPELVALFAWNEEKFLRITEGSPIRRIGHLRWLRNISVALGNAPYAENVLLALQSRQGENSLLDEHIEWAIAQQLQKRSENQVEVQSSQKKRLIRAVEKGLPRDA

SEQ ID NO: 76664 - protein, 395 aa, Ewingella americana
  misc_feature (1)..(395): tr|A0A085G2K9|A0A085G2K9_9GAMM Epoxyqueuosine reductase OS=Ewingella americana ATCC 33852 OX=910964 GN=queG PE =3 SV=1
MTLPLDLIQLAQLIKQWGQSLGFQQVGICDTDLSAEEPKLQAWLDKQYHGEMDWMARHGMLRARPHELLPGTLRVISVRMNYLPAKAAFAKTLNNPELGYVSRYALGRDYHKVLRQRLKKLGEKIQDYCTEHADSAAVDGSDQHGTQISFRPFVDSAPIMERPLAEKAGLGWVGKHSLILNREAGSWFFLGELLIDLSLPVDKPQEEQCGRCVACMTICPTQAIVAPYTVDARRCISYLTIELEGAIPEEFRPLMGNRIYGCDDCQLICPWNRYSQLTDEDDFSPRAALHAPELVALFAWNEEKFLRITEGSPIRRIGHLRWLRNISVALGNAPYAENVLLALQSRQGENSLLDEHIEWAIAQQLQKRSENQVEVQSSQKKRLIRAVEKGLPRDA

SEQ ID NO: 76665 - protein, 386 aa, Exiguobacterium antarcticum
  misc_feature (1)..(386): tr|K0AAT0|K0AAT0_EXIAB Iron-sulfur cluster binding prot ein OS=Exiguobacterium antarcticum (strain B7) OX=10874 48 GN=Eab7_0637 PE=4 SV=1
MDGAALKAQLQAYATEIGIDEFRVTTADPFLVMKQRLIQQQEKGYASGFEEPDLDRRTTPTLLLDDAVSIIAIAVAYPSKLKDAPRGKEGERRGIFGRSSWGLDYHQALKNRLMLLEEKIHTLSPGSQTRSMVDTGELVDRAVAERAGIGFSGKNCSIISETHGSYLYLGELITDCYLPPDEAVEELCGSCTKCMDACPTDALVEPGVIDAKRCISFITQTKTLIPEDFRYALGNRLYGCDTCQQVCPYNRKKHATQHAELQPDPEQVKPLLIPLLSLSNREFKTRFGSLSGAWRGKKPIQRNAVCALVHYQDRTALDALRTMAETDQREDMRALAIWAIGRISGQEAEGYVQDRLSVDAANDVQVEGARLLDEWRAERAVSSTEV

SEQ ID NO: 76666 - protein, 385 aa, Exiguobacterium aurantiacum
  misc_feature (1)..(385): tr|A0A377FVU6|A0A377FVU6_9BACL Epoxyqueuosine reductase OS=Exiguobacterium aurantiacum OX=33987 GN=queG PE=4 S V=1
MNGLSPETLKQKIIEYAQTIGIDELKVTTADPFIVMKQRLVKQQEKGFASGFEEPDLDKRTKPELLLEDAQSIIAIAIAYPSKLKEAPRSVSGSRRGLFARASWGLDYHRAVGSRLEKLQAYIETLVPEVRTRSMVDTGELVDRAVAERAGIGFSGKNCSIISPEKGSYIYLGEMILDTYLPPDEAIEDGCGDCDKCMTACPTSALVEPGVLDAKRCIAYLTQMKTLMPREFRSKLGGRLYGCDTCQQVCPYNRKKDWRHHEELLPEAEIVKPLLEPLLTLSNREFKTKFGHLSGAWRGKKPIQRNAILALAHYREPSAVPVLQAFVQEDAREDMRATAVWAIGAILGEEAETIYREIEQKEQSEVVLEEIRIFREEWERENRVI

SEQ ID NO: 76667 - protein, 385 aa, Exiguobacterium chiriqhucha
  misc_feature (1)..(385): tr|U1MZI0|U1MZI0_9BACL Iron-sulfur cluster-binding prot ein OS=Exiguobacterium chiriqhucha RW-2 OX=1345023 GN=M 467_08000 PE=4 SV=1
MNGMSPERLKQKIVAYATTIGIDELKVTTADPFIVMKQRLVKQQEKGFASGFEEPDLDKRTTPTLLLEEAQSIIAIAILYPSKLKDAPRSVADERRGLFARASWGLDYHRAVGSRLEQLQAYIEQLVPGVRTRSMVDTGELVDRAVAERAGIGFSGKNCSIISPEKGSYLYLGEMILDTYLPPDEMIEDGCGECTKCMTSCPTTALIEPGVLDAKRCIAYLTQMKTLMPREFRSKLGGRLYGCDTCQQVCPYNRKKDWRHHEELIPEAEIVKPLLVPLLNMSNREFKAKFGHLSGAWRGKKPIQRNAILALAHYREPSAVPVLEDFIQQDEREDMRATAVWAIGAILGAEAETIYQQIESTETSELVHEEIRLFREEWSHEDRVI

SEQ ID NO: 76668 - protein, 386 aa, Exiguobacterium enclense
  misc_feature (1)..(386): tr|A0A0V8GFQ9|A0A0V8GFQ9_9BACL Epoxyqueuosine reductase OS=Exiguobacterium enclense OX=1017277 GN=AS033_06425 PE=4 SV=1
MDGVQLKLALQEYAAEIGIDELKVTTADPFLVLKRRLQAQQEKGFASGFEEPDLDLRTTPSLLVEDAASIIAIAVAYPSTLKNAPRGKEGERRGIFCRSSWGLDYHQALRQRLTLLEEKIQELSPGARTRSMVDTGELVDRAVAERAGIGFSGKNCSIISEEHGSYLYLGELITDIVLPPDQPVEELCGTCNKCIDACPTDALVEPGVIDAKRCISFLTQTKTLLPEPFRMALGNRLYGCDTCQQVCPYNRKKNATHHAELQPDPEQVKPLLVPLLSMSNREFKSRFGTLSGAWRGKKPIQRNAICALVHYRDKSAIEALRLMTETDAREDMRALALWAVGRIGGIDEKSYIESRLLADIAVDVQTEGQRLLEEWGEADAISTAHL

SEQ ID NO: 76669 - protein, 382 aa, Exiguobacterium mexicanum
  misc_feature (1)..(382): tr|A0A099DF09|A0A099DF09_9BACL Iron-sulfur cluster-bind ing protein OS=Exiguobacterium mexicanum OX=340146 GN=J Y98_00020 PE=4 SV=1
MDPETLKQKIVAYATTIGIDELKVTTADPFIVMKQRLVKQQEKGFASGFEEPDLDKRTTPTLLLDEAQSIIAIAIAYPSKLKDAPRSVADERRGLFARASWGLDYHRAVGSRLEQLQAYIEQLVPGVRTRSMVDTGELVDRAVAERAGIGFSGKNCSIISPEKGSYLYLGEMILDTYLPPDEMIEDGCGECTKCMTACPTTALIEPGVLDAKRCIAYLTQMKTLMPREFRSKLGGRLYGCDTCQQVCPYNRKKDWRHHEELLPEAEIVKPLLVPLLNMSNREFKAKFGHLSGAWRGKKPIQRNAILALAHYREPSAVPVLEDFIQQDEREDMRATAVWAIGAILGAEAETIYRQIESTETSELVHEEIRLFREEWDREDRVI

SEQ ID NO: 76670 - protein, 177 aa, Exiguobacterium mexicanum
  misc_feature (1)..(177): tr|A0A099DC75|A0A099DC75_9BACL [Fe-S]-binding protein ( Fragment) OS=Exiguobacterium mexicanum OX=340146 GN=JY9 8_16590 PE=4 SV=1
KLQAWLDKQYHGEMEWMNRHGMMRARPHELHPGTLRVISVRMNYLPAKAAFASTLNNPELGYISRYALGRDYHKLLKKRLKVLSDRILAYCREFDGMMLANGIHVDDLNFRPFVDSAPILERPLAVKAGLGWTGKHSLVLNREAGSWFFLGELLINLPVPIDQPIEEGCGRCVACMT

SEQ ID NO: 76671 - protein, 381 aa, Exiguobacterium sibiricum
  misc_feature (1)..(381): tr|B1YK62|B1YK62_EXIS2 Iron-sulfur cluster binding prot ein OS=Exiguobacterium sibiricum (strain DSM 17290 / JC M 13490 / 255-15) OX=262543 GN=Exig_0662 PE=4 SV=1
MRGDMLKRELQAYAKEIGIDEFRVTTADPFLVMKQRLMEQQEKGYASGFEEPDLERRTTPALLLEDAVSIIAIAVAYPSKLKDAPRGKEGERRGIFGRSSWGLDYHQALKQRLTLLEEKIQELSPGARSRSMVDTGELVDRAVAERAGIGFSGKNCSIISEEHGSYLYLGELITDQYLPPDESVEELCGSCNKCLDACPTDALIEPGVIDAKRCISFITQTKTLIPEHFRYALGNRLYGCDTCQQVCPYNRKKNATQHSELQPDPEQVKPLLIPLLSLSNREFKSRFGSLSGAWRGKKPIQRNAVCALVHYQDRTALDALRLMAETDQREDMRALAIWAVGRIAGQEAEDYIQKRLLTDSAEDVQVEGNRLLEEWGNGHAI

SEQ ID NO: 76672 - protein, 382 aa, Exiguobacterium sp.
  misc_feature (1)..(382): tr|C4L373|C4L373_EXISA Iron-sulfur cluster binding prot ein OS=Exiguobacterium sp. (strain ATCC BAA-1283 / AT1b ) OX=360911 GN=EAT1b_2426 PE=4 SV=1
MDPYTLKQQILAYAETIGIDELKVTTADPFIVMKQRLIRQQEKGFASGFEEPDLEKRTNPELLLEEAQSIIAIAIAYPSKLKDAPRSVAGERRGLFARASWGLDYHRAVGNRLEKLQAYIEELVPNVRTRSMVDTGELVDRAVAERAGIGFSGKNCSIISPEKGSYLYLGEMILDVYLPPDEAIEDGCGDCDKCMTACPTTALVEPGVLDAKRCIAYLTQMKTLMPREFRSKLGGRLYGCDTCQQVCPYNRKKDWRHHEELLPEAEIVKPLLEPLLTLSNREFKQKFGHLSGAWRGKKPIQRNAILALAHYREPSAIPILREFIKQDEREDMRATAVWAIGAILGPEADSIFEEIERNETSDMVHEEIRIYREEWAHEDRVV

SEQ ID NO: 76673 - protein, 382 aa, Exiguobacterium sp.
  misc_feature (1)..(382): tr|A0A4R0ZAS6|A0A4R0ZAS6_9BACL tRNA epoxyqueuosine(34) reductase QueG OS=Exiguobacterium sp. SL-9 OX=2510963 G N=queG PE=4 SV=1
MDPETLKQKIVAYATTIGIDELKVTTADPFIVMKQRLVKQQEKGFASGFEEPDLDKRTTPTLLLEEAQSIIAIAILYPSKLKDAPRSVADERRGLFARASWGLDYHRAVGSRLEQLQVYIEQLVPGVRTRSMVDTGELVDRAVAERAGIGFSGKNCSIISPEKGSYLYLGEMILDTYLPPDEMIEDGCGECTKCMTACPTTALIEPGVLDAKRCIAYLTQMKTLMPREFRSKLGGRLYGCDTCQQVCPYNRKKDWRHHEELLPEAEIVKPLLVPLLNLSNREFKAKFGHLSGAWRGKKPIQRNAILALAHYQEPSAVPVLEDFIRQDEREDMRATAVWAIGAILGPEAEPIYQRIEATETSELVHEEIRLFREEWDREDRVI

SEQ ID NO: 76674 - protein, 323 aa, Extensimonas vulgaris
  misc_feature (1)..(323): tr|A0A369AL25|A0A369AL25_9BURK Epoxyqueuosine reductase OS=Extensimonas vulgaris OX=1031594 GN=DFR45_104152 PE =4 SV=1
MDYMAAHGLKRARPAELVPGTVSVITARMDYLPRMDAAGWSAQGDQDWRTVEWARLERPHEGVVSLYARGRDYHKVLRARLQKLCDRIAAAVGPFGHRVFTDSAPVLEAALAERSGLGWRGKHTLVIDRAAGSMFFLGEIYTDLVLEPTQPVPEHCGSCSACLSACPTGAIVAPYRLDARRCISYLTIEHPGAIPPELRPLLGNRIYGCDDCQLVCPWNKFAQRSSLPDFDARAELTGQRLVSLFAWDEATFLRRTEGSPIRRIGHERWLRNIAVALGNALHSRNDAVQGEEQAAMRAALQARSGHASPLVREHVAWALAQGG

SEQ ID NO: 76675 - protein, 311 aa, Fabibacter misakiensis
  misc_feature (1)..(311): tr|A0A1E5T363|A0A1E5T363_9BACT Epoxyqueuosine reductase OS=Fabibacter misakiensis OX=1563681 GN=queG PE=3 SV=1
MNNQISNNTRLVKATAQKLGFDFCGISKAEFLAEEAPRLENWLKRGAHGKMSYMENHFDKRLDPTKLVPGAKSVVSLLYNYYPESDLSAEEPSNYKIAKYAYGTDYHFVIKDKLKTFLQELNSEIGAIDGRVFVDSAPVMERQWAEKSGLGWIGKNTLLINKNQGSFFFLAELIIDLELEVDGPIKDYCGTCTKCIDSCPTDAITPYELDASKCISYLTIELKDNIPQEFENKMEGWAFGCDICQDVCPWNRFSKKHSEPAFSPKKELIELFNNNWQDLTDEVFRVVFKGSAVKRTKMSGLKRNLDFLKKS

SEQ ID NO: 76676 - protein, 313 aa, Fabibacter pacificus
  misc_feature (1)..(313): tr|A0A4D7JF28|A0A4D7JF28_9BACT Epoxyqueuosine reductase OS=Fabibacter pacificus OX=1267423 GN=queG PE=3 SV=1
MSSNKTVKNTEILKKLASDHGFSFCGVSKAEFLESEAGRLEEWLKRGYQGKMSYLENHFDKRLDPTLLVPGAKSVVSLIYNYFPPEDNHQRTDSYKIARYAYGKDYHYVVKDKLRELVHDLKKEVGDVDGRVFVDSAPVMERSWAEKSGIGWVGKNSLLLNRSMGSYFFLAELIIDLELIPDAPTKDYCGTCTACMDACPTDAIPESGVVDGSKCISYLTIELKDDIPAEFSNKMNDWIFGCDICQEVCPWNRFSTPHNEKDFLPNDFIQNATRQEWQEMTKEIFNEVFRKSPVKRTKYSGLKRNIEFIKKDQ

SEQ ID NO: 76677 - protein, 311 aa, Fabibacter pacificus
  misc_feature (1)..(311): tr|A0A1I0NL90|A0A1I0NL90_9BACT Epoxyqueuosine reductase OS=Fabibacter pacificus OX=1267423 GN=queG PE=3 SV=1
MKTLAHHNTQLIKQKAQALGFQFCGISKAEFLEEEAPRLEAWLKSGAHGKMSYMENHFDKRLDPTKLVPGAKSVVSLLYNYYPEKDFAQENPEAPKLAKYAYGKDYHHVIKEKLKEFMSILTEEIGEIDGRVFVDSAPVMERQWAAKSGLGWLGKNTLLINKGHGSFFFLAELIIDLELEPDGPIKDYCGTCTRCIDACPTDAITPYHLEANKCISYLTIELKDELPQEFKGKMEGWAFGCDICQDVCPWNRFSKPHNEAHFEPKDGLKELFNNNWQDLTEAVFREAFRHSAVKRTKFSGLKRNLEFVGKN

SEQ ID NO: 76678 - protein, 311 aa, Fabibacter sp.
  misc_feature (1)..(311): tr|A0A1E5SVT7|A0A1E5SVT7_9BACT Epoxyqueuosine reductase OS=Fabibacter sp. 4D4 OX=1889784 GN=queG PE=3 SV=1
MNHQISHNTSIVKAMAQDLGFDFCGISKAEFLSEEAPRLEKWLKNKAHGEMSYMENHFDKRLDPTQLVPGAKSVVSLLYNYYPEKDLASHQTDNPKIAKYAYGKDYHFVIKDKLKEFMHLLEEQVGQVEGRVFVDSAPVMERQWAAKSGLGWIGKNTLLINKDRGSFYFLAELIIDLELEVDGPIKDYCGTCTKCIDACPTDAITPYELDASKCISYLTIELKDQLPSEFKGKMEGWAFGCDICQDVCPWNRFSKPHTEPEFHPKDELIELFNNNWQDLTEEVFRSVFKGSAVKRTKFEGLKRNLDFLKKI

SEQ ID NO: 76679 - protein, 385 aa, Facklamia hominis
  misc_feature (1)..(385): tr|K1LTK8|K1LTK8_9LACT 4Fe-4S ferredoxin-type domain-co ntaining protein OS=Facklamia hominis CCUG 36813 OX=883 111 GN=HMPREF9706_01651 PE=4 SV=1
MESKQLKQAIKAKAQAIGIDKIGFTDAAPFLSIEAKYQEQIDRGYSTGFEHPILEERIYPDRIFDKPRSIIAICLAYPSAVPVIEEDRKGPRRGLFARASWGIDYHTILRDKMSQLIAYLEELVPDARFKAMVDTGELSDVAVAERAGIGFVGRNTLLITPEFGSYVYLGEIVTDLVIEPDDPIPNGCGDCYRCIKACPTQALLGEGQINGRRCLSYQTQTKDLMPLEFRRKMTHVIYGCDICQMACPYNRGVDSHLHPEMEPDAEVVRPVLQDLLFLTNKEFKAKYGHLSGAWRGKKPIQRNAIIALANYRDRTSMPLLMRVLEEDPRPVIRATAAYALSLIEGQQNPALLQLIEDQRAKEDQPAIIDEMTQAIQRLQDKRPAR

SEQ ID NO: 76680 - protein, 391 aa, Facklamia ignava
  misc_feature (1)..(391): tr|A0A2I1K213|A0A2I1K213_9LACT tRNA epoxyqueuosine(34) reductase QueG OS=Facklamia ignava OX=137730 GN=queG PE =4 SV=1
MQEAGNQTFKEAIRAYAHSIGIDKIGFTHAEPFLALEPKLRKQQALGHQSGFEHPVIEERIYPELTLPKAQSFISIALAYPSRPKQRVETRKGEPRGSFARASWGIDYHHILREKLALLVSYIEQSAEDYGIEAGQMVSMVDTGEFSDVSVAARAGLGFIGRNGLLISREFGSYMYLGEILTSITFEPDPLVDYDCGDCDRCIRGCPTQALLGDGSMNAKRCLSYQTQTKTLMPREFRKPMGRVIYGCDICQIICPYNRGIDVHHHPEMEPEGEVVFPELKPMLKMSNREFKAKFGHLAGSWRGKKPLQRNAIIALANYQEMTAVPILLELIEEDPRPEIRATAAWALGEMPDLKGNQEVIRLLKRTREQESDSLIQAEYDDAIYQLEMHR

SEQ ID NO: 76681 - protein, 391 aa, Facklamia ignava
  misc_feature (1)..(391): tr|K1LVG8|K1LVG8_9LACT Uncharacterized protein OS=Fackl amia ignava CCUG 37419 OX=883112 GN=HMPREF9707_00014 PE =4 SV=1
MQEAGNQTFKEAIRAYAHSIGIDKIGFTHAEPFLALEPKLRKQQALGHQSGFEHPVIEERIYPELTLPKAQSFISIALAYPSRPKQRVETRKGEPRGSFARASWGIDYHHILREKLALLVSYIEQSAEDYGIEAGQMVSMVDTGEFSDVSVAARAGLGFIGRNGLLISREFGSYMYLGEILTSITFEPDPRVDYDCGDCDRCIRGCPTQALLGDGSMNAKRCLSYQTQTKTLMPREFRKPMGRVIYGCDICQVICPYNRGIDVHHHPEMEPEGEVVFPELKPMLKMSNREFKAKFGHLAGSWRGKKPLQRNAIIALANYQEMTAVPILLELIEEDPRPEIRATAAWAIGEMPDLKGNQEVIQLLKRTREQESDSLIQAEYDDAIHQLDIYK

SEQ ID NO: 76682 - protein, 391 aa, Facklamia languida
  misc_feature (1)..(391): tr|H3NK31|H3NK31_9LACT Putative iron-sulfur cluster-bin ding protein OS=Facklamia languida CCUG 37842 OX=883113 GN=HMPREF9708_01220 PE=4 SV=1
MTNQNLAALQAQVCRKALEIGIDKIGFASAEPFDHLEESLMQQKARHYTSGFEHPNLKERIYPDLIFDQPQSIISICLAYPSQLPNPLPSDPGNRRGSFARASWGLDYHEILRQRMKALMDYLQDLFPDNHFKAMVDTGELIDVAVAERAGIGFIGKNGLIITPEFGSFVYLGEIITDIPFTPSQRIPNGCGDCDRCIRSCPTQALLGDGRMNAQRCLSYQTQTKGHLPEKFRRKITHVIYGCDICQLTCPYNKGHDHHRHPEMEPQPDQVQPALKPMLTLNNKEFKRQFGSLAGSWRGKKPLQRNAIVSLANYGDQTALPLLLELIERDPRPVIRATSAYAVSRIQKFQNEQMVDLIKGQLDRESDPETVTEMQKAIETLEKKRKKPVNR

SEQ ID NO: 76683 - protein, 376 aa, Facklamia miroungae
  misc_feature (1)..(376): tr|A0A1G7QVE1|A0A1G7QVE1_9LACT Epoxyqueuosine reductase OS=Facklamia miroungae OX=120956 GN=SAMN05421791_10223 5 PE=4 SV=1
MEEFAIDKIGFASAEPFVHFEDSLREQKAKGFTTGFEHPIIEERIYPEKIFEGAQSIISIALAYPSRMDNNLPYNKEERRGSFARASWGEDYHHILSDRMQRIINFIKNEIPDARFKPMVDTGELMDVVVAERAGLGFIGRNGLLVTKEFGSYVYLGEIITNIPFAPDSKVDYGCGDCNRCITACPTQALLGDGRMNAQRCLSYQTQTKGHLAEEFRRKITHVIYGCDICQMTCPYNKGIDFHNHLEMEPNPEHVTPVLKDMLNLSNKEFKKQFGHLAGSWRGKKPLQRNAIIALANYRDQTALTYLLDLIENDPRPVIRASAAYAVSVIQREKNPSMVDLIQQQLQRESDPETIEEMQDAIDRLQSKKNRKSKRS

SEQ ID NO: 76684 - protein, 160 aa, Faecalibacterium prausnitzii
  misc_feature (1)..(160): tr|A0A2A6ZFC3|A0A2A6ZFC3_9FIRM Epoxyqueuosine reductase (Fragment) OS=Faecalibacterium prausnitzii OX=853 GN=C GS49_13365 PE=4 SV=1
MNIKLEIQKMAKEIGISKIGFTTADDFDYLEKSLRLGIEEGRTTGFEHKNIEERIYPKLSLESAKTIISIAVAYPHKLPQQPQKTEFKRGKITPNSWGLDYHYVLQDKLKRLAKGIEKLTENFEYKGMVDTGALVDTAVAKRAGIGFIGKNGLVISKEYG

SEQ ID NO: 76685 - protein, 289 aa, Faecalibacterium sp.
  misc_feature (1)..(289): tr|R7IDM6|R7IDM6_9FIRM Uncharacterized protein OS=Faeca libacterium sp. CAG:74 OX=1262897 GN=BN770_02005 PE=4 S V=1
MEALLDSGFHRVVVLDGAECGLDAEQSLILAPWCYAAEKQPASDGAWIHPYYFASQKAYTAASSLVKSGAFPGLALRDEIRVKPIFARLPDFSQGTNTISYIRGIGSRFHVQILTYTPRLPATEHLLAENKPLHCGECRKCVEACPTNALEGGVFHRERCIRNWMMVGGEVPEEIRAKMGNRLIGCDVCQRVCPHNPPPQGEAHPAVPLADLLRQPKETALVLRPLIGVNLTLPNRVLSQSCLLAGCSGDTSLIPLLMPLLHHPSPAVSTHAAWALSRLQEGISFLSEL

SEQ ID NO: 76686 - protein, 293 aa, Faecalibacterium sp.
  misc_feature (1)..(293): tr|A0A1Q6PWY5|A0A1Q6PWY5_9FIRM Uncharacterized protein OS=Faecalibacterium sp. CAG:74_58_120 OX=1897005 GN=BHW 29_09545 PE=4 SV=1
MLDPVEALLDSGFHRAVVLDGTECGLDAEQSLILALWCYEAEKQPASDGAWIHPYYFASQKAYTAASSLVKSGAFPGLALRDEIRVKPIFARLPDFSQGTNTISYIRGIGSRFHVQILTYTPRLPATEHLLSENKPLHCRECRKCVEACPTNALEGGVFHRERCIRNWMMVGGEVPEEIRAKMGNRLIGCDVCQRVCPHNPPPQGEAHLAVPLANLLRQPKETALALRPLIGVNLTLPNRVLSQSCLLAGCSGDTSLTPLLMPLLHHPSPAVSTHAGWALSRLQEGISFLSEL

SEQ ID NO: 76687 - protein, 376 aa, Falsibacillus pallidus
  misc_feature (1)..(376): tr|A0A370GWW0|A0A370GWW0_9BACI Epoxyqueuosine reductase OS=Falsibacillus pallidus OX=493781 GN=queG PE=3 SV=1
MDFQQLKEDIISYSKNIGIDKIGFTTASAFDEMKNRLRRQEALGYQSGFEEPDIEKRVHPDLIFDGPQSIISIALAYPSKMKDAPQSKRGERRGIFCRASWGTDYHVLLREKLSMLEEYILSRVPEARFKSMVDTGELVDRAVAERAGIGWSGKNCAIITPEFGSYVYLGEMISNLPFEPDEPMEDRCGTCNKCIDVCPTGALVEGGQLDAQKCIAFLTQTKGFLPDQFRTKIGNRLYGCDTCQTVCPENKGKDFHLHAEMEPDPEIAKPLLKPLLSISNKEFKERYGHVSGSWRGKKPIQRNALLALAHFKDETAVPDIINVLEHDVRPVMRGTAAWALGKIGGEEAKAVLTKAREREKDEEVIEEIEKGLAFFN

SEQ ID NO: 76688 - protein, 380 aa, Falsibacillus sp.
  misc_feature (1)..(380): tr|A0A3L7K3W1|A0A3L7K3W1_9BACI Epoxyqueuosine reductase OS=Falsibacillus sp. GY 10110 OX=2478915 GN=queG PE=3 SV=1
MDFKKLKEEIIQYSRRIGIDKIGFTTASTFDEMKNRLVRQESLGYQSGFEEKDIEKRVDPSLIFDEPRSIISIALAYPSKMKDAPQSKKGERRGIFCRASWGTDYHDLLKEKLSLLEDYIKEKVPEAMFKSMVDTGELVDRAVAERAGIGWSGKNCAIITPEFGSYVYLGEMITNLPFEPDKPMEDQCGTCNKCVDVCPTGALVEGGQLDAQRCIAFLTQTKGFLPDQFRTKIGNRLYGCDTCQTVCPENKGKDFHLHERMEPDPEIAKPLLKPLLSISNKEFKQNYGHVSGSWRGKKPIQRNALLALAHFKDETAIPDIISVMERDVRPVIRGTAAWALGRIGGEDAIEALKKARNKEEDQEVIEEIEKGLSFFTEGRS

SEQ ID NO: 76689 - protein, 380 aa, Falsochrobactrum ovis
  misc_feature (1)..(380): tr|A0A364JUH3|A0A364JUH3_9RHIZ Epoxyqueuosine reductase OS=Falsochrobactrum ovis OX=1293442 GN=queG PE=3 SV=1
MATSISNPKELRLKRFLIEEAKAVGFDAVAFTTPDRIPHAPQHLRQYIAAGHHADMEWMEETELRRSNPRELWPEVRSIMMLAMNYGPQHDPSAILEQKDRAAISVYAQNRDYHDIIKGKLKHIASRFAARAGENVKVFVDTAPVMEKPLAQSAGLGWQGKHTNLVSRELGSWFFLGSIFTTAKIPPDDEERDHCGSCRACLNACPTDAFPAPYQIDARRCISYLTIENKGPIPSHFRKAMGNRIYGCDDCLAACPWNKFAQAASEMKLIARDDLKSPRIAELLQLDDAAFRRFFSASPVKRIGRDRFIRNTLIAAGNSNDPSLLPLIEQLLEDPAPVVRGAAIWALQQLGTRQRILELRKFYQPLEDDPAVRAEWDMEA

SEQ ID NO: 76690 - protein, 381 aa, Falsochrobactrum sp.
  misc_feature (1)..(381): tr|A0A316J5U1|A0A316J5U1_9RHIZ Epoxyqueuosine reductase OS=Falsochrobactrum sp. HN4 OX=2201899 GN=queG PE=3 SV =1
MAISTSETRQARLKRFLTEEAKAVGFDAVAFTTPDKIPQAPQRLRQYIAEGCHADMAWMEETEERRANPSVLWPEVRSIMMLAMNYGPETDPLALLERKDRGAISVYARNRDYHDIVKGKLKHVASRFAARAGQDVKVFVDTAPVMEKPLAQAAGLGWQGKHTNLVSREHGSWLFLGSIFTTAEIPPDEADRDHCGSCRACLDACPTKAFPAPYRIDARRCISYLTIENKGPIPLEFRKPIGNRIYGCDDCLAVCPWNKFAQATHEMKLKARDDLNAPRLADFLQLDDSAFRTFFSGSPVKRIGRDRFLRNVLIAAGNSQDLSLLPQVEALLRDEAPQVRGAAIWAFRQLAAPDHIAALQKELAPSEQDATVQAEWTMEEI

SEQ ID NO: 76691 - protein, 306 aa, Fermentimonas caenicola
  misc_feature (1)..(306): tr|A0A521J2H1|A0A521J2H1_9PORP tRNA epoxyqueuosine(34) reductase QueG OS=Fermentimonas caenicola OX=1562970 GN =queG PE=4 SV=1
MTFSEEIKKEALRLGFDACGICRATDTGEEERYMKWLAGNHHATMSYMERNIEKRLDPRLLVDGAKSIISVALNYYPHQKQPTYAPQFAYYAYGKDYHDVVKDKLKLLFEFIKQTYTDVTGRYFSDSAPVLERFWAAQAGIGFVGKNTLLIIPGKGSFFFLGELIIDIELDYDSPIPENCGSCTRCIDACPTGAIEKPFLVNANKCISYQTIENRGEISAEVAPKLKNYVFGCDICQKVCPWNRMSTPHNTDEFMPSEEFMELDLTKLIGMNEKEYQHLFRGSAVKRTKFAGLKRNVNAISKNRNK

SEQ ID NO: 76692 - protein, 306 aa, Fermentimonas caenicola
  misc_feature (1)..(306): tr|A0A098C173|A0A098C173_9PORP Epoxyqueuosine reductase OS=Fermentimonas caenicola OX=1562970 GN=queG PE=4 SV= 1
MTFSEEIKKEALRLGFDACGICRATDTGEEERYMKWLAGNHHATMSYMERNIEKRLDPRLLVDGAKSIISVVLNYYPHQKQPTYAPQFAYYAYGKDYHDVVKDKLKLLFEFIKQTYTDVTGRYFSDSAPVLERFWAAQAGIGFVGKNTLLIIPGKGSFFFLGELIIDIELDYDSPIPENCGSCTRCIDACPTGAIEKPFLVNANKCISYQTIENRGEISAEVAPKLKNYVFGCDICQKVCPWNRMSTPHNTDEFMPSEEFMELDLTKLIGMNEKEYQHLFRGSAVKRTKFAGLKRNVNAISKNRNK

SEQ ID NO: 76693 - protein, 328 aa, Ferrimicrobium acidiphilum
  misc_feature (1)..(328): tr|A0A0D8FXH0|A0A0D8FXH0_9ACTN Epoxyqueuosine reductase OS=Ferrimicrobium acidiphilum DSM 19497 OX=1121877 GN= queG PE=4 SV=1
MSELERKFERLLIDKGVVAAGSGAVVPLHFDAQQSRLRIAAGFVDPAHFTYRNPERAAVVARAFPWSHGYVSVAVSYATTRDAETQVAGYAYNRSYEDLREVLAVAVAYLRESGLRAASLFDSNQAFDKGLARRAGIGLVGRHTMVMVPKAGSRVVLGSIFTERLLSVSVGRRFRSDPCRNCRRCVDACPTGAIRLPGTLVAEHCIASILQQDSWSPVDRQLVGARVYGCDSCIDSCPIGWPSREESAPAPLVRWLTAGDQELLEEVGHWYIPRRDPFYVRRNVANALGNRGSLTRDERRALALLCVRSQTRERIEGLRSLLRVRWGR

SEQ ID NO: 76694 - protein, 379 aa, Ferrimonas balearica
  misc_feature (1)..(379): tr|E1SRU7|E1SRU7_FERBD Epoxyqueuosine reductase OS=Ferr imonas balearica (strain DSM 9799 / CCM 4581 / PAT) OX= 550540 GN=queG PE=3 SV=1
MSVTNPDWAAIAAHIKSLALEMGFCAVGIADVDLQAEWPHLQRWLDNHYHGEMDYMARHGQMRVRPDELHPGTLRVISVALDYLPPDAGFAQTLKAPEKGYISRYAGGRDYHKLMRNRLKQLGQRIHAELPELAFRPFVDSAPLLERPLARNAGLGWVGKHSLLLNRKAGSWFFLGELLINLPLPVDQPHQGDCGHCTACITSCPTGAIVEPYVVDGRRCISYLTIELDGPIPEPLRAPMGNRIYGCDDCQLVCPWNRVAPLTREADFHTRPDLQQPDLLTLWQWDEAHFLKATEGSPIRRIGYRRWQRNLAVALGNAPHSDATVAALKAGLGRVDEMVDEHIHWALAQQADKASQDPVANRQQQRLIRVVEKGLPRDA

SEQ ID NO: 76695 - protein, 376 aa, Ferrimonas marina
  misc_feature (1)..(376): tr|A0A1M5ZG48|A0A1M5ZG48_9GAMM Epoxyqueuosine reductase OS=Ferrimonas marina OX=299255 GN=queG PE=3 SV=1
MTAPTPDWDAIATRIKAKALDLGFSAVGIADIDLSEEAPRLEAWLAQNYHGEMDYMARNVAMRSAPDQLLPGTLRVVCVALDYLPPDAGFARNLKAEEQAYISRYAGGRDYHKLMRNRLKKLGDAIKAEAAECQFRPFVDSAPLLERPLARNAGLGWVGKHSLLLNRQAGSWFFLGELLVDLPLPVDTPHSGDCGSCTACLTACPTGAIVAPYVVDSRRCISYLTIEADGPIPEALRPALGNRIYGCDDCQLICPWNRVAPLTQESDFHTRAPLKGANLLTLWQWDEATFLKQTEGSPIRRIGFARWQRNLAVALGNAPASDAVLSALTQGLGRVNAMVDEHIQWAIARQQSQAQPADRRQQRLIRSIEKGLPRDA

SEQ ID NO: 76696 - protein, 384 aa, Ferrimonas sediminum
  misc_feature (1)..(384): tr|A0A1G8Q7Q7|A0A1G8Q7Q7_9GAMM Epoxyqueuosine reductase OS=Ferrimonas sediminum OX=718193 GN=queG PE=3 SV=1
MNLSPPDSTDNQQPDWAALASEIKSWARELGFADVGITRLDLADQQPALSTWLNNHYHGDMEYMARNVAMRTQPGLLHPGSVTAIVVRLDYLPPHAGFADALREGERAYISRYAGGRDYHKLMRNRLKQLGNRIRLQVQDYDGRPFVDSAPILERPLANQAGLGWVGKHSLLLSQEAGSWFFIGELLTNLPLPEDVPHQGDCGNCKACMTLCPTAAIVEPYVVDAKRCISYLTIESDAAIPEPLRPALGNRIYGCDDCQLACPYNRDAPLTREPDFHTRGPLTQPELLTLWHWSESEFLSATEGSPIRRIGYRRWQRNLAVALGNAPTSTAIIEALTQGLGQVDAMVDEHIRWAIARQQQRLGQLSKQQQRLIRVVEKGLPRDA

SEQ ID NO: 76697 - protein, 381 aa, Ferrimonas sp.
  misc_feature (1)..(381): tr|A0A4U1BF50|A0A4U1BF50_9GAMM Epoxyqueuosine reductase OS=Ferrimonas sp. IMCC35001 OX=2569538 GN=queG PE=3 SV =1
MNDHTHSQGKPDWAALATEIKSWAQELGFADCGIARLDLKDQHAALERWLSNHYHGDMDYMARNREMRTQPSLLHPGSLTAIVVRMDYLPPQAGFADTLSQPHLAYISRYAGGRDYHKLMRNRLKQLGNRLRERVRDYDGRPFVDSAPILERPLAREAGLGWVGKHSLLLERSAGSWFFIGELLTNLPLPVDPPYQGECGNCSACLTLCPTQAIVAPYVVDARRCISYLTIESDGAIPEALRPQLGNRIYGCDDCQLACPHNRTAPLTAEGDFHTRPQLHQVPLLTLWQWSEAQFLAATEGSPIRRIGFRRWQRNLAVALGNAAASAELLKALEQGVGRVDPMVDEHILWAIERQRSGLGQLSKQQQRLVRVVQKGLPRDA

SEQ ID NO: 76698 - protein, 381 aa, Ferrimonas sp.
  misc_feature (1)..(381): tr|A0A4V6WMT3|A0A4V6WMT3_9GAMM Epoxyqueuosine reductase OS=Ferrimonas sp. IMCC35002 OX=2569539 GN=queG PE=3 SV =1
MTDSTQFGAAHDWAALGNDIKTWGQQLGFSAVGITRLDLKQEQPALNAWLEKRYHGEMDYMARNVEMRTQPDLLHPGSVTAIVVRLDYLPPNARFAKDLNDDQCGFISRYAGGRDYHKLMRNRLKQLGNRIREQIADYDGRPFVDSAPILERPLAQQAGLGWVGKHSLLLNRDSGSWFFIGELLTNLPLPVDEPYQGDCGSCKACLTLCPTAAIVEPYVVDAKRCISYLTIESDGPIPEALRPALGNRIYGCDDCQLACPNNRDAPLTQESDFHTRSPLTQPKLLDLWRWSEAEFLKATEGSPIRRIGFIRWRRNLAVALGNASADPQIIDALQQGFGEAGEMVDEHIRWALARQQQGLGTKTKQQQRLIRIVEKGLSRDA

SEQ ID NO: 76699 - protein, 352 aa, Ferriphaselus amnicola
  misc_feature (1)..(352): tr|A0A2Z6GBH3|A0A2Z6GBH3_9PROT Epoxyqueuosine reductase OS=Ferriphaselus amnicola OX=1188319 GN=queG PE=3 SV=1
MATLAERIKAWGKELRFQAVGISGTDLSSAEAGLTDWLAQGFHGGMDYMAKHGLKRARPDELLPGTLSVISVRLDYRSAHARDGWEVLADGSRAYISRYALGRDYHKVLRNRLERLAQRIRAEVGEFGYRVFTDSAPVLEVELAKRARLGWRGKHTLLLNREHGSWFFLGEIFTDLPLPADTPEADHCGSCRRCLEICPTQAIVAPYRLDARRCISYLTIEHKGSIPLELRPLIGNRIYGCDDCQLVCPWNRFAQISQESDFAVRHGLDDVRLIELFAWDETTFQSRMAGSPIYRIGYEQWLRNIAVALGNAQTDAKVIESLSARAQHSSELVREHIHWALEQQRKHEKGLE

SEQ ID NO: 76700 - protein, 351 aa, Ferrithrix thermotolerans
  misc_feature (1)..(351): tr|A0A1M4UN46|A0A1M4UN46_9ACTN Epoxyqueuosine reductase OS=Ferrithrix thermotolerans DSM 19514 OX=1121881 GN=S AMN02745225_01041 PE=4 SV=1
MDLSGPIGLANSLDALSERLLGNLRSAGAVAAGITSAEGFEGDLTFLQRQRASGENDTMAFTYRNPYRSTHIRVTYPYAKSIVVAAHRYEKPLEPEVDYVAAYSLSDYYAELRSMLYDASRLLKDNGYRAQVVMDSNALVDKAAARRAGLGWVGKNSLVLIPKVGSNVVLGSIVTDAELCFTDSPVRSLCGSCTRCQDNCPTGALQQAGVVDVSRCLAWLLQREGSFPLTYRETVGTQIYGCDRCQTVCPVGGRARRDSKSQLEPAESSFEPKTLLVLTDEELLRRCERFYVPSRSANHIRRNALLALGNKRPITDQEVELLRRYSRSPDPVLAEQALWSLARHGLALSYT

SEQ ID NO: 76701 - protein, 381 aa, Ferrovibrio sp.
  misc_feature (1)..(381): tr|A0A2M8UGY4|A0A2M8UGY4_9PROT Epoxyqueuosine reductase OS=Ferrovibrio sp. OX=1917215 GN=queG PE=3 SV=1
MPGCPRATRRRAPPWNRNWRRRTTRSRSPALPRSVDTTDLKELIRQQALAEGFDAVGFTSADRIGPELAQRLDEFMALKRHGAMQWLEEKAERRRHPNALWPEARGIIALGLNYGPERNPLDVLAQTDRAAISVYAQGRDYHLVVKKKLKSLAGWLHRQAGNEVKVFVDTAPLMEKPLSVAAGIGWQGKHTNLVSRDFGSWLFLGLILTTAEIAADEAETDHCGSCSNCLDICPTQAFPAPYQLDARRCISYLTIEYDGVIADDFASAMGNRIYGCDDCLAVCPWNKFASSAREIALHSRPELDAPLLRDLATLDDAGFRERFATTAVKRVGRDRFIRNVCIALGNSGDPALRPVLEKLTQDSAEVVRLQAAQALKRLKAA

SEQ ID NO: 76702 - protein, 382 aa, Ferrovibrio sp.
  misc_feature (1)..(382): tr|A0A516GZ85|A0A516GZ85_9PROT Epoxyqueuosine reductase OS=Ferrovibrio sp. K5 OX=2594003 GN=queG PE=3 SV=1
MPGCPRATRRRAPPWNPGWRPRTTRSRSPALPRSANPTDLKELIRQHALAEGFDAVGFTTAGRIGPELAERLDEFMALKRHGTMQWLEDKAERRRHPNALWPEARGIIALGLNYGPDHNPLDVLLEKDRAAISVYAQGRDYHLVVKKKLKSLASWLHHHAGNDVKVFVDTAPLMEKPLSAAAGIGWQGKHTNLVSRDFGSWLFLGLILTTAELAPDEAETDHCGTCSNCLDICPTKAFPAPYQLDARRCISYLTIEYDGVIAEDFAAAMGNRIYGCDDCLAVCPWNKFASTAREITLHSRPELDAPTLLDLAGLDDASFRERFATTAVKRIGRDRFVRNVCVALGNSGDAAMRPVLEKLSHDEAEVVRLQAAQALTRLSRAA

SEQ ID NO: 76703 - protein, 354 aa, Ferrovum sp.
  misc_feature (1)..(354): tr|A0A257UCH1|A0A257UCH1_9PROT Epoxyqueuosine reductase OS=Ferrovum sp. 37-45-19 OX=1970377 GN=queG PE=3 SV=1
MNVKNLPIEPQLIKQQLIILAQQLGFEGVSIGQPNLDIASERLKTWLEKGYQGEMQYLERHLPLRASPAQLHPGTIRVISLYHPYLTAPLQDIQGELNNATQGYISYYARGRDYHKTLRHKLQTLAQTLTKWCGPFNYRVFTDSAPVMEVEIAQQAGLGWRGKNTLLLNREAGSWFFLGEIFTDLPLEIDQKTTEHCGRCDACIEICPTRAIVAPYVLDARRCISYLTIEHSGSIPEGLRAYFGNRIYGCDDCQIICPWNRFAKLTDEKHFASRFNGNHDLADFILFDEQEFEQRFEGSAIRRIGIIRWLRNVAVALGNGIGREKEITALKKQLHHPSTIVREHVNWALKRLSE

SEQ ID NO: 76704 - protein, 361 aa, Ferrovum sp.
  misc_feature (1)..(361): tr|A0A149VY65|A0A149VY65_9PROT Epoxyqueuosine reductase OS=Ferrovum sp. Z-31 OX=1789004 GN=queG PE=4 SV=1
MPPLSVFDLRTLLEREAHHLGFSAVRVSRPTLRTARKHLDTWLTAGYQGAMTWLERDPDLRTDPSRLWPGTTCILTVSLPYLSEDLTSCQDALNDPTEGVIAQYALGQDYHRLMRRRLHLLAEGLAAQWGPFAWRPFSDSAPLLEVEIAAQGGLGWRGKHTLLLQRQGSYFFLGELLCNLPLPADPPEKDHCGTCQTCLTVCPTRAIVAPYQLDARLCIAYLTIEHPGPIPESLRPLFGNRIYGCDDCQLHCPWNRFANTSRGARAFLRRKELENLSLPALFAWSAEDFQTHLTGSPIRRIGHERWLRNVAVALGNGPATPGALTALAQRRNHPAEQVREHVEWAWQRLQNGNSPYPPQSE

SEQ ID NO: 76705 - protein, 309 aa, Ferruginibacter sp.
  misc_feature (1)..(309): tr|A0A3M9NPL6|A0A3M9NPL6_9BACT Epoxyqueuosine reductase OS=Ferruginibacter sp. BO-59 OX=2294116 GN=queG PE=3 S V=1
MIPKSAYKYFVKQTAARLGFDYCGIAKAEKLNDEARRLESWLNKGFNGSMSYMNNYFDLRVDPTRLVPGAKSVITLLLNYFPAEQQKTEAPRVSKYAYGKDYHEVIKEKLKNFLTTVQQNIGEINGRGFTDSAPVLERSWAVKSGLGWVGRNGNLITKNQGSFFFIATLITDLELEPDDPFAKDYCGTCTKCIDSCPTEAILPNKVIDGSKCISYFTIELKDMLIPTDVKGKFENNMFGCDICQDVCPWNRFSKPTREAEFTPLNEVLNFSKNDWEELTEESFKIIFRKSPLKRSKFEGIKRNLKFLDS

SEQ ID NO: 76706 - protein, 334 aa, Fervidicella metallireducens
  misc_feature (1)..(334): tr|A0A017RXG1|A0A017RXG1_9CLOT (Fe-S)-binding protein O S=Fervidicella metallireducens AeB OX=1403537 GN=Q428_0 4485 PE=4 SV=1
MDIKSEIVQFANEIGVYYIGFSDTNFNSKFIEELLFRKEKGFLSGFEESDYVKRINVKGLMKEAKTIISIAVPYKTIDIDKSKPYFSKSSLGIDYHKVVINKLSQISDFIKEKYNGSCLYFCDIGPLADREIAKKCGVGFYGKNTCIITEKFGSYVFLGEIITDIYIDRDKEKDLNCNNCDLCIKACPVQAIEMPYRLNAKKCLSYISQKKERLSLHEIDHLGTRIYGCDTCQDVCPYNRNAEKSNIEEFMPEKWNYDVDINYILSLSNKEFKNSIGLTSAGWRGKKIIMRNAIIAAGNSGREEYLTLLKKIDADDEMKYYVDIAIRKINDKLK

SEQ ID NO: 76707 - protein, 340 aa, Fervidicola ferrireducens
  misc_feature (1)..(340): tr|A0A140L3D1|A0A140L3D1_9THEO Epoxyqueuosine reductase OS=Fervidicola ferrireducens OX=520764 GN=queG PE=4 SV =1
MVIIMLNKKEKIKDYARKIGFDKIGFASAEPFWEEKEILMERKRAGLFSSFEESDIELRCHPEKHLPGAKTIICFAVSYFFEKEDVPGENSSEPLGIISKYALLRDYHDVLFQKLKLMADFIYSMWGAKSKIFVDSGGLLERAAARRAGIGWIGQNTCLFTEEFGSWVFLGELITNLEIEPDMPCRNLCDNCGKCVKACPTGALEEPYRLNPFRCLSYITQMRGAIPEEFRGNLGLRLFGCDTCQEACPKNKKIILVNHEEFMLDYQIERRLTKLIFMNNVEFEKNFKLTPIAWRGRNVLRRNATVALANTGVGYKKYFEKLLSDPSPVIREHAMWALKR

SEQ ID NO: 76708 - protein, 313 aa, Fibrella aestuarina
  misc_feature (1)..(313): tr|I0K9E9|I0K9E9_9BACT Epoxyqueuosine reductase OS=Fibr ella aestuarina BUZ 2 OX=1166018 GN=queG PE=3 SV=1
MNNAATNARLIKAKALDLGFDFCGIAKAEFLEAEAPRLENWLNQNRHGQMGYMANHFDKRLDPRLLVDGAQSVVSVLLNYFPDPAKRLPEGDDDLKLSKYAYGTDYHFVLKDKLKDLLQFIQDEIGEVGGRAFVDSAPVMDKAWAAKSGLGWVGKHSNLLNRQMGSFFFIGELILDLPLQPDGPTTDHCGTCTRCIDACPTDAIVAPYVVDGSRCISYFTIELKEAIPEDVRGKFQNWVFGCDICQDVCPWNRFAKPHQTPAFDPSPELTAVSRNDWQEITEEVFKEVFRRSPVKRTKWEGWQRNVTFLNQQG

SEQ ID NO: 76709 - protein, 310 aa, Fibrella sp.
  misc_feature (1)..(310): tr|A0A1W6ECT0|A0A1W6ECT0_9BACT Epoxyqueuosine reductase OS=Fibrella sp. ES10-3-2-2 OX=1834519 GN=queG PE=3 SV= 1
MLTNAQKIKAKALELGFDFCGIAKADFLVEEAPRLEAWLTRNMHGQMGYMANHFDKRLDPRLLVDDAKSVVSVLLNYYPGDEPENRLPDDDEHLKVSKYAYGTDYHFVLKDKLKDLLTFIHTEIGEVGGRAFVDSAPVMDKAWAAKSGLGWVGKHSNLLNRKMGSFFFIGELILDLELDPDGPTTDHCGTCTRCIDACPTDAIVAPYVVDGSRCISYYTIELKEAIPQEVKGKFDNWVFGCDICQDVCPWNRFAKPHKTPDFKLSPELATIKKNDWEEITEELFRELFRRSPLKRTKRDGLVRNARFINK

SEQ ID NO: 76710 - protein, 314 aa, Fibrisoma limi
  misc_feature (1)..(314): tr|I2GM01|I2GM01_9BACT Epoxyqueuosine reductase OS=Fibr isoma limi BUZ 3 OX=1185876 GN=queG PE=3 SV=1
MNTAAVQYTQLIKHKALALGFDFCGIARAEFLEDEAPRLETWLKNGMHGQMNYMANHFDKRLDPRLLVDDAKSVVTLLLNYYPEQQLPEDDDAYKLSKYAYGTDYHFVIKDKLKDLLAFIQTEIGEVGGRAFVDSAPVMDKAWAKRAGLGWVGKHTNLINREIGSYFFIGELILDLDLEPDGPIADYCGTCTRCIDACPTDAIVAPYVVDGSKCISYFTIELKEALPDDVRGKFNNWVFGCDICQDVCPWNRFARPHQTPEFTPHPDLTTFSRKDWEEITDEVFREVFRRSAVKRTKLEGLKRNVRFVGESPEL

SEQ ID NO: 76711 - protein, 314 aa, Fibrisoma sp.
  misc_feature (1)..(314): tr|A0A418ME57|A0A418ME57_9BACT Epoxyqueuosine reductase OS=Fibrisoma sp. HYT19 OX=2305895 GN=queG PE=3 SV=1
MNTATIRHTQLIKHKALELGFDFCGIARADFLEDEAPRLETWLKNGMHGQMDYMANHFDKRLDPRLLVDDAKSVLTLLLNYYPEQRLPEGDDDYKLSKYAYGTDYHFVIKDKLKDLMAFIRTEIGEVGGRAFVDSAPVMDKAWAKRAGLGWVGKHTNLINREIGSYFFIGELILDLDLEPDSPMADYCGTCTRCIDACPTEAIVAPYVVDGSKCISYFTIELKEALPDDVRGKFNNWVFGCDICQDVCPWNRFARPHQTPEFAPHPDLTTFSRNDWEDITEEVFREVFRRSAVKRTKLEGLKRNIRFVGDSSTT

SEQ ID NO: 76712 - protein, 340 aa, Fibrobacteres bacterium
  misc_feature (1)..(340): tr|A0A3C1WH80|A0A3C1WH80_9BACT tRNA epoxyqueuosine(34) reductase QueG OS=Fibrobacteres bacterium OX=2052160 GN =queG PE=4 SV=1
MTSPSGVTLQNTLADFFAGQPEVLEWGIVPLNRALPNADNLESWVGQGMHAGLRYMEENLDKRTVPRQLFPWACSAVLFSLRQSVPFGTPTGDFRVAAYALGEDYHRRARRILNEAHHSLSLSTGAAPLRFESFCDTWPVFERDLAAEAGLGWRGKNSCLIHRKHGSGFMLAGFFLDVDFEAYSTPQEDFCGGCTACLEACPTNAFVAPGRLDASKCLSYWTIEAKGDVPSDIAEKSGSWIFGCDVCQEVCPWNHKHIKKSTTSTPKNLPQTGLDRKSVVRKGGGFQSRFKDSPLTRAGRRSLLRNVLIALRNNPQTNIRELVETIGKEESNQSVESGSD

SEQ ID NO: 76713 - protein, 381 aa, Fictibacillus aquaticus
  misc_feature (1)..(381): tr|A0A235F6M4|A0A235F6M4_9BACI Epoxyqueuosine reductase OS=Fictibacillus aquaticus OX=2021314 GN=queG PE=3 SV= 1
MTGAQLKEELIAYSKSIGIDKIGFAAADVFQQLKQRLIDQQELGYQSGFEEPDIDKRTNPELLLSGASSIISIALAYPSKMKDAPKSVKGERRGIFCRASWGRDYHHVLREKLQLLEAFILEKCPDAAVKSMVDTGELSDRAVAERAGIGWTGKNCAIITPEFGSYVYLGELITDLAIPPDTPMEEQCGSCNICVDACPTGALVQGGQLDSNKCVAYLTQSKDFIPDQYRTKIGNRLYGCDTCQTVCPENKKKDFHLHPDMEPDPEIAKPLLRPLLNMSNRDFKEKFGHVSGSWRGKKPIQRNAILALAHFKDETAVEDLLHVMKVDPRPVMRGTAAWALGKIGGEMIENHLIMAKEQEKDENVLSEIEKGLQMLKNEQIS

SEQ ID NO: 76714 - protein, 387 aa, Fictibacillus arsenicus
  misc_feature (1)..(387): tr|A0A1B1Z0G0|A0A1B1Z0G0_9BACI Epoxyqueuosine reductase OS=Fictibacillus arsenicus OX=255247 GN=queG PE=3 SV=1
MKGGICVTGAQLKEEIVAYSKEIGIDKIGFADADVFAELKERLRIQQDLQYQSGFEEKDIDKRTEPERLLTGASSIISIALAYPSKMKNAPKSIKGERRGIFCRASWGKDYHHILREKLALLEAFIIERVPDANIKSMVDTGELSDRAVAQRAGIGWSAKNCAIMSPEFGSYMYLGEMITNIAFPADTPMEDQCGSCNKCVEACPTGALVQGGQLDSSKCIAFLTQTKDFLPDQYREKLGNRLYGCDTCQTVCPENKGKDFHHHAEMEPDPEIAKPLLQPLLTMSNRDFKEKFGHVSGSWRGKKPIQRNAIIALAHFREEAAIPDLVYLLKNDPRPVIRGTAAWAIGKIGGHEAELELSSAKEREKDDLVALEIDKGLKMLRNQEIS

SEQ ID NO: 76715 - protein, 381 aa, Fictibacillus arsenicus
  misc_feature (1)..(381): tr|A0A1V3G9N0|A0A1V3G9N0_9BACI Epoxyqueuosine reductase OS=Fictibacillus arsenicus OX=255247 GN=queG PE=3 SV=1
MTGAQLKEEIVAYSKEIGIDKIGFADADVFAELKERLRIQQDLQYQSGFEEKDIDKRTEPDRLLSGASSIISIALAYPSKMKNAPRSMKGERRGIFCRASWGKDYHHILREKLALLEAFIIERVPDANIKSMVDTGELSDRAVAERAGIGWSAKNCAIMSPEFGSYMYLGEMITNIAFPADTPMEDQCGSCNKCVEACPTGALVQGGQLDSSKCIAFLTQTKDFLPDQYREKLGNRLYGCDTCQTVCPENKGKDFHHHAEMEPDPEIAKPLLQPLLTMSNRDFKEKFGHVSGSWRGKKPIQRNAIIALAHFKEEAALPDLIYLLKNDPRPVIRGTAAWAIGKIGGNEAELELSSAKEREKDDLVALEIDKGLKMLRNQEIS

SEQ ID NO: 76716 - protein, 381 aa, Fictibacillus enclensis
  misc_feature (1)..(381): tr|A0A0V8JAS9|A0A0V8JAS9_9BACI Epoxyqueuosine reductase OS=Fictibacillus enclensis OX=1017270 GN=queG PE=3 SV= 1
MTGAQLKEELIAYSKSIGIDKIGFAAADVFAELKERLKEQQNHGYQSGFEEKDIEKRTNPQLLLEGANTIISIALAYPSRMKDAPQSTREARRGIFCRASWGVDYHHILREKLRLLEAFIAEKAPHARSVSMVDTGELSDRAVAERAGIGWSGKNCATITPEFGSYVYLGEMLTTVYLPPDTPITDQCGDCNICVEACPTGALVQGGQLDSNKCIAFLTQTKDFLPDQYREKIGNRLYGCDTCQTVCPKNKGKDFHLHPEMEPDPEIAKPLLKPLLKMSNREFKEKFGHVSGSWRGKKPIQRNAIIALAHFKDTSAVGDLAQLMKEDQRPVIRGTAAWALGKIGSEAAENELISAKEQENDGNVSAEINKGLQMIQNQGIH

SEQ ID NO: 76717 - protein, 381 aa, Fictibacillus macauensis
  misc_feature (1)..(381): tr|I8AJQ4|I8AJQ4_9BACI 4Fe-4S ferredoxin-type domain-co ntaining protein OS=Fictibacillus macauensis ZFHKF-1 OX =1196324 GN=A374_09229 PE=4 SV=1
MTGAQLKEELIAYSKSIGIDKIGIASADVFTSLKTRLYEQQRLGYQSGFEEPDIEKRTTPALLVSEAASIISIALAYPSKMKNPPRSVKGQRRGIFCRASWGKDYHHILREKLQLLEQFLKEKVPGISIKSMVDTGELSDRAVAERAGIGWSGKNCSIITPEFGSYVYLGELVTSVSMPPDQPITDQCGTCNKCVEVCPTGALVQGGQLDSGKCIAFLTQTKDFLPDRYREKLGNRLYGCDTCQTVCPKNKGIDFHLHDEMEPDPELAKPLLEPMLFMSNREFKDSFGHVSGSWRGKKPIQRNAIIALAHYKEESAVPKLIRLMNEDPRPVIRGTAAWAIGKIGGPLSLQSLNIAKEQEKDGNVLVEIDKGLQMLENHGIS

SEQ ID NO: 76718 - protein, 381 aa, Fictibacillus phosphorivorans
  misc_feature (1)..(381): tr|A0A160IJC3|A0A160IJC3_9BACI Epoxyqueuosine reductase OS=Fictibacillus phosphorivorans OX=1221500 GN=queG PE =3 SV=1
MTSAQLKEEIVAYSKEIGIDKIGFAHADVFAELKKRLRLQQDLNYQSGFEESDIEKRTEPERLLSGASSIISIALAYPSKMKDAPKSVRGERRGIFCRASWGKDYHHILREKLSLLEAFIIEKVPGAAVKSMVDTGELSDRAVAERAGIGWSAKNCAIMSPEFGSYMYLGEMITNIAFPADTPMEDQCGSCNKCVDACPTNALVQGGQLDSSKCIAFLTQTKGFLPDQYRDKLGNRLYGCDTCQTVCPENKGKDFHHHLEMEPDPEIVKPLLKPLLSISNREFKEKFGYISGSWRGKKPIQRNAIIALAHFKDETAIPDLLMLLHHDPRPVIRGTAAWAIGKIGGENAELELLSAKENEKDDLVTLEIEKGLKMVRNQEIS

SEQ ID NO: 76719 - protein, 381 aa, Fictibacillus phosphorivorans
  misc_feature (1)..(381): tr|A0A163RLB8|A0A163RLB8_9BACI Epoxyqueuosine reductase OS=Fictibacillus phosphorivorans OX=1221500 GN=queG PE =3 SV=1
MTSAQLKEEIVAYSKEIGIDKIGFAQADVFGELKERLRLQQDLGYQSGFEESDIEKRTEPERLLSGASSIISIALAYPSKMKNAPRSVKGERRGIFCRASWGKDYHHILREKLSLLENFIIKKVPEANVRSMVDTGELSDRAVAERAGIGWSAKNCAIMSPEFGSYMYLGEMITNLALPPDTPMEDQCGSCNKCVEACPTGALVQGGQLDSSKCIAFLTQTKGFLPDQYRDKLGNRLYGCDTCQTVCPENKGKDFHHHVEMEPDPEIAKPLLKPLLSMSNREFKEKFGYVSGSWRGKKPIQRNAIIALAHFKDKTAVSDLVNVLNHDPRPVIRGTAAWAIGKIGGDGAELELLSAKEREKDDLVQLEIEKGLKMVRNQEIS

SEQ ID NO: 76720 - protein, 381 aa, Fictibacillus solisalsi
  misc_feature (1)..(381): tr|A0A1H0API1|A0A1H0API1_9BACI Epoxyqueuosine reductase OS=Fictibacillus solisalsi OX=459525 GN=SAMN04488137_4 137 PE=4 SV=1
MTGAQLKEELIAYSKSIGIDKIGFAAADVFVELKERLKEQQNHGYQSGFEEKDIEKRTNPELLLEGANTIISIALAYPSRMNDAPRSTREARRGIFCRASWGVDYHHILREKLRLLEAFIAEKAPHARSVSMVDTGELSDRAVAERAGIGWSGKNCATITPEFGSYVYLGEMLTTVYLPPDTPITDQCGDCNICVEACPTGALVQGGQLDSNKCIAFLTQTKDFIPDQYREKIGNRLYGCDTCQTVCPKNKGKNFHLHPEMEPDPEIAKPLLKPLLRMSNREFKEKFGQVSGSWRGKKPIQRNAIIALAHFKDTSAVGDLVQLMKEDQRPLIRGTAAWALGKIGSEAAKNELISAKEQEKDGNVAAEINKGLQMIQNQGIH

SEQ ID NO: 76721 - protein, 381 aa, Fictibacillus sp.
  misc_feature (1)..(381): tr|A0A4Q7R0A5|A0A4Q7R0A5_9BACI Epoxyqueuosine reductase OS=Fictibacillus sp. BK138 OX=2512121 GN=queG PE=3 SV= 1
MTGAQLKEEIVAYSKEIGIDKIGFADADVFAELKERLRIQQDLQYQSGFEEKDIDKRTEPERLLTGASSIISIALAYPSKMKNAPRSTKGERRGIFCRASWGKDYHHILREKLALLEAFIIERVPDANIKSMVDTGELSDRAVAERAGIGWSAKNCAIMSPEFGSYMYLGEMITNIAFPADTPMEDQCGSCNKCVEACPTGALVQGGQLDSSKCIAFLTQTKGFLPDQYREKLGNRIYGCDTCQTVCPENKGKDFHHHAEMEPDPEIAKPLLQPLLTMSNRDFKEKFGHVSGSWRGKKPIQRNAIIALAHFREEAAIPDLVYLLKNDPRPVIRGTAAWAIGKIGGNEAELELSSAKEREKDDLVALEIDKGLKMLQNQEIS

SEQ ID NO: 76722 - protein, 381 aa, Fictibacillus sp.
  misc_feature (1)..(381): tr|A0A4Q2HW13|A0A4Q2HW13_9BACI Epoxyqueuosine reductase OS=Fictibacillus sp. S7 OX=2212476 GN=queG PE=3 SV=1
MTGAQLKEELIAYSKSIGIDKIGFAAADVFAELKERLKEQQNHGYQSGFEEKDIEKRTNPQLLLEGANTIISIALAYPSRMKDAPQSTREARRGIFCRASWGVDYHHILREKLRLLEAFIAEKAPHARSVSMVDTGELSDRAVAERAGIGWSGKNCATITPEFGSFVYLGEMLTTVYLPPDTPITDQCGDCNICVEACPTGALVQGGQLDSNKCIAFLTQTKDFLPDQYREKIGNRLYGCDTCQTVCPKNKGKDFHLHPEMEPDPEIAKPLLKPLLKMSNREFKEKFGHVSGSWRGKKPIQRNAIIALAHFKDTSAVGDLAQLMKEDQRPVIRGTAAWALGKIGSEAAENELISAKEQENDGNVAAEINKGLQMIQNQGIH

SEQ ID NO: 76723 - protein, 318 aa, Unknown
  misc_feature (1)..(318): tr|A0A2T1CDD0|A0A2T1CDD0_9CYAN Epoxyqueuosine reductase OS=filamentous cyanobacterium CCP2 OX=2107700 GN=queG PE=3 SV=1
METLDCNRIKQKALELGFHKVGIASVPTPHSPLPASHSPLPASHSLQTWLHQGYHADMNWMENPKRQDIHSVMPSVRSVICVALNYYTPHDRPEGNEYAKISRYGWGRDYHRILHKRLKAYANWLQAQGEGVEARYYADTGPVQDKVWAERSGIGWIAKNSNVITREYGSWVFLGEVLTNLELTPDRPHTQHCGTCTRCIEACPTQAITQPFVVDANRCIAYHTIENRSEIPPDIAAKMQGWVAGCDICQEVCPWNQRFAQETNVAEFQPYSWNIAPTLKELATLSDDEWSDRFPASALRRIKPDMLRRNAQVNLKNP

SEQ ID NO: 76724 - protein, 312 aa, Unknown
  misc_feature (1)..(312): tr|A0A2T1G275|A0A2T1G275_9CYAN Epoxyqueuosine reductase OS=filamentous cyanobacterium Phorm 6 OX=2107706 GN=qu eG PE=3 SV=1
MKISINSDLIKQKSRELGFHKVGIASADADFDREKPRLQAWLDKGYQANMAWMANPKRLDIHAAMPEVKSLICVAINYYTPHQRPGGAEYAKISRYGWGRDYHKILHKKLKVLADWVRSQGEGIEARYYADTGPIQDKVWAEKAGIGWIAKNGNVISTEYGSWVFLGEILTNLELAPDAPHTQHCGTCTRCIDACPTGAIVEPFVVDADRCIAYHTIENRAEKLPDQIASNLQGWVAGCDICQDVCPWNQRFAKPTDVAEFEPYPENIAPTLAELAEISDEEWNRRFTASALRRIKPQMLRRNAKANQINSQ

SEQ ID NO: 76725 - protein, 379 aa, Filibacter sp.
  misc_feature (1)..(379): tr|A0A3P5WWJ1|A0A3P5WWJ1_9BACL Epoxyqueuosine reductase OS=Filibacter sp. TB-66 OX=2483811 GN=queG PE=4 SV=1
MNAVQLQQSIREFADSIGIDKIGFTTAAPFRELKNRLKRQQELGYQSGFEEKDLEKRTEPALLLDQAESIIAIAIAYPSKMENAPKGKKGERRGMFCRASWGTDYHTVLREKLSLLERFIFQHAPDAKVKSMVDTGELSDRAVAQRAGIGWSAKNCSIITPEFGSYVYLGEMITNIPFAPDEPMEDECGTCTLCLDVCPTGALIQGGQLNAQRCIAFLTQTKTPMPEEFRMEMGNRVYGCDTCQTVCPKNKRKHNLHQSAFQPEVELAKPLLQPILKLSNREFKEKFGHVSGSWRGKNPIQRNVIIALAHFKEESAVPELIAMLAKDPRPVIRGTIAWALGQIGTEEGYTALQAALLNETDKDVLAELQGALNNRKERL

SEQ ID NO: 76726 - protein, 318 aa, Filimonas endophytica
  misc_feature (1)..(318): tr|A0A561I3S2|A0A561I3S2_9BACT Epoxyqueuosine reductase OS=Filimonas endophytica OX=1500311 GN=queG PE=3 SV=1
MLQTHHTRLIKEWTQQLGFSYCGVARARMLDEDARRLESWLNKGMHGNMHYMEKNFELRVDPTKLVPGAKSVITLLMNYYPAEQQQADAPRISKYAWGEDYHEVIRPKLNELLFRMREHIGAVEGRGFVDSAPVLERSWATLSGAGWIGKNGNLISKQSGSFFFIATLITDLELDYDDPFARDFCGTCTKCIDACPTDAILPDKTIDGSRCISYFTIELKDLLIPDEMKGKFADWMFGCDTCQDVCPWNRFSKAGSEPAFSPLPEILNLKTQEWEALTEERFRTLFKKSPLKRSKFAGIQRNLRFLQYPSETITQPDI

SEQ ID NO: 76727 - protein, 351 aa, Filimonas lacunae
  misc_feature (1)..(351): tr|A0A1N7R1C4|A0A1N7R1C4_9BACT Epoxyqueuosine reductase OS=Filimonas lacunae OX=477680 GN=queG PE=3 SV=1
MRLNLFIYLFLRLQRCNYSFSGLRVIFARYYMLQVTHHTHLIKEWAQQLGFSYCGIARARMLDEDARRLESWLNKGMHGSMHYMEKNFELRVDPTRLVPGAKSVITLLMNYYPPEQQVTDAPRIAKYAYGEDYHEVIRPKLNDLLARIRLNIGAVEGRGFVDSAPVLERSWAQLTGAGWIGKNGNLISKQNGSFFFIATLIIDLELEYDDPFAKDFCGTCTKCIDACPTDAILPNKQVDGSKCISYFTIELKDMLIPDEMQGRFDDWMFGCDTCQDVCPWNRFSKAGSEPAFAPIPEVLNLKTQDWEALTEESFRTIFKNSPLKRSKFKGIQRNLQFLQYNGTPLPTKEEQ

SEQ ID NO: 76728 - protein, 307 aa, Filimonas sp.
  misc_feature (1)..(307): tr|A0A388Q416|A0A388Q416_9BACT Epoxyqueuosine reductase OS=Filimonas sp. OX=1954253 GN=EMGBS15_09680 PE=4 SV=1
MTKGNYTQLIKDEADKLGFQYCGIAKAEKLEEDAARLEKWLHKGFHGQMAYMENHFEKRIDPRRLVDDAKSVITLLLNYYPAEKQAMDAPLISKYAYGKDYHLVIKEKINALLEVIKEKIGEVHGRGFVDSAPVLERSWAIKSGAGWIGKNGNMITKKQGSFFFIATLIIDLTLEYDLPFLKDYCGTCTQCIDACPTDAILPDKEINGSHCISYYTIELKEALISSEKKWDDWMFGCDICQDVCPWNRFSKPTTENNFNPLNEIMDYTKADWEEITEETFKKVFKDSPLKRTKYAGIKRNLSFLKSS

SEQ ID NO: 76729 - protein, 318 aa, Filimonas sp.
  misc_feature (1)..(318): tr|A0A2U0ZP37|A0A2U0ZP37_9BACT Epoxyqueuosine reductase OS=Filimonas sp. YR581 OX=2135469 GN=queG PE=3 SV=1
MQQTNRKRLVKEWAQQLGFSYCGVARARMLDDDARRLENWLSKGMHGNMHYMEKNFDLRIDPTKLVPGAKSVITLLMNYYPPQQQAADAPRIAKYAYGEDYHEVIRPKLNELLARIRENIGAVEGRGFVDSAPVLERSWATLTGAGWIGKNGNLISKQNGSFFFIATLIVDLELDYDDPYARDFCGTCTKCIDACPTEAILPDKQVDGSKCISYFTIELKDMLIPDEMQGRFTNWMFGCDTCQDVCPWNRFSKPGNEPAFTPIPEILNLKTNEWEALTEESFRTIFKKSPLKRSKFAGIQRNINFLQYPSKPVSEADI

SEQ ID NO: 76730 - protein, 379 aa, Filobacillus milosensis
  misc_feature (1)..(379): tr|A0A4Y8IE17|A0A4Y8IE17_9BACI Epoxyqueuosine reductase OS=Filobacillus milosensis OX=94137 GN=queG PE=3 SV=1
MDFQQLKKELIEYSEEIGIQKIGFASTDTFDTLKQRLMVQQSLKFQSGFEKGSIEERTTPTQLMPKAQSIISIALAYPSRMKGAPKSRKGDRRGIFARASWGKDYHDVLREKLNLLGEFLQEKLDGVAYKAMVDTGELSDRAVAERAGVGFVGKNCALITEEYGSWVYLGELITNIPFEPDKPIEEGCGDCNICVDACPTGALVQGGQLNAQRCVAYQTITKSFLPDEFREKLGNRIYGCDTCQIVCPKNKGKDFHIHPEMEPDPELAKPKLIPLLKISNREFKNKFGYMSGSWRGKKPIQRNAIVALAHYKDETAVDTLADLMVNDPRPVIRGTAAWAIGKIGREDARDMIEQAKEREEDEDVLFEMEKGLDFLVQKV

SEQ ID NO: 76731 - protein, 380 aa, Filomicrobium sp.
  misc_feature (1)..(380): tr|A0A2D7FFA9|A0A2D7FFA9_9RHIZ Epoxyqueuosine reductase OS=Filomicrobium sp. OX=2024831 GN=queG PE=3 SV=1
MSVAADPHALAALLRAEASTYGFAAFGICRPDDIAGVEERLAAFIAAGRHGDMSWMPDTAERRSSPRKLWSDCRSVIVLGANYGPAVDPLSRVGERLRGVVSAYAKGRDYHDVLKGRLKQIVGKFVARSGSEVKVFVDTAPLMEKPLAAAAGLGWQGRHTNLVSREYGSWLFLGAILSDIELPTTEAEIDHCGSCRACLDVCPTDAFPEPYQLDARRCIAYLTIEYRGHIAREFRQPMGNRVFGCDDCLAVCPWNKFAQVAQETRFHPRVETDDPPLEELLELDDAAFRKRFAGTPVKRTGRDRLVRNVLIAAGNSDDRGLGAKVIRLLDDPSPLVRAMAVWAAARLLEAREFAALAESYQARERDIAVLEEWRTEMEEA

SEQ ID NO: 76732 - protein, 371 aa, Fimbriiglobus ruber
  misc_feature (1)..(371): tr|A0A225DA77|A0A225DA77_9BACT Epoxyqueuosine (OQ) redu ctase QueG OS=Fimbriiglobus ruber OX=1908690 GN=FRUB_06 983 PE=4 SV=1
METAARSLPLVAPDPPDPLLKDRLKAEARARGFTLAGVAPAADADGFGRFAAWLDAGYAGELQYLHDLRDERQHPRAVFAPVRSVLMLGLEYGPPVLPLPSTDTPRGRVAAYARGPDYHRLIWDKLNDLRDWLRAEVPGAAAHGVTDSAPLLERDFARRAGLGWVGKNTMLINTARGSFFFLAALLTNLDLAPDPPQANSHCGTCTACLDACPTAAFPAPGVLDARRCISYLTIELRGAVPEELRPGLGDWVFGCDVCQDVCPWNRRAARGTAGPPAFPADPALATLDPIELLSLNTAQFRKRFEGTSLSRARRVGLLRSAALVLGNVGDERAIPALERAAGGADEVIREAAAWALGQIRARAAGRVDTTA

SEQ ID NO: 76733 - protein, 307 aa, Fimbriimonas ginsengisoli
  misc_feature (1)..(307): tr|A0A068NTV0|A0A068NTV0_9BACT Iron-sulfur cluster bind ing protein OS=Fimbriimonas ginsengisoli Gsoil 348 OX=6 61478 GN=OP10G_3498 PE=4 SV=1
MLLKIEARRLGFELCGVAEAVEAPHLREYAAWLDKGYHGEMGYLREHLPIKAHPRALLPGVRSVIAVGLNYNQPNPPRPGRPRIARYALGRDYHRVLRGKLKKLAAWIEANHPGSECRACVDSAPVFERDYARLAGLGWFGKNTMLINSQRGSWFFIGLLLTTVEFHPDEAAVGACGTCRRCIDACPTGAIVFEEGRWQVDARHCISYLTIEHPGELPRPTGEWTFGCDVCQEVCPFNHPRPRAPLRAQVTEEPDFLAQREWPSLVELAELSYERWDHLTRGSAVRRTGIEGLRRNAGANLKNSDAS

SEQ ID NO: 76734 - protein, 298 aa, Firmicutes bacterium
  misc_feature (1)..(298): tr|A0A354HTU2|A0A354HTU2_9FIRM 4Fe-4S ferredoxin-type d omain-containing protein OS=Firmicutes bacterium OX=187 9010 GN=DDY38_07630 PE=4 SV=1
MLRRLSSSHRPPYVPWEPEYRCSPQSWLQGARSVLAGAVPYYSRYSRSCSSPAKGQGYVSPFAGEPDYHQFVTDKLVRLGEYILRLHPGTKYTVQVDSGPGCERLYALRAGVGWQGKNNFIIVPGVGSFVWLGLLVTNLELSPDLPLASQCGDCDLCLRACPTKAYRGANDYNHTRCMAYWLTDKNLSPEQCAILSRHRLIYGCDFCQLACPHNIPGDVEAAWPDLHNLLTMSAAELKAFFKNTAALWRGSNVLRRNLVLAAAGSRECRDVLEKLAQGQGMVAETAQAVLNAFAEGDS

SEQ ID NO: 76735 - protein, 408 aa, Firmicutes bacterium
  misc_feature (1)..(408): tr|A0A1Y3QLR4|A0A1Y3QLR4_9FIRM tRNA epoxyqueuosine(34) reductase QueG OS=Firmicutes bacterium ZCTH02-B6 OX=186 1639 GN=BAA04_04030 PE=4 SV=1
MCNSAKGGRHLVSLETEIKTFAREVGFDVAAIGRADPYLRARRVLESRRTKGHYPAFTEPDIALRCDPKRLLPSARSVIALGVSYRTAHRPRATRAGRDPKGQLSRYAWGQDYHPIVRSRMQSVIEFLERRVPDLEAQAFVDTGPPVDREVAAEAGLGWYGKNACLYVPGYGSWVFLGEIFTNVELRPDPPVSLDCGDCNRCIRACPTGAIIEPFHVDPNRCVSHLTQMGGSIPKELRPAMGLKVFGCDVCQEVCPWNRDAIVADRPEFQPLPEVGTAPSLIGMLTMSKGEFQRRFGPTAAAWRGKKTLQRNAAIALGNSRNPAAVPALAKAVCTDPKPVVRGSAAWALGRIGGNEAYAALLQARERETDPGVLQEIEDALQQIRHATNTPAPPPPPEAPSPLPRAGG

SEQ ID NO: 76736 - protein, 317 aa, Fischerella major
  misc_feature (1)..(317): tr|A0A1U7H5M5|A0A1U7H5M5_9CYAN Epoxyqueuosine reductase OS=Fischerella major NIES-592 OX=210994 GN=queG PE=3 S V=1
MNQLPGTSSAEVKQKALELGFHKVGIAAVDGDDTEIKRLQAWIKLGYHADMEWMTSPKRQDIRLVMSDVRSLICVALNYYTPHQRPEGKEYGKISRYAWGRDYHKVMHKKLKALSLWLQGLGENIQARYYADTGPVQDKVWAQKAGIGWIAKNGNVITREYGSWVFLGQVLTNLELTPDKPHTQHCGNCTRCLEACPTDAITSPFVVDANRCIAYHTIENRQEKLPETIASNLQGWIAGCDICQDVCPWNQRFANPTDVEEFQPYPGNIDPKLIELAQISDQDWDQQFPASALRRIKPEMLRRNARANLDAFQQAQE

SEQ ID NO: 76737 - protein, 317 aa, Fischerella muscicola
  misc_feature (1)..(317): tr|A0A2N6K9B2|A0A2N6K9B2_FISMU Epoxyqueuosine reductase OS=Fischerella muscicola CCMEE 5323 OX=2019572 GN=queG PE=3 SV=1
MNQLPGTSSAEVKQKALELGFHKVGIAAVDGDDTEIKRLQAWIKLGYHADMEWMTSPKRQDIRLVMSDVRSLICVALNYYTPHQRPEGEEYGKISRYAWGRDYHKVMHKKLKALSIWLQGLGENIQARYYADTGPVQDKVWAQKAGIGWIAKNGNVITREYGSWVFLGEVLTNLELTPDKPHTQHCGNCTRCLEACPTDAITSPFVVDANRCIAYHTIENRQEKLPHTIASNLHGWIAGCDICQDVCPWNQRFANPTDVEEFQPYPGNIDPKLIELAQISDQDWDQQFPASALRRIKPEMLRRNARANLDAFQQAQE

SEQ ID NO: 76738 - protein, 317 aa, Fischerella sp.
  misc_feature (1)..(317): tr|A0A0S3TSI2|A0A0S3TSI2_9CYAN Epoxyqueuosine reductase OS=Fischerella sp. NIES-3754 OX=1752063 GN=queG PE=3 S V=1
MNQLSGTSSAEVKQKALELGFHKVGVAAVDGDDTEVQRLQAWLKLGYHADMEWMTSPKRQDIRLVMSDVRSLICVALNYYTPHQRPEGEEYGKISRYAWGRDYHKVMHKKLKALSVWLQGLGENIQARYYADTGPVQDKVWAQKAGIGWIAKNGNVITREYGSWVFLGEVLTNLELTPDKPHTQHCGNCTRCLEACPTDAITSPFVVDANRCIAYHTIENRQEKLPHTIASNLHGWIAGCDICQDVCPWNQRFANPTDVEEFQPYPGNIDPKLIELAQISDQDWDQQFPASALRRIKPEMLRRNARANLDAFQQAQE

SEQ ID NO: 76739 - protein, 318 aa, Fischerella sp.
  misc_feature (1)..(318): tr|A0A1Z4TK55|A0A1Z4TK55_9CYAN Epoxyqueuosine reductase OS=Fischerella sp. NIES-4106 OX=2005456 GN=queG PE=3 S V=1
MNQLLGTNSAEVKQKAVELGFHKVGIAAIYGTDDIQMQQLRAWIELGYHADMEWMTSPKRQDIRLVMSEVRSLICVALNYYTPHQRPGGEEYAKISRYAWGRDYHKVMHKKLKALSNWLQGQGENIQARYYADTGPVQDKVWAQKAGIGWIAKNGNVITREYGSWVFLGEVLTNLELDPDKPHTQHCGNCTRCLEACPTDAITSPFVVDANRCIAYHTIENRQEKLPEAIASNLQGWVAGCDICQDVCPWNQRFASPTDVEEFQPYPGNIAPKLVELAQISDYEWDERFPASALRRIKPEMLRRNARANLNAFQQAQE

SEQ ID NO: 76740 - protein, 317 aa, Fischerella thermalis
  misc_feature (1)..(317): tr|G6FX26|G6FX26_9CYAN Epoxyqueuosine reductase OS=Fisc herella thermalis OX=372787 GN=queG PE=3 SV=1
MNQLPGTSSAEVKQKALELGFHKVGIAAVDGDDTEIKRLQAWIKLGYHADMEWMTSPKRQDIRLVMSDVRSLICVALNYYTPHQRPEGKEYGKISRYAWGRDYHKVMHKKLKALSLWLQGLGENIQARYYADTGPVQDKVWAQKAGIGWIAKNGNVITREYGSWVFLGEVLTNLELTPDKPHTQHCGNCTRCLEACPTDAITSPFVVDANRCIAYHTIENRQEKLPETIASNLQGWIAGCDICQDVCPWNQRFASPTDVDDFQPYPGNIAPKLIELAQISDQDWDQQFPASALRRIKPEMLRRNARANLDAFQQAQE

SEQ ID NO: 76741 - protein, 317 aa, Fischerella thermalis
  misc_feature (1)..(317): tr|A0A2N6MBJ3|A0A2N6MBJ3_9CYAN Epoxyqueuosine reductase OS=Fischerella thermalis CCMEE 5330 OX=2019670 GN=queG PE=3 SV=1
MNQLPGTSSAEVKQKALELGFHKVGIAAVDGDDTEIKRLQAWIKLGYHADMEWMTSPKRQDIRLVMSDVRSLICVALNYYTPHQRPEGKEYGKISRYAWGRDYHKVMHKKLKALSLWLQGLGENIQARYYADTGPVQDKVWAQKAGIGWIAKNGNVITREYGSWVFLGEVLTNLELTPDKPHTQHCGNCTRCLEACPTDAITSPFVVDANRCIAYHTIENRQEKLPETIASNLQGWIAGCDICQDVCPWNQRFANPTDVEEFQPYPGNIDPKLIELAQISDQDWDQQFPASALRRIKPEMLRRNARANLDAFQQAQE

SEQ ID NO: 76742 - protein, 307 aa, Flagellimonas aquimarina
  misc_feature (1)..(307): tr|A0A316L084|A0A316L084_9FLAO Epoxyqueuosine reductase OS=Flagellimonas aquimarina OX=2201895 GN=queG PE=3 SV =1
MNSKTVHTELIKTEAKRLGFLSCGVSKAEFLEEEAPRLEKWLNQNMHGEMQYMENHFDKRLDPTKLVEGSKSVISLLLNYYPSNEQNIDSYKISKYAYGTDYHFVIKDKLKDLLQFIQEEIGAVHGRAFVDSAPVLDKAWAAKSGLGWIGKHSNLLTQQVGSFYFIAELIIDLELDYDAPVTDHCGTCTACIDACPTDAIVEPYVVDGSKCISYFTIELKNEIPNEFHGKFDDWMFGCDVCQDVCPWNRFSKKHSEPLFNPTPELLSMTKKDWEEITEDVFKKIFKKSAVKRTKFSGLQRNINFLKP

SEQ ID NO: 76743 - protein, 308 aa, Flagellimonas eckloniae
  misc_feature (1)..(308): tr|A0A0Q1DM14|A0A0Q1DM14_9FLAO Epoxyqueuosine reductase OS=Flagellimonas eckloniae OX=346185 GN=queG PE=3 SV=1
MSLKTTYTKLIKTEAKRLGFLSCGVSKAEFLEEEAPRLEKWLNQNRHGEMRYMENHFDKRLDPTKLVEGSKSVISLLLNYHPSEEQNPNAYKISKYAYGTDYHFVIKGKLKSLLNFIQQDIGEVHGRAFVDSAPVLDKAWAAKSGLGWIGKHSNLLTQQVGSFYFIAELIVDLELDYDTPVTDHCGTCTACIDACPTEAIVEPYVVDGSKCISYFTIELKNEIPNEFQGKFDDWMFGCDVCQDVCPWNRFSKSHNEPLFNPNPELLSMTKKDWEEITEDVFKKVFKKSAVKRTKFSGLQRNINFLKST

SEQ ID NO: 76744 - protein, 298 aa, Flagellimonas flava
  misc_feature (1)..(298): tr|A0A1M5LME0|A0A1M5LME0_9FLAO Epoxyqueuosine reductase OS=Flagellimonas flava OX=570519 GN=queG PE=3 SV=1
MIKTEAKRLGFLSCGISKAEFLEDEAPRLEKWLNQNMHGEMHYMENHFDKRLDPTKLVEDSKSVVSLLLNYFPSEEQNKDAFKISKYAYGMDYHFVIKDKLKSLLHFIKDEIGEVQGRAFVDSAPVLDKAWAAKSGLGWIGKHSNLLTQQVGSFYFIAELILDLELEYDHPVTDHCGTCTACIDACPTQAIVEPYVVDGSKCISYFTIELKNEIPSTFQGQFDDWMFGCDVCQDVCPWNRFSKSHQEPLFHPQPELLSMTKKDWEEITEDVFKKIFKKSAVKRTKYSGLQRNIKFLSR

SEQ ID NO: 76745 - protein, 306 aa, Flagellimonas maritima
  misc_feature (1)..(306): tr|A0A2Z4LTR6|A0A2Z4LTR6_9FLAO Epoxyqueuosine reductase OS=Flagellimonas maritima OX=1383885 GN=queG PE=3 SV=1
MNIQSNTALIKNEARRLGFLSCGISKAEFLEEEAPRLEKWLNQNMHGEMHYMENHFDKRLDPTKLVEGSKSVISLLLNYYPSETQNNESYKISKYAYGTDYHFVIKDKLKSLLNFIQEEIGEVHGRAFVDSAPVLDKAWAAKSGLGWMGKHSNLLTQQIGSFYFIAELIVDLQLEYDTPVSDHCGTCTACIDACPTEAIVEPYVVDGSKCISYFTIELKNEIPNEFKGKFDDWMFGCDICQDVCPWNRFSKTHNEPLFDPNPELLSMTKKDWEEITEDVFKRIFKKSPVKRTKYTGLKRNIKFLKS

SEQ ID NO: 76746 - protein, 314 aa, Flagellimonas pacifica
  misc_feature (1)..(314): tr|A0A285MV33|A0A285MV33_9FLAO Epoxyqueuosine reductase OS=Flagellimonas pacifica OX=1247520 GN=queG PE=3 SV=1
MLALIQDKSVSIHSNTKLIKAEAKRLGFLSCGISKAGFLEEEAPRLEKWLNQNMHGEMQYMENHFDKRLDPTKLVEGSKSVVSLLLNYYPAKEQNPEAYKISKYAYGTDYHFVIKDKLKSLLNFIQEEIGEVHGRAFVDSAPVLDKAWAARSGLGWIGKHSNLLTQQVGSFFFIAELIIDLELEYDAPVTDHCGTCTACIDACPTEAIVEPYVVDGSKCISYFTIELKNEIPTEFQGKFDDWMFGCDVCQDVCPWNRFSKPHSQPLFNPHPELLSMDKKDWEEITEDVFRQIFKKSAVKRTKFAGLQRNIKFLK

SEQ ID NO: 76747 - protein, 306 aa, Flagellimonas sp.
  misc_feature (1)..(306): tr|A0A5C8V6Y3|A0A5C8V6Y3_9FLAO Epoxyqueuosine reductase OS=Flagellimonas sp. 176CP5-101 OX=2603628 GN=queG PE= 3 SV=1
MNSRTNHTDLIKTEAKRLGFLSCGISKAEFLEEEAPRLEKWLSQNRHGEMQYMENHFDKRLDPTKLVEGSKSVISLLLNYFPEQNQIKNTYKVSKYAYGIDYHFVIKDKLKSLLHFIQEEIGEVHGRAFVDSAPVLDKAWAAKSGLGWIGKHSNLLTQPVGSFYFIAELIVDLELDYDTPVTDHCGTCTACIDACPTEAIVEPYVVDGSKCISYFTIELKNEIPNEFQGKFDDWMFGCDVCQDVCPWNRFSKSHSEPLFNPHPELLSMTKKDWEEITEDVFRKIFKKSAVKRTKFSGLQRNIKFLK

SEQ ID NO: 76748 - protein, 312 aa, Flammeovirga kamogawensis
  misc_feature (1)..(312): tr|A0A553GEY2|A0A553GEY2_9BACT Epoxyqueuosine reductase OS=Flammeovirga kamogawensis OX=373891 GN=queG PE=3 SV =1
MNKQLQKERNANLIKAEAKRLGFSECGIAKAGFLEEEADPLEKWLKNNMHGEMGYMANHFDKRLDPTKLVEGAKSVVMLSYNYYPEKDLAKDGNYKIAKYAYGEDYHYVIKHKLKDLVKFINSEIGEVDGRVFVDSAPVMERAWAKKAGLGWVGKHSLLLNRQMGSFFFLAELIIDLDLEADPPVKDFCGTCTRCIDACPTDAIPEKGVVDGSKCISYLTIELKDQIPTQFEGKMNDWIFGCDICQDVCPWNRFSSSHSTDTFNPHQNLGNVDKKEWEELTEDVFKELFKKSAIKRTKYAGLMRNISFAKKK

SEQ ID NO: 76749 - protein, 312 aa, Flammeovirga pacifica
  misc_feature (1)..(312): tr|A0A1S1Z2D6|A0A1S1Z2D6_9BACT Epoxyqueuosine reductase OS=Flammeovirga pacifica OX=915059 GN=queG PE=3 SV=1
MNTTSQKEKNAALIKAEAKRLGFSECGIAKARFLEEEADFLEDWLKKGMHGKMGYMANHFDKRLDPTKLVEGAKSVVMLSYNYFPETDFASNETYKVAKYAYGEDYHYVIKRKLKDLVKFIQSHIGEVDGRVFVDSAPVMERAWAKQAGLGWVGKHSLLLNRKMGSFFFLAELIIDLELQEDPPIKDYCGTCTRCIDACPTEAIPQKGVVDGSKCISYLTIELKDQIPEEFSGKMQDWIFGCDICQDVCPWNRFSTPHQEDNFLPHENLGDLKKKDWEELTEDVFKEIFKKSAVKRTKFEGLNRNILFAKKR

SEQ ID NO: 76750 - protein, 312 aa, Flammeovirga sp.
  misc_feature (1)..(312): tr|A0A3S9P7D6|A0A3S9P7D6_9BACT Epoxyqueuosine reductase OS=Flammeovirga sp. L12M1 OX=2494373 GN=queG PE=3 SV=1
MNKQLQKERNAALIKAEAKRLGFSECGIAKAGFLEEEADPLEKWLKNNMHGEMGYMANHFDKRLDPTKLVEGAKSVVMLSYNYYPEKDLGQEGNYKIAKYAYGEDYHYVIKHKLKDLVKFINAEIGEVDGRVFVDSAPVMERAWAKKAGLGWVGKHSLLLNRQMGSFFFLAELIIDLDLEADPPVKDFCGTCTRCIDACPTEAIPEKGVVDGSKCISYLTIELKDQIPTQFEGKMNDWIFGCDICQDVCPWNRFSSSHSTNAFNPHEELGNVNKKEWEELTEDVFKELFRKSAIKRTKYAGLMRNISFAKKK

SEQ ID NO: 76751 - protein, 312 aa, Flammeovirga sp.
  misc_feature (1)..(312): tr|A0A150ADQ2|A0A150ADQ2_9BACT Epoxyqueuosine reductase OS=Flammeovirga sp. SJP92 OX=1775430 GN=queG PE=3 SV=1
MDKVNQKEKYSKLIKEEAQRLGFSECGIAKAGFLEEEADPLEKWLKAGMHGEMGYMANHFDKRLDPTKLVEGAKSVVMLSYNYFPEKDLAQEGNFKVAKYAYGEDYHYVIKRKLKDLVKFINAEIGEVEGRVFVDSAPVMERAWAKKAGLGWVGKHSLLLNRKMGSFFFLAELIIDLELQEDAPIKDYCGTCTRCIDACPTDAIPEKGIVDGSKCISYLTIELKEQIPTEFQGKMEDWIFGCDICQDVCPWNRFSKPHSTPEFSPHDHLGEMSKNDWNEITDEVFKEIFRKSAVKRTKLEGLKRNIMYAQKK

SEQ ID NO: 76752 - protein, 305 aa, Flammeovirgaceae bacterium
  misc_feature (1)..(305): tr|A0A2E0FAH2|A0A2E0FAH2_9BACT Epoxyqueuosine reductase OS=Flammeovirgaceae bacterium OX=2026740 GN=queG PE=3 SV=1
MTKNNTELIKIKAKELGFTSCGISKSRHLHEEEDNFEKWLSRGNQGSMSYLEKNFDKRLDPRKLVPGSKSVISLSYNYYPQKKIDQKNNFIISKYAYGKDYHNVIRKKLKKLFQFIKEKIGDVEGRVFVDSAPVHERAWAKLSGLGWIGKNSLLINEKRGSYFFLAEIICDLKLDYDSPALDRCGKCTQCIDACPTDAITSAQVINANKCISYLTIENKDQIPDELKDNLNGAIFGCDICQDVCPWNKFSKPHDEKKFIPNDELSSFKKSDWVELTEETFNKIFEGSAVKRSKYKGIIRNIKASN

SEQ ID NO: 76753 - protein, 311 aa, Flammeovirgaceae bacterium
  misc_feature (1)..(311): tr|A0A1Z8QHB8|A0A1Z8QHB8_9BACT Epoxyqueuosine reductase OS=Flammeovirgaceae bacterium TMED32 OX=1986681 GN=que G PE=3 SV=1
MMKSNRDIVKEIALDLGFSYCGISKADFLAEEADHLETWLKRGYQGKMSYMERHFDKRLDPRKLVPGAQSVISLLYNYAPQKDETDQTPYKIARYAYGKDYHFVIKDKLAEFMNRMKVGIGKIEGRAFVDSAPVHERAWASKSGLGWVGKNTLLINKDSGSYFFLAELIIDLKLEADGPIKDYCGTCTRCIDACPTDAISEPYVVDGSRCISYLTIELKDEIPTEFSDKMKGWAFGCDICQQVCPWNRFSTPHNEPQFAPQGWEELSKTAWEEMTEVVFGNVFKKSPINRTKFKGLQRNISFIQTRKDDTY

SEQ ID NO: 76754 - protein, 311 aa, Flaviaesturariibacter sp.
  misc_feature (1)..(311): tr|A0A4R1B8N3|A0A4R1B8N3_9BACT Epoxyqueuosine reductase OS=Flaviaesturariibacter sp. 17J68-12 OX=2502780 GN=qu eG PE=3 SV=1
MSAAAHTRWIKDAARRFGFDHCGIARAEALDDDARRLEQWLSKGYHGSMQYMANHFDLRVDPRRLVPGARSVITFLKNYYPAEESRSDIKVARYAWGADYHEVIRAQLNAFLAEARAAIGNIEGRGFVDSAPVLERSWAGRSGLGWVGKNGNLINKGAGSFFFIATLITDLELEYDAPYARDYCGSCTRCIDACPTDAILPGKTVDGSRCISYFTIELKDLLIPQEHQGKFGNWMFGCDICQEVCPWNRFSTPNREPAFTPVPEVLNLSSSEWEALSEEAFRTIFRRSPLSRAKHRGIQRNLRFLKGDQGA

SEQ ID NO: 76755 - protein, 312 aa, Flaviaesturariibacter sp.
  misc_feature (1)..(312): tr|A0A4R4DY08|A0A4R4DY08_9BACT Epoxyqueuosine reductase OS=Flaviaesturariibacter sp. 17J68-15 OX=2545761 GN=qu eG PE=3 SV=1
MPTTAENTRWIKEAALRHGFEHCGVARAVPLDDDARRLERWLGQGYQGDMRYMENHFDLRVDPGKLVPGARSVITFLKNYYPEETPTSDLRVARYAWGQDYHDVIRARLNTLLAEARSAIGAIDGRGFVDSAPVLERSWAQRSGLGWVGKNGNLINKGAGSFFFIATLITDLELEYDDPFARDFCGSCTRCIDACPTDAILPDKTIDGSRCISYFTIELKEALIPSEMEGKFGNWFFGCDTCQEVCPWNRFSKPHREAAFTPFREVLHLSSGEWEALSEEAFRKIFRGSPLSRAKHKGIQRNLRFLKGTSGD

SEQ ID NO: 76756 - protein, 308 aa, Flavihumibacter petaseus
  misc_feature (1)..(308): tr|A0A0E9N1Y6|A0A0E9N1Y6_9BACT Epoxyqueuosine reductase OS=Flavihumibacter petaseus NBRC 106054 OX=1220578 GN= queG PE=3 SV=1
MPTLSNHIKKMAYELGFMYCGISASKRLEEDERHLEAWLNKGYHGMMSYMANHFDMRVDPGKLVPGAKSVITVLMNYFPVEKQPEGLPKISKYAYGNDYHELIREKLNQLLFRIRELAGDVQGRGFVDSAPVLERAWARESGLGWMGKNGNLINKTSGSFFFIATLITDLELDYDAPFARDYCGTCTRCIDACPTGAILPDGTVAGDKCISYFTIELKSQLIPEEQQGKFDNWMFGCDTCQDVCPWNRFSQPATEPGFSAIPGLFSMAAEDWEQLGEDAFRKMFRHSPLKRAKYAGVLRNLHFIAPRD

SEQ ID NO: 76757 - protein, 312 aa, Flavihumibacter solisilvae
  misc_feature (1)..(312): tr|A0A0C1IRL3|A0A0C1IRL3_9BACT Epoxyqueuosine reductase OS=Flavihumibacter solisilvae OX=1349421 GN=queG PE=3 SV=1
MKELTHISNRIRQMAAELGFMHCGISQSKRLDEDARRLEQWLNKNYHGSMAYMANHFDLRVDPSRLVPGAKSVITLLINYYPDTEQSQKAPHISKYAYGNDYHEVIREKLRQLLFRIREIAGDVNGRGFVDSAPVLERAWARESGLGWIGKNGNLINKQAGSFFFIATLITDLELQYDDAFAGDYCGTCTRCIDACPTDAIMDNKTINGSKCISYFTIELKEMLIPGEMKGRFNDWMFGCDICQDVCPWNRFSRPHNEPAFTPIPEILELNPEDWEAMGEDRFREIFRHSPLKRAKYQGILRNLRFLRPEST

SEQ ID NO: 76758 - protein, 177 aa, Flavihumibacter sp.
  misc_feature (1)..(177): tr|A0A162NJJ1|A0A162NJJ1_9BACT 4Fe-4S ferredoxin-type d omain-containing protein OS=Flavihumibacter sp. CACIAM 22H1 OX=1812911 GN=A1D16_19795 PE=4 SV=1
MERAWARETGLGWIGKNGNLITRQNGSFFFIATLITDLEADQYDDPYAKDYCGTCTKCIDACPTEAIEPDRVINGSKCISYFTIELKEELIPAAEKGRFENWLFGCDICQDVCPWNRFSTPSKEEQFTPIPELFQLKPADWEAMGEEKFRKLFRNSPLKRTKYKGIIRNLRFLELPG

SEQ ID NO: 76759 - protein, 314 aa, Flavihumibacter sp.
  misc_feature (1)..(314): tr|A0A0C1L7N2|A0A0C1L7N2_9BACT Epoxyqueuosine reductase OS=Flavihumibacter sp. ZG627 OX=1463156 GN=queG PE=3 S V=1
MNFEIKISEKIKSYAAELGFLHCGIARSRRLDDDARRLENWLNNNYHGSMSYMANHFDLRVDPSKLVPGAKSVITLLMNYYPEEVQEKNLPGISKYAYGHDYHEVIREKLHHLLFRIRELAGDVNGRGFVDSAPVLERSWARESGLGWIGKNGNLINKEAGSFFFLATLITDLELEYDDLYTKDYCGTCTRCIEACPTDAILPDKTINGSQCISYFTIELKDLLIPSEMQGKFNNWMFGCDICQDVCPWNRFSQPTKEPAFSPIPGILNMTSGDWELLGEERFRSLFRHSPLKRSKYKGILRNLRFLKQDDPIE

SEQ ID NO: 76760 - protein, 345 aa, Flavimaricola marinus
  misc_feature (1)..(345): tr|A0A238LK94|A0A238LK94_9RHOB Epoxyqueuosine reductase OS=Flavimaricola marinus OX=1819565 GN=queG PE=4 SV=1
MGLKQELFSFALDAGFSKAGVCRPDAAPELAGRLAAFVDAGRHGQMGWMAERMAWRGDPTALWPEARSVIMLAEAYSPEHDPLAVLEQTDLAAVSVYAHGRDYHDLVKKRLKRVARWLIEQSPGAEVKVFVDTAPVMEKPLAQAAGLGWQGKHTNLLGRDIGNWVFLGAIFTTVELEPDPPERSHCGSCTACLDICSTNAFPAPYQLDARRCISYLTIEHKGPVPHELRALMGNRIYGCDDCLAVCPWNKFAVAAKEMRYLRDGPAPELADLVSLDDAAFRAMFSGSPIKRIGRNRFVRNVLYAIGNSGRGALADAARPLSKDPDPVVAEAANWAISTLETNSGA

SEQ ID NO: 76761 - protein, 309 aa, Flavipsychrobacter stenotrophus
  misc_feature (1)..(309): tr|A0A2S7SVL7|A0A2S7SVL7_9BACT Epoxyqueuosine reductase OS=Flavipsychrobacter stenotrophus OX=2077091 GN=queG PE=3 SV=1
MYSSPDKNTKLIKDEASRLGFNSCGIAKAVQLEDDAVRLEQWLSKGYNAGMEYMERNFDLRIDPRKLVPGAKSVITLQLNYYPAEQQQALAPKIAKYAWGTDYHYVIREKLNQLLDFINTNIGAVDGRGFVDSAPVLERSWAVRSGLGWIGKNGNVLTRNSGSFFFIATLITDLELSTDAPFTTDHCGTCTRCIDACPTDAIVSPTKIDATKCISYLTIELKDALIPSEFHNKMENWMFGCDICQDVCPWNRFSKPNTEANFTPIPEILNLSMRQWEELSEDAFNKIFKNSPLKRSKWKGMQRNISSIG

SEQ ID NO: 76762 - protein, 307 aa, Flaviramulus basaltis
  misc_feature (1)..(307): tr|A0A1K2IEQ4|A0A1K2IEQ4_9FLAO Epoxyqueuosine reductase OS=Flaviramulus basaltis OX=369401 GN=queG PE=3 SV=1
MNQKVSYTNLIKTEAKRLGFLSCGISKAQFLEEEAPRLEKWLNKNMHGEMRYMENHFDKRLDPTKLVEDSKSVISLLLNYYPEEKQNENSFKLSKYAFGNDYHFVIKDKLKSLLNFIQEEIGEVHGRAFVDSAPVLDKAWAAKSGLGWIGKHSNLLTQQVGSFYFIAELIIDLDLEYDTPVTDHCGTCTACIDACPTQAITEPYVVDGSKCISYFTIELKENIPSEFKGKMDDWMFGCDVCQDVCPWNRFSKSHSEPLFNPHPELLSMTKKDWEEITEDTFKKVFKNSAVKRTKFSGLKRNINFLKE

SEQ ID NO: 76763 - protein, 308 aa, Flavisolibacter ginsengisoli
  misc_feature (1)..(308): tr|A0A1M5FXX6|A0A1M5FXX6_9BACT Epoxyqueuosine reductase OS=Flavisolibacter ginsengisoli DSM 18119 OX=1121884 G N=queG PE=3 SV=1
MSVTAEHSGLVKQMAVQYGFDYCGIAKAVPLDEDARRLENWLNQGMNGNMHYMENYFDLRIDPSRLVPGARSVITLLKNYYPSEIPEQELKISKYAYGKDYHEVLRPRLQSMISALQDKIGQFNGRGFVDSAPVLERTWARKTGLGWIGKNGNLINKQSGSFYFIATLITDLDLDYDDPMAKDYCGSCTKCIDACPTEAILPGKVINGSKCISYFTIELKDEIIPSEMKGKFANWMFGCDICQDVCPWNRFSQPHHEEAFTPLPEILNLTTKEWEELSEEVFRKLFKFSPLSRSKHKGIQRNIRFLKS

SEQ ID NO: 76764 - protein, 307 aa, Flavisolibacter ginsenosidimutans
  misc_feature (1)..(307): tr|A0A5B8UQH4|A0A5B8UQH4_9BACT Epoxyqueuosine reductase OS=Flavisolibacter ginsenosidimutans OX=661481 GN=queG PE=3 SV=1
MVTATHTRLLKTLAKQFGFDYCGIAKAQVLDEDARRLEAWLNKGLHGKMRYMENYFDLRTDPSKLVPGAKSVITLLKNYYPSERLNGDLKISKYAYGQDYHDVIRASLKAMMHEAQEKIGAFSGRGFVDSAPVLERSWAQRSGLGWIGRNGNLITKESGSFYFIATLITDLELEYDDPLAKDFCGSCRRCIEACPTEAIGEDKVINGSQCISYFTIELKDEIIPEEMKGKFQNWMFGCDACQDVCPWNRFSKPHSEAAFSPLPEILNLSTKEWEELSEETFRKIFKHSPLSRSKHKGIQRNVKFLKA

SEQ ID NO: 76765 - protein, 308 aa, Flavisolibacter tropicus
  misc_feature (1)..(308): tr|A0A172U168|A0A172U168_9BACT Epoxyqueuosine reductase OS=Flavisolibacter tropicus OX=1492898 GN=queG PE=3 SV =1
MLSIEKNTALVKAKAQAFGFDYCGIAQAKRLDEDARRLEAWLNKGLHGKMQYMENYFDLRIDPTKLVPGAKSVITLLKNYYPHEQTPSGHGISKYAWGQDYHTVIKQHLRSMIQELQVDLGQFGGRGFVDSAPVLERTWAQRSGLGWIGKNGNLITKGSGSFFFIATLIVDVDLVYDDPFAKDFCGSCQRCIEACPTQAILPDKTINGSQCISYFTIELKDELIPTEMKGKFNNWMFGCDTCQDVCPWNRFSKPNSEQGFTPIPEILDFTTKDWEELSEEAFRKIFKHSPLSRSKYKGIQRNIKFLKS

SEQ ID NO: 76766 - protein, 308 aa, Flavivirga eckloniae
  misc_feature (1)..(308): tr|A0A2K9PPC5|A0A2K9PPC5_9FLAO Epoxyqueuosine reductase OS=Flavivirga eckloniae OX=1803846 GN=queG PE=3 SV=1
MNSKAKHTNLIKTEAKRLGFLSCGISKAQFLEEEAPRLESWLNKNMHGEMRYMENHFDKRLDPTKLVEGSKSVVSLLLNYYPSEIQQDKTAPKISKYAYGRDYHFVIKDKLKSLLNVIQEEIGEVNGRAFVDSAPVLDKAWAAKSGLGWIGKHSNLITQQVGSFYFIAELIIDLELDYDTPVTDHCGTCTACIDACPTQAITEPYVVDGSKCISYFTIELKENIPTEFKGQFDDWMFGCDVCQDVCPWNRFSKPHNEPLFNPHPELLFMTKKDWEEITEDTFKKVFQKSAVKRTKFAGLQRNIKFLKD

SEQ ID NO: 76767 - protein, 308 aa, Flavivirga sp.
  misc_feature (1)..(308): tr|A0A4S1DT32|A0A4S1DT32_9FLAO Epoxyqueuosine reductase OS=Flavivirga sp. RZ03 OX=2559571 GN=queG PE=3 SV=1
MNSKSKHTTLIKTEAKRLGFLSCGISKAQFLEEEAPRLENWLNKNMHGQMHYMENHFDKRLDPTKLVEGSKSVVTLLLNYYPSEFQQDKTAPKISKYAYGRDYHFIIKDKLKSLLNFIEEEIGEVEGRAFVDSAPVLDKAWAAKSGLGWIGKHSNLITQQVGSFYFIAELIIDLDLEYDLPTTDHCGTCTACIDACPTQAIAEPYVVDGSKCISYFTIELKENIPTEFKGQFEDWMFGCDVCQDVCPWNRFSKPHSEPLFNPHPELLSMTKKDWEEITEDTFKKVFQKSAVKRAKFSGLKRNIEFLKR

SEQ ID NO: 76768 - protein, 309 aa, Flavobacteria bacterium
  misc_feature (1)..(309): tr|C0BHX7|C0BHX7_FLABM Epoxyqueuosine reductase OS=Flav obacteria bacterium (strain MS024-2A) OX=487796 GN=queG PE=3 SV=1
MLNRKAHYSEIIKSKAKDLGFLSCGIAKAGFLEKEAPKLEQWLQEGRHGNMVYMENHFDKRLDPTVLVPGAKSVVSLLLNYYSDEKQIDPKAPKIASYAYGQDYHNVIKDKLTQLMIYLKEEIGEVDGRVFVDSAPVMDKAWASRAGLGWVGKNTNLISKQVGSFFFIAELIIDLELEYDLPVADHCGSCTACIDACPTEALTAPYQIDGSKCISYATIELKEAIPETFKGKMEGWAFGCDICQTVCPWNRFATPHQEIDFIPKKELLELSSRDWRELTEETFKRVFQKSAVKRAKFAGLQRNIKFLSS

SEQ ID NO: 76769 - protein, 313 aa, Flavobacteria bacterium
  misc_feature (1)..(313): tr|C0BP15|C0BP15_9BACT Epoxyqueuosine reductase OS=Flav obacteria bacterium MS024-3C OX=487797 GN=queG PE=3 SV= 1
MTTSDHVQQDRAQLFKREAALLGFISCGISKAGLLEEEAPRLEKWLKEAKQGKMGYMENHFDKRLDPTKLVPGAKSVVSLLYNYFPEQKQSSDSYQIAKYAYGQDYHEVIKNKLKTLLERVSAQLGQIEGRAFVDSAPILEKAWAAKSGLGWIGKNSNLLTQQVGSFYFIAELVLDIDLPQDPITSDHCGTCTACIDACPTQAITPYEVDGSKCISYFTIELKEAIPKEVSGQFQDWAFGCDICQDVCPWNRFSKSHSEPLFNPDPRLLENTKKDWEEITQEVFSQIFKKSAVKRTKYEGFKRNIDFLQNQKF

SEQ ID NO: 76770 - protein, 273 aa, Flavobacteriaceae bacterium
  misc_feature (1)..(273): tr|A0A359DSF2|A0A359DSF2_9FLAO tRNA epoxyqueuosine(34) reductase QueG (Fragment) OS=Flavobacteriaceae bacteriu m OX=1871037 GN=queG PE=4 SV=1
MLLQTEEHIKIKWSQCIKEKAEALGFISCGIAKADFLVEEVPRLEAWLKNDYHGEMQYMENHFDMRLDPRILVEGAKSVISLAYNYYQNLNRNPNSYKVAMYAQGEDYHFVVKEKVRELLDFIQDEIGEVNGRAFADSAPILEHAWARKAGIGWVGKNSLTLSKQKGSFFFLSELIVDLDLAYDSPIETDHCGKCTRCIDACPTEAILPNKTVNGSQCISYFTIELKEQIPAEMKGKFDDWIFGCDVCQEVCPWNRFSLPTQENRFTGHEKIN

SEQ ID NO: 76771 - protein, 315 aa, Flavobacteriaceae bacterium
  misc_feature (1)..(315): tr|A0A3L9MHE2|A0A3L9MHE2_9FLAO Epoxyqueuosine reductase OS=Flavobacteriaceae bacterium YIM 102668 OX=2479857 G N=queG PE=3 SV=1
MHLPTEEHIKIERTQRIKAKAEALGFISCGIAKADFLEEEAPRLESWLKNNYQGEMNYMANHFDMRLDPRLLVEGAKSVISLAYNYYQDLNRNLDSYKVAMYAQGEDYHFVVKEKVRELLDFIQDEIGEVVGRAFTDSAPIMEHAWATKAGIGWVGKNSLTLSKQKGSFFFLAELILDLDLMYDNPMETDHCGKCTKCIDACPTEAILPNLVVNGSKCISYFTIELKDQIPSEMKGKFDDWIFGCDICQEVCPWNRFSLPTKQERFIGHESINQFSKNDWEEITEDVFREIFKKSPVKRTKYVGLLRNIDFVKQN

SEQ ID NO: 76772 - protein, 306 aa, Flavobacteriales bacterium
  misc_feature (1)..(306): tr|A0A520UJF9|A0A520UJF9_9FLAO Epoxyqueuosine reductase OS=Flavobacteriales bacterium OX=2021391 GN=queG PE=3 SV=1
MKNKIRYTELIKNEAKRLGFISCGISKAEFLENEAPRLEKWLKSNMHGEMKYMENYFDKRLDPTKLVEGAKSIVSLAYNYYPNNFQKEGVPKVSKYAYGKDYHYVIKEKLKQLLSYIKEEVGEVYGRVFVDSAPILEKAWASKSGIGWVGKNSNLITKQVGSYYFLAEIIIDLDLDYDTIETDHCGECRACIDSCPTEAIVEPYVVDGSKCISYFTIELKENIPNEFKGKFNDWIFGCDICQDVCPWNKFSKPHKEPLFNPSSKTMDMSEKQWQEITEETFNRVFKNSPLKRAGYNGLKRNLNYIK

SEQ ID NO: 76773 - protein, 311 aa, Flavobacteriales bacterium
  misc_feature (1)..(311): tr|A0A424NLG0|A0A424NLG0_9FLAO Epoxyqueuosine reductase OS=Flavobacteriales bacterium TMED96 OX=1986730 GN=que G PE=3 SV=1
MLNKNKLSEIIKSEALSLNFLSCGISKAEFLSEEAPKLESWLKSGFNGEMSYMERNFDKRLDPRLLVPGCKSVISLLFNYHTEKKPKKDHEPKISSYAYGKDYHFVVKEKLRELLSRIKNLVGDVNGRVFVDSAPVMDRAWAKKSGLGWIGKNTNLINKKTGSFFFIAELILDIELEYDHPTTDHCGSCTACIDSCPTNALATPYKMDATKCISYATIELKNNIPDSFKDNMRGWIFGCDICQDVCPWNKFSKNHNEPSFEDKKNISNMSKKQWKDLTEEVFDKVFKDSPIKRTGYSGIKRNLNFAFSEEK

SEQ ID NO: 76774 - protein, 308 aa, Flavobacteriia bacterium
  misc_feature (1)..(308): tr|A0A2G6F0I2|A0A2G6F0I2_9BACT Epoxyqueuosine reductase OS=Flavobacteriia bacterium OX=2044941 GN=queG PE=3 SV =1
MRSREHLSLKIKKKARELGFASVGIAKADALESETQRLAQWLDNGYHGEMYYMGNHFEKRLDPRKLVPGAQSIIVLSHNYYPEQSITDGQYKIARYAYGEDYHKVLKDKMKVLLAYIQEEVGEVSARIFSDSAPVMERQWAVRAGLGWQGKNTLLIQKGLGSYFFLAEIIIDLPLIYDSPFKTDHCGTCTRCIDSCPTQAILPGKTLDANKCIAYLTIELKDNIPDAFKNKWKDWIFGCDICQEVCPWNRRSKPHNEPRFSPKQELVDMSKSNWETLNDKQFDSMFSKSAVKRATLPSLKETITFVKK

SEQ ID NO: 76775 - protein, 313 aa, Flavobacteriia bacterium
  misc_feature (1)..(313): tr|A0A1Q3ZI52|A0A1Q3ZI52_9BACT Epoxyqueuosine reductase OS=Flavobacteriia bacterium 40-80 OX=1895763 GN=queG P E=3 SV=1
MSLAEKHTKIVKEIAYELGFSFCGISKAGFLEEEAPRLEKWLNNGRHGKMAYMENHFDKRLDPTKLVEGSKSVVSLLLNYFPSHNQNAESYKISKYAYGQDYHDVIKNKLRLFLQEIRNRIGEVDGRVFVDSAPVMDKVWAQKSGLGWVGKNGNLIRPQNGSFFFIAELIIDLELQPDGPIKDYCGTCSKCMDSCPTGALDIPYVVDGSKCISYLTIELKDELFSAEFNGKMQNWMFGCDICQDVCPWNRFSKPHSIVEFEPKADLLDMKYKDWEEMTQELFSKLFTGSAVKRTKFSGLKRNIEFLKNHETKK

SEQ ID NO: 76776 - protein, 308 aa, Flavobacterium aciduliphilum
  misc_feature (1)..(308): tr|A0A328YMD4|A0A328YMD4_9FLAO Epoxyqueuosine reductase OS=Flavobacterium aciduliphilum OX=1101402 GN=queG PE= 3 SV=1
MREEKHTALIKAEAKRLGFISCGISKAGFLEEEAPRLENFLKQEMQGQMSYLERNFDKRLDPTLLVDDAKSVISLLYNYYPSEVASKESFKISKYAYGEDYHHVIKDKLKEFLDTLQNTIGAINGRAFVDSAPVLEKAWAAKSGLGWVGKNSNLITKKVGSFYFIAEIILDVALQYDSPASDHCGSCTACIDSCPTQAIVSPYVVDGSKCISYFTIELKDNLPKEMKGKFDDWIFGCDVCQDVCPWNSFSLPHQEPRFLPNQDWFSYSKKDWLDITEEVFSKTFKDSAIKRTKFEGLKRNIEFVSGRK

SEQ ID NO: 76777 - protein, 309 aa, Flavobacterium akiainvivens
  misc_feature (1)..(309): tr|A0A0M9VJE5|A0A0M9VJE5_9FLAO Epoxyqueuosine reductase OS=Flavobacterium akiainvivens OX=1202724 GN=queG PE=3 SV=1
MIDNKQKYSALIKAEAKRLGFISCGISRAGFLEEEAPRLEKWLNENRHGKMQYMENHFDKRLDPTLLVDGAKSVISLLLNYYPEEKQVSDTFKISKYAYGQDYHFVIKERLKGLLYSINEHIGEVGGRAFVDSAPVLDKAWAAKSGLGWIGKNSNLLSKQVGSFFFIAELIVDIELEYDHAVTDHCGSCTACIDACPTQAIIQPYVVDGSKCISYFTIELKENIPQEMKGSFADWAFGCDVCQDVCPWNRFSKPHREPLFNPHPDLLGFSKKDWEEITEDTFRAVFKNSAVKRTKFEGLKRNIDFLKAP

SEQ ID NO: 76778 - protein, 306 aa, Flavobacterium album
  misc_feature (1)..(306): tr|A0A2S1QUC5|A0A2S1QUC5_9FLAO Epoxyqueuosine reductase OS=Flavobacterium album OX=2175091 GN=queG PE=3 SV=1
MNNKKPYSDFIKQEAKRLGFLSCGISKAVFLEEEAPRLEKWLNEGRHGQMQYMENYFDKRLDPTLLVDGAKSVISLLLNYYPSETQTEGTYKISKYAYGQDYHFVIKEKLKELLHSIQSTIGEVGGRAFVDSAPVLDKAWAAKSGLGWIGKNSNLLSKQVGSFFFIAELIVDIELEYDHAVTDHCGSCTACLDACPTQAIIQPYVVDGSKCISYFTIELKDNLPAEMKGKFDEWAFGCDICQDVCPWNRFSKPHSEPLFNPHPDLLSMTKKDWEEITEDTFRAVFKNSAVKRTKYEGLKRNIDFLK

SEQ ID NO: 76779 - protein, 308 aa, Flavobacterium alvei
  misc_feature (1)..(308): tr|A0A2S5ACF9|A0A2S5ACF9_9FLAO Epoxyqueuosine reductase OS=Flavobacterium alvei OX=2080416 GN=queG PE=3 SV=1
MFNNKEKHTQFIKSEAKRLGFLSCGISKAGFLEKDAPRLEKWLNKQMNGQMSYMENNFDKRLNPTLLVDDAKSVVSLLLNYYPSEFQNEESYKISKYAYGQDYHFVIKDKLKELLFSIQSNIGEVSGRAFVDSAPVLDKAWAAKSGLGWIGKNGNLLTQKVGSFYFIAELIIDLDLEYDHATTDHCGSCTACIDACPTNAIVAPYVVDGSKCISYFTIELKENIPQEMKGKFDNWAFGCDVCQDVCPWNRFSKAHNEPLFTPNKEMLSMSKKDWTEITENTFNLVFKNSPVKRTKYSGIRRNIDFLKE

SEQ ID NO: 76780 - protein, 307 aa, Flavobacterium anhuiense
  misc_feature (1)..(307): tr|A0A444VU87|A0A444VU87_9FLAO Epoxyqueuosine reductase OS=Flavobacterium anhuiense OX=459526 GN=queG PE=3 SV= 1
MINSKEKYSKFIKEEAKRLGFLSCGISKAGFLEEEAPRLENWLKNNRNGQMAYMENHFDKRLDPTLLVDDGKSVVSLLLNYYPDSFQNDESFKISKYAYGQDYHFVIKDKLKEFLHSIQENIGEVSGRAFVDSAPVLDKVWAAKSGLGWIGKNSNLITQKVGSFYFIAELIIDLELEYDHAVTDHCGTCTACVDACPTQAIVAPYIVDGSKCISYYTIELKENLPEEMKGKFDEWMFGCDTCQDVCPWNRFSKPHSEPLFNPNPDLLSFTKKDWLEITEETFRTVFKNSPIKRTKFEGLKRNINFLK

SEQ ID NO: 76781 - protein, 307 aa, Flavobacterium anhuiense
  misc_feature (1)..(307): tr|A0A1G5AK41|A0A1G5AK41_9FLAO Epoxyqueuosine reductase OS=Flavobacterium anhuiense OX=459526 GN=queG PE=3 SV= 1
MINAKEKYSKFIKEEAKRLGFLSCGISKAGFLEQEAPRLENWLKNNRNGQMAYMENHFDKRLDPTLLVDDGRSVVSLLLNYYPDSFQNDESFKISKYAYGQDYHFVIKDKLKELLHSIQENIGEVSGRAFVDSAPVLDKAWAAKSGLGWIGKNSNLITQKVGSFYFIAELIIDLELEYDHVVTDHCGSCTACIDACPTQAIVAPYIVDGSKCISYYTIELKENLPEEMKGKFDEWMFGCDTCQDVCPWNRFSKPHSEPLFNPNPDLLSFTKKDWLEITEETFRTVFKNSPIKRTKFDGLKRNINFLK

SEQ ID NO: 76782 - protein, 258 aa, Flavobacterium aquaticum
  misc_feature (1)..(258): tr|A0A327YUZ3|A0A327YUZ3_9FLAO Epoxyqueuosine reductase OS=Flavobacterium aquaticum OX=1236486 GN=B0I03_102238 PE=4 SV=1
MSYMENHFDKRLNPTLLVDDAKSVISLLLNYYPSELQNQDSYKISKYAYGQDYHHVIKEKLKELLHFIQTEIGEVSGRAFVDSAPVLDKAWAAKSGLGWVGKNSNLITQKVGSFYFIAELIIDLELEYDKPTTDHCGSCTACLDACPTEAIVAPYVVDGSKCISYFTIELKDNLPQEMKGKFDDWMFGCDVCQDVCPWNRFSKPNNEPLFQTNKEILNFSKSDWEEITVDTFQKVFKNSAVKRTKYEGLLRNINFLKK

SEQ ID NO: 76783 - protein, 307 aa, Flavobacterium aquatile
  misc_feature (1)..(307): tr|A0A095V2X5|A0A095V2X5_9FLAO Epoxyqueuosine reductase OS=Flavobacterium aquatile LMG 4008 = ATCC 11947 OX=14 53498 GN=queG PE=3 SV=1
MINNKEKYTNLIKTEAKRLGFLSCGISKSGFLEEEAPRLENWLNNQMQGQMSYMENNFDKRLNPNLLVDDAKSVVSLLLNYYPSEIQNEESYKISKYAYGQDYHFVIKEKLKELLHTIQIEIGEVSGRAFVDSAPVLDKAWAAKSGLGWIGKNSNLLTQKVGSFYFIAELIIDIELDYDHATTDHCGTCTACIDACPTEAIVAPYIVDGSKCISYFTIELKENLPIEMKGKFDDWAFGCDICQDVCPWNKFSKPHNEPLFNPNAELLSFSKKDWQEITEDTFKKVFKNSAVKRTKLEGFTRNITFLK

SEQ ID NO: 76784 - protein, 307 aa, Flavobacterium aquicola
  misc_feature (1)..(307): tr|A0A3E0ES39|A0A3E0ES39_9FLAO Epoxyqueuosine reductase OS=Flavobacterium aquicola OX=1682742 GN=queG PE=3 SV= 1
MINSKESYSKFIKSEAKRLGFLSCGISKAGFLEKEAPRLENWLNNNYNGQMAYMANHFDKRLDPTLLVDDAKSVVSLLLNYYPSETQNPDSYKISKYAYGQDYHFVIREKLNEFLFSIQQNIGEVSGRAFVDSAPVLDKAWAAKSGLGWIGKNSNLLTQKTGSFYFIAELIIDLDLEYDHAVTDHCGSCTACLDACPTQAIVAPYVVDGSKCISYFTIELKDNIPMEMKGKFDDWAFGCDVCQDVCPWNRFSKPHDEPLLNANSELLSMSKKDWIEITEETFKKVFKDSPLKRSKFNGLQRNILFLE

SEQ ID NO: 76785 - protein, 308 aa, Flavobacterium aquidurense
  misc_feature (1)..(308): tr|A0A1H3SYD8|A0A1H3SYD8_9FLAO Epoxyqueuosine reductase OS=Flavobacterium aquidurense OX=362413 GN=queG PE=3 S V=1
MTINSKETYSKFIKAEAKRLGFLSCGISKAGFLEQEAPRLENWLKNNQNGQMAYMENHFDKRLNPTLLVDDAKSVVSFLLNYYPEQSQNHESFKISKYAYGQDYHFVIKEKLKEFLYSIQENIGDVSGRAFVDSAPVLDKAWAAKSGLGWIGKNSNLLTQKVGSFYFIAELILDLDLEYDHATTDHCGSCTACIDACPTQAIVAPYVVDGSKCISYYTIELKENIPYEMKGKFDEWMFGCDTCQDVCPWNRFSKPHSEPLFNPNPELLSFSKKDWIEITDETFKKVFKNSPIKRTKFDGLKRNINFLK

SEQ ID NO: 76786 - protein, 308 aa, Flavobacterium aquidurense
  misc_feature (1)..(308): tr|A0A0Q0VWU5|A0A0Q0VWU5_9FLAO Epoxyqueuosine reductase OS=Flavobacterium aquidurense OX=362413 GN=queG PE=3 S V=1
MSINAKETYSEFIKSEAKRLGFLSCGISKAGFLEEEAPRLEKWLNNNHHGQMAYMENYFDKRLDPTLLVDDAKSVVSLLLNYYPEETQTQESFKISKYAYGQDYHFVIKEKLKEFLHSIQENIGDVSGRAFVDSAPVLDRAWAAKSGLGWIGKSGNLLTQKVGSFYFIAELILDLDLEYDHATTDHCGSCTACIDACPTQAIVAPHIVDGSKCISYYTIELKENIPYEMKGKFDEWMFGCDTCQDVCPWNRFSKPHSEPLFNPNPELLSFTKKDWIEITEETFRAVFKNSPIKRTKFDGLKRNVKFLE

SEQ ID NO: 76787 - protein, 308 aa, Flavobacterium araucananum
  misc_feature (1)..(308): tr|A0A227NIU9|A0A227NIU9_9FLAO Epoxyqueuosine reductase OS=Flavobacterium araucananum OX=946678 GN=queG PE=3 S V=1
MTINSKETYSQFIKAEAKRLGFLSCGISKAGFLEEEAPRLEKWLNNNHHGQMAYMENYFDKRLDPTLLVDDAKSVISLLLNYYPTEAQSQESFKISKYAYGQDYHFVIKEKLKEFLHSIQENIGDVSGRAFVDSAPVLDRAWAAKSGLGWIGKSGNLLTQKVGSFYFIAELIVDLELEYDHATTDHCGSCTACIDACPTQAIVAPHVVDGSKCISYYTIELKENIPYEMKGKFDEWMFGCDTCQDVCPWNRFSKPHSEPLFNPNPELLSFSKKDWIEITEETFRTVFKNSPIKRTKFDGLKRNITFLK

SEQ ID NO: 76788 - protein, 307 aa, Flavobacterium arcticum
  misc_feature (1)..(307): tr|A0A345H9Y6|A0A345H9Y6_9FLAO Epoxyqueuosine reductase OS=Flavobacterium arcticum OX=1784713 GN=queG PE=3 SV= 1
MNSKKKYTDFIKSEAKRLGFLSCGISKAGFLEKEAPRLEKWLNENKNGQMQYMENHFDKRLDPTLLVDGAKSVISLLLNYYPDATQVDDSYKISKYAYGQDYHFVIKHRLKELLYSMQETIGGVGGRAFVDSAPVLDKAWAAKSGLGWMGKHSNLLSKQVGSFFFIAELIVDIELEYDTATTDHCGTCTACIDACPTQAIVEPYVVDGSKCISYFTIELKDNLPDSMKGKFDDWAFGCDVCQDVCPWNRFSKSHNEPLFNPHPDLLSMTKKDWEEITEDTFRAVFKNSAVKRTKFQGLNRNINFLKE

SEQ ID NO: 76789 - protein, 302 aa, Flavobacterium aurantiibacter
  misc_feature (1)..(302): tr|A0A255ZS86|A0A255ZS86_9FLAO Epoxyqueuosine reductase OS=Flavobacterium aurantiibacter OX=2023067 GN=queG PE =3 SV=1
MDYSALIKTKAAELGFLSCGFSRAEFLEAEAPRLESWLKNNYQGEMSYMNNHFDLRLDPRLLVAGAKTVISLLLNYFPEKTQVSDSFKVSKYAYGTDYHFVIKDKLKELLRFMRAEIGDVNGRAFVDSAPVLDKAWAAKSGLGWIGKNSNLITKSVGSFYFIAELIVDLELPPDTPVTDHCGSCTACLDACPTQAIVAPYVVDGSKCISYFTIELKAHLPISEEVNLDQWAFGCDVCQDVCPWNKFSKPHNEPLFTPNAKLLEMSKKEWLELTEETFNEIFRKSPLERPGYAGLKRNLEKLI

SEQ ID NO: 76790 - protein, 307 aa, Flavobacterium beibuense
  misc_feature (1)..(307): tr|A0A444WC65|A0A444WC65_9FLAO Epoxyqueuosine reductase OS=Flavobacterium beibuense OX=657326 GN=queG PE=3 SV= 1
MDNRKRYSDFIKAEAKRLGFLSCGISKAGFLEEEAPRLEKWLKEGRHGQMQYMENYFDKRLDPTLLVDDAKSVVSLLLNYYPEEKQTEGSYKISKYAYGQDYHFVIKERLKELLHSIQQEIGEVGGRAFVDSAPVLDKAWAAKSGLGWIGKNSNLLSKQVGSFFFIAELIIDLDLEYDGVTTNHCGSCTACIDACPTQAIIEPYVVDGSKCISYFTIELKDNIPSEMRGKFDDWAFGCDVCQDVCPWNRFSKPHREPLFNPHPDLLSLTKKDWDEITEDTFRAVFKNSAVKRTKFEGLKRNINFLKP

SEQ ID NO: 76791 - protein, 308 aa, Flavobacterium beibuense
  misc_feature (1)..(308): tr|A0A0A2LMI6|A0A0A2LMI6_9FLAO Epoxyqueuosine reductase OS=Flavobacterium beibuense F44-8 OX=1406840 GN=queG P E=3 SV=1
MDNRKRYSDFIKAEAKRLGFLSCGISKAGFLEEEAPRLEKWLNDNRHGKMQYMENHFDKRLDPTLLVDGAKSVISLLLNYYPEQTQTEGSYKISKYAYGQDYHFVIKSKLKELLQSIQEIIGEVEGRAFVDSAPVLDKAWAAKSGLGWIGKNSNLLSKQVGSFFFIAELIVDIDLEYDGVTTDHCGSCTACIDACPTQAIIEPYVVDGSKCISYFTIELKENIPADMRGKFDDWAFGCDVCQDVCPWNRFSKPHREPLFNPHPDLLSMTKKDWDEITEETFRAVFKNSAVKRTKFEGLTRNINFLKPL

SEQ ID NO: 76792 - protein, 302 aa, Flavobacterium branchiophilum
  misc_feature (1)..(302): tr|A0A543G419|A0A543G419_9FLAO Epoxyqueuosine reductase OS=Flavobacterium branchiophilum OX=55197 GN=queG PE=3 SV=1
MKSTYTAFIKSEALKLGFFSVGISKAAFLEEEAPRLELWLEKNHQGQMSYMERHFDKRLDPTILVPDAKSVISLLFNYYPSEKQIENTYKISKYAYGQDYHDVIRDKLKILMQAIQDQIGQVSGRVFVDSAPVLDKAWAKKSGLGWIGKNSNLITKKAGSFYFIAEIILDLELDYDTITTDHCGTCTACIDACPTQAIVAPYQVDGSKCISYFTIELKEQLPNELKQTFDDWVFGCDVCQDVCPWNRFSQPHQEPLFSAKTEIINNTKADWEFLSEENFNEIFKKSPIKRINYHKFFNNLLK

SEQ ID NO: 76793 - protein, 302 aa, Flavobacterium branchiophilum
  misc_feature (1)..(302): tr|G2Z4J9|G2Z4J9_FLABF Epoxyqueuosine reductase OS=Flav obacterium branchiophilum (strain FL-15) OX=1034807 GN= queG PE=3 SV=1
MKSTYTAFIKSEALKLGFFSVGISKAAFLEEEAPRLELWLEKNHQGQMSYMERHFDKRLDPTILVPDAKSVISLLFNYYPSEKQIENTYKISKYAYGQDYHDVIRDKLKILMQAIQDQIGQVSGRVFVDSAPVLDKAWAKKSGLGWIGKNSNLITKKAGSFFFIAEIILDLELDYDTITTDHCGTCTACIDACPTQAIVAPYQVDGSKCISYFTIELKEQLPNELKQTFDDWVFGCDVCQDVCPWNRFSKPHQEPLFSAKTEIINNTKADWEFLSDESFNEIFKNSPIKRINYHKFFNNLLK

SEQ ID NO: 76794 - protein, 306 aa, Flavobacterium caeni
  misc_feature (1)..(306): tr|A0A1G5IBL1|A0A1G5IBL1_9FLAO Epoxyqueuosine reductase OS=Flavobacterium caeni OX=490189 GN=queG PE=3 SV=1
MTRKENTELIKSHAQRLGFISCGISPAGFLEQEAPRLEAWLNNNHHGQMAYMANHFDKRLDPTKLVDGAKSVISLLLNYYPSQTQNPDAPKISKYAYGQDYHFVIKEKLKELLYVIEQEIGQVHGRAFVDSAPVLDKAWAAKSGLGWIGKNANLLSKQVGSFFFIAELIVDLELEYDHATTDHCGSCTACIDACPTEAIVAPYVVDGSKCISYFTIELKDNLPESMKGQFADWAFGCDVCQDVCPWNRFSKPHNEPLFNPNPELLTMSRKDWEEITEETFRAVFKDSAVKRTKFSGLKRNIDFLKG

SEQ ID NO: 76795 - protein, 307 aa, Flavobacterium cauense
  misc_feature (1)..(307): tr|A0A562M4M0|A0A562M4M0_9FLAO Epoxyqueuosine reductase OS=Flavobacterium cauense R2A-7 OX=1341154 GN=queG PE= 3 SV=1
MNGSKSKYTTIIKSEAQRLGFLSCGISKAGFLEEEAPRLEAWLKNNYQGEMSFMESYFDKRLDPTLLVDDSKSVISLLLNYYPPELQTEESYKISKYAYGKDYHNVIKKKLKKLLNHIKAEIGDVSGRAFVDFAPVMDKAWAAKSGLGWIGKHSNLLTQKVGSFYFIAELIVDLELEYDHATTDHCGSCTACIDACPTEAIVAPYVVDGSKCISYYTIELQDNLPTEMKGKFNDWIFGCDVCQDVCPWNRFSKPHNEPSFQPYPELLSYTKKDWEEITQETFEKVFPNSPLKRAKLSGLQRNIDFLK

SEQ ID NO: 76796 - protein, 298 aa, Flavobacterium cheniae
  misc_feature (1)..(298): tr|A0A562KM59|A0A562KM59_9FLAO Epoxyqueuosine reductase OS=Flavobacterium cheniae OX=295428 GN=queG PE=3 SV=1
MIKAEAHRLGFLSCGISKAGFLEEEAPRLENWLNNQMNGQMSYMENHFDKRLNPTLLVDDAKSVISLLLNYYPSELQNQDSYKISKYAYGQDYHHVIKEKLKELLHFIQTEIGEVSGRAFVDSAPVLDKAWAAKSGLGWIGKNSNLITQKVGSFYFIAELIIDLELDYDTPTTDHCGSCTACLDACPTEAIVAPYVVDGSKCISYFTIELKDNLPQEMKGKFDDWMFGCDVCQDVCPWNRFSKPHNEPLFQANSDILNFSKSDWEEITVDTFQKVFKNSAVKRTKYEGLLRNINFLKK

SEQ ID NO: 76797 - protein, 308 aa, Flavobacterium chilense
  misc_feature (1)..(308): tr|A0A1M7LZ60|A0A1M7LZ60_9FLAO Epoxyqueuosine reductase OS=Flavobacterium chilense OX=946677 GN=queG PE=3 SV=1
MTINAKETYSKFIKSEAKRLGFLSCGISKAGFLEEEAPRLEKWLNNNHHGQMAYMENYFDKRLDPTLLVDDAKSVVSLLLNYYPTEVQTEESFKISKYAYGQDYHFVIKEKLKEFLHAIQENIGDVSGRAFVDSAPVLDRAWAAKSGLGWIGKSGNLITQKVGSFYFIAELILDLELEYDHAVTDHCGSCTACIDACPTQAIVSPHVVDGSKCISYYTIELKENIPYEMKGKFDEWMFGCDTCQDVCPWNRFSKPHSEPLFNPNSELLSFSKKDWIEITEETFRAVFKNSPIKRTKFEGLKRNIKFLK

SEQ ID NO: 76798 - protein, 307 aa, Flavobacterium circumlabens
  misc_feature (1)..(307): tr|A0A4Y7UGT3|A0A4Y7UGT3_9FLAO Epoxyqueuosine reductase OS=Flavobacterium circumlabens OX=2133765 GN=queG PE=3 SV=1
MINSKETYSKFIKAEAKRLGFLSCGISKAGFLEQEAPRLENWLKNNRNGQMAYMENHFDKRLDPTLLVDDAKSVVSLLLNYFPGETQNQESFKISKYAYGQDYHTVIKDKLKEFLFSIQENIGEVSGRAFVDSAPVLDKAWAAKSGLGWIGKNSNLLTQKVGSFYFIAELILDLDLEYDFATTDHCGSCTACIDACPTQAIVAPYVVDGSKCISYYTIELKENIPTEMKGKFDEWAFGCDTCQDVCPWNRFSKPHAEPLFNPNPELLSFSKKDWIEITEETFRAVFKNSPIKRTKFDGLKRNIKFLQ

SEQ ID NO: 76799 - protein, 308 aa, Flavobacterium columnare
  misc_feature (1)..(308): tr|A0A2T4HF88|A0A2T4HF88_9FLAO Epoxyqueuosine reductase OS=Flavobacterium columnare OX=996 GN=queG PE=3 SV=1
MITNKEKYTQLIKSESLRLGFLSCGISKADFLETEAPRLENWLKKGMNGQMGYMNNHFDKRLDPRLLVEGAKSVISLILNYYPSQTQTQDSYKISKYAYGQDYHFIIKDKLKDLLHFIRTEIGEVDGRVFVDSAPVLDKAWAAKSGLGWIGKNSNLITKQVGSFYFIAEIILDLDLEYDLPTTDHCGKCTACIDACPTQAIIQPYVVDGSKCISYFTIELKDQIPQEMKGKFNDWMFGCDVCQDVCPWNRFAKPNTIDSFNPHPDLIKFTKEDWKEITEDVFKKIFKNSAVKRTKLEGLKRNILFLED

SEQ ID NO: 76800 - protein, 308 aa, Flavobacterium columnare; identical to SEQ ID NO: 76799
  misc_feature (1)..(308): tr|G8X5M6|G8X5M6_FLACA Epoxyqueuosine reductase OS=Flav obacterium columnare (strain ATCC 49512 / CIP 103533 / TG 44/87) OX=1041826 GN=queG PE=3 SV=1

SEQ ID NO: 76801 - protein, 313 aa, Flavobacterium commune
  misc_feature (1)..(313): tr|A0A1D9PAB9|A0A1D9PAB9_9FLAO Epoxyqueuosine reductase OS=Flavobacterium commune OX=1306519 GN=queG PE=3 SV=1
MASSNSQLQASRYTSFIKSEAKRLGFLSCGISKAGFLEEEAPRLENWLNKNLNGKMSYMENNFDKRLNPTLLVDDAKSVVSLLLNYYPEKEQVQDSYKISKYAYGKDYHFVIKEKLKELLFSIQENIGEVSGRVFVDSAPVLDKAWAAKSGLGWIGKNSNLLTQKVGSFYFIAELIIDLDLEYDHPTTDHCGSCTACIDACPTQAIIAPYVVDGSKCISYFTIELKENIPLEMKGYFDDWVFGCDTCQDVCPWNRFSKSHNEPLFNPNPALLSMTKKDWEEMTEETFKIVFKESAVKRTKFQGLSRNVNFLKK

SEQ ID NO: 76802 - protein, 307 aa, Flavobacterium crassostreae
  misc_feature (1)..(307): tr|A0A1B9DXD2|A0A1B9DXD2_9FLAO Epoxyqueuosine reductase OS=Flavobacterium crassostreae OX=1763534 GN=queG PE=3 SV=1
MIATKQTYTQHIKSEAKRLGFLSCGISKAGFLEQEAPRLEQWLQKNQNGQMAYMENHFDKRLDPTLLVEGAKSVVSLLLNYYPSEIQNSDTYKISKYAYGQDYHQVIKDKLKELLFSIQENIGNVSGRAFVDSAPVLDKAWAAKSGLGWIGKNSNLITQKVGSFYFIAELILDLELVYDTPTTDHCGSCTACIDACPTEAIVSAHVVDGSKCISYYTIELKENIPPEMKGKLNDWAFGCDICQDVCPWNRFSKPHQEPLFNAKPEILSLSKKDWEEITEETFRVVFKDSPIKRTKFKGLQRNIDFLK

SEQ ID NO: 76803 - protein, 310 aa, Flavobacterium croceum
  misc_feature (1)..(310): tr|A0A2S4N5S7|A0A2S4N5S7_9FLAO Epoxyqueuosine reductase OS=Flavobacterium croceum DSM 17960 OX=1121886 GN=queG PE=3 SV=1
MYNLAEKHTRLIKSEAKRLGFLACGISKAEFLEEEAPRLEHWLNQNYHGEMAYMENHFDKRLNPKLLVDGAQSVISLLLNYYPENKQRDSSYKISKYAYGEDYHFVLKDKLKSLLAYIQEQIGEVHGRAFVDSAPVLDKAWAAKSGLGWVGKNSNLITRKTGSFYFIAELIVDLKLEYDNPTTNHCGSCTACIDACPTEAIVSPYVVNGSQCISYYTIELKNNLPEDMQVRFQDWIFGCDICQDVCPWNKFSKPHQEEKFLPHENLLHFTKKDWEEITQETFNEVFKNSAVKRTKFQGFVRNVKFLKDKF

SEQ ID NO: 76804 - protein, 307 aa, Flavobacterium crocinum
  misc_feature (1)..(307): tr|A0A2S1YJP9|A0A2S1YJP9_9FLAO Epoxyqueuosine reductase OS=Flavobacterium crocinum OX=2183896 GN=queG PE=3 SV= 1
MINSKEKYSKFIKAEAKRLGFLSCGISKAGFLEQEAPRLEKWLNNNHNGQMAYMANHFDKRLDPTLLVEDGKSVVSLLLNYYPHSVQNDESFKISKYAYGQDYHFIIKDKLKEFLHSIQENIGEVSGRAFVDSAPVLDKAWAAKSGLGWIGKNSNLITQKVGSFYFIAELIIDLDLEYDYAVTDHCGTCTACIDACPTQAIVAPYVVDGSKCISYYTIELKENIPQEMKGKFDDWMFGCDTCQDVCPWNRFSKSHSEPLFNPNPDLLSFTKKDWIEITEETFKLVFKNSPIKRTKFEGLKRNIKFLG

SEQ ID NO: 76805 - protein, 312 aa, Flavobacterium cucumis
  misc_feature (1)..(312): tr|A0A1M7ZT71|A0A1M7ZT71_9FLAO Epoxyqueuosine reductase OS=Flavobacterium cucumis OX=416016 GN=queG PE=3 SV=1
MSSNFQLPTSNYSKIIKAESKRLGFLSCGISKAAFLEEEAPRLENWLNNNMNGQMSYMENHFDKRLNPTLLVDDAKSVISLLLNYYPSELQNDDSYKISKYAYGQDYHHVIKEKLKELLHFIQNEIGEVSGRAFVDSAPVLDKAWAAKSGLGWVGKNSNLITQKVGSFYFIAELIIDLELEYDSPTTDHCGSCTACLDACPTEAIVAPYVVDGSKCISYFTIELKDNLPQEMKGKFDDWMFGCDVCQDVCPWNRFSKPHNEPLFQTNSEILNFSKSDWEEITVDTFQKVFKNSAVKRTKYEGLLRNINFLKK

SEQ ID NO: 76806 - protein, 309 aa, Flavobacterium cupreum
  misc_feature (1)..(309): tr|A0A434A969|A0A434A969_9FLAO Epoxyqueuosine reductase OS=Flavobacterium cupreum OX=2133766 GN=queG PE=3 SV=1
MINSKETYSKFIKEEAKRLGFLSCGISKAGFLETEAPRLENWLKNNQNGQMAYMENHFDKRLDPTLLVDDAKSVVSLLLNYYPAETQNQESFKISKYAYGQDYHTVIKEKLKEFLFSIQENIGEVSGRAFVDSAPVLDKAWAAKSGLGWIGKNSNLLTQRVGSFYFIAELILDLDLEYDHATTDHCGSCTACIDACPTQAIVAPYVVDGSKCISYYTIELKENIPTEMKGKFDEWAFGCDTCQDVCPWNRFSKPHAEPLFNPNPELLSFSKKDWIEITEETFRVVFKNSPIKRTKFDGLKRNIKFLQLD

SEQ ID NO: 76807 - protein, 308 aa, Flavobacterium cutihirudinis
  misc_feature (1)..(308): tr|A0A3D9FXM0|A0A3D9FXM0_9FLAO Epoxyqueuosine reductase OS=Flavobacterium cutihirudinis OX=1265740 GN=queG PE= 3 SV=1
MSINAKETYSKFIKEEAKRLGFLSCGISKAGFLEDEAPRLEKWLNNNHNGQMAYMENHFDKRLNPTLLVDDAKSVVSLLLNYFPSEFQNDNSFKISKYAYGQDYHFVIKEKLKELLHSIEENIGAVSGRAFVDSAPILDKAWAAKSGLGWIGKNSNLITQKVGSFYFIAELILDLELEYDHAVTDHCGSCTACIDACPTQAILAPYIVDGSKCISYYTIELKENIPHEMKGKFDEWMFGCDTCQDVCPWNRFSKPHAEPLFNPNPDLLSFSKQDWMDITEETFRKVFKNSPIKRTKFEGLKRNINFLE

SEQ ID NO: 76808 - protein, 308 aa, Flavobacterium cyanobacteriorum
  misc_feature (1)..(308): tr|A0A255YXJ7|A0A255YXJ7_9FLAO Epoxyqueuosine reductase OS=Flavobacterium cyanobacteriorum OX=2022802 GN=queG PE=3 SV=1
MLNDRQEYTGYIKSEAKRLGFLSCGIARAGFLEEEAPRLEKWLNENRHGQMQYMENHFDKRLDPTKLVDGAKSVISLLLNYYPEQTQQEGTYKISKYAYGQDYHFVIKDKLKELLHSIRSTIGEVGGRAFVDSAPVLDKAWAARSGLGWIGKNSNLLSKQAGSFFFIAELIVDLELEYDSPTTDHCGSCTACIDACPTQAIIAPYEVDGSKCISYFTIELKDNIPAEMKGRFDDWAFGCDVCQDVCPWNRFSKPHREPLFNPHPDLLSLTKKDWEEITEETFRAVFKNSAVKRAKFDGLKRNIAFLKQ

SEQ ID NO: 76809 - protein, 255 aa, Flavobacterium daejeonense
  misc_feature (1)..(255): tr|A0A0N8VM13|A0A0N8VM13_9FLAO Epoxyqueuosine reductase OS=Flavobacterium daejeonense OX=350893 GN=RCH33_2389 PE=4 SV=1
MENHFDKRLNPTLLVDDAKSVVSLLLNYYPEKEQNPDSYKISKYAYGKDYHFVIKDKLKELLFSIQENIGEVSGRVFVDSAPVMDKAWAAKSGLGWIGKNSNLLTQKVGSFYFIAELIIDLDLEYDHAVTNHCGSCTACIDACPTQAIVAPYVVDGSKCISYFTIELKENIPQEMKGQFDDWAFGCDTCQDVCPWNRFSKSHNEPLFNPNPEILSMTKKDWEEMTEETFRVVFKDSAVKRTKFQGLQRNISFLKK

SEQ ID NO: 76810 - protein, 308 aa, Flavobacterium defluvii
  misc_feature (1)..(308): tr|A0A1M5EWV0|A0A1M5EWV0_9FLAO Epoxyqueuosine reductase OS=Flavobacterium defluvii OX=370979 GN=queG PE=3 SV=1
MSINSKEIYSKFIKEEAKRLGFISCGISKAGFLEQEAPRLEKWLNNNYNGQMAYMENHFDKRLDPTLLVDDAKSVVSLLLNYYPSESQNSESFKISKYAYGQDYHFVIKEKLKELLHSIQENIGDVSGRAFVDSAPVLDKAWAAKSGLGWIGKNSNLITQKVGSFYFIAELILDLDLEYDHAVTDHCGSCTACIDACPTQAIVAPYIVDGSKCISYYTIELKENIPNEMKGKFDEWMFGCDTCQDVCPWNRFSKPHSEPLFDPNPDLISFSKKDWTEITEETFQKVFKNSPIKRTKFEGLKRNIKFLK

SEQ ID NO: 76811 - protein, 286 aa, Flavobacterium degerlachei
  misc_feature (1)..(286): tr|A0A1H3EN81|A0A1H3EN81_9FLAO Epoxyqueuosine reductase OS=Flavobacterium degerlachei OX=229203 GN=SAMN0544433 8_11577 PE=4 SV=1
MACGISKAGFLEQDAPRLEDWLKNNSHGQMSYMENNFDKRLNPTLLVDDAKSVVSLLLNYYPEQCQNLDSYKISKYAYGQDYHSVIKDKLKEFLFSIQSTIGEVSGRAFVDSAPVLDKAWAAKSGLGWIGKNSNLLTQKVGSFYFIAELIIDLELDYDHATTDHCGSCTACLDACPTEAIVAPYVVDGSKCISYFTIELKENIPQEMKGKFDDWAFGCDICQDVCPWNKFSKPNNEPLFNPNPDLLAMSKKDWEEITEETFKAVFKNSPLKRSKFLGIKRNIDFLK

SEQ ID NO: 76812 - protein, 307 aa, Flavobacterium enshiense
  misc_feature (1)..(307): tr|A0A0A2MY76|A0A0A2MY76_9FLAO Epoxyqueuosine reductase OS=Flavobacterium enshiense DK69 OX=1107311 GN=queG PE =3 SV=1
MINQQSKYTQMIKSEAARLGFLSCGISKAGFLEEEAPRLERWLKNGMQGEMHYMENHFDKRLDPTLLVDDAKSVISLLLNYYPSENQNPESYKISKYAYGEDYHFVIKDKLKDLLQFIQTEIGEVSGRAFVDSAPVLDKAWAAKSGLGWIGKNANLLSKQVGSFFFIAELIVDLDLDYDTITTDHCGKCTACIDACPTEAIVAPYVVDGSKCISYFTIELKDNLPESMKGKFDEWMFGCDVCQDVCPWNRFSKPHNEPLFNPNPELLSFSKRDWEEITEETFRRVFKNSAVKRTKLSGLKRNIDFLK

SEQ ID NO: 76813 - protein, 306 aa, Flavobacterium faecale
  misc_feature (1)..(306): tr|A0A2S1L9F0|A0A2S1L9F0_9FLAO Epoxyqueuosine reductase OS=Flavobacterium faecale OX=1355330 GN=queG PE=3 SV=1
MISKTENTQFIKFEAKRLGFLSCGISKAGFLETEAPRLENWLNKNHNGQMAYMENHFDKRLDPTLLVEGSKTVVSLLLNYFPEKKQVEDSYKISKYAYGTDYHAVVKDKLNELLFSIKTAVGDVSGRAFVDSAPVLDKAWAAKSGLGWIGKNSNLITQKVGSFYFIAELIIDLELDYDHAVTDHCGSCTACLDACPTQAIIAPYVVDGSKCISYFTIELKENIPDSMKGQFDDWAFGCDICQDVCPWNRFSKPHKEPLFDPNSHLLSMSKKDWEEITEDTFKHVFKDSPLKRSKYSGITRNIKFLQ

SEQ ID NO: 76814 - protein, 286 aa, Flavobacterium flevense
  misc_feature (1)..(286): tr|A0A4Y4AXQ2|A0A4Y4AXQ2_9FLAO Epoxyqueuosine reductase OS=Flavobacterium flevense OX=983 GN=queG PE=4 SV=1
MSCGISKAGFLEEEAPRLENWLNKNLNGKMSYMENHFDKRLDPTLLVDDAKSVVSLLLNYYPEQEQIQDSYKISKYAYGQDYHFVIKEKLKELLFSIQESIGEVSGRVFVDSAPVLDKAWAAKSGLGWIGKNSNLLTQKVGSFYFIAELIIDLELEYDYATTDHCGNCTACIDACPTQAIIEPYVVDGSKCISYFTIELKENIPAEMKGYFDDWVFGCDTCQDVCPWNRFSKSHNEPLFNPNPDLLSMTKKDLEEMTEETFKIVFKDSAVKRTKFQGLKRNIDFLK

SEQ ID NO: 76815 - protein, 307 aa, Flavobacterium fluvii
  misc_feature (1)..(307): tr|A0A1M5DXI1|A0A1M5DXI1_9FLAO Epoxyqueuosine reductase OS=Flavobacterium fluvii OX=468056 GN=queG PE=3 SV=1
MFNNKEKYSQFIKSEAKRLGFLSCGISKAGFLEEEAPRLEHWLNNQMNGQMSYMENNFDKRLNPTLLVDDAKSVVSLLLNYYPSEFQNEDSYKISKYAYGQDYHFVIKEKLKELLFSIQSTIGEVSGRAFVDSAPVLDKAWAAKSGLGWIGKNSNLLTQKVGSFYFIAELIIDLELEYDHAVTDHCGSCTACIDSCPTQAIVAPHVVDGSKCISYFTIELKENIPPEMKGKFDDWAFGCDVCQDVCPWNRFSKAHNEPFFNPNPELLSMSKKDWKELTEETFKTVFKNSPLKRAKFDGLKRNVTFLK

SEQ ID NO: 76816 - protein, 307 aa, Flavobacterium fontis
  misc_feature (1)..(307): tr|A0A1M5BS57|A0A1M5BS57_9FLAO Epoxyqueuosine reductase OS=Flavobacterium fontis OX=1124188 GN=queG PE=3 SV=1
MNNQKQHYSQFIKAEAKRLGFLSCGIAKAGFLEAEAPRLERWLHQGFHGEMQYMENHFDKRLDPRLLVDDAKSVISVLLNYFPAETQQEDTYKISKYAYGKDYHYVIKDKLKALLHSIQTEIGAVNGRAFVDSAPVLDKAWAAKSGLGWIGKNANLITQKTGSYYFVAELIVDLELDYDPPTTDHCGTCTACIDACPTQAIVAPYVVDGSKCISYFTIELKNQLPETMKGAWNDWVFGCDVCQEVCPWNRFATPHQEPQFNPHPDLLSFSKKDWEEITEDIFKEVFRDSAVKRTQYQGLKRNIDFLK

SEQ ID NO: 76817 - protein, 308 aa, Flavobacterium frigidimaris
  misc_feature (1)..(308): tr|A0A1M5GRN9|A0A1M5GRN9_FLAFR Epoxyqueuosine reductase OS=Flavobacterium frigidimaris OX=262320 GN=queG PE=3 SV=1
MSINAKETYSKFIKSEAKRLGFLSCGISKAGFLEEEAPRLEKWLNNNHHGQMAYMENYFDKRLDPTLLVDDAKSVVSLLLNYYPEETQSQDSFKISKYAYGQDYHFVIKERLKEFLHAIQENIGDVSGRAFVDSAPVLDRAWAAKSGLGWIGKSGNLLTQKVGSFYFIAELILDLELEYDHATTDHCGSCTACIDACPTQAIVAPHIVDGSKCISYYTIELKENIPYEMKGKFDEWMFGCDTCQDVCPWNRFSKPHSEPLFNPNPELLSFSKKDWIEITEETFRAIFKNSPIKRTKFDGLKRNVKFLE

SEQ ID NO: 76818 - protein, 254 aa, Flavobacterium frigoris
  misc_feature (1)..(254): tr|A0A1H9G6I3|A0A1H9G6I3_FLAFI Epoxyqueuosine reductase OS=Flavobacterium frigoris OX=229204 GN=SAMN05444355_1 02402 PE=4 SV=1
MENHFDKRLDPTLLVEDSKSVISLLLNYYPENTQLEDSYKISKYAYGTDYHLVIKDKLKELLLSIQETIGEVSGRAFVDSAPVLDKAWAAKSGLGWIGKNSNLLTQKVGSFYFIAELIIDLDLDYDNATTDHCGTCTACIDSCPTEAIVAPYIVDGSKCISYFTIELKEHIPQEMKGKFDDWAFGCDICQDVCPWNKFSKPHNEPLFNANPELLSMSKKDWEEITEDTFKVVFKDSPLKRTKFSGLKRNIDFLK

SEQ ID NO: 76819 - protein, 255 aa, Flavobacterium frigoris
  misc_feature (1)..(255): tr|H7FQ37|H7FQ37_FLAFP Iron-sulfur cluster-binding prot ein OS=Flavobacterium frigoris (strain PS1) OX=1086011 GN=HJ01_01297 PE=4 SV=1
MENNFDKRLNPTLLVDDAKSVVSLLLNYYPEQFQNPDSYKVSKYAYGQDYHSVIKDKLKELLFSIQSTIGEVSGRAFVDSAPILDKAWAAKSGLGWIGKNSNLLTQKVGSFYFIAELIIDLELDYDHATTDHCGSCTACLDACPTEAIVAPYVVDGSKCISYFTIELKENVPLEMKGKFDEWAFGCDICQDVCPWNKFSKAHNEPLFSPNADFLSMSKKDWEEITEETFKAVFKNSPLKRTKFQGLTRNIEFLKQ

SEQ ID NO: 76820 - protein, 307 aa, Flavobacterium fryxellicola
  misc_feature (1)..(307): tr|A0A167X971|A0A167X971_9FLAO Epoxyqueuosine reductase OS=Flavobacterium fryxellicola OX=249352 GN=queG PE=3 SV=1
MINSKTTHTQFIKSEAKRLGFLSCGIAKAGFLEEEAPRLEDWLNRNRNGQMSYMENNFDKRLNPTLLVDDAKSVVSLLLNYYPEQLQNPDSYKISKYAYGEDYHFVIKEKLKEFLFSIQSTIGEVAGRAFVDSAPVLDKAWAAKSGLGWIGKNSNLLTQKVGSFYFIAELIIDLDLDYDTPTTDHCGTCTACIDACPTEAIVAPYVVDGSKCISYFTIELKENIPQDMKGKFEEWAFGCDICQDVCPWNKFSKAHNEPLFSPNPELLSMSKKDWIEITEETFKAVFKNSPLKRAKFQGIKRNIDFLK

SEQ ID NO: 76821 - protein, 257 aa, Flavobacterium gillisiae
  misc_feature (1)..(257): tr|A0A1H3WN02|A0A1H3WN02_9FLAO Epoxyqueuosine reductase OS=Flavobacterium gillisiae OX=150146 GN=SAMN05443667_ 101126 PE=4 SV=1
MSYMENNFDKRLNPTLLVDGAKSVISLLLNYYPESTQVVDSYKISKYAYGTDYHFVIKDKLKELLFSIQDKIGEVYGRAFVDSAPVLDKAWAAKSGLGWIGKNSNLLTQKVGSFYFIAELIIDLDLEYDNATTDHCGTCTACIDSCPTQAIVAPYIVDGSKCISYFTIELKENIPQEMKGKFDDWAFGCDICQDVCPWNKFSKPHSEPLFNANPELLSMSKKDWEEITEDTFRAVFKDSSLKRTKFSGLNRNIAFLK

SEQ ID NO: 76822 - protein, 315 aa, Flavobacterium gilvum
  misc_feature (1)..(315): tr|A0A085ENT7|A0A085ENT7_9FLAO Epoxyqueuosine reductase OS=Flavobacterium gilvum OX=1492737 GN=queG PE=3 SV=1
MFSLKKEVINNKSKYTQFIKSEAKRLGFLSCGISKAGFLEQEAPRLENWLNKNYNGQMSYMENHFDKRLDPTLLVDDAKSVVSLLLNYYPSEFQDSDSYKISKYAYGQDYHFVIKDKLKELLFSIESSIGTVSGRAFVDSAPVLDKAWAAKSGLGWIGKNSNLLTQKVGSFYFIAELIIDLDLEYDHAVTDHCGTCTACIDACPTEAIVAPYVVDGSKCISYFTIELKDNIPAEMKGKFDNWAFGCDTCQDVCPWNRFSKPHSEPLFNPNPELISMSKKDWLEITEETFKSVFKNSPLKRSKFQGLKRNITFLDK

SEQ ID NO: 76823 - protein, 257 aa, Flavobacterium glaciei
  misc_feature (1)..(257): tr|A0A562PM86|A0A562PM86_9FLAO Epoxyqueuosine reductase OS=Flavobacterium glaciei OX=386300 GN=IQ02_02256 PE=4 SV=1
MSYMENHFDKRLNPTLLVDDAKSVVSLLLNYFPEELQNQDTYKISKYAYGQDYHFIIKEKLKEFLFSIQSTIGDVSGRAFVDSAPVLDKAWAAKSGLGWIGKNSNLLTQKVGSFYFIAELIIDLELDYDNPTTDHCGTCTACLDACPTEAIVAPYVVDGSKCISYFTIELKENIPHEMKGKFDDWAFGCDVCQDVCPWNKFSKPHNEPLFDANPQLMSMSKKDWIEITEETFKSVFKNSPLKRAKFHGIKRNLDFLK

SEQ ID NO: 76824 - protein, 308 aa, Flavobacterium glycines
  misc_feature (1)..(308): tr|A0A511CHZ5|A0A511CHZ5_9FLAO Epoxyqueuosine reductase OS=Flavobacterium glycines OX=551990 GN=queG PE=3 SV=1
MIIDLREKYSQFIKSEARRLGFLSCGISKAGFLEEEAPRLENWLNNNRNGQMSYMENHFDKRLNPTLLVDDAKSVVSLLLNYYPEKEQIQDSYKISKYAYGQDYHFVIKEKLKELLFAIQENIGEVSGRVFVDSAPVLDKAWAAKSGLGWIGKNSNLLTQKVGSFYFIAELIIDLDLEYDSRTTDHCGSCTACIDACPTQAIVAPYIVDGSKCISYFTIELKENIPTEMKGHFDDWVFGCDTCQDVCPWNRFSKSHNEPLFNPNPALLSMTKKDWEEMTEETFKIVFKDSAVKRTKFKGLQRNIGFLK

SEQ ID NO: 76825 - protein, 307 aa, Flavobacterium glycines
  misc_feature (1)..(307): tr|A0A1B9DSN7|A0A1B9DSN7_9FLAO Epoxyqueuosine reductase OS=Flavobacterium glycines OX=551990 GN=queG PE=3 SV=1
MIDLREKYSQFIKSEARRLGFLSCGISKAGFLEEEAPRLENWLNNNRNGQMSYMENHFDKRLNPTLLVDDAKSVVSLLLNYYPEKEQIQDSYKISKYAYGQDYHFVIKEKLKELLFAIQENIGEVSGRVFVDSAPVLDKAWAAKSGLGWIGKNSNLLTQKVGSFYFIAELIIDLDLEYDSRTTDHCGSCTACIDACPTQAIVAPYIVDGSKCISYFTIELKENIPTEMKGHFDDWVFGCDTCQDVCPWNRFSKSHNEPLFNPNPALLSMTKKDWEEMTEETFKIVFKDSAVKRTKFKGLQRNIGFLK

SEQ ID NO: 76826 - protein, 257 aa, Flavobacterium granuli
  misc_feature (1)..(257): tr|A0A1M5MP05|A0A1M5MP05_9FLAO Epoxyqueuosine reductase OS=Flavobacterium granuli OX=280093 GN=SAMN05443373_10 495 PE=4 SV=1
MTYMESHFDKRLDPTKLVDGARSVISLLLNYYPQEIQNPESYKISKYAYGQDYHFVIKDKLKELLFSIQESIGEVSGRAFVDSAPVLDKAWAAKSGLGWIGKNSNLLTQKVGSFYFIAELIVDLDLEYDNATTDHCGTCTACIDACPTQAIVAPYVVDGSKCISYFTIELKENIPLEMKGKFDDWAFGCDVCQDVCPWNRFSKAHKEPLFDPKPELLSMSKKDWEEITEETFKTVFKNSPLKRTKFQGIKRNIDFLK

SEQ ID NO: 76827 - protein, 308 aa, Flavobacterium haoranii
  misc_feature (1)..(308): tr|A0A1M6FSK8|A0A1M6FSK8_9FLAO Epoxyqueuosine reductase OS=Flavobacterium haoranii OX=683124 GN=queG PE=3 SV=1
MINNKEKYAHLIKAESKRLGFLSCGISKADFLEVEAPRLENWLNNNFNGQMSYMENHFDKRLDPRLLVDGAKSVVSLLLNYYPNEIQNVDSYKISKYAYGQDYHHVIKDKLKDLLQFIQNEIGEVNGRVFVDSAPVLDKAWAAKSGLGWIGKNSNLLTQKVGSFYFIAELILDIELDYDLPTTDHCGTCTACIDACPTQAIVSPYVVDGSKCISYFTIELKDNIPNEFKNKFDDWMFGCDVCQDVCPWNRFSKPNSEPFFTPNPELLNFNKKDWEEITHDVFQKIFQKSAVKRTKFEGLKRNILFLKE

SEQ ID NO: 76828 - protein, 308 aa, Flavobacterium hercynium
  misc_feature (1)..(308): tr|A0A226HQ81|A0A226HQ81_9FLAO Epoxyqueuosine reductase OS=Flavobacterium hercynium OX=387094 GN=queG PE=3 SV= 1
MSINSKETYSKFIKEEAKRLGFLSCGISKAGFLEEEAPRLEKWLNKNHHGQMAYMENYFDKRLDPTLLVDDAKSVVSLLLNYYPEETQSQESFKISKYAYGQDYHFVIKERLKEFLHSIQENIGDVSGRAFVDSAPVLDRAWAAKSGLGWIGKSGNLITQKVGSFYFIAELILDLDLEYDHATTDHCGSCTACIDECPTQAIVAPHVVDGSKCISYYTIELKENIPYEMKGKFDEWMFGCDTCQDVCPWNRFSKSHSEPLFNPNPELLSFTKKDWMEITEETFRVVFKNSPIKRTKFEGLKRNLKFLE

SEQ ID NO: 76829 - protein, 308 aa, Flavobacterium hibernum
  misc_feature (1)..(308): tr|A0A0D0EX79|A0A0D0EX79_9FLAO Epoxyqueuosine reductase OS=Flavobacterium hibernum OX=37752 GN=queG PE=3 SV=1
MSINAKETYSEFIKSEAKRLGFLSCGISKAGFLEEEAPRLEKWLNNNHHGQMAYMENYFDKRLDPTLLVDDAKSVVSLLLNYYPEETQSQDSFKISKYAYGQDYHFVIKEKLKEFLHSIQENIGDVSGRAFVDSAPVLDRAWAAKSGLGWIGKSGNLLTQKVGSFYFIAELILDLELEYDHATTDHCGSCTACIDACPTQAIVAPHVVDGSKCISYYTIELKENIPQEMKGKFDEWMFGCDTCQDVCPWNRFSKPHSEPLFNPNPDLLSFSKKDWIEITEETFRAVFKNSPIKRTKFDGLKRNITFLE

SEQ ID NO: 76830 - protein, 307 aa, Flavobacterium hydatis
  misc_feature (1)..(307): tr|A0A086AET7|A0A086AET7_FLAHY Epoxyqueuosine reductase OS=Flavobacterium hydatis OX=991 GN=queG PE=3 SV=1
MINSKSTYSQFIKTEAKRLGFLSCGISKAGFLEQEAPRLENWLNKNHNGQMAYMENHFDKRLDPTLLVDDAKSVVSLLLNYYPSETQESDSFKISKYAYGQDYHFVIKEKLKELLFSIQEQIGDVTGRVFVDSAPVLDKAWAAKSGLGWIGKNSNLITQKVGSFYFIAELILDLDLEYDYATTDHCGSCTACIDACPTQAIVAPYVVDGSKCISYFTIELKENIPQEMKGKFDDWAFGCDTCQDVCPWNRFSKAHSEPLFNPNPDVMAMSKKEWLEITEETFRVVFKNSPLKRTKFDGLKRNINFLK

SEQ ID NO: 76831 - protein, 311 aa, Flavobacterium indicum
  misc_feature (1)..(311): tr|H8XQ44|H8XQ44_FLAIG Epoxyqueuosine reductase OS=Flav obacterium indicum (strain DSM 17447 / CIP 109464 / GPT SA100-9) OX=1094466 GN=queG PE=3 SV=1
MASIFHLPSSIYSKLIKQKAIALGFLSCGISKADFLEQEAPRLENWLNKNYHGQMAYMENHFDKRLDPRLLVDGAKSVISLLLNYYPSEQQNQESYKISKYAYGEDYHFVIKDKLKSLLQFIQEEIGEVNGRVFVDSAPVLDKAWAAKSGLGWIGKNANLITQKVGSFYFIAELIIDLELEYDLPTTDHCGTCTACIDACPTQAIIQPYVVDGSKCISYFTIELKDNLPQEMKGQFEDWVFGCDVCQDVCPWNRFAKPHHEPLFQPKPELLNFSKRDWQELTKETFNKVFKNSAVKRTKFEGLLRNIEFVK

SEQ ID NO: 76832 - protein, 308 aa, Flavobacterium johnsoniae
  misc_feature (1)..(308): tr|A0A1M6RCY6|A0A1M6RCY6_FLAJO Epoxyqueuosine reductase OS=Flavobacterium johnsoniae OX=986 GN=queG PE=3 SV=1
MSINSKETYSKFIKEEAKRLGFISCGISKAGFLEQEAPRLEKWLNNNHNGQMAYMENHFDKRLDPTLLVDDAKSVVSLLLNYFPSESQNEESFKISKYAYGQDYHFVIKEKLKEFLHSIQENIGDVSGRAFVDSAPVLDKAWAAKSGLGWIGKNSNLITQRVGSFYFIAELILDLDLEYDHAVTDHCGSCTACIDACPTQAILAPYIVDGSKCISYYTIELKENLPNDMKGKFDEWMFGCDTCQDVCPWNRFSKPHSEPLFNPNPDLLSFSKKDWTEITEETFRVVFKNSPIKRTKFDGLKRNIKFLE

SEQ ID NO: 76833 - protein, 308 aa, Flavobacterium johnsoniae; identical to SEQ ID NO: 76832
  misc_feature (1)..(308): tr|A5FJE7|A5FJE7_FLAJ1 Epoxyqueuosine reductase OS=Flav obacterium johnsoniae (strain ATCC 17061 / DSM 2064 / U W101) OX=376686 GN=queG PE=3 SV=1

SEQ ID NO: 76834 - protein, 308 aa, Flavobacterium kingsejongi
  misc_feature (1)..(308): tr|A0A2S1LJT6|A0A2S1LJT6_9FLAO Epoxyqueuosine reductase OS=Flavobacterium kingsejongi OX=1678728 GN=queG PE=3 SV=1
MISNKEKHTAFIKSEALRLGFMSCGISKAGFLETEAPRLENWLKENRNGQMAYMENHFDKRLDPTLLVEGSKSVISLLLNYYPTETQQDDSFKISKYAYGQDYHFVIKEKLKELVFSIESTIGAVEGRAFVDSAPVLDKAWAAKSGLGWIGKNSNLLSKKAGSFFFIAELIVDLDLEYDHAVTDHCGSCTKCIDACPTQAIIAPYQVDGSKCISYFTIELKENIPQEMKGRFDDWVFGCDVCQDVCPWNRFSKPHSEPLFDPNPELLSLTKSDWAEITRDVFQDIFKKSPVKRAKFEGLQRNIEFLKE

SEQ ID NO: 76835 - protein, 306 aa, Flavobacterium lacus
  misc_feature (1)..(306): tr|A0A328WSM6|A0A328WSM6_9FLAO Epoxyqueuosine reductase OS=Flavobacterium lacus OX=1353778 GN=queG PE=3 SV=1
MNAKEKHSVGIKSEAKRLGFLSCGISKAGFLEEEAPRLENWLNNNMNGQMSYMENHFDKRLNPTLLVDGAKSVISLLLNYYPSEFQNEESYKISKYAYGQDYHFVIKEKLKELLHFIQTEIGEVSGRAFVDSAPVLDKAWAAKSGLGWMGKNTNLITQKVGSFYFIAELIVDLELEYDAPTTDHCGSCTACIDACPTEAIVAPYVVDGSKCISYFTIELKENIPAEMKGKLDDWVFGCDVCQDVCPWNRFSKPHSEPLFQANPELLSFTKKDWEEITEDVFKKVFKNSAVKRTKLEGVKRNAEFLK

SEQ ID NO: 76836 - protein, 299 aa, Flavobacterium limnosediminis
  misc_feature (1)..(299): tr|V6SSB7|V6SSB7_9FLAO Epoxyqueuosine reductase OS=Flav obacterium limnosediminis JC2902 OX=1341181 GN=queG PE= 3 SV=1
MIKSEAKRLGFLSCGISKAGFLEEEAPRLERWLKQNYHGEMSFMENYFDKRLDPTLLVDDSKSVISLLLNYYPPELQNEESYKISKYAYGKDYHNVIKKKVKKLLNYIKAEIGDVSGRAFVDFAPVMDKAWAAKSGLGWIGKNSNLLTQKVGSFYFIAELIVDLDLEYDHATTDHCGSCTACLDACPTEAIVAPYVVDGSKCISYYTIELQDNLPAEMKGKLDDWMFGCDVCQDVCPWNKFSKAHSEPLFKPYPELLSYSKKDWEEITQETFEKVFTNSPLKRAKISGLKRNIDFLKQS

SEQ ID NO: 76837 - protein, 311 aa, Flavobacterium macacae
  misc_feature (1)..(311): tr|A0A3P3WDU1|A0A3P3WDU1_9FLAO Epoxyqueuosine reductase OS=Flavobacterium macacae OX=2488993 GN=queG PE=3 SV=1
MISNKEKYTKFIKSEAVRLGFLSCGISQAGFLEQEAPRLEAWLKNNAHGQMAYMENHFDKRLDPTLLVEDSKSVISLLLNYYPEETQAGLLGDDTFKISKYAYGQDYHFVIKEKLKEFLFSIQENIGEVSGRAFVDSAPVLDKAWASKGGLGWIGKNSNLLSKQVGSFFFIAELIVDLDLEYDNAVTDHCGSCTKCIDACPTEAIVAPYVVDGSKCISYFTIELKDNIPSEMKGKFDDWAFGCDVCQDVCPWNRFSKSHSEPLFNPHPDLLSMTKKDWEEITEDTFKAVFKNSAVKRTKFGGLQRNIDFLK

SEQ ID NO: 76838 - protein, 309 aa, Flavobacterium magnum
  misc_feature (1)..(309): tr|A0A2S0RCR1|A0A2S0RCR1_9FLAO Epoxyqueuosine reductase OS=Flavobacterium magnum OX=2162713 GN=queG PE=3 SV=1
MIENKSRYAEFIKSEARRLGFLSCGISKAGFLEQEAPRLETWLNNQHHGRMAYMENHFDKRLDPTRLVEGSKSVVSLLLNYYPSESQAADSYKISKYAYGQDYHFVIKEKLKELLHAIQTEIGEVGGRAFVDSAPVLDKAWAAKSGLGWIGKNANLLTRQTGSFYFIAELILDLELEYDHAVTDHCGSCTACIDACPTDAIVAPYVVDGSKCISYFTIELKDNLPAEMKGRFDDWAFGCDVCQDVCPWNRFSKAHQEPLFNPHPDLLSMSKKDWQEITEDTFRKVFKDSAVNRTKFEGLKRNIDFLQPE

SEQ ID NO: 76839 - protein, 308 aa, Flavobacterium marinum
  misc_feature (1)..(308): tr|A0A1H6LT89|A0A1H6LT89_9FLAO Epoxyqueuosine reductase OS=Flavobacterium marinum OX=1159016 GN=queG PE=3 SV=1
MNKKEIYTKLIKDKALDLGFSYCGISEAAFLETEAPRLENWLKQNMHGEMKYMENHFDKRLDPRLLVPGAKSVVSLLLNYYPSEKQNPDSYKISKYAYGEDYHFVIKDKLKDLLRFINDEIGAVDGRVFVDSAPVLDKAWAAKSGLGWIGKNNNLIRKSEGSFFFIAELIIDLELLYDTATTNHCGSCTACIDACPTQAIESPYVVNGSKCISYLTIELKDEIPNEFAGKLDDWIYGCDVCQDVCPWNRFSKPHQQPLFNPKPSLIDYDKQQWNDLTQELFNEVFRKSPVKRTKYSGLMRNIAFLKET

SEQ ID NO: 76840 - protein, 289 aa, Flavobacterium micromati
  misc_feature (1)..(289): tr|A0A1M5FGT7|A0A1M5FGT7_9FLAO Epoxyqueuosine reductase OS=Flavobacterium micromati OX=229205 GN=SAMN05444372_ 101129 PE=4 SV=1
MGFLSCGISKAGYLEKEAPRLEDWLNKNQNGQMSYMDNHFDTRLDPTLLVDDAKSVVSLLFNYYPKDFQGSESYKIAKYAYGEDYHHVVKDKLKELLFSIQSEIGEVAGRAFVDSAPILEKAWAAKSGLGWVGKNSNLLTQKVGSFYFIAELIIDLDLEYDYATTDHCGTCTACIDACPTEAIVAPYVVDGSKCISYFTIELKENIPDEMKGKFDDWAFGCDICQDVCPWNKFSKSHNEPLFSPNPNLLTMSKKEWTEITEETFRVVFKNSPLKRAKYKGIKRNIDFLQ

SEQ ID NO: 76841 - protein, 307 aa, Flavobacterium nitrogenifigens
  misc_feature (1)..(307): tr|A0A521C6A2|A0A521C6A2_9FLAO Epoxyqueuosine reductase OS=Flavobacterium nitrogenifigens OX=1617283 GN=queG P E=3 SV=1
MINSKEKYSKFIKEEAKRLGFLSCGISKAGFLEEEAPRLENWLKNNRNGQMAYMENHFDKRLDPTLLVDDGKSVVSLLLNYYPDSFQNDESFKISKYAYGQDYHFVIKDKLKELLHSIQENIGEVSGRAFVDSAPVLDKAWAAKSGLGWIGKNSNLITQKVGSFYFIAELIIDLELEYDHAVTDHCGSCTACIDACPTQAIVAPYIVDGSKCISYYTIELKENLPEEMKGKFDEWMFGCDTCQDVCPWNRFSKPHSEPLFNPNPDLLSFTKKDWLEITEETFRTVFKNSPIKRTKFDGLKRNIKFLQ

SEQ ID NO: 76842 - protein, 318 aa, Flavobacterium noncentrifugens
  misc_feature (1)..(318): tr|A0A1G8RXE8|A0A1G8RXE8_9FLAO Epoxyqueuosine reductase OS=Flavobacterium noncentrifugens OX=1128970 GN=queG P E=3 SV=1
MRTKLYLCGSMIENKQKYTQFIKSEAQRLGFLSCGISKAGFLEADAPRLEAWLKKNSHGQMAYMENHFDKRLDPTLLVEDSKSVISLLLNYYPSETQNPDSYKISKYAYGQDYHFVIKEKLKELLFSIQNEIGEVSGRAFVDSAPVLDKAWAAKSGLGWIGKNSNLLTKSTGSFYFIAELIVDLELEYDYAVTDHCGSCTACIDACPTEAIVAPYVVDGSKCISYFTIELKENIPTEMKGKFDEWAFGCDICQDVCPWNRFSKPHSEPLFNPNPELLSMSKKDWEEITAETFQAVFKNSAVKRTKLSGLQRNIDFLKP

SEQ ID NO: 76843 - protein, 286 aa, Flavobacterium omnivorum
  misc_feature (1)..(286): tr|A0A1G7W170|A0A1G7W170_9FLAO Epoxyqueuosine reductase OS=Flavobacterium omnivorum OX=178355 GN=SAMN04488062_ 101268 PE=4 SV=1
MSCGIAKAGFLEEEAPRLEDWLNRNRNGQMSYMENHFDKRLNPKLLVDDAKSVVSLLLNYYPEQFQNPDSFKISKYAYGEDYHFVIKEKLKEFLFSIQSAIGEVSGRAFVDSAPVLDKAWAAKSGLGWIGKNSNLLTQKVGSFYFIAELLIDLELDYDNPTTDHCGTCTACIDACPTEAIVAPYVVDGSKCISYFTIELKENIPHEMKGKFDDWAFGCDVCQDVCPWNKFSKQHNEPLFNPNPELLAMSKKDWLEITEETFKAVFKNSPLKRAKFQGIKRNINFLE

SEQ ID NO: 76844 - protein, 308 aa, Flavobacterium oncorhynchi
  misc_feature (1)..(308): tr|A0A226I9Q3|A0A226I9Q3_9FLAO Epoxyqueuosine reductase OS=Flavobacterium oncorhynchi OX=728056 GN=queG PE=3 S V=1
MLINSKETYSKFIKSEAKRLGFISCGISKAGFLEQEAPRLEKYLKNNYNGQMTYMENHFDKRLDPTLLVDDAKSVVSLLLNYYPSEVQNEESFKISKYAYGQDYHFVIKEKLKEFLHSIQENIGEVSGRAFVDSAPVLDKAWAAKSGLGWIGKNSNLITQKVGSFYFIAELILDLELEYDHAVTDHCGSCTACIDACPTQAIVAPYVVDGSKCISYYTIELKENLPHEMKGKFDEWMFGCDTCQDVCPWNRFSKPHSEPLFNPNPELLSFSKKDWLEITEETFRLVFKNSPIKRTKFDGLRRNINFLE

SEQ ID NO: 76845 - protein, 310 aa, Flavobacterium pallidum
  misc_feature (1)..(310): tr|A0A2S1SGA1|A0A2S1SGA1_9FLAO Epoxyqueuosine reductase OS=Flavobacterium pallidum OX=2172098 GN=queG PE=3 SV= 1
MLPKSEYTSFIKSEAKRLGFLSCGISKAGFLEEEAPRLENWLNHRHHGQMSYMENHFDKRLDPTKLVEGSKSVISLLLNYFPSETQTADSYKISKYAYGKDYHFVIKDKLKELLYSIRHEIGDVDGRAFVDSAPVLDKAWAAKSGLGWIGKHSNLLTKQTGSFYFIAELILDLDLEYDHKVTDHCGSCTACIDACPTEAIVAPYVVDGSKCISYFTIELKDNLPMEMKGKFDDWAFGCDVCQDVCPWNRFSKAHNEPLFNPQPELLSMSKKDWEEITEDTFRKVFKDSAVKRTKLEGLKRNIKFLGDASL

SEQ ID NO: 76846 - protein, 308 aa, Flavobacterium pectinovorum
  misc_feature (1)..(308): tr|A0A1M7GXH0|A0A1M7GXH0_9FLAO Epoxyqueuosine reductase OS=Flavobacterium pectinovorum OX=29533 GN=queG PE=3 S V=1
MTINAKETYSKFIKTEAKRLGFLSCGISKAGFLEQEAPRLESWLKNNSHGQMAYMENHFDKRLDPTLLVDDAKSVVSLLLNYYPEESQTQESFKISKYAYGQDYHFVIKEKLKEFLFSIQENIGDVSGRAFVDSAPVLDKAWAAKSGLGWIGKNSNLITQKVGSFYFIAELILDLDLEYDYATTDHCGSCTACIDACPTQAIVAPHVVDGSKCISYYTIELKENIPNDMKGKFDEWMFGCDTCQDVCPWNRFSKSHSEPLFNPNPDLLSFTKKDWIEITEETFRTVFKNSPIKRTKFDGLKRNIKFLE

SEQ ID NO: 76847 - protein, 308 aa, Flavobacterium pectinovorum
  misc_feature (1)..(308): tr|A0A502EN71|A0A502EN71_9FLAO Epoxyqueuosine reductase OS=Flavobacterium pectinovorum OX=29533 GN=queG PE=3 S V=1
MTINAKETYSKLIKSEAKRLGFLSCGISKAGFLEEEAPRLEKWLNNNHHGQMAYMENYFDKRLDPTLLVDDAKSVVSLLLNYYPEETQSQESFKISKYAYGQDYHFVIKEKLKEFLHSIQENIGDVSGRAFVDSAPVLDRAWAAKSGLGWIGKSGNLLTQKVGSFYFIAELILDLELEYDNATTDHCGSCTACIDACPTQAIVAPYVVDGSKCISYYTIELKENIPYDMKGKFDEWMFGCDTCQDVCPWNRFSKPHSEPLFNPNPELLSFSKKDWIEITEETFRAVFKNSPVKRTKFDGLKRNISFLE

SEQ ID NO: 76848 - protein, 307 aa, Flavobacterium phragmitis
  misc_feature (1)..(307): tr|A0A1I1QQS6|A0A1I1QQS6_9FLAO Epoxyqueuosine reductase OS=Flavobacterium phragmitis OX=739143 GN=queG PE=3 SV =1
MIDSKEKYTKFIKAEAKRLGFLSCGISKAGFLEQEAPRLEKWLNNNYNGQMAYMANHFDKRLDPTLLVDDGKSVVSLLLNYYPDSVQNEESFKISKYAYGQDYHFVIKDKLKEFLHSIQENIGEVSGRAFVDSAPVLDKAWAAKSGLGWIGKNSNLITQKVGSFYFIAELIIDLDLEYDHAVTDHCGSCTACIDACPTQAIVAPYVVDGSKCISYYTIELKENIPHEMKGKFDDWMFGCDTCQDVCPWNRFSKSHSEPLFNPNPDLLSFTKKDWIEITEETFKLVFKNSPIKRTKFEGLKRNIKFLD

SEQ ID NO: 76849 - protein, 307 aa, Flavobacterium psychrolimnae
  misc_feature (1)..(307): tr|A0A366B2E5|A0A366B2E5_9FLAO Epoxyqueuosine reductase OS=Flavobacterium psychrolimnae OX=249351 GN=queG PE=3 SV=1
MINLKATYTEFIKTEAKRLGFMSCGISKAGFLEEEAPRLENWLKNNRNGQMSYMENHFDKRLNPTLLVDDAKSVVSLLLNYYPAELQNPDSYKISKYAYGQDYHFVIKEKLKEFLFSIQSTIGEVSGRAFVDSAPVLDKAWASKSGLGWIGKNSNLLTQKVGSFYFITELIIDLDLDYDNPTTDHCGTCTACINACPTEAIVAPYVVDGSKCISYFTIELKENIPHEMKGKFDDWAFGCDVCQDVCPWNKFSKPHSEPLFNPNPELLAMSKKDWIEITEETFKAVFKNSPLKRAKFQGIKRNINFLE

SEQ ID NO: 76850 - protein, 290 aa, Flavobacterium psychrophilum
  misc_feature (1)..(290): tr|A0A1Z5HHK2|A0A1Z5HHK2_FLAPS tRNA epoxyqueuosine(34) reductase QueG OS=Flavobacterium psychrophilum OX=96345 GN=FPS14_contig00013-0044 PE=4 SV=1
MINNKSKYTNLIKSEAKRLGFLSCGISKAGFLEAEAPRLENWLNKQMNGQMSYMENHFDKRLNPTLLVDDAKSVISLLLNYYPSEIQNTNSYKISKYAYGQDYHFVIKEKLAALLHFIQTEIGEVSGRAFVDSAPVLDKAWAAKSGLGWIGKNSNLLTKQVGSFYFIAELIIDLDLEYDNPTTDHCGSCTACIDACPTDAIVAPYIVDGSKCISYFTIELKENIPTEMKGKFNDWAFGCDVCQDVCPWNKFSKPHNEPLFNPNPEVLSFTKKTGKKLPKKFSRKHLKIRQ

SEQ ID NO: 76851 - protein, 308 aa, Flavobacterium psychrophilum
  misc_feature (1)..(308): sp|A6H1G2|QUEG_FLAPJ Epoxyqueuosine reductase OS=Flavob acterium psychrophilum (strain JIP02/86 / ATCC 49511) O X=402612 GN=queG PE=3 SV=1
MINNKSKYTNLIKSEAKRLGFLSCGISKAGFLEAEAPRLENWLNKQMNGQMSYMENHFDKRLNPTLLVDDAKSVISLLLNYYPSEIQNTNSYKISKYAYGQDYHFVIKEKLTALLHFIQTEIGEVSGRAFVDSAPVLDKAWAAKSGLGWIGKNSNLLTKQVGSFYFIAELIIDLDLEYDNPTTDHCGSCTACIDACPTDAIVAPYIVDGSKCISYFTIELKENIPTEMKGKFNDWAFGCDVCQDVCPWNKFSKPHNEPLFNPNPEVLSFTKKDWEEITEEIFKKTFKDSAVKRTKIGGLKRNINFLKD

SEQ ID NO: 76852 - protein, 307 aa, Flavobacterium reichenbachii
  misc_feature (1)..(307): tr|A0A085ZQX2|A0A085ZQX2_9FLAO Epoxyqueuosine reductase OS=Flavobacterium reichenbachii OX=362418 GN=queG PE=3 SV=1
MINAKETYSKFIKEEAKRLGFLSCGISKAGFLEQEAPRLENWLKNNRNGQMAYMENHFDKRLDPTLLVDDAKSVVSILLNYYPDIAQNDESFKISKYAYGQDYHYVIKEKLKEFLHSIQENIGEVSGRAFVDSAPVLDKAWAAKSGLGWIGKNSNLLTQKVGSFYFIAELILDLELEYDHATTDHCGSCTACIDACPTQAIVAPYVVDGSKCISYYTIELKENIPYEMKGKFDEWMFGCDTCQDVCPWNRFSKPHSEPLFNANPEILSFTKKDWVEVTEETFRIVFKNSPIKRTKFEGLKRNINFLK

SEQ ID NO: 76853 - protein, 308 aa, Flavobacterium resistens
  misc_feature (1)..(308): tr|A0A521CMG1|A0A521CMG1_9FLAO Epoxyqueuosine reductase OS=Flavobacterium resistens OX=443612 GN=queG PE=3 SV= 1
MSINAKETYSKFIKDEAKRLGFLSCGISKAGFLEEEAPRLEKWLNNNHNGQMAYMENHFDKRLDPTLLVDDAKSVVSLLLNYFPSESQNEDSFKISKYAYGQDYHFVIKEKLKELLHSIEENIGEVSGRAFVDSAPVLDKAWAAKSGLGWIGKNSNLITQKVGSFYFIAELILDLDLEYDYKTTDHCGSCTACIDACPTQAILAPYIVDGSKCISYYTIELKENLPYEMKGKFDEWMFGCDTCQDVCPWNRFSKPHSEPLFNPNPDLLSFSKKDWTEITEETFRTVFKNSPIKRTKFEGLKRNISFLK

SEQ ID NO: 76854 - protein, 307 aa, Flavobacterium rivuli
  misc_feature (1)..(307): tr|A0A0A2M5T4|A0A0A2M5T4_9FLAO Epoxyqueuosine reductase OS=Flavobacterium rivuli WB 3.3-2 = DSM 21788 OX=11218 95 GN=queG PE=3 SV=1
MINNKQKYSQFIKAEAKRLGFMSCGISKAGFLEEEAPRLEKWLNENRHGQMQYMENHFDKRLDPTLLVDGAKSVVSLLLNYYPKEKQPEDTYKISKYAYGQDYHFVIKEKLKELLHSIQESVGEVGGRAFVDSAPMLDKAWAAKSGLGWIGKNSNLLSKQVGSFFFIAELVIDLDLEYDHAVTDHCGSCTACLDACPTEAIIAPYVVDGSKCISYFTIELKENIPESMKGSFNDWAFGCDVCQDVCPWNRFSKPHREPLFNPHPDLLSLTKKDWEEITEDTFRAVFKNSAVKRTKFAGLTRNIDFLK

SEQ ID NO: 76855 - protein, 308 aa, Flavobacterium saccharophilum
  misc_feature (1)..(308): tr|A0A1M7BJF6|A0A1M7BJF6_9FLAO Epoxyqueuosine reductase OS=Flavobacterium saccharophilum OX=29534 GN=queG PE=3 SV=1
MTINSKETYSKFIKAEAKRLGFLSCGISKAGFLEQEAPRLEKWLKNNQNGKMAYMENHFDKRLDPTLLVDDAKSVVSLLLNYYPSEAQNQESFKISKYAFGQDYHFVIKEKLKEFLHSIQENIGEVSGRAFVDSAPVLDKAWAAKSGLGWIGKNSNLLTQKVGSFYFIAELILDLDLEYDHATTDHCGSCTACIDACPTQAIVAPYVVDGSKCISYYTIELKENIPYEMKGKFDEWMFGCDACQDVCPWNRFSKPHSEPLFNPNPELLSFSKKDWIEITEETFKKVFKNSPIKRTKFDGLKRNINFLD

SEQ ID NO: 76856 - protein, 307 aa, Flavobacterium saliperosum
  misc_feature (1)..(307): tr|A0A1G4V7C7|A0A1G4V7C7_9FLAO Epoxyqueuosine reductase OS=Flavobacterium saliperosum OX=329186 GN=queG PE=3 S V=1
MVNQQSKYTQMIKSEAQRLGFLSCGISKAGFLEEEAPRLEHWLKQNYHGEMSFMESYFDKRLDPTLLVEDSKSVISLLLNYYPPELQTEGTYKISKYAYGKDYHNVIKKKVKKLLNYIKAEIGEVSGRAFVDFAPVMDKAWAAKSGLGWIGKNSNLLTQKVGSFYFIAELIVDLELDYDHATTDHCGSCTACLDACPTEAIVAPYVVDGSKCISYYTIELQDNLPTEMKGKFDDWMFGCDVCQDVCPWNKFSKAHSEPLFTPYPELLSYTKKDWEEITQETFEKVFTNSPLKRAKITGLKRNIDFLK

SEQ ID NO: 76857 - protein, 308 aa, Flavobacterium sediminis
  misc_feature (1)..(308): tr|A0A2U8QUT4|A0A2U8QUT4_9FLAO Epoxyqueuosine reductase OS=Flavobacterium sediminis OX=2201181 GN=queG PE=3 SV =1
MINNKEKYSQLIKAESKRLGFLSCGIAKADFLEEEAPRLEKWLKEQRNGEMGYMENHFDKRLDPRLLVEGSKSVISLVLNYYPEEKQRNDSYKISKYAYGEDYHFVIKDKLRQLLDFVQSEVGEVNGRYFVDSAPVLDKAWAAKAGLGWIGKNANLITKGIGSFYFVAELIIDLELDYDSPTTDHCGTCTACIDACPTEAIIAPYVVDGSKCISYFTIELKGALPEDVKGTFDDWFFGCDTCQDVCPWNRFAKPHNETAFEPNFNLLHFTKNDWENLSKEAFNQIFKNSAVKRTKFEGFKRNVDFLKG

SEQ ID NO: 76858 - protein, 257 aa, Flavobacterium segetis
  misc_feature (1)..(257): tr|A0A1M5F0F4|A0A1M5F0F4_9FLAO Epoxyqueuosine reductase OS=Flavobacterium segetis OX=271157 GN=SAMN05444396_10 254 PE=4 SV=1
MSYMENHFDKRLDPTLLVEDAKSVVSLLLNYYPHQLQNVDSYKISKYAFGEDYHLVIRDKLKEFLFSIQSSIGEVSGRAFVDSAPVLDKAWAAKSGLGWIGKNSNLLTQKVGSFYFIAELIIDLELEYDHAVTDHCGSCTACIDSCPTQAIVAPYVVDGSKCISYFTIELKENIPVEMKGLFNDWAFGCDVCQDVCPWNRFAKPHSEPLFNANSEILSMSKKDWIEITEETFKAVFKNSPIKRAKFQGIKRNIDFLT

SEQ ID NO: 76859 - protein, 286 aa, Flavobacterium seoulense
  misc_feature (1)..(286): tr|A0A066WW98|A0A066WW98_9FLAO Epoxyqueuosine reductase OS=Flavobacterium seoulense OX=1492738 GN=FEM21_03310 PE=4 SV=1
MSCGISKAGFLEEEAPRLENWLNKNLNGKMSYMENHFDKRLNPTLLVDDAKSVVSLLLNYYPEKEQIQDSYKISKYAYGQDYHFVIKEKLKELLYSIQENIGEVSGRVFVDSAPVLDKAWAAKSGLGWIGKNSNLLTQKVGSFYFIAELIIDLDLEYDHAVSDHCGSCTACIDACPTQAIIAPYIVDGSKCISYFTIELKENIPNEMKGHFDDWVFGCDTCQDVCPWNRFSKSHNEPLFNPNPALLSMTKKDWEEMTQETFKIVFKDSPVKRTKFQGLTRNVDFLK

SEQ ID NO: 76860 - protein, 310 aa, Flavobacterium sinopsychrotolerans
  misc_feature (1)..(310): tr|A0A1H8IS34|A0A1H8IS34_9FLAO Epoxyqueuosine reductase (Fragment) OS=Flavobacterium sinopsychrotolerans OX=60 4089 GN=SAMN04487942_0682 PE=3 SV=1
IFWVIIQKSKYTEFIKSEAKRLGFLSGGISKAEFLEQEAPRLENWLNENRNGQMAYMENHFDKRLNPTLLVDDAKSVVSLLMNYYPEQRQNSDAYKISKYAYGEDYHFVIKEKLKEFLFSIQSTIGEVSGRAFVDSAPVLDKAWAAKSGLGWIGKNSNLLTQKVGSFYFIAELIIDLDLDYDNATTDHCGTCTACMDACPTEAIVAPYIIDGSKCISYFTIELKENIPQEMKGKFDDWAFGCDVCQDVCPWNKFSKPHNEPLFNPNPEVLSMSKKDWREITEETFKVVFKNSSLKRAKFQGIKRNIDFLQ

SEQ ID NO: 76861 - protein, 309 aa, Flavobacterium sp.
  misc_feature (1)..(309): tr|A0A519K8Z1|A0A519K8Z1_FLASP Epoxyqueuosine reductase OS=Flavobacterium sp. OX=239 GN=queG PE=3 SV=1
MSTKSKHTAFIKAEAKRLGFLSCGISKAGFLEAEASRLEAWLNRNMHGQMSYMENHFDKRLDPTKLVDGAKSVISLLLNYYPEKTQNPDSYKISKYAFGQDYHFVIKEKLKGLLFSIQNEIGEVGGRAFVDSAPVLDKAWAAKSGLGWIGKNSNLLTQKVGSFYFIAELIVDLALEYDTAVTDHCGTCTACIDSCPTEAIVAPYVVDGNKCISYFTIELKDNLPQEMKGKFDDWAFGCDVCQDVCPWNRFSKPHSEPLFSPNPDLLAFSKSDWDEITEDTFRAVFGNSAVKRTKFEGLKRNIGFLKQPE

SEQ ID NO: 76862 - protein, 309 aa, Flavobacterium sp.
  misc_feature (1)..(309): tr|A0A552V7R3|A0A552V7R3_9FLAO Epoxyqueuosine reductase OS=Flavobacterium sp. ZT4R6 OX=2593302 GN=queG PE=3 SV =1
MKNNKQKYTDFIKSEALRLGFMSCGISKAGFLEEEAPRLEAWLNQNRHGKMQYMENHFDKRLDPTLLVDGAKSVISLLLNYYPEETQTTDTYKISKYAYGQDYHFVIKEKLKELLHSIQSTIGEVGGRAFVDSAPVLDKAWAAKSGLGWIGKNSNLLSKKTGSFFFIAELIVDIDLEYDYAVTDHCGSCTACLDACPTQAIIAPYVVDGSKCISYFTIELKENIPAEMRGSFNDWAFGCDVCQDVCPWNRFSKPHREPLFNPHPDLLSLTKKDWEEITEDTFRAVFKNSAVKRAKYDGLKRNINFLKEL

SEQ ID NO: 76863 - protein, 308 aa, Flavobacterium spartansii
  misc_feature (1)..(308): tr|A0A1S1J908|A0A1S1J908_9FLAO Epoxyqueuosine reductase OS=Flavobacterium spartansii OX=1278819 GN=queG PE=3 S V=1
MTINSKETYSKFIKAEAKRLGFLSCGISKAGFLEEEAPRLEKWLNNNHHGQMGYMENYFDKRLDPTLLVDDAKSVVSLLLNYYPTETQTDESFKISKYAYGQDYHFVIKEKLKEFLHSIQENIGEVSGRAFVDSAPVLDRAWAAKSGLGWIGKSGNLLTQKVGSFYFIAELILDLDLEYDHATTDHCGSCTACIDACPTQAIVAPHVVDGSKCISYYTIELKENIPHEMKGKFDEWMFGCDTCQDVCPWNRFSKPHSEPLFNPNPELLSFSKKDWIEITEETFRLVFKNSPIKRTKFDGLKRNILFLE

SEQ ID NO: 76864 - protein, 309 aa, Flavobacterium subsaxonicum
  misc_feature (1)..(309): tr|A0A0A2N0T5|A0A0A2N0T5_9FLAO Epoxyqueuosine reductase OS=Flavobacterium subsaxonicum WB 4.1-42 = DSM 21790 O X=1121898 GN=queG PE=3 SV=1
MIDNKQKYSDFIKSEAKRLGFMSCGISKAGFLEEEAPRLEAWLNQNRHGKMQYMENHFDKRLDPTLLVDGAKSVISLLLNYYPEETQTEGSYKISKYAYGQDYHFVIKEKLKELLHFIQENIGEVGGRAFVDSAPVLDKAWAAKSGLGWIGKNSNLLSKKTGSFFFIAELVVDIDLEYDYAVTDHCGSCTACLDACPTQAIIAPYVVDGSKCISYFTIELKENIPAEMRGSFNDWAFGCDVCQDVCPWNRFSKPHREPLFNPHPDLLSLTKKDWEEITEDTFRAVFKNSAVKRTKYDGLKRNINFLKEL

SEQ ID NO: 76865 - protein, 307 aa, Flavobacterium succinicans
  misc_feature (1)..(307): tr|A0A1I4RV24|A0A1I4RV24_9FLAO Epoxyqueuosine reductase OS=Flavobacterium succinicans OX=29536 GN=queG PE=3 SV =1
MINNKEKYTQFIKAESKRLGFLSCGISKVGFLESEAPRLEKWLNHQMNGQMSYMENHFDKRLDPTLLVDGAKSVISLLLNYYPSEVQNPDSYKISKYAFGQDYHFVIKDKLKELLFSIQNEIGEVSGRAFVDSAPVLDKAWAAKSGLGWIGKNSNLIAQKVGSFYFIAELIVDLDLVYDHATTDHCGTCTACLDSCPTQAIVSPYVVDGSKCISYFTIELKDNIPTEFKGKFDDWIFGCDVCQDVCPWNRFSKPHQEPLFNPNPEMLGWSKKDWEEITSETFNAVFKNSPLKRTKWNGLIRNVDHSK

SEQ ID NO: 76866 - protein, 286 aa, Flavobacterium succinicans
  misc_feature (1)..(286): tr|A0A199XN83|A0A199XN83_9FLAO Epoxyqueuosine reductase OS=Flavobacterium succinicans OX=29536 GN=queG PE=4 SV =1
MSCGISKAGFLDKEAPRLENWLNQQMNGQMSYMENHFDKRLDPTLLVDGAKSVISLLLNYYPSDIQNPDSYKISKYAFGQDYHFVIKDKLKELLFSIQTEIGDVSGRAFVDSAPVLDKAWAAKSGLGWIGKNSNLITQKVGSFYFIAELIVDLDLECDDATTDHCGTCTACLDACPTQAIVAPYVVDGSKCISYFTIELKDNIPIEFKGKFDDWIFGCDVCQDVCPWNRFSKSHEEPLFNPNPELLQWSKKDWEEITSETFNAVFKNSPLKRTKWSGLLRNIDNSL

SEQ ID NO: 76867 - protein, 311 aa, Flavobacterium suncheonense
  misc_feature (1)..(311): tr|A0A0A2MNF8|A0A0A2MNF8_9FLAO Epoxyqueuosine reductase OS=Flavobacterium suncheonense GH29-5 = DSM 17707 OX=1 121899 GN=queG PE=3 SV=1
MNTTTSKYTQMIKSEAQRLGFLSCGISKAGFLEAEAPRLEAWLQKGMQGEMHYMENHFDKRLDPTLLVDGAKSVISLLLNYYPSEVQNPESYKLSKYAYGQDYHFVIKDKLKDLLRFIQTEIGEVSGRAFVDSAPVLDKAWAAKSGLGWVGKNGNLLSKQVGSFFFIAELIVDLDLEYDTITTDHCGNCTACLDACPTEAIVAPYVVDGSKCISYFTIELKDNLPMEMKGKFEDWMFGCDVCQDVCPWNRFSKPHSEPLFDPNPELLSFTKKDWEEITEETFRKVFKNSAVKRTKYDGLLRNINFLSEKKD

SEQ ID NO: 76868 - protein, 308 aa, Flavobacterium swingsii
  misc_feature (1)..(308): tr|A0A1I0VRU9|A0A1I0VRU9_9FLAO Epoxyqueuosine reductase OS=Flavobacterium swingsii OX=498292 GN=queG PE=3 SV=1
MINNKSKYTQLIKTEAQRLGFLSCGISKAGFLEEEAPRLENWLNKQMHGEMSYMENNFDKRLNPTLLVDDAKSVISLLLNYYPSEIQNSDSYNISKYAYGQDYHFVIKEKLKELLHFIQTEIGEVSGRAFVDSAPVLDKAWAAKSGLGWIGKNSNLLTKQVGSFYFIAELIVDLDLEYDYATTDHCGSCTACIDACPTEAIVAPYVVDGSKCISYFTIELKENLPIEMKGKFDDWAFGCDVCQDVCPWNKFSKPHNEPLFNPNPEILLFTNKDWEEITDETFKKVFKNSAVKRTKLEGLKRNINFLKE

SEQ ID NO: 76869 - protein, 307 aa, Flavobacterium terrae
  misc_feature (1)..(307): tr|A0A1M6A8D7|A0A1M6A8D7_9FLAO Epoxyqueuosine reductase OS=Flavobacterium terrae OX=415425 GN=queG PE=3 SV=1
MNTKEKYSQLIKSEALRLGFLSCGISKAGFLEEEAPRLENWLNKNMHGQMSYMENHFDKRLDPTLLVDGAKSVISLLLSYYPSEIQNEDSYKISKYAYGQDYHFVIKDKLKDLLRFIQTEIGEVQGRVFVDSAPVLDKAWAAKSGLGWIGKNSNLITKQVGSFYFIAELIIDLELEYDYATTDHCGSCTACLDACPTQAIVSPYVVDGSKCISYFTIELKEQIPYEMKGKFDDWMFGCDVCQDVCPWNRFSKPHQEPLFNPNSEILSYSKKDWEEITEEVFKAVFKNSAVKRTKLEGLKRNISFLKD

SEQ ID NO: 76870 - protein, 380 aa, [Flavobacterium] thermophilum
  misc_feature (1)..(380): tr|A0A377H2Z2|A0A377H2Z2_9BACL Epoxyqueuosine reductase OS=[Flavobacterium] thermophilum OX=1414643 GN=queG PE =3 SV=1
MDVMALKQEVIEYSRSIGIDKIGFASADPFVELKERLRRQQELGYQSGFEEPDIEKRTNPSLLLPEAKSIIAIALAYPSKMKDAPRGTKTERRGVFCRASWGKDYHVVLRERLQQLEEFLLAKVPHARVRSMVDTGELADRAVAERAGIGWSGKNCSIITPEFGSYVYLGEMITNIPFPPDEPVENRCGTCTKCIDACPTGALVQGGQLNAQRCISFLTQTKGFLADEFREKIGNRLYGCDTCQLVCPENKGKDFHLHPEFEPDPEAAKPKLVPLLDMTNREFQEKFGAMAGSWRGKKPIQRNAIIALAHYKDRTAVPHLLRLLKEDSRPVIRGTAAWALGKIGDATAKPHLEEARQTETDMDVIAEIDKGLKLLSETKE

SEQ ID NO: 76871 - protein, 286 aa, Flavobacterium tiangeerense
  misc_feature (1)..(286): tr|A0A562L3S7|A0A562L3S7_9FLAO Epoxyqueuosine reductase OS=Flavobacterium tiangeerense OX=459471 GN=IQ05_00561 PE=4 SV=1
MSCGISKAEFLETEAPRLEKWLNLNHHGKMAYMENNFDKRLDPTLLVEDSKSVVSLLLNYYPSEFQNQESFKISKYAYGIDYHDVIKGKLRELIHSIQTNIGAVSGRAFVDSAPVLDKAWAAKSGLGWIGKNSNLLTKKVGSFYFIAELIIDLELEYDSPTTDHCGACTACIDSCPTNAIVAPYVVDGSKCISYFTIELKENIPTEFKGMFNDWAFGCDVCQDVCPWNKFSKPHSEPLFNPNPDVLAMSKKDWIEITEETFKVVFKNSPIKRTKFEGIKRNIDFLY

SEQ ID NO: 76872 - protein, 310 aa, Flavobacterium tibetense
  misc_feature (1)..(310): tr|A0A365NZV3|A0A365NZV3_9FLAO Epoxyqueuosine reductase OS=Flavobacterium tibetense OX=2233533 GN=queG PE=3 SV =1
MINNKEKYAQLIKAESQRIGFLSCGISKAGFLEEEAPRLESWLNNNMNGQMSYMENHFDKRLDPTLLVDGAKSVISLLLNYYPSEFQNEDSYKISKYAYGEDYHFVIKDKLKELLHFIQTEIGEVNGRAFVDSAPVLDKAWAAKSGLGWIGKNSNLITQKVGSFYFIAELIVDLELEYDTPTTDHCGTCTACIDACPTEAIVAPYVVDGSKCISYFTIELKDNLPNVMKDKFDDWMFGCDVCQDVCPWNRFSKPHNEPRFQPNNEILQFTKSDWEEITQDTFQKVFKNSAFNRTKLSGLQRNINFFKDYP

SEQ ID NO: 76873 - protein, 310 aa, Flavobacterium ummariense
  misc_feature (1)..(310): tr|A0A1I5GBM7|A0A1I5GBM7_9FLAO Epoxyqueuosine reductase OS=Flavobacterium ummariense OX=913024 GN=queG PE=3 SV =1
MTNKEKYTQFIKQKAQDLGFSYCGISQATFLEEEAPRLESWLKNNMHGEMKYMENHFDKRLDPRLLVPGAKSVVSLLLNYFPSEQQNPDSYKISKYAYGEDYHFVIKDKLKDLLHYINDEIGEVDGRVFVDSAPVLDKAWAAKSGLGWVGKNNNLIRKTEGSFFFVAELIIDLDLMYDTATTNHCGSCTACIDACPTQAIESPYIVNGSKCISYLTIELKDAIPDEFSGKLDDWMYGCDVCQDVCPWNRFAKPNAEPLFKPKPTLIDYDKQQWNDLTNELFNEIFKKSAVKRTKFSGLMRNIAFLNKDDL

SEQ ID NO: 76874 - protein, 307 aa, Flavobacterium urocaniciphilum
  misc_feature (1)..(307): tr|A0A1H9DJ10|A0A1H9DJ10_9FLAO Epoxyqueuosine reductase OS=Flavobacterium urocaniciphilum OX=1299341 GN=queG P E=3 SV=1
MINNKEKYSKLITEESKKLGFLSCGISRAEFLEQEAPRLESWLNKNLHGQMSYMENHFDKRLNPTLLVDGAKSVISLLLNYYPSEIQNQESFKISKYAYGEDYHFVIKDKLKTLLQFIQDEIGEVNGRVFVDSAPVLDKAWAAKSGLGWIGKNANLITQKVGSFYFIAELIVDLELEYDTPTTDHCGSCTACLDACPTEAIIAPYVVDGSKCISYFTIELKDNLPQEMKGKFDDWMFGCDVCQDVCPWNRFSKPHQEPLFEPKSELLNFSKRDWQELTKETFNKVFKNSAVKRTKFEGLMRNIEFLK

SEQ ID NO: 76875 - protein, 285 aa, Flavobacterium urumqiense
  misc_feature (1)..(285): tr|A0A1H5UDQ5|A0A1H5UDQ5_9FLAO Epoxyqueuosine reductase OS=Flavobacterium urumqiense OX=935224 GN=SAMN04488130 _102211 PE=4 SV=1
MSCGISKAGFLEEEAPRLENWLNKNRNGEMSYMENHFDIRLNPTLLVDDGKSVISLLLNYYPDQFQSDSYKISKYAYGQDYHFVIKEKLKELLFSIQSAIGDVSGRAFVDSAPVLDKAWAAKSGLGWIGKNSNLLTQKVGSFYFISELIVDLNLEYDHATTDHCGTCTACIDACPTEAIVAPYIVDGSKCISYFTIELKGNIPQEMKGKFDDWAFGCDVCQDVCPWNKFSKANNEPLFNPKPALLSMTRKDWKEITEETFRVVFKDSPLKRTKFEGLKRNIDFLK

SEQ ID NO: 76876 - protein, 286 aa, Flavobacterium weaverense
  misc_feature (1)..(286): tr|A0A3L9ZY62|A0A3L9ZY62_9FLAO Epoxyqueuosine reductase OS=Flavobacterium weaverense OX=271156 GN=BC961_0170 P E=4 SV=1
MSCGISKAGFLEEEAPRLENWLNQNRNGQMSYMENHFDIRLNPTLLVESSKSVISLLLNYYPEDLQNSDSFKISKYAYGEDYHFIIKDKLKEFLHSIQFEIGEVGGRAFVDSAPVLDRAWAAKSGLGWIGKNSNLITQKVGSFYFIAELIIDLDLDYDHAVTDHCGSCTACIDSCPTEAIVSPYIVDGSKCISYFTIELKESIPAAMKGKFDDWAFGCDVCQDVCPWNKFSKPHSEPLLTPHPDLLSMTKRDWIEITEETFRAVFKKSPIKRAKYLGLKRNIDFLK

SEQ ID NO: 76877 - protein, 254 aa, Flavobacterium xanthum
  misc_feature (1)..(254): tr|A0A1M7A584|A0A1M7A584_9FLAO Epoxyqueuosine reductase OS=Flavobacterium xanthum OX=69322 GN=SAMN05443669_100 683 PE=4 SV=1
MENHFDKRLNPTLLVDDAKSVVSLLLNYYPEQFQNPDSYKISKYAYGEDYHFVIKEKLKEFLFSIQSAIGEVSGRAFVDSAPVLDKAWAAKSGLGWIGKNSNLLTQKVGSFYFIAELIIDLDLDYDNPTTDHCGTCTACIDSCPTESIVSPYVVDGSKCISYFTIELKENIPQEMKGKFDDWAFGCDVCQDVCPWNKFSKPHNEPLFTVNPEIMSMSKKDWIEITEETFKTIFKNSPLKRAKFEGVKRNINFLK

SEQ ID NO: 76878 - protein, 261 aa, Flavobacterium xinjiangense
  misc_feature (1)..(261): tr|A0A1M7E7X0|A0A1M7E7X0_9FLAO Epoxyqueuosine reductase OS=Flavobacterium xinjiangense OX=178356 GN=SAMN052162 69_101377 PE=4 SV=1
MSYMENHFDKRLDPTLLVDDAKSVISLLLNYYPDQLQSQIVTSETYKISKYAYGYDYHFVIKEKLKELLFAIQSSIGDVSGRAFVDSAPVLDKAWAAKSGLGWIGKNSNLLTQKVGSFYFIAELIVDLNLEYDNATTDHCGTCTACIDACPTEAIVAPYIVDGSKCISYFTIELKENIPQEMKGKFDDWAFGCDVCQDVCPWNKFSKANNEPLFNPNPELLSMTKKDWKEITEETFRVVFKDSPLKRAKFKGIKRNIDFLQ

SEQ ID NO: 76879 - protein, 261 aa, Flavobacterium xueshanense
  misc_feature (1)..(261): tr|A0A1I1ZFP4|A0A1I1ZFP4_9FLAO Epoxyqueuosine reductase OS=Flavobacterium xueshanense OX=935223 GN=SAMN0448813 1_101334 PE=4 SV=1
MSFMENHFDKRLNPTLLVDDAKSIVSLLLNYYPEELQSRSVGTDSYKISKYAYGQDYHFVIKEKLKEFLTSIQSTIGEVSGRAFVDSAPVLDKAWAAKSGLGWIGKNSNLLTQKVGSFYFIAELIIDLDLDYDNPITDHCGTCTACIDACPTEAIVAPYVVDGSKCISYFTIELKENIPQEMKGKFDDWAFGCDVCQDVCPWNKFSKPHNEPLFNPNPELLSMSKKDWMELTEETFKVVFKNSPLKRAKFQGIKRNIDFLK

SEQ ID NO: 76880 - protein, 274 aa, Flavonifractor plautii
  misc_feature (1)..(274): tr|A0A1C7FIJ9|A0A1C7FIJ9_FLAPL (Fe-S)-binding protein O S=Flavonifractor plautii OX=292800 GN=A4U99_01415 PE=4 SV=1
MLDKWFAAAGAAAWGGVAFRRLLPFLSTGAREKVETLCPAPETVLVAAFPYYAGERPGNLSLYARGEDYHRVLTRRLNTVCDALRRKYPGESFVPAADNSPLPEREAAWLAGIGLRGKNGLLILPPYGTYVFLGTILTGAALDVPERPAAPDCPDCGACRAACPAGALGEGGPDVSRCLSELTQKKGALTEEEAARLKVHPLIWGCDFCQRACPYNAAPARSPLPEFSTSLVDALENSDLDGLTNRMFQDKYGARAFAWRGPGPLRRNLGLKEE

SEQ ID NO: 76881 - protein, 274 aa, Flavonifractor plautii
  misc_feature (1)..(274): tr|A0A4R2M3I7|A0A4R2M3I7_FLAPL 4Fe-4S dicluster protein OS=Flavonifractor plautii DSM 6740 OX=649753 GN=EV206_ 110118 PE=4 SV=1
MLDKWFAAAGAAAWGGVAFRRLLPFLSTGAREKVETLCPAPETVLVAAFPYYAGERPGNLSLYARGEDYHRVLTRRLNTVCDALRRKYPGESFVPAADNSPLPEREAAWLAGIGLRGKNGLLILPPYGTYVFLGTILTGAALDVPERPAAPDCPDCGACRAACPAGALGEGGADVSRCLSELTQKKGALTEEETARLRVHPLIWGCDFCQRACPYNAAPARSPLPEFSTSLVDALENSDLEGLTNRTFRDKYGGRAFAWRGPGPLRRNLGLKEE

SEQ ID NO: 76882 - protein, 176 aa, Flavonifractor sp.
  misc_feature (1)..(176): tr|A0A1Y4WGH9|A0A1Y4WGH9_9FIRM (Fe-S)-binding protein ( Fragment) OS=Flavonifractor sp. An10 OX=1965537 GN=B5E4 2_12820 PE=4 SV=1
MLDELFAAAGAAAWGGAAFRRLLPFLSTGALEKVENLCPRPRTVLAAAFPYFAGERPGNLSLYARGEDYHAVVVRRLNTVCEALAEQYPGESFFPSADNSPLPEREAAWLAGIGLRGASGLLILPPYGTYVFLGTILTGAALELPERPPAPDCPRCGACRAACPAGAMGADSYTHL

SEQ ID NO: 76883 - protein, 275 aa, Flavonifractor sp.
  misc_feature (1)..(275): tr|A0A1Y3RQE7|A0A1Y3RQE7_9FIRM (Fe-S)-binding protein O S=Flavonifractor sp. An91 OX=1965665 GN=B5G42_04590 PE= 4 SV=1
MLNKAFAAAGAAAWGGLPFSELAEDMTPEAIAKAEQLCPNPRTVLVAAFPYYAGDRPGNLSLYARGRDYHQVVTGKLNTICDILREKYPNGVCLPAADNSPLPERQAAWRCGIGLRGKNGLVILPPYGSYVFLGTILTDVELDLPPRTPSAHCVGCGKCLAACPGGALGEDGVNLSRCLSGLTQKKGELTGEEEALVKAHPLIWGCDCCQRACPYNASPELSPLPEFREDLVDALDRADLEGLTNRTFREQYGGRAFAWRGPAPLRRNLELKKSV

SEQ ID NO: 76884 - protein, 314 aa, Flectobacillus sp.
  misc_feature (1)..(314): tr|A0A267TDZ4|A0A267TDZ4_9BACT Epoxyqueuosine reductase OS=Flectobacillus sp. BAB-3569 OX=1509483 GN=queG PE=3 SV=1
MNQLRQHHTQLIKEQAKLLGFDFCGVSKATFLEEEAPRLEKWLNNNYHGAMNYMENHFDKRLDPRLLVDDAKSVVSLLYNYYPEEKLSEKEEDYKISKYAYGMDYHFVIKDKLKQLLDFIQENIGEVGGRAFVDSAPVMDKAWAKKSGLGWVGKNANLINKGHGSFFFIAELIIDLELEPDGPVKDFCGTCKRCIEACPTEAIVEPYVVNGSKCISYFTIELKDAIPIEMKGKFDNWMFGCDVCQDVCPWNRFSKPHKEPLFNLHPDLKDFTNKDWDEITTEVFNQVFKKSPVKRTKLEGLKRNIDFIGWNDKK

SEQ ID NO: 76885 - protein, 313 aa, Flexibacter flexilis
  misc_feature (1)..(313): tr|A0A1I1DUI3|A0A1I1DUI3_9BACT Epoxyqueuosine reductase OS=Flexibacter flexilis DSM 6793 OX=927664 GN=queG PE= 3 SV=1
MLAASTPARYAQLIKQKAAELGFDFCGISKAEFLEEEAPRLENWLNAQMHGQMHYMAGHFDKRLDPRLLVDGAKSVVSLMLNYFPAKDLAQPDNYKISKYAYGTDYHFVIKDKLNLLLQHLQTEIGEVNGRAFVDSAPVMDKAWAARSGLGWVGKNSNLIHKKAGSFFFIAELILDLELETDGPVKDYCGTCTRCLDACPTQAIVAPYQVDGSRCISYFTIELKEQIPASMKGQFEDWAFGCDVCQDVCPWNRFSRPHRTPAFGPSPELEHFTRRDWEEITQETFSKIFSKSAVKRTKLAGLQRNIQFLKNDE

SEQ ID NO: 76886 - protein, 308 aa, [Flexibacter] sp.
  misc_feature (1)..(308): tr|A0A1V2CB20|A0A1V2CB20_9FLAO Epoxyqueuosine reductase OS=[Flexibacter] sp. ATCC 35103 OX=1937528 GN=queG PE= 3 SV=1
MSINAKETYSKFIKSEAKRLGFLSCGISKAGFLEEEAPRLEKWLNNNHHGQMAYMENYFDKRLDPTLLVDDAKSVVSLLLNYYPEETQTQESFKISKYAYGQDYHFVIKEKLKEFLHSIQENIGDVSGRAFVDSAPVLDRAWAAKSGLGWIGKSGNLLTQKVGSFYFIAELILDLDLEYDHATTDHCGSCTACIDACPTQAIVAPHVVDGSKCISYYTIELKENIPYEMKGKFDEWMFGCDTCQDVCPWNRFSKPHSEPLFNPNPELLSFSKKDWIEITEETFRAVFKNSPIKRTKFDGLKRNVKFLE

SEQ ID NO: 76887 - protein, 308 aa, [Flexibacter] sp.
  misc_feature (1)..(308): tr|A0A1V2B604|A0A1V2B604_9BACT Epoxyqueuosine reductase OS=[Flexibacter] sp. ATCC 35208 OX=1936242 GN=queG PE= 3 SV=1
MQLAETHTAFIKAQAADLGFDHCGIARAVQLDDDARRLETWLNKGMHGNMKYMENHFDKRIDPRKLVDNARSVITLLLNYYPSEQQVPDAPRISKYAYGKDYHEVIKAKLNTLLARMQETMGEVSGRGFVDSAPVLERAWAQKSGLGWLGKNGNLIHKQAGSFFFIATLITDVELVYDNPVGDYCGSCTKCLDACPTGALVAPGVVDGSRCISYYTIELKELLIPEKMQGQFDNWMFGCDTCQDVCPWNRFSKPNQTAEFTPIPEILNFSTKDWEELTEEEFRRIFKHSPMKRSKYAGIRRNLNFLEF

SEQ ID NO: 76888 - protein, 320 aa, Flexibacter sp.
  misc_feature (1)..(320): tr|A0A2M7NFP1|A0A2M7NFP1_9BACT tRNA epoxyqueuosine(34) reductase QueG OS=Flexibacter sp. CG_4_10_14_3_um_filte r_32_15 OX=1975530 GN=queG PE=4 SV=1
MNPISLHQKTECFKNLAFEAGFLHCGISKATFLEKEARDLEKWLTQGKNGQMQWIENYFDIRLDPRLLVDNAKSVLTFAYNYYPPILLNKNKERESNYKISKYAYGRDYHKVIKKKLKHLINHLKEEFGDFNGRAFVDSAPIMEKVWAKKSGITWQGKHTNAINPKTGSFFFLATLVVDIELEYDSPTKDRCGNCTLCLDACPTDALSVENPYQIDGSKCISYFTIELKDKIPSEMQGKFEDWIFGCDICQDVCPWNKRKSAQIPHTENDFLPSELLQQMTKKDWQELTSELFDELFVGSAVKRTKFEGLKRNIDFLKPK

SEQ ID NO: 76889 - protein, 311 aa, Flexilinea flocculi
  misc_feature (1)..(311): tr|A0A0S7BRX7|A0A0S7BRX7_9CHLR Epoxyqueuosine reductase OS=Flexilinea flocculi OX=1678840 GN=ATC1_131142 PE=4 SV=1
MNQTSEKEIIKAEAEKLGFCFSGFTDPRKPDHFPRYLDWIEAGKYAGMNYLARHDHIEKRKNPAIIYPDCRSILVLGISICYEFEPSFFSVASFARYWDYHHQITELCGKLIDRISSRLCKDVHAKICTDSSPILERSLAVQAGLGWIGRNSMLIHPKYGSTTLLAECLLDIEIEPDPPYNDDRCGKCRLCVDTCPTKCIDPNTRTIDAGRCIAYQTVENHGEIEPEIAALCGNQIFGCDVCVKICPWNQKNLVNQTPLSLHHIVIGEMKDLDLSDAEFKEKYQETPILRTKNSGLKRNIRNALHNLAEGG

SEQ ID NO: 76890 - protein, 375 aa, Floricoccus penangensis
  misc_feature (1)..(375): tr|A0A1E8GG50|A0A1E8GG50_9LACT tRNA epoxyqueuosine(34) reductase QueG OS=Floricoccus penangensis OX=1859475 GN =BG262_02405 PE=4 SV=1
MDIKSQIIKLAEELNIQKIGFTKADDFEYMRKSLVYQKEKGHTSGFEHKNLDERLDPKLTLPSAKTIISVALAYPNKLQGRPDKTEFRRGSFARASWGIDYHHIMQKKLDALIQGINEIIDGLEYEGFVDTGPLIDVAVAARAGLGFIGKNGLLVTKEFGSYVYLGEIITSLEIEADKPVDYGCGDCNRCIDFCPTDALIGDGKMNAKKCLSFQTQNKGILQEEYRQKMKTIIYGCDICQMVCPYNKGIDSHFHPEMEGDPELVQPELIPFLDLTNRQFKDKYGHLAGSWRGRNVLQRNAIYALANANDKSAIPKLLEIVDSTQNQVLLGSAFWALGRLVKEPNREMINLVEHRITEDEQAMQEREKLLLLWYSR

SEQ ID NO: 76891 - protein, 375 aa, Floricoccus tropicus
  misc_feature (1)..(375): tr|A0A1E8GSE7|A0A1E8GSE7_9LACT tRNA epoxyqueuosine(34) reductase QueG OS=Floricoccus tropicus OX=1859473 GN=BG 261_01210 PE=4 SV=1
MDIKSQIIKLAEELNIQKIGFTKADDFEYMRKSLVDQKEKGHNSGFEHKNIDERLDPKLTLPSAKTIISVALAYPNKLQGRPDKTEFRRGSFARASWGIDYHHIMQKKLDALIEGINEIINGLDYEAFVDTGPLIDVVVAARAGLGFIGKNGLLVTKEFGSYVYLGEIITSLEIEADKPVEYGCGDCNRCIDFCPTDALIGDGKMNAKKCLSFQTQNKGILQEEYRQKMKTIIYGCDICQMVCPYNKGIDSHFHPEMEGDPELVQPELIPFLDLTNRQFKEKYGHLAGSWRGRNVLQRNAIYALANANDKSAIPKLLEIVDSTQNQVLLGSAFWALGRLVKEPNQDMINLVEDRDTDDEQAKQERENLLYLWYSR

SEQ ID NO: 76892 - protein, 348 aa, Fluviibacterium aquatile
  misc_feature (1)..(348): tr|A0A4R6AX40|A0A4R6AX40_9RHOB tRNA epoxyqueuosine(34) reductase QueG OS=Fluviibacterium aquatile OX=2552766 G N=queG PE=4 SV=1
MKAALEAQAQAEGFAKMGICRPDAVPELPARLDAFVEHGRHGQMAWMAERMTWRSDPAVLWPEARSVVMLAEPYTPDHDPLEVLTRRDRAAISVYAQNRDYHDLVKKRLKRVGRWLLEQPEATGHAIKVFVDTAPVMEKPLAAASGLGWQGKHTNLLGRDLGNWFFLGAIFTTIDLPADAPETERCGSCTACLDICPTAAFPAPFQLDARRCISYLTIEHRGAVDEELRGKMGNRIYGCDDCLAACPWNKFAAEARELRYAGRDDLRAPALADLVGLDDAAFRAKFSGSPIKRIGRDRFVRNVLYAIGNSGDPTLADAARTLICDPDPAVADAAAWAVQVLSHGEGFS

SEQ ID NO: 76893 - protein, 354 aa, Fluviicoccus keumensis
  misc_feature (1)..(354): tr|A0A4Q7ZA91|A0A4Q7ZA91_9GAMM Epoxyqueuosine reductase OS=Fluviicoccus keumensis OX=1435465 GN=queG PE=3 SV=1
MEKIPTTPDAATLATLIRQWGAELGFGQVGISGLDLGDHGDHLQRWLDKGYQGEMAWMASHGEKRWRPELLVEGVQSIISVRLDYLVDAPRHRHVPQEPATGVISRYARGRDYHKTLRKRLQQLADRLQTVVEGSGHRVFVDSAPVLERAVAEQAGLGWIGKNTMLIHRQAGSFFFLGELFTTLALPRDEAVSSHCGSCRACLDICPTQAFTGPYELDARRCISYLTIEYQGSIPVELRPLIGNRIFGCDDCQLICPWNRYAKLSAEADFRPRHGLENSPLWVLFGWTEEEFLRKTEGSPLRRTGYENFLRNIAVGLGNAPRLPEVLAALTARKEDESAMVREHVAWALQRHAD

SEQ ID NO: 76894 - protein, 310 aa, Fluviicola sp.
  misc_feature (1)..(310): tr|A0A2G2F7I9|A0A2G2F7I9_9FLAO Epoxyqueuosine reductase OS=Fluviicola sp. OX=1917219 GN=queG PE=3 SV=1
MNSKERNTQLIKQKAKDLGFFFCGISKADFLKEDAVHLDAFLKNNYQGKMSYLENHYDKRLDPRLLVDDAKSVVSLLMNYFPENEQEDPSAPKISKYAYGKDYHFLIKDRLKEFFAYIQDEIGEVGGRVFVDSAPVLDKAWAKKSGLGWVGKNANLIHPKHGSFFFIAELILDLELTEDGPMKDYCGTCTKCIDACPTGAIVKPYVVDGSKCISYLTIELKDELLPSEFKGKMDNWMFGCDICQDVCPWNRFSKPTKESHFDPHENLLKMSKVDWEDLTEEIFQELFRKSAVKRTKFKGLNRNIQFNSTE

SEQ ID NO: 76895 - protein, 311 aa, Fluviicola sp.
  misc_feature (1)..(311): tr|A0A316KJT7|A0A316KJT7_9FLAO Epoxyqueuosine reductase OS=Fluviicola sp. XM-24bin1 OX=2133950 GN=queG PE=3 SV =1
MSKEVHTQLIKGKAQELGFMYCGISKADFLEDEARRLDDWLKKDYHGKMSYMANNFDKRLDPRLLVDGAKSVVSLLLNYFPEQTQEDSDAPKISKYAYGKDYHFVIKDKLKSLMTYINEEIGEVGGRVFVDSAPVMDKAWAAKSGLGWIGKNSNLIHPKHGSFFFVAELIIDLELEPDGPMKDYCGTCTACIDECPTDAIVEPYVVDGSKCISYLTIELKDAIIPGHFKDQMDGWMFGCDVCQDVCPWNRFSKAHNELSFNPHENLLKMSKSDWEDLSEEVFREIFKNSAVKRTKYAGLKRNIQFLNNPSS

SEQ ID NO: 76896 - protein, 310 aa, Fluviicola taffensis
  misc_feature (1)..(310): tr|F2IB84|F2IB84_FLUTR Epoxyqueuosine reductase OS=Fluv iicola taffensis (strain DSM 16823 / NCIMB 13979 / RW26 2) OX=755732 GN=queG PE=3 SV=1
MQQDHIKRLIRTKAEKLGFLHVGFSKADFLASEEPRLVNWLKAEKHGKMSYMENHFDLRLDPRLLVPGAKTVISLAYNYFPESTQRKDTYQISKYAYGKDYHDVVKAKLRTLVSELQTEIGAVEGRVFVDSAPILEKAWAEKSGVGWLGKNGNLIQPKTGSFFFLAEIICDLEVEADGPIKDYCGSCTRCIDACPTQAIEAPYIVNGSKCISYATIELKDADLPELFRGNMNNWIYGCDICQDVCPWNRFSKPHSEIDFRPKDEILSFSKQDWEELDELAFQSIFKGSAVKRTKFSGLKRNVSFLSSTED

SEQ ID NO: 76897 - protein, 315 aa, Fodinibius salinus
  misc_feature (1)..(315): tr|A0A5D3YRI1|A0A5D3YRI1_9BACT Epoxyqueuosine reductase OS=Fodinibius salinus OX=860790 GN=queG PE=3 SV=1
MNLRKRTQKVREAALRLGFNACGFAKAGRLETEERRLREWLNQDRQGTMGWMANHFDKRVDPTKLVPGAKSVVSVIGSYYHPKHEQQQEQENSPKIAKYAQGRDYHKVYKKKLKALFAETEELLGGLEGRVFVDSAPVLDKAWAVRSGLGWMGKNSNILNKNLGSFFFIGEMIVDAKFQYDTPVTDHCGSCTRCIESCPTNAIYEPYRVDATKCISYLTIELKEEIPDEHRDDLGNWMFGCDICQDVCPWNRNAQYGQMEDLAPRDKILNHDINFWEELDIKQYDALFEGSAIRRAKFEKYKDNVAAAAANIKGD

SEQ ID NO: 76898 - protein, 582 aa, Fontibacillus panacisegetis
  misc_feature (1)..(582): tr|A0A1G7QKY6|A0A1G7QKY6_9BACL Methylated-DNA--protein- cysteine methyltransferase OS=Fontibacillus panaciseget is OX=670482 GN=SAMN04488542_12277 PE=3 SV=1
MATTKNGAAGSLAGKLPIWAELKQEIVAIAPSLGIDDIGFASADPFLSLKSILQQHREKGHESGFEEPDIEKRVHPELSLEQPASLISIAVAYPSKMDNPPKSEPGKRRGILARSAWGQDYHHVLRAAMAKLEEFILSRVPEARLVNMVDTGALVDRAVAERAGIGFSGKNCAIISPKWGSWIYLGELITNIPFPPDTPVTEGCGECTKCLDACPTGALIGPGQLNAQRCISFLTQTKGFLEEEFMLKIGNRLYGCDTCQIVCPKNKGKSWNHRPELQPEPEVAKPLLLPLLDMSNREFKETFGSSAASWRGKKPMQRNAVIALGNFKDRDSVPKLIDIMQNDPRPVMRGTAAWSLSRIGGEEALEAINRAIATEQDAEVLGRLQAAQGKLKAAAIKEDAVVLSEDQVLYYDEMDSVIGKLTLVTSTRGLCHIEFGPYSDCSDVLNRWMQRYYKGSQMVASKEALSTANQQLKEYFAGERRQFDLRLDLQGSEFQRKVWDALLTIPYVKTASYKDIAEMIGQPKAVRAVGGANNKNPIPIIVPCHRVIGSNGSLVGYGGGLSIKESLLSLERNMEYGSGQDQ

SEQ ID NO: 76899 - protein, 396 aa, Fontibacillus phaseoli
  misc_feature (1)..(396): tr|A0A369B431|A0A369B431_9BACL Epoxyqueuosine reductase OS=Fontibacillus phaseoli OX=1416533 GN=DFP94_11368 PE =4 SV=1
MARANNLTSETWKPGQSVWDELKREIKAAAPSFGIDDIGFASADPFLSLKSILLDRREKGYESGFEEPDLDKRIYPELSLEQPASLISIAVAYPSKMDNPPKSEPGRRRGILARSAWGQDYHQVLRQAMAKLKGFILERVPDARIEDMVDTGALSDRAVAQRAGIGFHGKNCAIISPEWGSWIYLGELITNIPFQPDTPVTEDCGDCTKCLDACPTGALVGPGVLNAQRCISFLTQTKGFLEEEFMVKIGNRLYGCDTCQVVCPKNKGKSWSHRTELQPDPETVKPLLLPILDLSNREFKERFGDSAAAWRGKKPIQRNAVIALGNFKDLSSVPKLIDIMVNDPRPVLRGTAAWALSRIGGEEALAAVAKAAESEADPEVLERIESARIKLEEIVT

SEQ ID NO: 76900 - protein, 299 aa, Fonticella tunisiensis
  misc_feature (1)..(299): tr|A0A4V3ETD0|A0A4V3ETD0_9CLOT Epoxyqueuosine reductase OS=Fonticella tunisiensis OX=1096341 GN=EDD71_10855 PE =4 SV=1
MKEKLKNFCKSIGIEYVGIASPGPYLELQKILEDRINKGFYTGFEEKELKKRIYPEITMPDVKSIIVCLFPYYVGYSNDTNISNYTYARDYHLIVKEKLINIGEFLRENIEGFNYMAFVDTGPLVDRYLAYLAGLGFWGINTHIINDKYGSYVFIGYLMVDYEFEFDTPHDRTCIQCGSCIRNCPGGAILGGFEIDPRRCVSYLTQKKGELSEEEKGCIRNNGHSVFGCDICQKVCPHNMNKEHTNMEEFKKDLIYKLNYDELNSISNKEFKRRYGDRAFSWRGRTIIVRNFEYLMDDK

SEQ ID NO: 76901 - protein, 359 aa, Fontimonas thermophila
  misc_feature (1)..(359): tr|A0A1I2HLI0|A0A1I2HLI0_9GAMM Epoxyqueuosine reductase OS=Fontimonas thermophila OX=1076937 GN=queG PE=3 SV=1
MNPALDHELPARIVQWARELGFSDAGVSTRELDQDHAHLRAWLAQGRHGGMAYMARDPALRVEPERLQPGTVSVISARLPYRSAQAADPAQVLADGTRAYISRYALGRDYHRVVRARLRKLAQRIEQAIAPHGYRVLCDSAPALEKALARDARLGWIGKHTLLLHREAGSWFFLGEIYTDLPLPPPRTPAVENACGRCSACMRICPTQAIVAPYQLDARRCISYLTIEHHGPIPLELRPLIGNRIFGCDDCQLVCPWNRHAQLSAIPDFAPRHGLDAARLVDLFAWSEAEWLARTEGMALRRTGYTRWLRNLAVALGNAPTSAEVVAALRARATHPDAVVREHVHWALARHGESAAHGQ

SEQ ID NO: 76902 - protein, 352 aa, Formivibrio citricus
  misc_feature (1)..(352): tr|A0A1I4WJC9|A0A1I4WJC9_9NEIS Epoxyqueuosine reductase OS=Formivibrio citricus OX=83765 GN=queG PE=3 SV=1
MHSEELDQLALQIKTWARELGFARAAIGGVDLGHAEASLQDWLAAGFHGEMDYMARHGLKRARPTELVPETRSLISVFMPYRVKDAADAKAILADGERAYISRYALGRDYHKVLRNRLQTLADRLAARIGPFGYRVFVDSAPVLEVEVARQAGQGWRGKHTLLLNRDHGSFFFLGELFTDLPLPADPPLPQEHCGSCSRCMDACPTSAIVAPYRVDARRCISYLTIELAGAIPDEFRPLIGNRVYGCDDCQLACPWNRFAVTTDEPDFAVRHGLDDVKLVELFGWSEEDFKSRMAGSAIYRIGYPRWLRNIAVGLGNAPMTPAVLAALQARRDAPDLMVRAHVRWALAQHEL

SEQ ID NO: 76903 - protein, 306 aa, Formosa agariphila
  misc_feature (1)..(306): tr|T2KHQ6|T2KHQ6_FORAG Epoxyqueuosine reductase OS=Form osa agariphila (strain DSM 15362 / KCTC 12365 / LMG 230 05 / KMM 3901) OX=1347342 GN=queG PE=3 SV=1
MNIKAKNTSLIKTEAKRLGFLSCGISKAEFLELEAPRLERYLNQNFHGEMDYMEHHFDKRLDPTILVEGSKSVISLLLNYYPNKLQQEDTYKLSKYAYGKDYHFVIKEKLKELLHTIESEIGAVNGRAFVDSAPVLDKAWAAKSGLGWIGKHSNLLTQQVGSFYFIAELIIDLELEYDGATTDHCGTCTKCIDACPTDAITEPYVVDGSKCISYFTIELKDQLPESEKGKFEDWMFGCDICQDVCPWNRFSQPHKEPLFNPHPELLEMSKKDWEEITEDIFRKVFQKSAVKRTKFTGLTRNIDFLK

SEQ ID NO: 76904 - protein, 306 aa, Formosa algae
  misc_feature (1)..(306): tr|A0A2K2ZEU5|A0A2K2ZEU5_9FLAO Epoxyqueuosine reductase OS=Formosa algae OX=225843 GN=queG PE=3 SV=1
MSLKSKHTHIIKAEAKRLGFLSCGISKAQFLEEEAPRLEAYLNKNFHGQMQYMEHHFDKRLDPTKLVEGSKSVVSLLLNYYPHECQTKDTYKLSKYAYGKDYHFVIKEKLKELLHTIQTEIGEVDGRAFVDSAPVLDKAWAAKSGLGWIGKHSNLLTQQVGSFYFIAELIIDLELNYDGITTDHCGSCTKCIDACPTDAITEPYVVDGSKCISYFTIELKDQLPESEKGKFEDWMFGCDICQDVCPWNRFSKPHNEPLFNAHPDVLSMTKSDWEDITEDTFKTIFQKSAVKRTKLAGLKRNISFLK

SEQ ID NO: 76905 - protein, 308 aa, Formosa sp.
  misc_feature (1)..(308): tr|A0A2D4WWS5|A0A2D4WWS5_9FLAO Epoxyqueuosine reductase OS=Formosa sp. OX=2018467 GN=queG PE=3 SV=1
MSKKAVYAQSIKSEAKRLGFLSCGISKAEFLEEEAPRLESWLHQNKHGKMYYMENHFDKRLDPTLLVEGSKSVISLTYNYYIDKPQQDPNAPKISKYAYGLDYHYVIKDKLNQLLEFIKEEIGDVHGRAFVDSAPIMEKAWAKKSGLGWIGKNSNLITQKVGSFYFISELIVDLDLEVDHAVTDHCGSCKACIDACPTEAITEPFQVDGSKCISYFTIELKDNIPNEMKGKLDHWAFGCDICQDVCPWNRFSKQHSEPLFNPKPELLSMTKNDWEEITQETFNKVFKKSAVKRTKYTGLKRNIKFLKE

SEQ ID NO: 76906 - protein, 306 aa, Formosa sp.
  misc_feature (1)..(306): tr|A0A516GN46|A0A516GN46_9FLAO Epoxyqueuosine reductase OS=Formosa sp. PS13 OX=2594004 GN=queG PE=3 SV=1
MRTQTRHTQIIKTEAKRLGFLSCGISKAEFLETEAPRLERFLNQNYHGQMQYMENHFDKRLDPTKLVEGSKSVVSLLLNYYPHQFQNIDSYKLSKYAYGTDYHFVIKEKLKELLYTIQTEIGDVHGRAFVDSAPVLDKAWAAKSGLGWIGKHSNLLTQQVGSFYFIAELIIDLELEYDGITTDHCGTCTKCIDACPTDAITEPYVVDGSKCISYFTIELKDQLPESEKGKFEDWMFGCDICQDVCPWNRFSKPHNEPHFNPHPDVLQMTKKDWEEITEETFKKVFQKSAVKRTKLTGLKRNINFLK

SEQ ID NO: 76907 - protein, 307 aa, Formosa spongicola
  misc_feature (1)..(307): tr|A0A316DS99|A0A316DS99_9FLAO Epoxyqueuosine reductase OS=Formosa spongicola OX=570520 GN=queG PE=3 SV=1
MNTKQKHTELIKTEAKRLGFLSCGISKAQFLEEEAPRLEKWLSNNMHGEMQYMENHFDKRLDPTKLVDNSKSVISLLLNYYPKDIQNQNSYKLSKYAYGTDYHFIIKDKLKSLLNYIQDEIGEVEGRAFVDSAPVLDKAWAAKSGLGWIGKHSNLLTQQVGSFYFIAELIIDLELEHDSITSDHCGTCTACIDACPTEAIKEPYVVDGSKCISYFTIELKDNLPTEFKGKFDDWMFGCDVCQDVCPWNRFSKAHNEPLFNPHPELLSMTKKDWEDITEDTFKKVFQKSAVKRTKYSGLTRNIKFLKD

SEQ ID NO: 76908 - protein, 362 aa, Francisella adeliensis
  misc_feature (1)..(362): tr|A0A2Z4XYC2|A0A2Z4XYC2_9GAMM Epoxyqueuosine reductase OS=Francisella adeliensis OX=2007306 GN=queG PE=3 SV=1
MQIKLSLEQWQKIQDYATNELGISSISKADCDLSEYIPYYDKWIENNYHADLGYMTKHGSKRFVPDKLVPGTNSVIVTTLNYSNRPISTKNEVKRLRSESNIADISIYAHGRDYHKVMKKKLQKLGEYINDIIDTHEFRVFTDSAPVLEKPLAEKAGLGWMGKNSMLMNKSQGSFFFIGVIYSNLDLSHLPNNPKHLDACGKCQACIKLCPTNAITPGKMIDSRRCISYLTIENKGAIAQEFRDAIGTRIYGCDDCQLVCPFNNSAPQTKEKDFQLREFLVNRPLLELYSWDSNDFDKNTQGSAIRRIGYNAWVRNISIAIGNSSYSLNNILALENKKLEFKDNDLILEHIDWAVNKQKNSQ

SEQ ID NO: 76909 - protein, 362 aa, Francisella cf.
  misc_feature (1)..(362): sp|F4BEN2|QUEG_FRACF Epoxyqueuosine reductase OS=Franci sella cf. novicida (strain Fx1) OX=984129 GN=queG PE=3 SV=1
MKLELSLEQWQQVKDFAIRNLNLSSISKADCDLSEYIPYYNKWLENNYHADLEYMVKHGSKRFIPNELVPGTNSVIVATLNYLNRPVNVKTEVKRLRTTSNIADISIYAHGRDYHKVMKKKLQQLGEFIDELTGGHQFRVFTDSAPVLERPLAEKAGLGWQGKSSMLMNKAQGSFFFIGVIYSNLDLSKLPDSPKHQDSCGKCQACIKLCPTGAIQPGKMIDSRKCISYLTIENKGSIPLELRDKIGTRIYGCDDCQLVCPFNNYAPITTEKDFQQRDFLVNKPLLELLAWSEKDFDKYTQGSAIRRIGYAAWIRNIAIAVGNSPFNQDNIQALELKKLEFSDNQLVLEHLDWAINKQKLLS

SEQ ID NO: 76910 - protein, 368 aa, Francisella hispaniensis
  misc_feature (1)..(368): tr|F4BG12|F4BG12_9GAMM Epoxyqueuosine reductase OS=Fran cisella hispaniensis OX=622488 GN=queG PE=3 SV=1
MKVELSLEQWQQVKDFAIRSLNLSSISKADCDLSEYIPHYNKWLENNYHADLDYMVKHGSKRFIPNELVAGTNSVIVATLNYLNRPVNVKTEVKRLRTANNIADISIYAHGRDYHKVMKKKLQQLGEFIDKLTGGHQFRVFTDSAPVLERPLAEKAGLGWQGKSSMLMNKSQGSFFFIGVIYSNLDLSKLPDLPKHQDSCGKCQACIKLCPTGAIQSGKMIDSRKCISYLTIENKGAIPIELRDKIGTRIYGCDDCQLVCPFNNTAPITTEKDFQQRDFLVNKPLLELFAWSEKDFDKYTQGSAIRRIGYAAWIRNIAIAIGNSPFSQANLQALELKKSHFSNNQLVLEHIDWAIKKQKLLSYTDKTL

SEQ ID NO: 76911 - protein, 368 aa, Francisella hispaniensis
  misc_feature (1)..(368): tr|A0A153JHA4|A0A153JHA4_9GAMM Epoxyqueuosine reductase OS=Francisella hispaniensis FSC454 OX=1088883 GN=queG PE=3 SV=1
MKVELSLEQWQQVKDFAIRSLNLSSISKAHCDLSEYIPHYNKWLENNYHADLDYMVKHGSKRFIPNELVAGTNSVIVATLNYLNRPVNVKTEVKRLRTANNIADISIYAHGRDYHKVMKKKLQQLGEFIDKLTGGHQFRVFTDSAPVLERPLAEKAGLGWQGKSSMLMNKSQGSFFFIGVIYSNLDLSKLPDLPKHQDSCGKCQACIKLCPTGAIQSGKMIDSRKCISYLTIENKGAIPIELRDKIDTRIYGCDDCQLVCPFNNTAPITTEKDFQQRDFLVNKPLLELLAWSEKDFDKYTQGSAIRRIGYAAWIRNIAIAIGNSPFSQANLQALELKKSHFSNNQLVLEHIDWAIKKQKLLSYTDKTL

SEQ ID NO: 76912 - protein, 368 aa, Francisella marina
  misc_feature (1)..(368): tr|A0A5C2C233|A0A5C2C233_9GAMM Epoxyqueuosine reductase OS=Francisella marina OX=2249302 GN=queG PE=3 SV=1
MKLKLSLEQWQQVQKFATADLGLSSISKSDCDLSEYIPHYDKWIENNYQADLEYMTKHGSKRFVPDELVPGTNSVIVATLNYLNRPVTIKNEVKRLRSQTNIAEISIYAHGRDYHKVMKKKLQKLGEYIDDLTGGHQFRVFTDSAPVLERPLAEKAGLGWQGKSSMLMNKLQGSFFFIGVIYSNLDLSDLPNLPKHQDSCGKCQACIKLCPTGAIQHGKMIDSRKCISYLTIENKGPIPLELRDKIGTRIYGCDDCQLVCPFNNNAPVTTEKDFQQRDFLINKPLLELFSWSKKDFDKYTQGSAIRRIGYDAWIRNIAVGIGNSPYKQENILSLENKKNEFIDNKIILEHIEWALNKQIKLSKIDKRL

SEQ ID NO: 76913 - protein, 125 aa, Francisella noatunensis
  misc_feature (1)..(125): tr|I2AZ63|I2AZ63_FRANT Uncharacterized Fe-S protein OS= Francisella noatunensis subsp. orientalis (strain Toba 04) OX=1163389 GN=OOM_0997 PE=4 SV=1
MKLKLSAMQWQEVQKFATDSLGLSSISKADCDLSEYIPYYNKWIENNYHADLEYMVKHGSKRFIPNELVPGTNSVIVATLNYLNRPITIKNEVKRLKSSTDIADISIYAHGRDYHKVMKKTSTIR

SEQ ID NO: 76914 - protein, 147 aa, Francisella noatunensis
  misc_feature (1)..(147): tr|I2AZ65|I2AZ65_FRANT Putative Fe-S protein OS=Francis ella noatunensis subsp. orientalis (strain Toba 04) OX= 1163389 GN=OOM_0999 PE=4 SV=1
MINLRKCISYLTIENRGSIPLELRDKIGTRIYGCDDCQLVCPFNNNTPVTTEKDFQQRDFLISKPLLELFSWSRNNFDKYTQGSAIRRIGYGAWIRNIAIGIRNSPYKQENILALENKKNEFLDKEIVLEHIICALNKQINLSKIDK

SEQ ID NO: 76915 - protein, 362 aa, Francisella novicida
  misc_feature (1)..(362): tr|A0A2L1CJ68|A0A2L1CJ68_FRANO Epoxyqueuosine reductase OS=Francisella novicida OX=264 GN=queG PE=3 SV=1
MKLELSLEQWQQVKDFAIRNLNLSSISKADCDLSEYIPYYNKWLENNYHADLEYMVKHGSKRFIPNELVPGTNSVIVATLNYLNRPVNVKTEVKRLRTTSNIADISIYAHGRDYHKVMKKKLQQLGEFIDELTGGHQFRVFTDSAPVLERPLAEKAGLGWQGKSSMLMNKAQGSFFFIGVIYSNLDLSKLPDPPKHQDSCGKCQACIKLCPTGAIQPGKMIDSRKCISYLTIENKGTIPLELRDKIGTRIYGCDDCQLVCPFNNYAPITTEKDFQQRDFLVNKPLLELLAWSEKDFDKYTQGSAIRRIGYAAWIRNIAIAVGNSPFNQDNIQALELKKLEFSDNQLVLEHLDWAINKQKLLS

SEQ ID NO: 76916 - protein, 366 aa, Francisella philomiragia
  misc_feature (1)..(366): tr|A0A0E1N5H8|A0A0E1N5H8_9GAMM Epoxyqueuosine reductase OS=Francisella philomiragia OX=28110 GN=queG PE=3 SV=1
MKLKLSAMQWQQVQKFATDSLGLSSISKADCDLSEYIPYYNKWIENNYHADLEYMIKHGSKRFVPNELVPGTNSVIVATLNYLNRTIAIKNEVKRLKSSTDIADISIYAHGRDYHKVMKKKLQRLGEYINELTGDHQFRVFTDSAPVLERPLAEKAGLGWQGKSSMLMNKIQGSFFFIGVIYSNLDLSDLPTLPKHQDSCGKCQACIKLCPTGAIQHGKMIDSRKCISYLTIENKGSIPLELRDKIGTRIYGCDDCQLVCPFNNNAPITREKDFQQRDFLINKPLLELFSWTRKDFDKYTQGSAIRRIGYDAWIRNIAIGIGNSPYKPENILSLENKKNEFLDKEIVLEHIKWALNKQINLSKIDK

SEQ ID NO: 76917 - protein, 366 aa, Francisella philomiragia
  misc_feature (1)..(366): tr|A0A0B6EYX9|A0A0B6EYX9_9GAMM Epoxyqueuosine reductase OS=Francisella philomiragia subsp. philomiragia ATCC 2 5015 OX=539329 GN=queG PE=3 SV=1
MKLKLSAMQWQQVQNFATDSLGLSSISKADCNLSEYIPYYNKWIENNYHADLEYMIKHGSKRFVPNELVPGTNSVIVATLNYLNRTIAIKNEVKRLKSSTDIADISIYAHGRDYHKVMKKKLQRLGEYINELTGDHQFRVFTDSAPVLERPLAEKAGLGWQGKSSMLMNKIQGSFFFIGVIYSNLDLSDLPTLPKHQDSCGKCQACIKLCPTGAIQHGKMIDSRKCISYLTIENKGSIPLELRDKIGTRIYGCDDCQLVCPFNNNAPITTEKDFQQRAFLINKPLLELFSWTRKDFDKYTQGSAIRRIGYDAWIRNIAIGIGNSPYKPENILSLENKKNEFLDREIVLEHIKWALNKQINLSKIDK

SEQ ID NO: 76918 - protein, 368 aa, Francisella sp.
  misc_feature (1)..(368): tr|F8G885|F8G885_FRAST Epoxyqueuosine reductase OS=Fran cisella sp. (strain TX077308) OX=573569 GN=queG PE=3 SV =1
MKLKLSLEQWQQVQKFATTNLGLSSISESDCDLSEYIPHYNKWIENNYQADLEYMTKHGSKRFVPDELVPGTNSVIVATLNYLNRPVAIKNEVKRLRSQTNIAEISIYAHGRDYHKVMKKKLQKLGEYIDDLTGGHQFRVFTDSAPVLERPLAEKAGLGWQGKSSMLMNKLQGSFFFIGVIYSNLDLSDLPNLPKHQDSCGKCQACIKLCPTGAIQHGKMIDSRKCISYLTIENKGPIPLELRDKIGTRIYGCDDCQLVCPFNNNAPVTTEKDFQQRDFLINKPLLELFSWSKKDFDKYTQGSAIRRIGYDAWIRNIAVGIGNSPYKQENILSLENKKNEFIDNKIILEHIEWALNKQIKLSKIDKRL

SEQ ID NO: 76919 - protein, 366 aa, Francisella sp.
  misc_feature (1)..(366): tr|A0A073A7Q0|A0A073A7Q0_9GAMM Epoxyqueuosine reductase OS=Francisella sp. W12-1067 OX=1385420 GN=queG PE=3 SV =1
MKLELTLKQWQKVKNYAVNELGLSSLSKADCDLSEYIPYYNKWIENGYHAELDYMVKHGQKRFVPDQLVPGTNSVIVATLNYLNRPISTKTEVKRLRAPSEIAEVSIYAHGRDYHKVMKKKLQKLGEYIDKITSDHQFRVFTDSAPVLEKPLAEKAGLGWIGKNSMLMNKEQGSFFFIGVIYSNLDLSKLPNTDLKLNECGKCQACIKLCPTGAILPNKMIDSRKCISYLTIENKEAIPLEFRDKIGTRIYGCDDCQLVCPFNNQAPVTTEQDFQQRDFLVNRPLLELFSWSKEDFDKYTQGSAIRRIGYDAWIRNVSIAIGNSPYKHENLLALENKRAEYLDNFLILEHIDWAINKQRACLILVK

SEQ ID NO: 76920 - protein, 176 aa, Francisella tularensis
  misc_feature (1)..(176): tr|A0A0B3VE41|A0A0B3VE41_FRATU Epoxyqueuosine reductase OS=Francisella tularensis subsp. holarctica OX=119857 GN=queG PE=4 SV=1
MSKLPDSPKHQDSCGKCQACIKLCPTGAIQPGKMIDSRKCISYLTIENKGTIPLELRDKIGTRIYGCDDCQLVCPFNNYAPITTEKDFQQRDFLVNKPLLELLAWSEKDFDKYTQGSAIRRIGYAAWIRNIAIAVGNSPFNQDNIQALELKKLEFSHNQLVLEHLDWAINKQKLLS

SEQ ID NO: 76921 - protein, 162 aa, Francisella tularensis
  misc_feature (1)..(162): tr|A0A0M1U5N7|A0A0M1U5N7_FRATT Epoxyqueuosine reductase OS=Francisella tularensis subsp. tularensis (strain SC HU S4 / Schu 4) OX=177416 GN=queG PE=4 SV=1
MSKLPDSPKHQDSCGKCQACIKLCPTGAIQPGKMIDSRKCISYLTIENKGTIPLELRDKIGTRIYGCDDCQLVCPFNNYAPITTEKDFQQRDFLVNKPLLELLAWSEKDFDKYTQGSAIRRIGYAAWIRNIAIAVGNSPFNQDNIQALELKKLEFSHNQLVL

SEQ ID NO: 76922 - protein, 379 aa, Franconibacter pulveris
  misc_feature (1)..(379): tr|A0A0J8VSS8|A0A0J8VSS8_9ENTR Epoxyqueuosine reductase OS=Franconibacter pulveris OX=435910 GN=queG PE=3 SV=1
MSAPLDLNQLARDIKQWGAELGFQQVGITDTDLSASEGALQAWLDKQYHGEMEWMARHGMMRARPHELLPGTLRVISVRMNYLPANAAFARTLKDPSLGYVSRYALGRDYHKLLRNRLKKLGERIQQQCASLNFRPFVDSAPLLERPLAEKAGLGWTGKHSLILSRDAGSFFFLGELLIDLPLPVDKPVEEGCGKCVACMTICPTGAIVEPYTVDARRCISYLTIELEGAIPEAFRPLIGNRIYGCDDCQLICPWNRFSQLTDEEDLTPRQALHAPKLVELFGWSEAHFLKVTEGSAIRRIGHLRWLRNIAVALGNAPWDEANLQALEKRKGEHPLLDEHIEWAIAQQIARRNANVIEVQLPQKQRLVRVVEKGLPRDA

SEQ ID NO: 76923 - protein, 353 aa, Frankia sp.
  misc_feature (1)..(353): tr|A0A4R1DBN8|A0A4R1DBN8_9ACTN Epoxyqueuosine reductase OS=Frankia sp. BMG5.11 OX=222540 GN=queG PE=3 SV=1
MVNRPATDDLRVALVEQARAEGFAAIGIASAAPDRPRAEQLDLWLGDDRHGTMDWMATRVAERASPQTLWPEANSVIALGMSYAPANDPLALAGESDKGRISVYAQGRDYHDTVKKALKRLARWLVAQAPGEQVKVFVDTAPVMEKPLGQAAGLGWQGKHTNLVSRADGSWLFLGAIYTTIDFAPDAAHQPRCGSCSACLDACPTAAFPAPFQLDARRCISYLTIENAGPIPHEFRKAIGNRIYGCDDCLAVCPWNRFAQSAAANAAFLPRAELAAPRLAELLALDDAAFRRLFSGSPIKRIGRNRFVRNCLIAAGNSADPTLVEPVSRLARDADPVVAEAAQWALRELTAVP

SEQ ID NO: 76924 - protein, 400 aa, Frateuria aurantia
  misc_feature (1)..(400): tr|H8L0U0|H8L0U0_FRAAD Epoxyqueuosine reductase OS=Frat euria aurantia (strain ATCC 33424 / DSM 6220 / NBRC 324 5 / NCIMB 13370) OX=767434 GN=queG PE=3 SV=1
MQPLAAEARRNDGRGRANRPIRSRACHPLPTIDGMSLASAIDYHHLARRIKYWAGELGFADTGIADVALGDDEGHLQRWLDAGFHGEMDYMARHGMKRARPAELEPGTRRVISVRMDYIPPGLPHAWEVIADPAAGYVARYALGRDYHKLMRNRLQKLAERIREVTGDFGYRAFVDSAPVLEKALARNAGLGWIGKHTVVINRRAGSYFFLGELYTDLPLPVDAPASAHCGSCSRCIDICPTRAIVAPYRLDARRCISYLTIELQGSIPEPLRAPIGNRIFGCDDCQLVCPWNKFAQLSTEPDFAPRHQLDGPRLIDLFSWSEATFLDRTQGMAIRRTGHAGWSRNIAVALGNATPTPAVWSALMSRALDPSDLVREHVQWALARQRQLQQTLSLRFRPA

SEQ ID NO: 76925 - protein, 358 aa, Frateuria sp.
  misc_feature (1)..(358): tr|A0A0Q9PTN9|A0A0Q9PTN9_9GAMM Epoxyqueuosine reductase OS=Frateuria sp. Soil773 OX=1736407 GN=queG PE=3 SV=1
MAGMPAAAPPDYDALARDIKRWARELGFADAGISGVALGEDEQHLRRWLEDGHHGEMEYMARHGDKRSRPAELEPGTQRVISVRMDYVPPGTRNAWEVIRDGEAGYVARYALGRDYHKLMRNRLQKLAERIHAAVGDFGYRAYVDSAPVLEKALARNAGLGWIGKHTVLINRRAGSYFFLGELYTDLPLPVDEAATAHCGSCRRCIDICPTQAIVGPYRLDARRCISYLTIELRGSIPEELRAPIGNRIFGCDDCQLICPWNKFAQDAAEPDFAPRHRLDGAKLVELFGWSEDEFLKRTEGMAIRRTGYEGWLRNIAVALGNAPASAAVRDALRARLDDPSAIVREHVAWALARQQAA

SEQ ID NO: 76926 - protein, 366 aa, Frateuria terrea
  misc_feature (1)..(366): tr|A0A1H6YID2|A0A1H6YID2_9GAMM Epoxyqueuosine reductase OS=Frateuria terrea OX=529704 GN=queG PE=3 SV=1
MSVVPSPDYALLARDIKQWALELGFAQAAISGVELGEDETHLEHWLGEGLHGEMDYMARHGTRRSRPAELEPGTLRVISVRMDYRAPGTRHAWDVLNDGEAGYVARYALGRDYHKLMRNRLQKLAERIRAAIGEFGYRAYVDSAPVLEKALARNAGLGWIGKHTVLINKDAGSYFFLGELYTDLPLPVDAPATAHCGTCTRCIEVCPTQAILGPYRLDARRCISYLTIELKGSIPEELRAPMGNRIFGCDDCQLVCPWNKFAQDATEPDFAPRHSLDGAKLAELFGWSEQEFLRRTEGMAIRRTGYEGWLRNIAVALGNAPSSAQVVATLRTREHAASRIVREHVAWALARHGERILEGGPQPAAS

SEQ ID NO: 76927 - protein, 324 aa, Fremyella diplosiphon
  misc_feature (1)..(324): tr|A0A1Z4MDF2|A0A1Z4MDF2_MICDP Epoxyqueuosine reductase OS=Fremyella diplosiphon NIES-3275 OX=1973485 GN=queG PE=3 SV=1
MNSSGITTTDVVKKKAQELGFHKVGIAAVDGVDETAAQRLQAWLALGYNADMAWMANPKRQDIRLIMPEARSLICVALNYYTPHQRPTGEEYGKISRYGWGRDYHKVMHKRLKALNNWVQSLSENVQARYYADTGPVPDKLWAQKSGIGWIAKNGNVITREYGSWVFLGEIITNLELECDRPATEHCGTCTRCLEACPTGAITQPYVVDANRCIAYHTIENRAEQLPPNVKPHLQGWVAGCDICQDVCPWNQRFAKSTDVEEFNPYPGNLAPKLLELAEISEEEWEQQFTASALRRIKPEMLRRNARANLDASRQQNDSDSDYF

SEQ ID NO: 76928 - protein, 306 aa, Frisingicoccus caecimuris
  misc_feature (1)..(306): tr|A0A4V2SE21|A0A4V2SE21_9FIRM Epoxyqueuosine reductase OS=Frisingicoccus caecimuris OX=1796636 GN=EV212_10198 PE=4 SV=1
MVDLYRLAEELNIDDIAVCHAEKFNSVEQLLKKDVELGILPPFVETDIHRRVCPEETLARAKSFIVILEHYEPSVYKVREGLYGNISPAASGEDYHRIVRRKLSGLMSALEAADPDGRRLAYVDNSPFSEKHVAIRAGLGRLMRNGLFYSRKFGSRCYIGLILSDRPADFYGLPFRRDDEDPWFERCRTCSACQKFCPGKAITEAGMNSYRCVSYLTQKKEPLSPEEERIMGRQIYGCDVCQNVCPLNRPTVPAGYTTGTEVSLEELLTMSNKQFKMHYQATAAGWRGKKQLQKNAEIVLKNIMER

SEQ ID NO: 76929 - protein, 376 aa, Frisingicoccus caecimuris
  misc_feature (1)..(376): tr|A0A4R2LW21|A0A4R2LW21_9FIRM Epoxyqueuosine reductase OS=Frisingicoccus caecimuris OX=1796636 GN=EV212_1083 PE=4 SV=1
MNKQELTLKIKYKAYELGFARVGIAPADDFSEYEEEFRSRIDDYQFLVGDAIDPLKGSRPKTVMPEGKSIVALVWDYSKTIYPEKLVQSFGRAYLSRTYLPKENSEHGARLRVFTDYMESLGLHIAPGLHMPERNACARAGITNYGKNNFAYAEGCGSYIILRAFLVDQELVYDKPTVECGCPPNCHLCIDSCPTGALYAPGKLKPEKCLLYNQMRGTYNMEVRDKAGTSIHGCDICQAVCPRNKKVAAQANRRDHFLELLAEDFDLEKVLLLTPDYYEKVIYPIAYNYIHKLELFQRNAAIALGNTGDQAHVPALMQALETCKPRVQGAAAWALGKIGGKEAEAALKRQLMQENTDERTKAEILHALEMCAVKAF

SEQ ID NO: 76930 - protein, 342 aa, Fuerstia marisgermanicae
  misc_feature (1)..(342): tr|A0A1P8W9H5|A0A1P8W9H5_9PLAN Epoxyqueuosine reductase OS=Fuerstia marisgermanicae OX=1891926 GN=queG PE=4 SV =1
MSETEQLSALLKSQGKAIGFNLVGIAPAVSPAGFHPLLEWIGNGYHADMDWIPRRENAYQHPNGVLPNTRSVIVVALNYHSQPPASDTARIARYAWGTEDYHSLMRRKLKLVTETLHQHQPHDRTRVIIDTAPLLERDFAQLAGIGWRGKNTMLISREIGSWFFLGAILTTAELNYDTPFETEHCGTCTRCLDACPTDAFPEPHVLDANKCISYLTIERRDKPVPDELKNGVGNWVFGCDICQEVCPWNRFAPNDCLPEFQPVPHLHNLQIADLLSLTESQFNFQFANTPLERTGRDVIIRNAAIVAANQRDPAYLPLLQKLQTDSSPLVRDAANWAILAIQ

SEQ ID NO: 76931 - protein, 396 aa, Fulvimarina manganoxydans
  misc_feature (1)..(396): tr|A0A1W2CG56|A0A1W2CG56_9RHIZ Epoxyqueuosine reductase OS=Fulvimarina manganoxydans OX=937218 GN=queG PE=3 SV =1
MTDAATIGLKAFLTEDARRLGFSALGVAPGEGDGLAGERLAEFVEAGRHGTMEWMPETLDRRRSAKALWPEVRSIVVLAMNYGPDEDPLAILDRPDRGAISVYARHRDYHDVIKGKLKELAGRLVAEARRRGLGDHEVKVFVDTAPVMEKPLGAMAGLGWQGKHTNLLSRDFGSWLFLGSIFTTLPLEADEPASDRCGSCRACLDACPTDAFPAPYQLDARRCISYLTIETKHVIPRPLRKAMGNRIYGCDDCLAVCPWNKFAKQAREAKLVAREDLKAPRLTDLLALDDAAFRQLFSGSPIKRIGRAKFVSNCLVAAGNSGDPGFLPHIEALLSDDQPLVRAMAVWALAQLSPHDALQRSAPALDREGDDIVRDEWQAAARWKSDMRETASERME

SEQ ID NO: 76932 - protein, 347 aa, Fulvimarina pelagi
  misc_feature (1)..(347): tr|Q0G221|Q0G221_9RHIZ Iron-sulfur cluster-binding prot ein OS=Fulvimarina pelagi HTCC2506 OX=314231 GN=FP2506_ 01380 PE=4 SV=1
MAWMPKTQKRRRSARMLWPKVKSILVLAMNYGPEDDPLAVLDRPDRGGISVYARHRDYHDVIKGKLKELAGRLIAEARKAGLGDHDAKVFVDTAPVMEKPIGAMAGLGWQGKHTNLLSRDFGSWLFLGSIFTTLDLPVDEPVADRCGSCTACLDICPTDAFPAPYQLDARLCISYLTIETKRPIPRDLRPKMGNRIYGCDDCLAVCPWNKFAKKASEAKLIAREDLKAPRLADLLVLDDNGFRAFFSGSPIKRIGRDKFVSNCLIAAGNSGDSHFLPIVRRLLADPSSCVREMAVWAFGRLAEPAEVLSAAGEAQDRERDEQVREEWQAVIAMIEERSTERAGRGTV

SEQ ID NO: 76933 - protein, 385 aa, Fulvimarina sp.
  misc_feature (1)..(385): tr|A0A2E1H7L7|A0A2E1H7L7_9RHIZ Epoxyqueuosine reductase OS=Fulvimarina sp. OX=1969479 GN=queG PE=3 SV=1
MTTAALASLKTFLQADARRLGFASAGIAEASGNVLAGDRLAEFVAAGRHGTMGWMPQTLDRRRSPRDLWPEVRSIVVLAMNYGPDEDPLEILQHPDRGAISVYARHRDYHDVIKGRLKELAGRLVARAREAGLGDHDAKVFVDTAPIMEKPLGELAGLGWQGKHTNLLSRDFGSWLFLGSIFTTLDLPADEAGRDRCGSCRACLTACPTDAFPAPYQLDARRCISYLTIETRTVIPREFRAAMGNRIYGCDDCLAVCPWNKFAQDASEAKLIAREDLKAPRLADLLGLDDPGFRGLFSGSPIKRIGRDKFVSNCLIAAGNSGRAEFLPAAQGLLSDDAPLVRAMAVWAIGRLDRGEALRLRAAALDKEADETVRSEWHALDESQD

SEQ ID NO: 76934 - protein, 399 aa, Fulvimarina sp.
  misc_feature (1)..(399): tr|A0A371X665|A0A371X665_9RHIZ tRNA epoxyqueuosine(34) reductase QueG OS=Fulvimarina sp. 85 OX=2293836 GN=queG PE=4 SV=1
MGARLKRHLAEGAERLGFSGFGIAPGTGDGVAGGRLKTFVAEGRHGTMGWMPETLERRRSAKALWPDVRSILVLAMNYGPGEDPLAILERADRGAISVYARHRDYHDVIKGKLKELASRLIAEAWREGLGAHDAKVFVDTAPVMEKPLGALAGLGWQGKHTNLLSRDFGSWLFLGSIFTTLDLPHDEPATDRCGSCTACLDICPTNAFPAPYQLDARACISYLTIETKRVIPRSLRAKMGNRIYGCDDCLAVCPWNKFAEAAREAKLIAREDLKAPRLDDLLALDDKAFRALFSGSPIKRIGRGKFVSNCLIAAGNSGDRAFLPQIRTLLGDGEALVRAMAVWAFAQLTSDADLLREAGPARDSETDEMVIEEWQAAMTERGTGGQAPTGTPTDRGERR

SEQ ID NO: 76935 - protein, 353 aa, Fulvimonas soli
  misc_feature (1)..(353): tr|A0A316IIA3|A0A316IIA3_9GAMM Epoxyqueuosine reductase OS=Fulvimonas soli OX=155197 GN=queG PE=3 SV=1
MTIAAPDYAALARDIKRWARELGFAEAGISGVDLGEDERHLERWLGDGLHGEMAYMARHGRKRSRPAELEPGTRRVISVRMDYVPPGTRNAWEVLGDAEAGYVARYALGRDYHKLMRHRLQKLAERIRAAVGEFGFRAYVDSAPVLEKALARNAGLGWIGKHTVLINRRAGSYFFLGELYTDLPLPVDEPATAHCGSCRRCLDVCPTRAIVAPYRLDARRCISYLTIELKGSIPEELRAPIGNRIFGCDDCQLVCPWNKFAQEAAEPDFAPRHRLDGAKLVELFGWSEEEFLRRTEGMAIRRAGYEGWLRNIAVALGNAPRSDAVRAALRARSGHPSAVVREHVAWALARQGG

SEQ ID NO: 76936 - protein, 317 aa, Fulvivirga imtechensis
  misc_feature (1)..(317): tr|L8JR24|L8JR24_9BACT Epoxyqueuosine reductase OS=Fulv ivirga imtechensis AK7 OX=1237149 GN=queG PE=3 SV=1
MHISRNTAFIKSKAKELGFMYCGISKAEFLTEEAPKLDEWLKKGFHGKMSYMENHFDKRLDPTELVPGAKSVVTLLYNYFPKEDIAGNNSYKIAKYAYGKDYHFVIKEKLKDFMTAIHTEIGEVGGRAFVDSAPVMERAWAKKSGAGWIGKNSLLLNKQSGSFFFLAELIIDLELEYDGPVKDYCGSCTACMDHCPTDAIPEPYVVDGSRCISYLTIELKDEIPNNFKGQFENWAFGCDICQDVCPWNRFSKPHNEPAFDPHEQLKSMNKNDWQEMTYEVFNEIFRKSAVKRTKYEGLMRNIKFIRENPVATNSNNE

SEQ ID NO: 76937 - protein, 311 aa, Fulvivirga sp.
  misc_feature (1)..(311): tr|A0A553F0Y2|A0A553F0Y2_9BACT Epoxyqueuosine reductase OS=Fulvivirga sp. M361 OX=2594266 GN=queG PE=3 SV=1
MGRHSAKYSNTALVKKTAAELGFMYCGISKAEFLEDEAPRLEKWLKQNHHGEMAYMANHFDKRLDPTQLVPGAQSVVSLAYNYFPKQDLAKKDHFKIAKYAYGKDYHFVIKDKLKAFLNILTEQIGEINGRAFVDSAPVMERQWAQKSGLGWIGKNTLLLNKQSGSFFFLAELITDLELEFDGPVKDYCGTCTACIDACPTEAIPQPYIVDASRCISYLTIELKDNIPDTFKGKFDNWVFGCDICQDVCPWNRFSKPHSEPAFSPHDQLAELNTVDWEEMTEDVFNTLFRKSALKRTKFTGLKRNISFSKK

SEQ ID NO: 76938 - protein, 387 aa, Fusibacter sp.
  misc_feature (1)..(387): tr|A0A1B6BID0|A0A1B6BID0_9FIRM Epoxyqueuosine reductase QueG OS=Fusibacter sp. 3D3 OX=1048380 GN=F3D3_4121 PE= 4 SV=1
MDQNMNNNKANANTNYGTNIRALFAQMDNILIRGQLSYYDFLYMGFDELKKMSVHERNLLKHIKLNPFKTEFEPEPDQRFFFRMLEAKVNSDESVLLLSVALPYPRQRAEVSKSKGFIEGSSWYYDYHTILRARMNQILVMFSEIGRDAVKESGCFVDTSDYIDRELAFLCGLGNYGKNQMLIHPDLGTQFHIGHLYIILEERMDPLLSKMESEIELDGRRLYSGCQNCDKCVKACPAEICGTIQMNRLECISYLTQTKKTLTFEEMKMMRNKLYGCDICQNVCPTNLTQNKSGVNSLNIDHWQLNDFEGIELLETLKLSQSAFKRQYGDRGFAWRGVKVFKRNALIAMGNSGDNIFYEKLKMFSELKEDDFLKSYYEYALRETKPD

SEQ ID NO: 76939 - protein, 321 aa, Fusibacter sp.
  misc_feature (1)..(321): tr|A0A4Q2A3W6|A0A4Q2A3W6_9FIRM Epoxyqueuosine reductase OS=Fusibacter sp. A1 OX=2283630 GN=DWB64_01915 PE=4 SV =1
MDAGWVRSELERFVEGDFDVSFVDVRTLERYAQPAMASEEWLSRNSADYHVPDAKWAIVIARPYALCLTKREIGKGRLASTGRELDYHEDLESILDTLAGEMKKHYVDFNHKLFIDKHGYDDRKIAHASGLGFWGKHNLLIHEAYGSAFNIGYLLTDIELDAPAPKVRSSECGSCTKCIRGCPNGALVEGRPLDTSKCRSALNQKKGPLDSDQMMLISDWVYGCDICQWCCPYNDKVKVDGNLNLDLKSMMMESKSTFKKNHLTRAYGYLGASRLKRNAMVILARQYGIEALDDYFETIQRIPMLKDQYEILKTWSLKSVK

SEQ ID NO: 76940 - protein, 282 aa, Fusicatenibacter sp.; identical to SEQ ID NO: 76455
  misc_feature (1)..(282): tr|A0A174T991|A0A174T991_9FIRM Epoxyqueuosine reductase OS=Fusicatenibacter sp. 2789STDY5834925 OX=1806509 GN= queG PE=4 SV=1

SEQ ID NO: 76941 - protein, 355 aa, Fusobacteriia bacterium
  misc_feature (1)..(355): tr|A0A1W9TK73|A0A1W9TK73_9BACT tRNA epoxyqueuosine(34) reductase QueG OS=Fusobacteriia bacterium 4572_132 OX=1 971640 GN=B6I28_03300 PE=4 SV=1
MKKLRLSKKNLDWLEIFIKTNKIGEIMLEKILLKYKIDTFGVTNTTDFSYLEKIFFDKKDKGYFANFDEHDFQKRANLDNILPNIKSIISIAFPYDTQEKINNSYNYNISKYAIRKDYHLTVKKILNDIIYDLKNIFPNNKFEIFVDSNPLFEKEIAQKSGLGFYGKNSLLYTKKYGSFIFLGEIITDLFIPGKNEKFITNCNTCTICADACPNNAIHDGILDASNCIAYLTTTKENITSSKIYNNFWGCDICQDVCPLNIKKEKSPLNNFSVIHNIFLPLEDIIFMSNKKLQAYYRESAIGWTGPNILKRNAIILMGNSSEKKYIPFLENFIKLTTNDMLFNYAQKSLKQLNNK

SEQ ID NO: 76942 - protein, 314 aa, Fusobacterium periodonticum
  misc_feature (1)..(314): tr|A0A2G9EGQ7|A0A2G9EGQ7_9FUSO 4Fe-4S ferredoxin OS=Fus obacterium periodonticum OX=860 GN=CTM71_06830 PE=4 SV= 1
MEQLANKIREKALEYGFSNCGIISVDKMEGFKKLYRKRIFKAPTSWLVYRTLKLSQTRKRFPWAKSVIVCTYWLGKFKFPKELQGKYAKAFILSQNNEKINKDYKEREKFEKWLEENGIRYEGGDKLGHGSIGSLRYAAVTAGLGIIRKNNFFYDERGSYVELVAYVIDKECELIHKNNLKKCSPKCDLCQKACQTKALKAPNTMEPLKCISFWTTFGKGAVPPNLKKEMFREWICGCDDCQDVCPFNRRHNWEVGEDLEGLAELSSNLMAEKIKDASDEFLINNVASLTDNHILAKDVSTLRKNAKRALSYKK

SEQ ID NO: 76943 - protein, 308 aa, Gaetbulibacter sp.
  misc_feature (1)..(308): tr|A0A2G5GNN0|A0A2G5GNN0_9FLAO Epoxyqueuosine reductase OS=Gaetbulibacter sp. 4G1 OX=1891971 GN=queG PE=3 SV=1
MVKSKANHTKLIKTEAKRLGFLSCGISKADFLEEEAPRLEKWLKNNMHGEMHYMENHFDKRLDPTKLVEGSKSVVSLLLNYYPSQEQIASSYKLSKYAYGTDYHFVIKDKLKSLLNFIQDEIGEVSGRAFVDSAPVLDKAWAAKSGLGWIGKHSNLLTQQVGSFYFIAELIIDLELDYDMPTTDHCGTCTACIDACPTEAITEPYVVDGSKCISYFTIELKENIPTEFKGKMDDWMFGCDVCQDVCPWNRFSKSHNEPLFNPHPELLSMTKKDWEEITEDTFKKVFQKSAVKRTKFSGLKRNINFLKD

SEQ ID NO: 76944 - protein, 308 aa, Gaetbulibacter sp.
  misc_feature (1)..(308): tr|A0A2G5KW43|A0A2G5KW43_9FLAO Epoxyqueuosine reductase OS=Gaetbulibacter sp. 5U11 OX=1889780 GN=queG PE=3 SV= 1
MLDNKSKYTTQIKAEAKRLGFLSCGISKAGFLEKEAPRLENWLNKNMHGQMSYMQNHFDKRLDPTKLVEDSKSVISLLLNYYPSEVQKDTKAPKLSKYAYGQDYHFVIKEKLKELTHYIQQEIGDVSGRAFVDSAPVLDKAWAAKSGLGWIGKHSNLLTQQVGSFYFIAELIIDLDLEYDSIVTDHCGTCTACIDACPTQAITEPYVVDGSKCISYFTIELKEQLPTTMKGKFDHWMFGCDVCQDVCPWNKFSKPHSEPLFNPHPDLLDMTKKDWEEITEEVFKNLFKKSAVKRTKFSGLKRNIDFLK

SEQ ID NO: 76945 - protein, 307 aa, Galbibacter marinus
  misc_feature (1)..(307): tr|K2QNT5|K2QNT5_9FLAO Epoxyqueuosine reductase OS=Galb ibacter marinus OX=555500 GN=queG PE=3 SV=1
MDLRAKHTQWIKNQAKALGFMSCGISKADFLEQEAPRLEKWLSESKNGQMQYMENHFDKRLDPRKLVEGSKSVISLLLNYYPSEIQKDKQAPKISKYAYGVDYHFVIKDKLKELLSLMQDEIGDVHGRAFVDSAPVLDKAWAERSGLGWRGKHSNILSKQVGSFFFIAELIVDLELEYDSPATDHCGSCTACIDACPTQAITEPYVVDGSKCISYFTIELKEQIPTEFSGQFDDWIFGCDVCQDVCPWNRFSKAHNEPLFNPHPKLLDMTKKDWEEITEDVFREIFKKSAVKRTKFSGLRRNIEFLR

SEQ ID NO: 76946 - protein, 409 aa, Gallaecimonas pentaromativorans
  misc_feature (1)..(409): tr|A0A3N1P464|A0A3N1P464_9GAMM Epoxyqueuosine reductase OS=Gallaecimonas pentaromativorans OX=584787 GN=queG P E=3 SV=1
MTSQDVLMSLPTARRRAQICYPAPCNTGGAVTDYQQLANDIKAWGRELGFAQVGITDTDLKSHEAALQAWLDAGHHGDMDYMARYGMLRARPQELLPGTLRVISARMDYLPPKARFGEILGNPEKGYVSRYALGRDYHKLLRNRLKKLGEKIQAALGEYQFRPFVDSAPVLERPLAEKAGLGWVGKHSLLLNPEGGSFFFLGELLVDLPLPVDPPFGEEKCGKCVACMTICPTQAIVEPYVVDARRCISYLTIELKGPIPEPFRPLIGNRIYGCDDCQLICPWNRFAHLSSEPDFAPRAPLHAPDLLALWAWDETTFLKVTEGSPIRRIGFEHWQRNLAVALGNAPYSLDIIAALEARLEGASELVAEHILWALGQQRQKPQEGDGSGKVGQKKARLVRAVEKGLPDSA

SEQ ID NO: 76947 - protein, 378 aa, Gallaecimonas xiamenensis
  misc_feature (1)..(378): tr|K2JRQ0|K2JRQ0_9GAMM Epoxyqueuosine reductase OS=Gall aecimonas xiamenensis 3-C-1 OX=745411 GN=queG PE=3 SV=1
MIDYQQLADDIKGWGQELGFQQVGITDTDLTSHEAALQAWLDAGHHGDMDYMARYGMLRARPTELLPGTLRVISARMDYLPPKARFGEILGDGNKGYVSRYALGRDYHKLLRNRLKKLGERIQQACGDYQFRPFVDSAPVLERPLAAKAGLGWVGKHSLLINPQGGSFFFLGELLVDLPLPKDPPADADKCGKCVACMTICPTQAIVEPYVVDARRCISYLTIELKGAIPEPLRPLIGNRIYGCDDCQLICPWNRFAHLSVEPDFAPRSALHGPQLLDLWQWDEARFLKITEGSPIRRIGFESWQRNIAVALGNAPHSQAVIEALEHKLPQLSPLVAEHAQWALGQQRQKAQGQPAGKSGQQKARLVRAVQKGLPDSA

SEQ ID NO: 76948 - protein, 357 aa, Gallionella capsiferriformans
  misc_feature (1)..(357): tr|D9SDS5|D9SDS5_GALCS Epoxyqueuosine reductase OS=Gall ionella capsiferriformans (strain ES-2) OX=395494 GN=qu eG PE=3 SV=1
MQNRIPQSGQYDQLAGNIRIWAHELGFQAAGITDVDLSSAEAGLEAWLTRGFHGEMDYMAKHGVKRSRPADLVPGTVRVISLRMNYWPDEAREGFEVLGQGERAYISRYALGRDYHKVLRKRLALLADKIRGEVAEFDGRVFTDSAPVMEVALADKSGLGWRGKHTLLLTRDQGSWFFLGEIYLNLPLPVDAPVAAHCGSCDACMRICPTQAIIAPYRLDARRCISYLTIELKGPIPTEFRPLLGNRIYGCDDCQLACPWNRFAKMTVEADFAIRHHLDDVGLAELFAWDEAQFTERFAGSAIYRIGHEQWLRNIAVALGNAPASEQVRAALQSRMNHPSELVREHVQWALAQQPES

SEQ ID NO: 76949 - protein, 364 aa, Gallionella sp.
  misc_feature (1)..(364): tr|A0A3D2H637|A0A3D2H637_9PROT Epoxyqueuosine reductase OS=Gallionella sp. OX=2052161 GN=queG PE=3 SV=1
MQNRIPQSGQYDQLAGKIRIWAHELGFQAAGITDVDLSCAEAGLEAWLAQGFHGEMDYMAKHGVKRSRPADLVPGTVRVISLRMNYWPGEARDGVEVLGQGECAYISRYALGRDYHKLLRKRLALLADRIRGVVAEFDGRVFTDSAPVMEVALAGKSGLGWRGKHTLLLTRNQGSWFFLGEIYLNLPLPVDVPVAAHCGSCDACIRICPTQAIIAPYLLDARRCISYLTIEFKGSIPPEFRPLLGNRIYGCDDCQLVCPWNRFAKVTVEADFAIRHQLDDVGLAELFAWDEAQFREKLAGSAIHRIGHEQWLRNIAVALGNAPASEQVRAALQSRVNHPSALVREHVEWALAQQLNQHADFDVK

SEQ ID NO: 76950 - protein, 356 aa, Gallionella sp.
  misc_feature (1)..(356): tr|A0A3D2NNI6|A0A3D2NNI6_9PROT Epoxyqueuosine reductase OS=Gallionella sp. OX=2052161 GN=queG PE=3 SV=1
MQNGNPQSEQYVELAENIRAWARELGFQAVGITDTDLADAETDLLEWLAHGFHGDMDYMAKHGPKRSHPAELVPGTLRVISVRMNYLPAARDSEKVLQQGERAFISRYALGRDYHKVIRHRLAKLAERIRAAVAEFDGRVFTDSAPVLEVALANQAGQGWRGKHTLLLTREHGSWFFLGEIYVNLPLPVDKPQAEHCGSCQRCITICPTQAIIAPYQVDARRCISYLTIELKGNIPVELRPLIGNRIYGCDDCQLVCPWNSFAQTSVEPDFAVRHGLDDVGLVALFAWDEAEFKSKLAGSPIHRIGYEQWLRNIAVALGNAPKNAAIVAALQARSEHPSERVREHVKWALVRQGIM

SEQ ID NO: 76951 - protein, 325 aa, Gallionellaceae bacterium
  misc_feature (1)..(325): tr|A0A521PGJ6|A0A521PGJ6_9PROT tRNA epoxyqueuosine(34) reductase QueG (Fragment) OS=Gallionellaceae bacterium OX=2052162 GN=queG PE=3 SV=1
MPAKATQTKKSDPIWLSARIKEEAQRLGFALVGISPVRTAVHEKSFAQWLRKGLGGELGYLQRTEELRRDPGKLVPWALSVVSVGMNYYAPMPRPEGNDGSTGWISRYAWGDDYHDLVRERLGSLLEKIRRVYPEPVEGKAFVDSGPVLERDIAGVAGIGWIGKNTHLISPRRGSWFFLGELFLSVEMAYDRPIRDRCGKCDLCLKACPTAAFVGPYILDARRCISYLTIELKGAIPNHLRPLMGNHIFGCDICQEVCPYNVKAETTGEEAFLPREGLYAPELIPLLSLSEEEFRRRFRGSPILRAKRRGFLRNVAVALGNLKSR

SEQ ID NO: 76952 - protein, 370 aa, Gallionellaceae bacterium
  misc_feature (1)..(370): tr|A0A2H0NKX4|A0A2H0NKX4_9PROT Epoxyqueuosine reductase OS=Gallionellaceae bacterium CG11_big_fil_rev_8_21_14_ 0_20_60_62 OX=1974012 GN=queG PE=3 SV=1
MPAYPTSAMIRCMQTNVPHVDLVELAARIKTWGKALGFQLVGIGDTELGAAETHLLQWLADGRHGAMDYMAKHGAKRARPAELLPGTLRVISLCMNYYPENSRDTQALLADGERAFISRYALGRDYHKVLRHRMQQLAQQIIAAAPAASCRVFTDSAPVLEVELAHKAGLGWRGKHTLLLSREHGSYFFLGEIFINLPLPVDTAEGNHCGSCRACLDICPTQAITAPYQLDARRCISYLTIELKGSMPPELRPLIGNRIYGCDDCQMVCPWNRFAQAADEEDFAVRNRLDDVSLVDLFGWSEAEFRARLAGSAIYRIGHEQWLRNIAVALGNAPTTAEVVNALQQRAADPSELVREHVAWARQRHAPATG

SEQ ID NO: 76953 - protein, 367 aa, Gallionellales bacterium
  misc_feature (1)..(367): tr|A0A258ZK49|A0A258ZK49_9PROT Epoxyqueuosine reductase OS=Gallionellales bacterium 24-53-125 OX=1970510 GN=qu eG PE=3 SV=1
MWFMQNVLPQEINFETLSTRIKQWGAELGFQAVGISDTSLDVAEVRMQQWLAHGYHGTMDYMAKHGSKRSRPAELIPGTLRVISVRMNYYPPGTSDAWEVIKDGERAYISRYALGRDYHKVLRKRLEQLAQKIRTVADGSACRVFTDSAPVLEVALAEKAQLGWRGKHTLLLTREHGSYFFLGEIFTDLPLDIDAKNAENASPKNHCGSCTACLDICPTQAIVAPYQVDARRCISYLTIELKGSIPLEFRKMMGNRIYGCDDCQLACPWNRFAQTSLEPDFAARLGLDNISLAELFAWDEATFQRNFSGSAVYRIGHEQWLRNIAVALGNAPASDEVLNVLRTRLLHQSALVREHAEWAIKQHEHAA

SEQ ID NO: 76954 - protein, 352 aa, Gallionellales bacterium
  misc_feature (1)..(352): tr|A0A1G0FB28|A0A1G0FB28_9PROT Epoxyqueuosine reductase OS=Gallionellales bacterium RIFOXYB12_FULL_54_9 OX=179 8258 GN=queG PE=3 SV=1
MEGGSPDFHRLALQIKHWAVELGFQQAGIAGIDLSREEGFLQAWLNEGRHGEMEYMARHGLKRSRPAELVPGTLSVISVRLDYLPPASRSTKTLADPVRAFISRYAQGRDYHKLMRDRLQRLAERIQAEIGPFGYRAFSDSAPVLEKALAQKAGLGWIGKHTNLINPKAGSWFFLGELYTSLPLPPDSPALPHCGRCTACMDICPTRAIVAPFELDARRCISYLSIELPGPIPLELRPLLGNRIYGCDDCQLICPWNRFARPTGERDFHPRQGLDRAGLIDLFGWNETEFLQRLEGSPIRRIGHQRWLRNIAVALGNAPKSEQTRTALLERTEDPSELVREHVAWALARQTN

SEQ ID NO: 76955 - protein, 372 aa, Unknown
  misc_feature (1)..(372): tr|I2JIZ3|I2JIZ3_9GAMM Epoxyqueuosine reductase OS=gamm a proteobacterium BDW918 OX=1168065 GN=queG PE=3 SV=1
MCKIPDYRSAQISPGTLMTQSSTDLDLLAQQIKDWGREFGFAHIGISPASNEAHAQRLREWLAKQYHGDMAYMAEREGLRGEAAELHSGTIRVISARMDYLPDAENMDAVLGNPDKAYISRYALGRDYHKLIRKRLSQLAGKISAVAGGHHRAFVDSAPVLERGFAEQAGLGWIGKNSMLINSKAGSWFFLGEIYTDLPLPVDPPQETGHCGSCRACLDDCPTGAIVAPYQVDARRCISYLTIELKTSIPEELRPLMGNRVFGCDDCQLVCPWNKFAQATAEADFSPRHQLDNSDLIELFLWNEETFLKNTEGSAIRRIGYQHWLRNLAVGLGNAPASSAAISALKQQRPSAESMAREHIDWAIGQLQGKLV

SEQ ID NO: 76956 - protein, 360 aa, Unknown
  misc_feature (1)..(360): tr|A0A421K1A2|A0A421K1A2_9GAMM Epoxyqueuosine reductase OS=gamma proteobacterium symbiont of Stewartia florida na OX=1968599 GN=queG PE=3 SV=1
MSETLSADELLKLSLQIKQWGEELGFDAVGITDTDLSEAESRLHQWLASGCHGEMDYMAKHGNKRSRPAELEPGTVRVISVRMDYLPEPMQDLQRILEDPQKAFISRYALGRDYHKLLRNRLKRLQQKIQQTLPESSNRLYVDSAPVLEKPLAEKAGLGWIGKHTNLLNKRSGSWFFLGEIYSTIPLPIDSPAENHCGRCQACLEICPTQAITAPYQLDARRCISYLTIELRGAIPEPYRAAMGNRIYGCDDCQQVCPWNRFAQLTGEQDFLARHKLDSSSLITLFEWDEATFLQKTEGSAIRRIGYQRWQRNLAVALGNAPPSVAVAEALLRQLEQASPMVKEHILWALDRQRIQPTTA

SEQ ID NO: 76957 - protein, 372 aa, Gammaproteobacteria bacterium
  misc_feature (1)..(372): tr|A0A2E6J9X6|A0A2E6J9X6_9GAMM Epoxyqueuosine reductase OS=Gammaproteobacteria bacterium OX=1913989 GN=queG PE =3 SV=1
  misc_feature (11)..(11): Xaa can be any naturally occurring amino acid
  misc_feature (31)..(31): Xaa can be any naturally occurring amino acid
  misc_feature (39)..(39): Xaa can be any naturally occurring amino acid
  misc_feature (81)..(81): Xaa can be any naturally occurring amino acid
  misc_feature (83)..(83): Xaa can be any naturally occurring amino acid
  misc_feature (85)..(85): Xaa can be any naturally occurring amino acid
  misc_feature (87)..(87): Xaa can be any naturally occurring amino acid
  misc_feature (96)..(96): Xaa can be any naturally occurring amino acid
  misc_feature (105)..(105): Xaa can be any naturally occurring amino acid
  misc_feature (266)..(266): Xaa can be any naturally occurring amino acid
  misc_feature (303)..(303): Xaa can be any naturally occurring amino acid
  misc_feature (347)..(347): Xaa can be any naturally occurring amino acid
MSEQYYKNLAXTIKTWGHELGFAQLAISDIXLGSYHDSXRQWLREDCHGDMAYMANNIDKRLYPQQLVEETCRIISVRMDXAXVXDXSLSPLSETXTAYIARYAXGRDYHKVMRKRLQKLANKINSEVGQFGYRAFVDSAPVLERALAEKAGLGWIGKNTMLINKNAGSWFFLGELFTDLPLPVDKAATNHCGSCNACLDVCPTKAFIAPNKMDAKRCISYLTVELRSSIPVEFRRAMGNRIFGCDDCQLVCPWNKFTQVSHESDXSPRHALDRTALLDLFQWSEQEFLERTEGSPIRRIGYXCWLRNLAIGLGNAEYSPELVAALQARRESASPMVREHIDWALEXHAETKPQTTLPENAPGSKSARLQSP

SEQ ID NO: 76958 - protein, 360 aa, Gammaproteobacteria bacterium
  misc_feature (1)..(360): tr|A0A1Z9AKY0|A0A1Z9AKY0_9GAMM Epoxyqueuosine reductase OS=Gammaproteobacteria bacterium TMED95 OX=1986771 GN= queG PE=3 SV=1
MQLETLQEQITDWAYDLGFSAVGFVRLTASDHEQHLRQWLAQGFHGTMSYMDRNIDLRLDAAGLLPGAISAITVRMDYLSRDELPSLSQTLAASNQGYIARYALGRDYHKVIRGRLRALARRINEASLTLPDGPFISRACTDSAPILEKRLAEQSGLGWIGKNTLLNDTRRGSWCVIGELLTNLPVEDPHFKDDNHCGSCQRCLEICPTQAFTGPYQLDARRCISYLTIESKEAIPVALRSAVGNRIFGCDDCQLVCPWNKFAALHIDADYQARAQFTDQPLLSLFNWSEAEFLKHTEGSPIRRTGYEGWLRNCAVALGNAPFDPLIVRALSAKRPAVSPMVQEHIDWALAQQSQDQATP

SEQ ID NO: 76959 - protein, 366 aa, Garciella nitratireducens
  misc_feature (1)..(366): tr|A0A1T4PJA5|A0A1T4PJA5_9FIRM Epoxyqueuosine reductase OS=Garciella nitratireducens DSM 15102 OX=1121911 GN=S AMN02745973_02104 PE=4 SV=1
MENVKEKIIEISKKIHIDCIGFTSVKPFKERKHILKEREQKGYLSGFEEEDIQKRIYPQKIFSKAQSIISIGLCYYQELETPKQKELYGNISRSSWGKDYHQVLQKKMKELIDCIEKEVTKIEYKTFVDTGPLIDREVAYRSGIGAFGKNNFIIHPKFGSWIFIGNILTNLKIQENTPIEEDICGECDLCIQACPTGALEGAYQFNAQKCVSYLTQKKDLLTEKERRSIGTNIYGCDICQLVCPKNKKVSNTCHQSFRTDGYLAFPQIKTLLNMTNKEFQEIFKPIAAGWRGKKILQRNAIIVLGNSKDSRAIPILKECLQDVRWDIRLYAIWSLSQFKKEGRKIIENFASIEKDARVKKEIQKVL

SEQ ID NO: 76960 - protein, 313 aa, Geitlerinema sp.
  misc_feature (1)..(313): tr|K9S9W5|K9S9W5_9CYAN Epoxyqueuosine reductase OS=Geit lerinema sp. PCC 7407 OX=1173025 GN=queG PE=3 SV=1
MGTLTAAQIKDQAQRLGFHKVGIAPVGPWQDGAEARLQAWLEQGYQADMAWMADPRRQDITQVLPSARSLICLALNYYTPHPRPQGPEYAKISRYGWGRDYHRVLQRRLKALTLWLQDQAPEVEARYYVDTGPVQDKVWAQRAGLGWIGKNGNVITREYGSWVFLGEIVTNLVLEPDKPHTDHCGTCDRCLQACPTGAIAAPFVVDANRCIAYHTIENRSPALPEAIASHLQGWVAGCDICQDVCPWNQRFAKPSDIEDFQPYSWNVGPTLAELAQISEDDWQARFPASALRRIKPEMLRRNAQASLPAIADS

SEQ ID NO: 76961 - protein, 307 aa, Gelidibacter algens
  misc_feature (1)..(307): tr|A0A1A7R1J8|A0A1A7R1J8_9FLAO Epoxyqueuosine reductase OS=Gelidibacter algens OX=49280 GN=queG PE=3 SV=1
MNNKQQYTQLIKTEAKRLGFLSCGISKAQFLEEEAPRLEKWLKNNMQGEMRYMENHFDKRLDPTKLVDDSKSVISLLLNYYPEETQTENSFKLSKYAYGTDYHFVIKDKLKSLLNFIQEEIGDVHGRAFVDSAPVMDKAWAAKSGLGWIGKHSNLLTQQVGSFYFIAELIIDLELEYDLPTTDHCGTCTKCIDACPTQAITEPYVVDGSKCISYFTIELKDKIPTEFRGQFDDWMFGCDICQDVCPWNRFSKAHNEPLFNPHPELLSMTKKDWEEITEDVFKELFKKSAVKRTKFEGLKRNIEFLKD

SEQ ID NO: 76962 - protein, 307 aa, Gelidibacter gilvus
  misc_feature (1)..(307): tr|A0A4Q0XLJ0|A0A4Q0XLJ0_9FLAO Epoxyqueuosine reductase OS=Gelidibacter gilvus OX=59602 GN=queG PE=3 SV=1
MNNKSKYSQLIKTEAKRLGFMSCGISKAQFLEEEAPRLEKWLKNNMHGEMQYMENHFDKRLDPTKLVEGSKSVISLLLNYYPEETQIENTYKLSKYAYGTDYHFVIKDKLKELLNFITEEIGEVSGRAFTDSAPVLDKAWAAKSGLGWVGKHTLLLTQQTGSFYFVGELIIDLELDYDSPTTDHCGTCTKCIDACPTQAITEPYVVDGSKCISYFTIELKDKIPNDFKGQFDDWMFGCDICQDVCPWNRFSKAHSEPLFNPHPELLSMTKKDWEEITEDVFKDLFKKSPVKRTKFEGLTRNIQFLRK

SEQ ID NO: 76963 - protein, 308 aa, Gelidibacter salicanalis
  misc_feature (1)..(308): tr|A0A5C7AEN2|A0A5C7AEN2_9FLAO Epoxyqueuosine reductase OS=Gelidibacter salicanalis OX=291193 GN=queG PE=3 SV= 1
MNHKSKYSQLIKSEAKRLGFLSCGISRAQFLEEEAPRLERYLKNNMHGEMRYMENHFDKRLDPTKLVEDSKSVISLLLNYYPEEHQIDHTYKISKYAYGTDYHFVIKDKLKSLLNFIQEEIGEVHGRAFTDSAPVLDKAWAAKSGLGWVGKHTLLLTQQAGSFHFVAELIIDLELEYDLPTTDHCGTCTKCIDACPTQAITEPYVVDGSKCISYFTIELKDKIPSEFKGKFDDWMFGCDICQDVCPWNRFSKAHSEPLFNPHPDLLSMTKKDWEDITEDVFKDLFTKSPVKRTKFEGLKRNINFIKEG

SEQ ID NO: 76964 - protein, 308 aa, Gelidibacter sediminis
  misc_feature (1)..(308): tr|A0A4R7QA63|A0A4R7QA63_9FLAO Epoxyqueuosine reductase OS=Gelidibacter sediminis OX=1608710 GN=queG PE=3 SV=1
MNNKSKYSQLIKEEAKRLGFLSCGISKAQFLEEEAPRLERYLKNNMHGEMRYMENHFDKRLDPTKLVDDSKSVISLLLNYYPEEQQIDQTYKLSKYAYGTDYHFVIKDKLKSLLNFIQEEIGEVHGRAFTDSAPVLDKAWAAKSGLGWVGKHTLLLTQQAGSFHFVAELILDLELEYDLPTTDHCGTCTKCIDACPTQAIAEPYVVDGSKCISYFTIELKDKIPTEFKGQFDDWMFGCDICQDVCPWNRFSKAHSEPLFNPHPELLSMTKKDWEEITEDVFRDLFKKSPVKRTKFEGLKRNIDFLKKN

SEQ ID NO: 76965 - protein, 357 aa, Geminicoccus sp.
  misc_feature (1)..(357): tr|A0A2E1V6J2|A0A2E1V6J2_9PROT Epoxyqueuosine reductase OS=Geminicoccus sp. OX=2024832 GN=queG PE=3 SV=1
MPKATSNPFNEAAPTELRAQIHAQAIALGFDACGFGPAQIPERNRERYLEFVATGQHGTMDWMQTRLDQRSDPQTLWPEARSVVVVGLNYGPEDNPLDRLDQPQRANFSVYAENRDYHDILKRRLKRLGRWIAEHTDGQPLKVFVDTAPVPEKALAAQTSVGWQGKHSNLVSPEFGSWLFLGVIYLSIDLPADTPTPDQCGSCTRCIDICPTAAIPAPYTLDATRCLAYLSIEHRGAIPVEFRKAMGNRIYGCDDCLAACPWNKFAKATAEAGFKPRDVVDQAQLLDFAGFDDAAFRAAFSGSPIKRIGIERFLRNLAICLGNSGQQKAREPLRQLARSENPIVAESAQWALGQLPT

SEQ ID NO: 76966 - protein, 358 aa, Geminicoccus sp.
  misc_feature (1)..(358): tr|A0A2E3IRE5|A0A2E3IRE5_9PROT Epoxyqueuosine reductase OS=Geminicoccus sp. OX=2024832 GN=queG PE=3 SV=1
MPKATSTPFDPAALKQRIDAEARALGFDAVGFGPAQIPARNRARYQDFVASGQHGTMDWMERRLDERADPQTLWEGTKSVIAVGLNYGPDSDPLDRLRDPDRANFSVYAENRDYHDILKKKLKRLGRWIGEETGQALKVFVDTAPVPEKALAAQTAVGWQGKHSNLVSQDFGSWLFLGLIYLGFELPTDSPSDDHCGSCSRCIDVCPTAAIPAPYQLDATRCLAYLSIEHDGPIPVEFRAAMGNRIYGCDDCLAVCPWNKFAQATAEAGFQPRALLADPRLLDFIGYEDAQFRAAFAGSPVKRIGIVRFLRNLAICLGNSGHEKARRPLEQLARHENAVVAESAVWALDQLRSETPAA

SEQ ID NO: 76967 - protein, 323 aa, Geminocystis sp.
  misc_feature (1)..(323): tr|A0A0D6ADT0|A0A0D6ADT0_9CHRO Epoxyqueuosine reductase OS=Geminocystis sp. NIES-3708 OX=1615909 GN=queG PE=3 SV=1
MKNNEKSLYFTSEDIKQQALDIGFHRIGITNVTINSYKQAENKQRLQQWLDKDYQAQMAWMSNPRRQDIKETWEETKSIISLALNYYTPHQHSDNPDTAKISRYGWGRDYHRVMAKKLKTLCQWLTAKDENIKVRYYVDTGPIQDKFWAQQAGVGWVAKNSNLITKDYGSWVFLGEILINVHLSPDQPHTNHCGTCTRCLDACPTQAITEPFVVNANLCIAYHTIENRQETLPPEIASKLNGWVAGCDICQDVCPWNQRFAKVTDVPDFSPYSANINPKLTELAQITKTEWDKRFQGSALRRIKPEMWRRNAQCQIEKSPIKD

SEQ ID NO: 76968 - protein, 316 aa, Geminocystis sp.
  misc_feature (1)..(316): tr|A0A0D6ALF1|A0A0D6ALF1_9CHRO Epoxyqueuosine reductase OS=Geminocystis sp. NIES-3709 OX=1617448 GN=queG PE=3 SV=1
MINSKSIVTTEEIKEQALTIGFHKVGVTTVNYNIEKQEKNKQRLQEWLDKGYQAQMAWMNNPKRQNIIECWPQAKSIVSLALNYYTPHQHSQKPNTAKISRYGWGRDYHRVMTKKLKTLANWLKKQSNNVEVRYYVDTGPVQDKFWAQEAGIGWVAKNGNVITTDYGSWIFLGEILTNIELRPDRPHTNHCGTCTRCLSACPTQAITEPFVVNANLCIAYHTIENRQANLPPEITSKLNGWVAGCDICQDVCPWNQRFAKVTDVADFFPYPANLNPTLTEIAQMTPLEWDQRFQGSALRRIKPEMWRRNAQVQIDN

SEQ ID NO: 76969 - protein, 373 aa, Gemmata obscuriglobus
  misc_feature (1)..(373): tr|A0A2Z3HB66|A0A2Z3HB66_9BACT tRNA epoxyqueuosine(34) reductase QueG OS=Gemmata obscuriglobus OX=114 GN=queG PE=4 SV=1
MGDIEERLKAEAARLGFALSGIAPATDADGFGRFAVWLDRGFAGEMSYLPKLRAERQHPRSVLDDVRSVLMVGLEYSGVRSAEFGIRSENETQEKGETSSTNSPSAVPHSEFRTPHFGRVAAYAAGPDYHRYIWDRLNALAAWLEEQVPGSRTEAVADTAPLLERDFARRAGLGWVGKNTMLINTRRGSFFFLGAILTTLELAPDPPATSSHCGTCTRCLEACPTGAFTEPYVLDARKCISYLTVELRSEIPVELREPMGHWLYGCDVCQDVCPWNRNAGERTVAFPHDPELAWLDPIELLGLDADAFRKRFKKTSLFRNRRPGLLRNAAIVLGNIGDSRAVPALEQALTDSEETIREAAAWALAQICLRSGG

SEQ ID NO: 76970 - protein, 442 aa, Gemmata sp.
  misc_feature (1)..(442): tr|A0A142XPU1|A0A142XPU1_9BACT Epoxyqueuosine reductase OS=Gemmata sp. SH-PL17 OX=1630693 GN=queG PE=4 SV=1
MSHPSPQRAESRTSLSDRLKEQARTLGFELVGIAPATDADGFARFNSWLDRGFAGEMSYLPKFRTERQNPRSILEGVRSVLMVGMEYGRGERQPNPLTPFPRKEGGTKSSVALSPSPLRGGVGEGLFSEPTPPAPLPEGKGELAYEISEIGITHDDRSFSPFPSGRGAGGVGSALARVASYAAGPDYHRYIWDRLNALAAWLEDEAPGSRTEAVADTAPLLERDFARRAGLGWVGKNTMLINTRRGSFFFLGAVLTDLELEPDSPSTSSHCGTCTACLDACPTRAFPEPFVLNATKCISYLTIELRSDIPVELRESVGNWLYGCDVCQDVCPWNRNAGSRAPAFPHDPDLAWIDPAELLGLDADAFRVRFKKTSFWRNRRTGLLRNAAIVLGNIGDERSLPALEKALTDPEDVIRNAAQWAIDHIRHRTSSVKSGLPSAPSD

SEQ ID NO: 76971 - protein, 333 aa, Gemmataceae bacterium
  misc_feature (1)..(333): tr|A0A4V0HUU3|A0A4V0HUU3_9BACT 4Fe-4S ferredoxin-type d omain-containing protein OS=Gemmataceae bacterium OX=20 52164 GN=GCJUQL4_31080 PE=4 SV=1
MTYLREQAEQRLHPRSILEDVRSVVMLGMEYRECGVRSAECGVEDRSEETALSSIPHSALRTPHFSGRIAAYAQGPDYHRYIWDRINELAAWLEAEVPGCRTRAVADTAPLLERDFARRAGLGWVGKNTMLLNPRRGSFFFLASVLTDLKLEPDPPFAGSHCGTCTACLDACPTGAFPEPFVLDATKCISYLTIELRDPVPEELRPKIGDWLYGCDVCQDVCPWNRKPSPGPAGFPHRDDLERLDAVELLGLDAAAFRAKFKATSLWRNRRPGLLRNAALVLGNTGDARALPALEKALSDPEDIVRDAAAWAIAQIRERRGVSPPVPPNPRAG

SEQ ID NO: 76972 - protein, 376 aa, Gemmataceae bacterium
  misc_feature (1)..(376): tr|A0A5C1ANK0|A0A5C1ANK0_9BACT tRNA epoxyqueuosine(34) reductase QueG OS=Gemmataceae bacterium PX52 OX=2598579 GN=queG PE=4 SV=1
MNPNELKLQLKAEANRLGFSLFGVATATDADGFERFTSWLGEGYHGEMDYLAKRRDARRSPASVLASVRSVVMLGFEYGQAVQESYKSLGRVAAYARGPDYHGLIWEKLNALGSFLQTQDVAAEFRGVTDSAPLLEREFARRAGLGWFGKNTMLINKHRGSFFFLAGFLTNLDLPADEPYRTNHCGTCTACLDACPTDAFVTAGTLDARKCISYLTIESKSAFPLELRPAVRNWLFGCDVCQEVCPWNRHAGKTPVPFPADAELVALDPLELLAMSEAEFRTRFKPTPLFRPKWSGLRRNAAIVLGNVGDEKALPILACALADVNEVVREAATWAIDQIRERQGTGAPQPAGPDRPVAQPAVNSVSSHAGSAIING

SEQ ID NO: 76973 - protein, 387 aa, Gemmatimonadaceae bacterium
  misc_feature (1)..(387): tr|A0A2E8H3D7|A0A2E8H3D7_9BACT Epoxyqueuosine reductase OS=Gemmatimonadaceae bacterium OX=2026741 GN=queG PE=3 SV=1
MPAPGSQADHDLTRFVRSEATRLGFDLVGITSADPLEAAEFNARWVAQGYAGQMGWLERNLEKRADPRQLVPGARSVICLGMYYDPPGAAEGADGDAGLAGRMARYARGDDYHDLIKSRLAGLWESLLAEADHDISGRYYVDTAPVLERELAARAGLGWWGKNTVLIHRRGGSYFLLAELITTAALEIDAPATDHCGSCTRCLDACPTEAFPEPYVLDARRCISYLTIELKGSIPEDLRHGMGDWLLGCDICQDVCPWNRRSASTREPAFHARAGLDPVNLLELIRMDRDAFNERFRRNPAKRPKRRGMLRNAAVALGNSGQRDEAVPVLVGVLQNEEEPLVRAHAAWALGKLGGEQAKRALHEAKQVDQDSDVKREIDSALAMVKD

SEQ ID NO: 76974 - protein, 443 aa, Gemmatimonadaceae bacterium
  misc_feature (1)..(443): tr|A0A2E0DNR9|A0A2E0DNR9_9BACT tRNA epoxyqueuosine(34) reductase QueG OS=Gemmatimonadaceae bacterium OX=202674 1 GN=queG PE=4 SV=1
  misc_feature (27)..(27): Xaa can be any naturally occurring amino acid
  misc_feature (48)..(48): Xaa can be any naturally occurring amino acid
  misc_feature (146)..(146): Xaa can be any naturally occurring amino acid
  misc_feature (253)..(253): Xaa can be any naturally occurring amino acid
  misc_feature (262)..(262): Xaa can be any naturally occurring amino acid
  misc_feature (405)..(405): Xaa can be any naturally occurring amino acid
  misc_feature (424)..(424): Xaa can be any naturally occurring amino acid
MNQVTLGLREEAERLGFEVFGIGHLNXSEHMEFFDRWLARKHHGEMEXLERPDTRERRAFPSSSFSGARSVIVVGHEYAGRAPTGAESSPTARLRADRISKIEGEGVPPHPKAEALIARYARGSDYHHIIPPKLEKMLMWLDRRIXGGVRGRALVDTAPVFERELARRAGMGWFGRNTMLIHPRRGSFFVLGLLMVDVDLETTGPCIEDHCGTCHACIDECPTGALLGREESGAPSIDARRCISYLTIELKGXIPHQYRSAXGNRVFGCDICQEVCPWNKRFAQGDGDPAYRASSPPELLVDLAKEIFEMSEKEYQRRYRGSPLSRPRRKGMLRNLLVGIGNAIREGVLTSDQKGEAIRVLAAALNDPQPLVRGHAAWALGQAGNKLETVTQRSTRDAIVTVEGXPLSSSETAETPSPLELLSXRREIETDVEVLEELRLAAH

SEQ ID NO: 76975 - protein, 366 aa, Gemmatimonadales bacterium
  misc_feature (1)..(366): tr|A0A524H0V9|A0A524H0V9_9BACT tRNA epoxyqueuosine(34) reductase QueG OS=Gemmatimonadales bacterium OX=2448054 GN=queG PE=4 SV=1
MVRLGLRPHLLPHRLPQSAAGDDRVGHFLHHVRSGCPHNYRPRSGAGFVLLDDAVRVTLTAQEVKARAAELGFVACGITDLGPSSRGDALDRWLRQGYGGNMRYINRQAKKRKDLRLIDREARRAVVILDNYYYPETAHADSIPRTARYSRSTDYHIITLKRINQLAELLLEHGAKTARPYVDTGPVPERELAERAGLGWIGKNTMLLRPGLGSWFVIGSIFTDLPLDVDPPFATDHCGSCTKCLDACPTDAFVEPYILDATKCISYLTIEYKKEIPAELAGQLGGWAFGCDICNDVCPWNLRFATEATIPEFRDRGELRGADEAFFDRMTEGEFEARFGDTPLARPGLERMRRNWRNAWGSLRKT

SEQ ID NO: 76976 - protein, 224 aa, Gemmatimonadetes bacterium
  misc_feature (1)..(224): tr|A0A3B9DT63|A0A3B9DT63_9BACT tRNA epoxyqueuosine(34) reductase QueG (Fragment) OS=Gemmatimonadetes bacterium OX=2026742 GN=queG PE=4 SV=1
MTLTTRLKEQARELGFGLVGVASVEASRHMGLYREWVEDGRHGEMGYLAREDAVARRADLRGTLPTVRSAVVVGHEYFQEDPPGVPADPARGVIARYARGQDYHGTIQKRLLELHRWIEASVAAPVEGRVYVDTGPILEREMAVRAGIGWFGKNTMLIDPKRGSYFFLGLLLLDLDLDADDPFQEDHCGTCRSCLDACPTGALLGRDASGAPVMDAPRCISYLT

SEQ ID NO: 76977 - protein, 113 aa, Gemmatimonadetes bacterium
  misc_feature (1)..(113): tr|A0A1E4BAY9|A0A1E4BAY9_9BACT Uncharacterized protein OS=Gemmatimonadetes bacterium SCN 70-22 OX=1660163 GN=A BS52_05995 PE=4 SV=1
MCPWNVRFSRELAEDSPFKPRDVLRGRDARTLARELLAMSQEEFSAAFRKSPMKRAKLRGLKRNAAAVLGNVGSGDDVDVLTRALDDEEPLVREHAAWAISQIARRISSSAAG

SEQ ID NO: 76978 - protein, 364 aa, Gemmatimonas aurantiaca
  misc_feature (1)..(364): tr|A0A3D4VAD7|A0A3D4VAD7_9BACT tRNA epoxyqueuosine(34) reductase QueG OS=Gemmatimonas aurantiaca OX=173480 GN= queG PE=4 SV=1
MSDVPPAARAAASAAAPTRSLSERLIAQAYGLGFDAAGIAELGEPETRAVFDAWLAAGHHGNMGYLDGAGAQLRHDSRRPHPGATHALVLAASYGGREPAGPVARYARGDDYHDVLRERMRELHRWLEQEVGAPIDARPYVDSAPILERDLAQRAGLGWFGKNTMLISPQAGSFLFLASLFVAFPLEASAPFEADRCGSCTRCIDACPTDAITAPRTVDARRCISYLTIELREEIPEALRPGIGSWLYGCDICQDVCPWNRRFAQPIRFDEFQTRPFLSDSDPRAMARSVLMMDAADYRETFRGSAMKRAKLWMLQRNAAVVLGNVGTPDDLPVLEAAAELHDQPLVREHATWAIRRVQERPEN

SEQ ID NO: 76979 - protein, 364 aa, Gemmatimonas aurantiaca; identical to SEQ ID NO: 76978
  misc_feature (1)..(364): tr|C1ABN3|C1ABN3_GEMAT 4Fe-4S ferredoxin-type domain-co ntaining protein OS=Gemmatimonas aurantiaca (strain T-2 7 / DSM 14586 / JCM 11422 / NBRC 100505) OX=379066 GN=G AU_2868 PE=4 SV=1

SEQ ID NO: 76980 - protein, 360 aa, Gemmatimonas phototrophica
  misc_feature (1)..(360): tr|A0A143BMD2|A0A143BMD2_9BACT 4Fe-4S ferredoxin-type d omain-containing protein OS=Gemmatimonas phototrophica OX=1379270 GN=GEMMAAP_15070 PE=4 SV=1
MSAGTDQPSLSRRFLAQAYAAGFDAAGIAALGEPATYAAYADWLTEGRQADMAYLTGDGATLRADTRLPHAGATHALVVAASYGGTAPTGPVARYARGDDYHERLRERLRELHRWLEREVGHAVNARPYVDSGPVLERDLAQRAGLGWMGKNTMLITPRAGSFVFLASLFVELDLEPSVPFEADRCGTCTRCLDACPTGALPAPRVLDANRCVSYLTIEHRQSIPGALRESMGGLLYGCDICNDVCPWNHKFARDAMFSEFAPRDLFAESYDREGARALARELLMMSPANYAAAFRGSAIKRAKLWMLQRNACVVLGNIGTEEDLAVLEAMCQHKHELVREHSQWAVAHIRQGSGNHPSR

SEQ ID NO: 76981 - protein, 328 aa, Gemmatimonas sp.
  misc_feature (1)..(328): tr|A0A0S7ZVY7|A0A0S7ZVY7_9BACT 4Fe-4S ferredoxin-type d omain-containing protein OS=Gemmatimonas sp. SG8_17 OX= 1703355 GN=AMS18_10740 PE=4 SV=1
MAPGGDALVTPKRRATLVKERALQLGFDGVGVTDLSPVPHGGRLHEWLAEGMAGTMTYMQRQAGRRVEPARIVPGTHRAVVVTVNYFSQDPSPKPGFGRVAKYARGRDYHRSLLGPLKRLAAFIRSLGDAGTIAKWYVDAGPVPERELAQRAGLGWIGKNTMLIDPKRGSFCFVATVLTNLDLDLDQPFEADRCGSCRLCLDACPAMAFPEERLLDARLCISYLTIELAGEVPAEQAAKMGSWVFGCDVCQDVCPWNRSFARPSTSVTLELDPSLALLDLKSLTEIDELGFAQQYGWTPLERTGAAGISRNARIAAANFAGEPPCQNQ

SEQ ID NO: 76982 - protein, 391 aa, Gemmatimonas sp.
  misc_feature (1)..(391): tr|A0A0S8HA33|A0A0S8HA33_9BACT Epoxyqueuosine reductase OS=Gemmatimonas sp. SM23_52 OX=1703359 GN=queG PE=3 SV =1
MAPSSPPTHPAPSASQEIKRRALALGFDLVGIAPAQRPAHAEFYLEWLKRGYHGAMAYLERPDAVKRRLDPSTALPGARAIVAVAMNYSSRDSSPVDDGSRAIVARYARGADYHQLFEEKLEQLAGSLRELCGQGTGTRAYVDYGPVLERDHAQRAGLGWIGKNTVLINPAIGSYLILGVILTDAELEPDEPFLPDHCGTCERCVQACPTGAILAPRELDARLCISYLTIELRGPIPRELRRLIGNRIFGCDICQEVCPWNCETPATREPRFQPREELTGPDLVGLANLGEAEFREHYSGTAIERAKRHGFLRNVAVALGNWGDSAALPALITSLNEDVPLVRGHAAWALGCMATPEARSALQNRLQLERDDWVREEIQLALQCDYSGCDP

SEQ ID NO: 76983 - protein, 109 aa, Gemmatirosa kalamazoonesis
  misc_feature (1)..(109): tr|W0RHC6|W0RHC6_9BACT Uncharacterized protein OS=Gemma tirosa kalamazoonesis OX=861299 GN=J421_2290 PE=4 SV=1
MCPWNVRFSKELPNDSPYAPREALAGKDARTLARALLGMTQAEFSAAFKGSPMKRAKLRGLKRNAAVVLGNVGTADDVGVLTRALDDEEPLVREHAAWALARMRHRAGE

SEQ ID NO: 76984 - protein, 345 aa, Gemmobacter aquatilis
  misc_feature (1)..(345): tr|A0A1H7ZSC7|A0A1H7ZSC7_9RHOB Epoxyqueuosine reductase OS=Gemmobacter aquatilis OX=933059 GN=SAMN04488103_101 597 PE=4 SV=1
MKAEDALVLKDRLVARALEEGFSKVGICAPEAVPEAAGRLRAFLAAGRHGQMGWMAEREGWRGSAAALWPEARSVIMLAEVYTPEADPLAVLAQRDRAAVSVYAQGKDYHDLVKRRLKRLGGWFVQVAGAEIKVFVDTAPVMEKPLAQAAGLGWQGKHTNLLARDLGSWFFLGAIFTTADLPKDAAEVSHCGSCRACLDACPTGAFPAPYQLDARRCISYLTIEHKGPVDEGLRGLMGNRIYGCDDCLAVCPWNKFAQAAREIGYQPRVGAPLLAELAGLDDAGFRARFAGSPIKRIGRDRFVRNVLYAIGNSGLAELRAAALALVEDADAAVADAARWACLKLA

SEQ ID NO: 76985 - protein, 348 aa, Gemmobacter caeni
  misc_feature (1)..(348): tr|A0A2T6B4S6|A0A2T6B4S6_9RHOB Epoxyqueuosine reductase OS=Gemmobacter caeni OX=589035 GN=C8N34_104195 PE=4 SV =1
MSKGMEPSVLKDRLVARAVEEGFSKTGICAPDAVPEAAGRLRTFLAAGRHGQMGWMAEREGWRGSAAALWPEARSVIMLAEVYTPEVDPLAVLAQRERAAISVYAQGKDYHDLVKRRLKRLGRWLLDQAGGEIKVFVDTAPVMEKPLAQAAGLGWQGKHTNLLARDLGSWFFLGAIFTTLDLPKDVAEVSHCGSCRACLDICPTGAFPAPYQLDARRCISYLTIEHKGPVEPDLRALMGNRIYGCDDCLAVCPWNKFAQAARDAGYQPRVGAPELAELAALDDTAFRARFVGSPIKRIGRDRFVRNVLYAIGNSGEVALCGAASALLADPDPVVAEAAAWAVDRLSRC

SEQ ID NO: 76986 - protein, 350 aa, Gemmobacter intermedius
  misc_feature (1)..(350): tr|A0A3S3WSD0|A0A3S3WSD0_9RHOB tRNA epoxyqueuosine(34) reductase QueG OS=Gemmobacter intermedius OX=1553448 GN =queG PE=4 SV=1
MVVSPSPDLSGLKTALIAEAKAAGFVAAGFCRPDAIPHAAGALEAFVEGGYHGEMTWMAERMAWRGNPAALWPEARSVIMLAESYTPPQDPRLVLAQSDRAAVSVYAQGKDYHDLVKKRLKRVGRWLIDKAPGSEIKVFVDTAPVMEKPLAQAAGLGWQGKHTNLLSRQFGNWVFLGAIFTTVEFEPDPAEVSHCGSCTACLVACPTGAFEGEGRLNPKRCISYLTIEHKGPVPEDLRGLMGNRIYGCDDCLAACPWNKFAVDAVDPGYGHRVGAPLLAELAGLDDAAFRARFAGSPIKRIGRNRFLRNVLYAIGNSGRGDLLPCAEALTRDPDPVVADAAAWAVSRLGG

SEQ ID NO: 76987 - protein, 344 aa, Gemmobacter lutimaris
  misc_feature (1)..(344): tr|A0A398BQD5|A0A398BQD5_9RHOB Epoxyqueuosine reductase OS=Gemmobacter lutimaris OX=2306023 GN=queG PE=3 SV=1
MEPSVLKERLVARAVEEGFSKAGICAPDAVPEAAGRLRAFLAAGRHGQMGWMAEREGWRGSAAALWPEARSVIMLAEVYTPEVDPLAVLGQRDRAAISVYAQGKDYHDLVKRRLKRLGRWLLDQAGGEIKVFVDTAPVMEKPLAQAAGLGWQGKHTNLLSRDLGSWFFLGALFTTLDLPKDAAEVSHCGSCRACLDICPTGAFPAPYQLDARRCISYLTIEHKGPVDPDLRALMGNRIYGCDDCLAVCPWNKFAQVARDVGYQPRVGAPELAELAALDDTAFRARFAGSPIKRIGRDRFVRNVLYAIGNSADPRLVPVAAALVQDSDPTVAEAAAWAMDRLSAV

SEQ ID NO: 76988 - protein, 356 aa, Gemmobacter megaterium
  misc_feature (1)..(356): tr|A0A1N7KU09|A0A1N7KU09_9RHOB Epoxyqueuosine reductase OS=Gemmobacter megaterium OX=1086013 GN=SAMN05421774_1 01674 PE=4 SV=1
MNLKDRLLAQAQAEGFAAMGICRPDAVPQAAARLAEYVARGHHGQMGWMAERMQWRGDPVALWAEAKSVIMLAEPYQPATDPLAILKEPALGAVAAYAQGKDYHDLVKRRLKRLGRWLLEQAGGEIKVFVDTAPVMEKPLAEAAGLGWQGKHTNLLSRDLGNWFFLGAIFTTLELEPDAPQLPHCGSCTACLDACPTRAFPAPFQLDARRCVSYLTIEHRGPVDEALRGLLGNRIYGCDDCLAVCPWNKFAVAAREIGYAHRVGAPRLEELVVLDDAGFRAMFSGSPIKRIGRDRMVRNVLYAIGNSGLARLRPLAAALVEDADPAVADAARWAVARLVAAGEQPVAQGGDGVAQI

SEQ ID NO: 76989 - protein, 111 aa, Gemmobacter sp.
  misc_feature (1)..(111): tr|A0A352V233|A0A352V233_9RHOB Epoxyqueuosine reductase (Fragment) OS=Gemmobacter sp. OX=1898957 GN=DC061_1390 5 PE=4 SV=1
MGICAPDATPETAGRLRAFLEAGHHGQMGWMAEREEWRGSAAALWPEARSVIMLAEVYTPETDPLAVLAQPDRAAVSVYAQGKDYHDLVKRRLKRLGRWLMDQLPEGAAIK

SEQ ID NO: 76990 - protein, 349 aa, Gemmobacter sp.
  misc_feature (1)..(349): tr|A0A3P3DJ80|A0A3P3DJ80_9RHOB Epoxyqueuosine reductase OS=Gemmobacter sp. YIM 102744-1 OX=2488730 GN=queG PE= 3 SV=1
MALAPPDTTGLRTALIAEAKAAGFVAVGFCRPDAIPHAAEALEAFVEGGYHGEMAWMAERMAWRGNPAALWPEARSVIMLAESYTPPEDPRLVLGQSDRAAVSVYAQGKDYHDLVKKRLKRVGRWLIDKAPGSEIKVFVDTAPVMEKPLAQAAGLGWQGKHTNLLSRQFGNWVFLGSIFTTVDFAPDAAEVSHCGSCTSCLTACPTGAFEGEGRLNPKRCISYLTIEHKGPVPEDLRARMGNRIYGCDDCLAACPWNKFAVDAVDPGYGHRVGAPLLAELAELDDAAFRARFSGSPIKRIGRDRFLRNVLYAIGNSGRSELLPRAEALTGDPDPVVAEAAAWAAARLRG

SEQ ID NO: 76991 - protein, 389 aa, Geobacillus galactosidasius
  misc_feature (1)..(389): tr|A0A226QMX9|A0A226QMX9_9BACI Epoxyqueuosine reductase OS=Geobacillus galactosidasius OX=883812 GN=queG PE=3 SV=1
MDVAALKQEIIEYSKTIGIDKIGFASADPFVELKERLRRQQELGYQSGFEEPDIEKRTNPSLLLPEAKSIIAIALAYPSKMKNAPRGTKTERRGIFCRASWGKDYHYILRERLEKLEAFILERVPQARVKSMVDTGELADRAVAERAGIGWSGKNCSIITPEFGSYVYLGEMITNIPFPPDEPIESRCGTCTKCIDACPTGALVQGGQLNAQRCLSFLTQTKGFLADEFRDKIGNRLYGCDTCQMVCPENKGKDFHLHPEMEPDPEVVKPKLIPLLHISNREFKEKFGSIAGAWRGKKPIQRNAILALAHYKDQTAIPDLLKLLKEDSRPVIRGTAAWALGKIGDTRVISDLEEASKTEKDPEVLAEIEKGLQLLRSNEEKGKNRSPVT

SEQ ID NO: 76992 - protein, 380 aa, Geobacillus kaustophilus
  misc_feature (1)..(380): tr|A0A0D8BVK6|A0A0D8BVK6_GEOKU Epoxyqueuosine reductase OS=Geobacillus kaustophilus OX=1462 GN=queG PE=3 SV=1
MDVMALKQEVIEYSRSIGIDKIGFASADPFVELKERLRRQQELGYQSGFEEPDIEKRTNPSLLLPDAKSIIAIALAYPSKMKNAPQGTKTERRGVFCRASWGKDYHDVLRERLRQLEEFLLTKVPHARVRWMVDTGELADRAVAERAGIGWSGKNCSIITPEFGSYVYLGEMITNIPFPPDEPVENRCGTCTKCIDACPTGALVQGGQLNAQRCLSFLTQTKGFLADEFREKIGNRLYGCDTCQQVCPENKGKDFHLHPEFEPDPEAVKPKLIPLLQMSNREFKEKFGAMAGSWRGKKPIQRNAILALAHYKDRTAVPHLLRLLKEDSRPVIRGTAAWALGKIGDPSAKPYLEAARQTETDADVIGEIEKGLKLLSEAKE

SEQ ID NO: 76993 - protein, 387 aa, Geobacillus kaustophilus
  misc_feature (1)..(387): tr|U2Y642|U2Y642_GEOKU Epoxyqueuosine reductase OS=Geob acillus kaustophilus GBlys OX=1337888 GN=queG PE=3 SV=1
MTKGGKTMDVMALKQEVIEYSRSIGIDKIGFASADPFVELKERLRRQQELGYQSGFEEPDIEKRTNPSLLLPEAKSIIAIALAYPSKMKNAPRGTKTERRGVFCRASWGKDYHDVLRERLQQLEEFLLAKVPHARVRSMVDTGELADRAVAERAGIGWSGKNCSIITPEFGSYVYLGEMITNIPFPPDEPVENRCGTCTKCIDACPTGALVQGGQLNAQRCLSFLTQTKGFLADEFREKIGNRLYGCDTCQQVCPENKGKDFHLHPEFEPDPEAVKPKLIPLLQMSNREFKETFGAMAGSWRGKKPIQRNAILALAHYKDQTAVPHLLRLLKEDSRPVIRGTAAWALGKIGDPSAKPYLEAARQTEADADVIAEIEKGLKLLAEAKE

SEQ ID NO: 76994 - protein, 380 aa, Geobacillus lituanicus
  misc_feature (1)..(380): tr|A0A223DXY7|A0A223DXY7_9BACI Epoxyqueuosine reductase OS=Geobacillus lituanicus OX=169283 GN=queG PE=3 SV=1
MDMMALKEEVIAYSRSIGIDKIGFASADPFVELKERLRRQQELGYQSGFEEPDIEKRTNPSLLLPEAKSIIAIALAYPSKMKDAPRGTKTERRGLFCRASWGKDYHVVLRERLQKLEEFLLAKVPSARVRSMVDTGELADRAVAERAGIGWSGKNCSIITPEFGSYVYLGEMITNIPFPPDEPVENRCGTCTKCIDACPTGALVQGGQLNAQRCISFLTQTKGFLADEFREKIGNRLYGCDTCQLVCPENKGKDFHLHPEFEPDPEAAKPKLVPLLDMTNREFQEKFGAMAGSWRGKKPIQRNAIIALAHYKDRTAVPHLLRLLKEDSRPVIRGTAAWALGKIGDATAKPHLEEARQTETDMDVIAEIDKGLKLLSETKE

SEQ ID NO: 76995 - protein, 401 aa, Geobacillus proteiniphilus
  misc_feature (1)..(401): tr|A0A1Q5SJV7|A0A1Q5SJV7_9BACI Epoxyqueuosine reductase OS=Geobacillus proteiniphilus OX=860353 GN=queG PE=3 S V=1
MHFILITSDFILPYMTKGGKTMDVMALKREVIEYSRSIGIDKIGFASADPFVELKERLRRQQELGYQSGFEEPDIEKRTNPSLLLPEAKSIIAIALAYPSKIKNAPRGTKTERRGVFCRASWGKDYHDVLRERLQQLEEFLLAKVPHARVRSMVDTGELADRAVAERAGIGWSGKNCSIITPEFGSYVYLGEMITNIPFPPDEPVENRCGTCTKCIDACPTGALVQGGQLNAQRCLSFLTQTKGFLADEFREKIGNRLYGCDTCQQVCPENKGKDFHLHPEFEPDPEAVKPKLIPLLQMSNREFKETFGAMAGSWRGKKPIQRNAILALAHYKDQTAVPHLLRLLKEDSRPVIRGTAAWALGKIGDPSAKPYLEAARQTEADADVIAEIEKGLKLLAEAKE

SEQ ID NO: 76996 - protein, 389 aa, Geobacillus sp.
  misc_feature (1)..(389): tr|C5D5W5|C5D5W5_GEOSW Epoxyqueuosine reductase OS=Geob acillus sp. (strain WCH70) OX=471223 GN=queG PE=3 SV=1
MDVAALKQEIIEYSKTIGIDKIGFASADPFVELKERLRRQQELGYQSGFEEPDIEKRTNPSLLLPEAKSIIAIALAYPSKMKNAPRGTKTERRGIFCRASWGKDYHYILRERLEKLEAFILERVPQARVKSMVDTGELADRAVAERAGIGWSGKNCSIITPEFGSYVYLGEMITNIPFPPDEPIESRCGTCTKCIDACPTGALVQGGQLNAQRCLSFLTQTKGFLADEFRDKIGNRLYGCDTCQMVCPENKGKDFHLHPEMEPDPEVVKPKLIPLLHISNREFKEKFGSIAGSWRGKKPIQRNAILALAHYKDQTAIPDLLKLLKEDSRPVIRGTAAWALGKIGDTRVISDLEEASKTEKDPEVLAEIEKGLQLLRSNEEKGKNRSPVT

SEQ ID NO: 76997 - protein, 418 aa, Geobacillus sp.
  misc_feature (1)..(418): tr|S7U1Y0|S7U1Y0_9BACI Epoxyqueuosine reductase OS=Geob acillus sp. WSUCF1 OX=886559 GN=queG PE=3 SV=1
MTPNLPEGRRCFSCSDITNFILITSDFILSYMTKGGKTMDVMALKREVIEYSRSIGIDKIGFASADPFVELKERLRRQQELGYQSGFEEPDIEKRTNPSLLLPEAKSIIAIALAYPSKMKNAPRGTKTERRGVFCRASWGKDYHDVLRERLQQLEEFLLAKVPHARVRSMVDTGELADRAVAERAGIGWSGKNCSIITPEFGSYVYLGEMITNIPFPPDEPVENRCGTCTKCIDACPTGALVQGGQLNAQRCLSFLTQTKGFLADEFREKIGNRLYGCDTCQQVCPENKGKDFHLHPEFEPDPEAVKPKLIPLLQMSNREFKETFGAMAGSWRGKKPIQRNAILALAHYKDQTAVPHLLRLLKEDSRPVIRGTAAWALGKIGDPSAKPYLEAARQTEADADVIAEIEKGLKLLAEAKE

SEQ ID NO: 76998 - protein, 380 aa, Geobacillus stearothermophilus
  misc_feature (1)..(380): tr|A0A3L7CM80|A0A3L7CM80_GEOSE Epoxyqueuosine reductase OS=Geobacillus stearothermophilus OX=1422 GN=queG PE=3 SV=1
MDVMALKQEVIEYSRSIGIDKIGFASADPFVELKERLRRQQELGYQSGFEEPDIEKRTNPSLLLPEAKSIIAIALAYPSKMKNAPRGTKTERRGVFCRASWGKDYHDVLRERLQQLEEFLLAKVPHARVRSMVDTGELADRAVAERAGIGWSGKNCSIITPEFGSYVYLGEMITNIPFPPDEPVENRCGTCTKCIDACPTGALVQGGQLNAQRCLSFLTQTKGFLADEFLEKIGNRLYGCDTCQQVCPENKGKDFHLHPEFEPDPEAVKPKLIPLLQMSNREFQETFGAMAGSWRGKKPIQRNAILALAHYKDQTAVPHLLRLLKEDSRPVIRGTAAWALGKIGDPSAKPYLEAARQTEADADVIAEIEKGLKLLAEAKE

SEQ ID NO: 76999 - protein, 380 aa, Geobacillus stearothermophilus
  misc_feature (1)..(380): tr|A0A0K2HAY1|A0A0K2HAY1_GEOSE Epoxyqueuosine reductase OS=Geobacillus stearothermophilus 10 OX=272567 GN=queG PE=3 SV=1
MDVMALKREVIEYSRSIGIDKIGFASADPFVELKERLRRQQELGYQSGFEEPDIEKRTNPSLLLPEAKSIIAIALAYPSKMKNAPRGTKTERRGVFCRASWGKDYHDVLRERLQQLEEFLLAKVPHARVRSMVDTGELADRAVAERAGIGWSGKNCSIITPEFGSYVYLGEMITNIPFPPDEPVENRCGTCTKCIDACPTGALVQGGQLNAQRCLSFLTQTKGFLADEFREKIGNRLYGCDTCQQVCPENKGKDFHLHPEFEPDPEAVKPKLIPLLQMSNREFKETFGAMAGSWRGKKPIQRNAILALAHYKDQTAVPHLLRLLKEDSRPVIRGTAAWALGKIGDPSAKSYLEAARPTEADADVIAEIEKGLKLLAEAKE

SEQ ID NO: 77000 - protein, 380 aa, Geobacillus subterraneus
  misc_feature (1)..(380): tr|A0A143MKF8|A0A143MKF8_9BACI Epoxyqueuosine reductase OS=Geobacillus subterraneus OX=129338 GN=queG PE=3 SV= 1
MDVAALKQEVIEYSRSIGIDKIGFASADPFVELKERLRRQQELGYQSGFEEPDIEKRTNPSLLLSEAKSIIAIALAYPSKMKDAPRGTKTERRGLFCRASWGKDYHDVLRDRLQQLEEFLLIKVPHARVRSMVDTGELADRAVAERAGIGWSGKNCSIITPEFGSYVYLGEMITTIPFPPDEPIENRCGTCTKCIDACPTGALVQGGQLNAQRCISFLTQTKGFLADEFREKIGNRLYGCDTCQLVCPENKGKDFHLHPEFEPDPEAAKPKLIPLLQISNREFKEKFGAMAGSWRGKKPIQRNAILALAHYKDRTAVPYLLQLLKEDSRPVIRGTAAWALGKIGDVSAKPYLEEARQTETDPDVASEIEKGLKLLAEVKE

SEQ ID NO: 77001 - protein, 380 aa, Geobacillus thermocatenulatus
  misc_feature (1)..(380): tr|A0A226Q579|A0A226Q579_9BACI Epoxyqueuosine reductase OS=Geobacillus thermocatenulatus OX=33938 GN=queG PE=3 SV=1
MDVMALKQEVIEYSRSIGIDKIGFASADPFVELKERLRRQQELGYQSGFEEPDIEKRTNPSLLLPEAKSIIAIALAYPSKMQNAPRGTKTERRGVFCRASWGKDYHDVLRERLQQLEEFLLAKVPHARVRSMVDTGELADRAVAERAGIGWSGKNCSIITPEYGSYVYLGEMITNIPFPPDEPVENRCGTCTKCIDACPTGALVQGGQLNAQRCLSFLTQTKGFLADEFREKIGNRLYGCDTCQQVCPENKGKDFHLHPEFEPDPEAVKPKLIPLLQMSNREFQETFGAMAGSWRGKKPIQRNAILALAHYKDQTAVPHLLRLLKEDSRPVIRGTAAWALGKIGDPSAKPYLEAARQTEADADVIAEIEKGLKLLAEAKE

SEQ ID NO: 77002 - protein, 380 aa, Geobacillus thermodenitrificans
  misc_feature (1)..(380): tr|A0A1W6VNH2|A0A1W6VNH2_GEOTD Epoxyqueuosine reductase OS=Geobacillus thermodenitrificans OX=33940 GN=queG PE =3 SV=1
MDIVSLKQEVIEYSRSIGIDKIGFASADPFVELKERLRRQQELGYQSGFEEPDIEKRTNPSLLLPEAKSIIAIALAYPSKMKDAPRGTKNERRGLFCRASWGKDYHDVLRERLRQLEEFLLAKVPHARVRSMVDTGELADRAVAERAGIGWSGKNCSIITPEFGSYVYLGEMITTIPFPPDEPIENRCGTCTKCIDACPTGALVQGGQLNAQRCISFLTQTKGFLADEFREKIGNRLYGCDTCQLVCPENKKKDFHLHPEFEPDPEAAKPKLIPLLQVSNREFKEKFGAMAGSWRGKKPIQRNAILALAHYKDRTAVPHLLRLLKEDSRPVIRGTAAWALGKIGDVSAKPYLEEARQTETDSDVVAEIEKGLKLLTEVKE

SEQ ID NO: 77003 - protein, 380 aa, Geobacillus thermodenitrificans; identical to SEQ ID NO: 77002
  misc_feature (1)..(380): tr|A4IKM2|A4IKM2_GEOTN Epoxyqueuosine reductase OS=Geob acillus thermodenitrificans (strain NG80-2) OX=420246 G N=queG PE=3 SV=1

SEQ ID NO: 77004 - protein, 380 aa, Geobacillus thermoleovorans; identical to SEQ ID NO: 74503
  misc_feature (1)..(380): tr|A0A1C3D571|A0A1C3D571_GEOTH Epoxyqueuosine reductase OS=Geobacillus thermoleovorans OX=33941 GN=queG PE=3 S V=1

SEQ ID NO: 77005 - protein, 380 aa, Geobacillus thermoleovorans; identical to SEQ ID NO: 74503
  misc_feature (1)..(380): tr|G8N5M5|G8N5M5_GEOTH Epoxyqueuosine reductase OS=Geob acillus thermoleovorans CCB_US3_UF5 OX=1111068 GN=queG PE=3 SV=1

SEQ ID NO: 77006 - protein, 380 aa, Geobacillus zalihae
  misc_feature (1)..(380): tr|A0A1V9CMQ7|A0A1V9CMQ7_9BACI Epoxyqueuosine reductase OS=Geobacillus zalihae OX=213419 GN=queG PE=3 SV=1
MDVMALKREVIEYSRSIGIDKIGFASADPFVELKERLRRQQELGYQSGFEEPDIEKRTNPSLLLPEAKSIIAIALAYPSKMKNAPRGTKTERRGVFCRASWGKDYHDVLRERLQQLEEFLLAKVPHARVRSMVDTGELADRAVAERAGIGWSGKNCSIITPEFGSYVYLGEMITNIPFPPDEPVENRCGTCTKCIDACPTGALVQGGQLNAQRCLSFLTQTKGFLADEFREKIGNRLYGCDTCQQVCPENKGKDFHLHPEFEPDPEAVKPKLIPLLQMSNREFKETFGAMAGSWRGKKPIQRNAILALAHYKDQTAVPHLLRLLKEDSRPVIRGTAAWALGKIGDPSAKPYLEAARQTEADADVIAEIEKGLKLLAEAKE

SEQ ID NO: 77007 - protein, 254 aa, Geobacter argillaceus
  misc_feature (1)..(254): tr|A0A562V8S9|A0A562V8S9_9DELT Epoxyqueuosine reductase QueG OS=Geobacter argillaceus OX=345631 GN=JN12_03479 PE=4 SV=1
MKQNIKAYALELGVDDVGFAAAAGYDSPLTPALDTIFPGARTLIVMAFREASHCESENMRIAMGGRLAIMDFMKSSSYKLSHLLEREYGAKAMMIPMSYPSDISPEAKFGLIGDFSHRHAAIAAGLGSWGRHNLVIHPTLGARVLFSTILTDIELAADPPVTQELCTGCNLCVESCPGNALASEGKTEQMKCLVHSQPYGIGANIRFWKRFVDTPPEDQKKMLATPEYMRLYQASFIGYQYHCFKCYSVCPIGR

SEQ ID NO: 77008 - protein, 344 aa, Geobacter metallireducens
  misc_feature (1)..(344): tr|Q39WY3|Q39WY3_GEOMG Iron-sulfur cluster-binding prot ein OS=Geobacter metallireducens (strain GS-15 / ATCC 5 3774 / DSM 7210) OX=269799 GN=Gmet_0999 PE=4 SV=1
MSTDNLALNIREKAMEAGFDHCGIVKIDALADYVSRLEERAAAFPRSKPFYDFLSKLGTPQAAHEWGKSVIVCAMRYGKYRIPNRADRHIGKLYLYGGYRQPAYSQEYAGMAGFEAFLAAEGIRFAKDVFGIAPARLCAAQANLGVIRNNNFLYTEHGSWVWLETWLIDRELEYRESPNTLPSCPPGCSKCIDACPTGALKAPFLTDMGTCIARLTYSPSGEAPEPLRESMGTWLYGCDECQNACPMNKGRWEEKEEYPRLEELSRHISLEKIAEMDEHAVSDILSPMFWIIGKEKLWMWKCNVIRAMVNGKDPGHHSTIRKLCDDGNENVRRTAEWACRQLGI

SEQ ID NO: 77009 - protein, 266 aa, Geobacter sp.
  misc_feature (1)..(266): tr|A0A2T5RE99|A0A2T5RE99_9DELT Epoxyqueuosine reductase QueG OS=Geobacter sp. DSM 2909 OX=2135459 GN=C7376_101 201 PE=4 SV=1
MNDIKEVIRNYILGLGVDDVGFASVDDYRSPRTPSLESLFPGVRSMIVMAFRELSACESPSPQLAMNARLDLMEFTRSACYRVARYVETQLGSPVVTAPVSYPMDFTTPQKIGLAEVSLRHAAVSAGLGAFGLHNLVVHPKFGTRVIFTAVLTKLELASDPAPEKNPCTSCGLCIKACPAGALNDEGKTDVMKCLMNSQPYGMGANIGFWCRFSDATPEEQKEMLQSTEYLSLYHAGSIGYQYFCFRCLAACPIGRSVRQESPGPT

SEQ ID NO: 77010 - protein, 269 aa, Geobacter sp.
  misc_feature (1)..(269): tr|A0A0A8WTJ7|A0A0A8WTJ7_9DELT Epoxyqueuosine reductase OS=Geobacter sp. OR-1 OX=1266765 GN=queG PE=4 SV=1
MAERIRAEIERFVRESPLNRFPDSDTPYFDAPLVGFAAAGDPLFQRYKQIIGPFHRTPEELLNGAATVIVWSLPITQSTRESNRAESVRPSLDWARTRSFGDEFIKVLRRHLVAWLEQQGYRAIAPQLDPNWQALDDPHVGPVSTWSERHAAYAAGLGTFSLNDALITTKGIAHRLGSVVTDMVVGSTPEDRPGVRDNCLFYRDGSCMACVKRCPVDALSANGHDKKRCQSYLYTTLTQELAEQYGTPIPGCGLCQTKVPCEGGIPKGK

SEQ ID NO: 77011 - protein, 446 aa, Geobacter thiogenes
  misc_feature (1)..(446): tr|A0A1T4KD46|A0A1T4KD46_9DELT Epoxyqueuosine reductase QueG (Queuosine biosynthesis) OS=Geobacter thiogenes O X=115783 GN=SAMN02745119_00488 PE=4 SV=1
MELNQHPTVIRYHEKIAARASRITAQKLNAKELREICLETGVDDVGFVEINNALLADQKADILQMFPWAKTLISFVGRINRENLRSPARSIASLELHQVEERLTHAANALAAALERKGIRAATPAGGFPMEADNWLRGKMQVISHKPIAVAAGLGKMGLHRNVIHPVFGSFVLLGTVLIEAELDEYSTPLDYNPCIDCKLCVAACPTGAIGPDGFFNPVNCMTHTYRELLGGFTDWVENIADSKNSIDYRGKVSDAETVSMWQTLVCGPCYKSVYCLAVCPAGDEVIPQYLDDRKAFVNDVVKPLQQKTEPVYVLPGSDAEHHVLNKFPHKKIRRVGNGVRPPTIAAFLTSMPIAFQRHKSERLNATYHFTFSGIERAEATVVIKDKTLKIEQGHVGVADVSVRADARTWLRVLHKETSMIKQIVLRRIRVKGPLNLFKAFGKCFA

SEQ ID NO: 77012 - protein, 312 aa, Geofilum rubicundum
  misc_feature (1)..(312): tr|A0A0E9LT40|A0A0E9LT40_9BACT Epoxyqueuosine reductase OS=Geofilum rubicundum JCM 15548 OX=1236989 GN=queG PE =3 SV=1
MSLTSEYMAREIRSEALRIGFDDIGFSPAKELVEDKERLTQWLDNGYNAGMGYMANHFEKRVNPALLVEGSLSVITVVYNYHPSEALLSQKVPKISRYAYGLDYHDTIRKKIGSLFDFIRAHLYPQLEGRFFVDSAPLLERSLAVRAGLGWIGKNSMLINRKLGSYIFIGELVVNMELPYHESPMMDRCGGCSNCVDACPTQAILPDRVIDGNKCISYLTIENKTEIPRTFDGKLKGWAFGCDICQEVCPWNRKAPDTDEPDFRPSETLLTMEKGDWEELTAEGFSKLFKGSAVKRAKYAGWLRNYRFVTEK

SEQ ID NO: 77013 - protein, 372 aa, Geomicrobium sp.
  misc_feature (1)..(372): tr|A0A061NUL3|A0A061NUL3_9BACL Epoxyqueuosine reductase OS=Geomicrobium sp. JCM 19037 OX=1460634 GN=queG PE=3 SV=1
MNEELKEEIINFSKSIGIDRIGFASADPFLTLKERLKTQQQLGYDSGFEEPDIDKRTNPELLLPYAKSIISIALSYPSKLKNPPKGVKGNRRGLFCRASWGEDYHTVLNDRLERLQAFIKERVPEAKTASMVDTGALSDRAVAERAGIGWTGKNCMVITHEYGSYVYLGEMITTLAFEPDTPVEDGCGTCNKCVDSCPTGALIQGGQLDSQKCIAFLTQKKDMIPKRYRKKIGNRLYGCDTCQVVCPINKGKGDHYQPEFEPEPEKVKPELLPLLSMSNREFKETYGMMAGSWRGKKPIQRNAVIALGHFKEEAASPKLRDLLQNDPRPVIRGTAAWSLGEISGSENLEALRLAALHEDDDEVQKEIEEALQ

SEQ ID NO: 77014 - protein, 372 aa, Geomicrobium sp.
  misc_feature (1)..(372): tr|A0A061NGD8|A0A061NGD8_9BACL Iron-sulfur cluster-bind ing protein OS=Geomicrobium sp. JCM 19055 OX=1460649 GN =JCM19055_4819 PE=4 SV=1
MNEELKQEIIAYSKTIGIDKIGFASADPFLTLKERLREQQRLGYESGFEESDIDLRTEPERLLPYAKSIIAIALSYPSKLKNPPKGVKGKRRGLFCRASWGADYHHVLNDRLQKLQEFIESKVPDAKMASMVDTGALSDRAVAERAGIGFSGKNCMIITPEYGSYVYLGEMITTIPFEPDTPIEEGCGTCNKCVESCPTGALIQGGQLDAQKCIAFLTQKKDFIPKQYRKKIGNRLYGCDTCQVVCPINKGKGEEYQPEFEPDPEKVKPELLPLLSLSNRQFKEKYGEMAGSWRGKKPIQRNAILALGHFKEESASETLRQLLTDDARPVIRGTAAWALGEIGGDDNELAMQQALEKEEDLDVIKEIEEALT

SEQ ID NO: 77015 - protein, 398 aa, Georhizobium profundi
  misc_feature (1)..(398): tr|A0A3Q8XL24|A0A3Q8XL24_9RHIZ Epoxyqueuosine reductase OS=Georhizobium profundi OX=2341112 GN=queG PE=3 SV=1
MASRLANRPSSSNTNNLEATELARLVRQAALEEGFDAVRIVAPDAIESAAGHLASFIAEGRHATMDWMAETAERRGDPRVLWPDVRSVIMLAMNYGPEHDPLANLAFPDRAAISVYAQNRDYHDVIKGKLKTVAQKFASRAGADVKVFVDTAPVMEKPLAEKAGLGWQGKHTNLVSRKFGSWLFLGSIFTTAELVADEAESDHCGSCRACLDICPTNAFPAPYQLDARRCISYLTIEHKGTIPEEFRRPIGNRIYGCDDCLAVCPWNKFAETAREAKLKARDDLKAPSIADLLALDDTSFRQHFAGSPIKRIGRDRFVRNVLIAAGNSGLAELSAHCDPLLADPSPLVRAMAVWATAELADAGTLRHKAGHHLESEADPVVRAEWTRALDRQTLQETI

SEQ ID NO: 77016 - protein, 344 aa, Geosporobacter ferrireducens
  misc_feature (1)..(344): tr|A0A1D8GLQ5|A0A1D8GLQ5_9CLOT Fe-S oxidoreductase OS=G eosporobacter ferrireducens OX=1424294 GN=Gferi_21265 P E=4 SV=1
MSIEKLIQNKAYEFGYEKCGIVRIQDLEGYDKCLMERIDKVPASKMFYQNQSRLTHLPERYPWTKSVIVAVSHYGHYEVPGQLKGHIGKHYIFDGRVNTESQEFKRSVAMEQFLQDLGLKTASNRNFGIVGLRWAAMKAGLGVIRRNNFFYTESGSWVELEAWITDRDMELVESTNLPICPEGCSNCIKACPTCSLSSPYTMNPVSCVSFLTTFGGRDLSNDPLGKSFGTWIYGCDACQDACPMNSGKWTEKDEFPGVSEISLCLTPENIMKMEEEFYKHNIQPKFFYLSPDELWKWKVNVLNFMRNNYQESYKQYIMGACSNENEKIRDLAQMICKEMSLTDN

SEQ ID NO: 77017 - protein, 374 aa, Geosporobacter ferrireducens
  misc_feature (1)..(374): tr|A0A1D8GN68|A0A1D8GN68_9CLOT tRNA epoxyqueuosine(34) reductase QueG OS=Geosporobacter ferrireducens OX=14242 94 GN=Gferi_24105 PE=4 SV=1
MVNRLKEKIKICAKDIGIDLIGFTSAAPFNEIKEILMERKEKGYLSGFEEQDIGKRIDPKQIMPDARTIIAIAINYYVEKPRLLEGKERPLGAIARSAWGRDYHEVLRDKLLLLMQNIEKLIGPFQYKIYVDTGSLSDRAVAWRAGLGWFGKNNMLITKKYGSWVFLGYAIVNFEVEPDQPMPDQCAGCNACIQACPAEALEEGYKLQGKKCLSFITQTKEDITPEVRQKMGNRLYGCDTCQCVCPHNHTVEETKHQEFSPEAYSDRPDLIEILHMDNKTFKVRYGKTAAGWRGKNNIRRNAIIALANRKDPLAIPHLKKLLFDESNMIRKYAIWAIIKLDAELARSIIKAHLENEKDEEIREIIEEFLGDDSH

SEQ ID NO: 77018 - protein, 374 aa, Geosporobacter subterraneus
  misc_feature (1)..(374): tr|A0A1M6G746|A0A1M6G746_9CLOT Epoxyqueuosine reductase OS=Geosporobacter subterraneus DSM 17957 OX=1121919 GN =SAMN02745975_01200 PE=4 SV=1
MGEDLKEKIKQIARGLGIDLIGFTSAAPFNELEKIFLERKAQGYLSGFEEQDIAKRIDPRLTLENAETIIVIGMSYYTDASEICEEEGAARGTIARSAWGKDYHEVLRNKLLILMKKIEELIGFFQYRIFVDTGPLSDRAVARRAGLGWIGKNNMLITRQYGSWVFIGYGIVDFKIEQDEPLQDSCAGCNACIQACPAGALEEGYKLKGKKCLSFITQTKDEIESEECKKLGNRIYGCDTCQLVCPHNQKIKKTKTWEFLPDPSISRPKLVDLLSMDNQTFKEKYENTAAGWRGKNTLRRNAIIALANSRDPKGIPYLEKLLAEDSKMIRKYALRGIVSLEPQAAKNILKTHLKRERDAELKGFIENFLGDDCN

SEQ ID NO: 77019 - protein, 379 aa, Gibbsiella quercinecans
  misc_feature (1)..(379): tr|A0A250B0D8|A0A250B0D8_9ENTR Epoxyqueuosine reductase OS=Gibbsiella quercinecans OX=929813 GN=queG PE=3 SV=1
MTNPLDLNQLAQHIKQWGQSLGFQQVGICDTDLSAEEPKLQAWLDKQYHGEMEWMARHGMLRARPHELLPGTLRVISVRMNYLPAKAAFASTLRNPELGYVSRYALGRDYHKLLRQRLKKLGEQIKAYCGELNFRPFVDSAPVMERALAAKSGIGWIGKHSLILNREAGSWFFLGELLIDLPLPVDRPQQEQCGRCVACITTCPTGAIVAPYTVDARRCISYLTIELEGVIPLEFRPLLGNRIYGCDDCQLICPWNRFSQLTDEDDFSPRAALHAPELVELFGWSEEKFLRITEGSAIRRIGHLRWLRNIAVALGNAPYLDSAVLALRARQGESAMLDEHIAWALEQQLARRAEQGIAVLTTQKKRLIRAVEKGLPRDA

SEQ ID NO: 77020 - protein, 370 aa, Giesbergeria anulus
  misc_feature (1)..(370): tr|A0A1H9R1T5|A0A1H9R1T5_9BURK Epoxyqueuosine reductase OS=Giesbergeria anulus OX=180197 GN=queG PE=3 SV=1
MVVSSSQLVPQIRQWARELGFSQIGVAGVDLSSAEAGLIQWLEQGFHGDMHYMAAHGLKRARPAELVPGTVSVITARMDYLPRTTPAGWQALEFARLQQPAQGVVSMYARGRDYHKVLRTRLQKLADQLAQAVGPLGHRVFTDSAPVLEAELAARSGQGWRGKHTLVLHRQAGSLFFLGEIYIDLALEPTEPVSAHCGQCTACLDVCPTQAIVAPYRLDARRCISYLTIEHSGPIPLELRPLLGNHIYGCDDCQLVCPWNKFAQTSTLPDFDARTGVSGQQLIHLFSWDEATFLRLTEGGPIRRIGHERWLRNVAVALGNALRTADSQQVLDLRTALQERVADSSALVREHVVWALAQGQASSVQMGSRL

SEQ ID NO: 77021 - protein, 307 aa, Gillisia hiemivivida
  misc_feature (1)..(307): tr|A0A5C7A0X4|A0A5C7A0X4_9FLAO Epoxyqueuosine reductase OS=Gillisia hiemivivida OX=291190 GN=queG PE=3 SV=1
MELRSKYSEIIKAEAKRLGFMSCGISKAEFLETEAPRLEKWLKQNMHGEMSYMENHFDKRLDPTKLVSGSKSVISLLLNYYPSEFQNKDSYKISKYAYGTDYHFVIKEKLKQLLQFIQQEIGEVEGRAFVDSAPVLDKAWAAKSGLGWIGKNSNLLTKQVGSFYFIAELIVDLELEYDTPVTDHCGSCTACIDACPTQAIVEPYKVDGSKCISYFTIELKNELPNSYKDQFDDWMFGCDVCQDVCPWNKFSKSHNEPLFDPNPQILEYDKKDWEELTKETFNEIFKKSAVKRTKFDGLKRNIEFLKK

SEQ ID NO: 77022 - protein, 307 aa, Gillisia limnaea
  misc_feature (1)..(307): tr|H2BYG1|H2BYG1_9FLAO Epoxyqueuosine reductase OS=Gill isia limnaea DSM 15749 OX=865937 GN=queG PE=3 SV=1
MATKNNHTQLIKTEAMRLGFMSCGISKAEFLETEAPRLESWLKRNMHGEMSYMENHFDIRLDPTKLVDGSKSVISFLLNYYPSQFQKADSYKISKYAYGTDYHFVIKEKLKQLLQFIQQEIGEVKGRAFVDSAPVLDKAWAAKSGLGWIGKNSNLLTKQVGSFYFIAELIVDLELEYDTPVTDHCGSCTACIDACPTQAIVDPYKVDGSKCISYFTIELKEELPTSVNGQFDDWMFGCDICQDVCPWNKFSKPHNEPLFNPHTDLLGMNKKDWQEITKEIFSEIFKKSAVKRTKFEGLKRNLRFLED

SEQ ID NO: 77023 - protein, 306 aa, Gillisia mitskevichiae
  misc_feature (1)..(306): tr|A0A495PZJ0|A0A495PZJ0_9FLAO Epoxyqueuosine reductase OS=Gillisia mitskevichiae OX=270921 GN=queG PE=3 SV=1
MLQKAKYSELIKSEAKRLGFMSCGISKAEFLEEEAPRLEKWLKLNMHGEMSYMENHFDKRLDPTKLVSGSKSVISLLLNYYPSEFQREDTFKISKYAYGTDYHFVIKDKLKQLLQFIQQEIGEVDGRAFVDSAPVLDKAWAAKSGLGWIGKNSNLLTKQVGSFYFIAELIVDLELEYDLPVTDHCGSCTACIDACPTQAIVEPYKVDGSKCISYFTIELKNELPNSYKDQFDDWMFGCDICQDVCPWNKFSKSHNEPLFDPNPQVLTNDRKDWEELTKETFNEIFKKSAVKRTKFEGLKRNIDFLK

SEQ ID NO: 77024 - protein, 307 aa, Gillisia sp.
  misc_feature (1)..(307): tr|A0A559PJH5|A0A559PJH5_9FLAO Epoxyqueuosine reductase OS=Gillisia sp. Hel_I_86 OX=1249981 GN=queG PE=3 SV=1
MLQKAKYSKLIKTKAKRLGFMSCGISKAGFLEEEAPRLENWLKQDMQGEMHYMENHFDKRLDPTKLVEGSKSVISLLLNYYPSALQREDSYKISKYAYGIDYHFVIKEKLKHLLQFIQQEIGEVGGRAFVDSAPVLDKAWAAKSGLGWIGKHSNLLTKQAGSFYFIAELIVDLDLEYDLPVTDHCGSCTACIDACPTQAIVEPYKVDGSKCISYFTIELKNELPNTYKNQFDDWMFGCDVCQDVCPWNKFSKSHNEPLFDPNPQLLNFDRKDWEELTKETFDEIFRKSAVKRTKFDGLKRNIEFLKE

SEQ ID NO: 77025 - protein, 307 aa, Gillisia sp.
  misc_feature (1)..(307): tr|A0A1H1LBP0|A0A1H1LBP0_9FLAO Epoxyqueuosine reductase OS=Gillisia sp. Hel1_33_143 OX=1336796 GN=queG PE=3 SV =1
MLQKSKYSELIKTEAKRLGFMSCGISKAEFLEEEAPRLETWLQKNMHGEMSYMENHFDKRLDPTKLVEGSKSVISLLLNYYPSEFQREDTYKISKYAFGTDYHFVIKDKLKNLLKYIQDEIGEVDGRAFVDSAPVLDKAWAARSGLGWIGKNANLLTKQVGSFYFIAELIVDLELEYDTPVTDHCGSCTACIDACPTQAIVEPYKVDGSKCISYFTIELKNELPNSYKDQFNDWMFGCDVCQDVCPWNKFSQPHNEPLFNPNLRLLDNSKKDWEELTKETFNEIFKKSAVKRTKFEGLRRNIDFLKK

SEQ ID NO: 77026 - protein, 313 aa, Gilvibacter sp.
  misc_feature (1)..(313): tr|A0A1Y0MN18|A0A1Y0MN18_9FLAO Epoxyqueuosine reductase OS=Gilvibacter sp. SZ-19 OX=754429 GN=queG PE=3 SV=1
MNQNQSTYAKLIKTHAQRLGFLSCGISKAEFLAEEAPRLEQWLKAGMHGQMAYMENHFDKRLDPTLLVPGAKSVVSLLYNYYPQQKQDKDSFKISKYAYGEDYHFVVKDKLKELMHVLSEEIGEIGGRVFVDSAPVLDKVWAAKSGLGWIGKHSNLLSKKTGSFFFVAELIIDLDLEYDHPVTDHCGTCTACIDACPTQAIIKPYVVDGSKCISYATIELKEAIPKSFSGQMDDWMFGCDVCQDVCPWNRFSKPHSESRFNPKPELLQLDKNAWRELTEEVFGELFKKSAVKRTKYTGLMRNIAFLDRDTSSQ

SEQ ID NO: 77027 - protein, 409 aa, Gimesia maris
  misc_feature (1)..(409): tr|A0A3D3R005|A0A3D3R005_9PLAN tRNA epoxyqueuosine(34) reductase QueG OS=Gimesia maris OX=122 GN=queG PE=4 SV= 1
MGTDAGPSLALNNESTVEKIMGEATGSTADEQSRKSAVIKQMAFDCGFDLAGLAPAITPAGFHHFLEWLNQGYAGEMSYLERRKDAYQHPQHVMSSVRSVLMLTLNYRTEDPPPVTGTEARVSRYAWGTTDYHKVIRKKLKQLSRQIREKCPDCETRGVVDTAPLLERDFAQLAGLGWIGKNTLLLNKSEGSWFFLAGLLLSDELEYDEPHHSSHCGTCTRCLDACPTDAFVAGGTLDARKCISYLTIELRDQPIPQELRPGLEDWAFGCDVCQDVCPWNRKTPLSREIAFQPVETYAPLDACELLTLNDAQFQERFQSTPMSRSGRAGLLRNAAIVLGNRGDVSAVPVLKNVLNDREPLIRGAAAWALGKLGDAEVQTFLKEQLAVEPEPHVRQELQQAIADMNIQSK

SEQ ID NO: 77028 - protein, 409 aa, Gimesia maris
  misc_feature (1)..(409): tr|A6CFA7|A6CFA7_9PLAN 4Fe-4S ferredoxin-type domain-co ntaining protein OS=Gimesia maris DSM 8797 OX=344747 GN =PM8797T_06707 PE=4 SV=1
MGTDAGSSLALNNESTVEKIMGEATGSTADEQSRKSAVIKQMAFDCGFDLAGLAPAITPAGFHHFLEWLNQGYAGEMSYLERRKDAYQHPQHVMSSVRSVLMLTLNYRTEEPPPVTGTEARVSRYAWGTTDYHKVIRKKLKQLSRLIREKYPDCETRGVVDTAPLLERDFAQLAGLGWIGKNTLLLNKSEGSWFFLAGLLLSDELEYDEPHHSSHCGTCTRCLDACPTDAFVAGGVLDARKCISYLTIELRDQPIPQELRPGLEDWAFGCDVCQDVCPWNRKTPLSREIAFQPVETYAPLDACELLSLDEVQFRERFQSTPMSRAGRAGLLRNAAIVLGNRGDVSAVPALKNVLNDREPLIRGAAAWALGKLGDAEVQTFLKEQLAVEPEPHVRQELQQAIADMNIQSK

SEQ ID NO: 77029 - protein, 368 aa, Gimesia sp.
  misc_feature (1)..(368): tr|A0A2E2C092|A0A2E2C092_9PLAN tRNA epoxyqueuosine(34) reductase QueG OS=Gimesia sp. OX=2024833 GN=queG PE=4 S V=1
MAYECGFDLAGLAPAITPAGYHHFLEWLNQGYAGEMNYLERRKDAYQHPAHVMSSVRSVMMLTLNYRTEDPPPVSGTEARVSRYAWGSTDYHKVIRKKLKQLSRLIREQFPDCETRGVVDTAPLLERDFAQLAGLGWIGKNTLLLNKTEGSWFFLAGLLLSDELDYDEPHHSSHCGTCTRCLDACPTDAFVEGGVLDARKCISYLTIELRDQPIPSELRPGLQDWAFGCDVCQDVCPWNRKTPLSREIAFQPVESYSPLDACELLTLDDAQFQERFQSTPMSRSGRAGLLRNAAIVLGNRGDQSAVPVLKRVLSDTEPLIRGAAAWALGQLGETETLDSLAAQLSVERESSVRLELQQAITSIKASGK

SEQ ID NO: 77030 - protein, 386 aa, Gimesia sp.
  misc_feature (1)..(386): tr|A0A5A8BC98|A0A5A8BC98_9PLAN tRNA epoxyqueuosine(34) reductase QueG OS=Gimesia sp. JC646 OX=2605989 GN=queG PE=4 SV=1
MGKSAETTGKSLSQQSELIKRLAREVGFDLAGIAPAVTPTGYHSFLDWLNQGYAGEMSYLERRKEAYEHPRYVMSSVRSVLMLTLNYQTEAPPEVTGTEARVSRYAWGTTDYHKVIRKKLKQLSRLIREQYPDCETRGVVDTAPLLERDFAQLAGLGWIGKNTLLLNKREGSWFFLAGLLLSDELEYDEPQQTSHCGTCTRCLEACPTDAFVEAGTLDARKCISYLTIELRDQPIPAELRPGMQDWMFGCDVCQDVCPWNRKAPISGETAFQPVETFTPVDACELLTLDEAAFQERFQSTPMSRARRAGLLRNAAIVLGNRGDETAVQALLGVLNDEEPLIRGAAAWALGRLGAPTTVETLQTRLETETETDVIEELKQALSRLVS

SEQ ID NO: 77031 - protein, 387 aa, Glaciecola nitratireducens
  misc_feature (1)..(387): tr|G4QJ99|G4QJ99_GLANF Epoxyqueuosine reductase OS=Glac iecola nitratireducens (strain JCM 12485 / KCTC 12276 / FR1064) OX=1085623 GN=queG PE=3 SV=1
MSVINSIDLNQLTDNIKTWGKSLGFQQVGVSDVDLSQHEKALRNWLENGYQGDMSFLERNIDKRLSPSELVPGTLRIISVRMDYLPPDASFASNLKSSSTAYISRYALGRDYHKVIRKKLQKLAEQIQEYTQDLSFRPFVDSAPVLEHAVAEKAGIGWTGKHSLTINKEAGSYFFLGELFINLPLPVDQAVEENCGKCTACISICPTQAIVEPYVVDARKCISYLTIENDGAIPVIYRKAIGNRIYGCDDCQLVCPWNKYAEVTEEKDFFARQHMHNRSLLDLFKWTEDEFLEHTEGSAIRRIGYRKWKRNIAVGLGNQIVQSVEDAENIKSVLQNARDFPDDMVQEHIRWALAEIEQSELQLGKKSVNRKTLSLARSVEKGMPRHG

SEQ ID NO: 77032 - protein, 407 aa, Glaciecola pallidula
  misc_feature (1)..(407): tr|K6ZNQ4|K6ZNQ4_9ALTE Epoxyqueuosine reductase OS=Glac iecola pallidula DSM 14239 = ACAM 615 OX=1121922 GN=que G PE=3 SV=1
MSVINSIDLSQLTDNIKTWGKSLGFQQIGISDVDLSQHEKALKNWLENDYQGSMSFLERNVEKRLSPNELVPGTLRIISVRMDYLPPDASFASNLKSSSTAYISRYALGRDYHKVIRKKLQKLAEQIQEYTQDFSFRPFVDSAPVLEHAIAEKAGLGWTGKHSLTINKEAGSYFFLGELFINLPLPVDQPVEENCGKCTACISICPTQAIVAPYVVDARKCISYLTIENDGEIPIIYRKAIGNRVYGCDDCQLVCPWNKYAKVTEEKDFFARQHMHNRSLLDLFKWTENEFLKNTEGSAIRRIGYRKWKRNIAVGLGNQIAKTPQETEEIKSALENALDFPDAMVQEHIQWALAEVMQSDVQQVDTNVTRNKEEDGSASDTSLGKNTVNRKTQRLARSVEKGMPKHK

SEQ ID NO: 77033 - protein, 397 aa, Glaciecola punicea
  misc_feature (1)..(397): tr|H5TC39|H5TC39_9ALTE Epoxyqueuosine reductase OS=Glac iecola punicea ACAM 611 OX=1121923 GN=queG PE=3 SV=1
MSLINSTNGSAHADVNDSSCLDLLALANNIKAWGKALGFQQVGVCDIDVSQQKPMLEAYLEKGYHASMDYLARNVDKRLAPEKLHPNTCRIISVRMNYLPPEAQFANNLQNDKQAYISRYALGRDYHKVMRSRLKKLGERIKQHCEALDYRPFVDSAPVLEHAIAQKAGLGWTGKHTLTLNEEAGSWFFLGELFVNIPLPLDESAQENCGTCTACISICPTQAIVAPYQLDARRCISYLTIEHKGVIPLVYRKAMGNRIYGCDDCQLVCPWNRYAEVTQEKDFFAKEFLQGASLVSLFELTKLEFLEKTQGSPIRRIGYESWQRNLSIAMGNAGFDEQILSSLQRALSCAVSDVLKEHFAWAIAEQKTRKANPEKAVSTRQHERLIRIVQKGLPRDA

SEQ ID NO: 77034 - protein, 414 aa, Glaciecola sp.
  misc_feature (1)..(414): tr|A0A3B8T1Q7|A0A3B8T1Q7_9ALTE Epoxyqueuosine reductase OS=Glaciecola sp. OX=1905676 GN=queG PE=3 SV=1
MSQINSIDLDNLAQNIKVWAKALGFQHVGICDVDLSQHSDHLKAWLDKQYYGDMLYFPERGMLRSDPAQLVPGTVRIISVSMDYLPPDASFAQHLSDPTKGYVSRYALGRDYHKLVRKRLKQLGDQIHTYCADTQFRPFVDSAPILEHAVAEKAGIGFTGKHSLTINPQTGSWSFLGELFINLPLPIDSPIADNCGTCTACKSICPTGAIVSDYVVDARKCISYLTIEHQGAIPEQYRAPMGNRIYGCDDCQLVCPYNRAAPLTQESDFFAREPLHGNSLLNLFSWDEQMFLRQTEGSAIRRIGYAKWQRNISVALGNAPTDTVISTVLHDKSKHLLAIQVMLNKPETLENPEKASQLANIARTYGFSEIPSLPDITMLIEHLSWALNTHGQSSLSRQQARLVRSIQKGLVRDA

SEQ ID NO: 77035 - protein, 407 aa, Glaciecola sp.
  misc_feature (1)..(407): tr|A0A2N1HXQ2|A0A2N1HXQ2_9ALTE Epoxyqueuosine reductase OS=Glaciecola sp. 33A OX=2057807 GN=queG PE=3 SV=1
MSVINSIDLSQLTDNIKTWGKSLGFQQIGISDVDLSQHEKALKNWLENDYQGSMSFLERNVEKRLSPNELVPGTLRIISVRMDYLPPDASFASNLKSSSTAYISRYALGRDYHKVIRKKLQKLAEQIQEYTQDFSFRPFVDSAPVLEHAIAEKAGLGWTGKHSLTINKEAGSYFFLGELFINLPLPVDQPVEENCGKCTACISICPTQAIVAPYVVDARKCISYLTIENDGEIPIIYRKAIGNRVYGCDDCQLVCPWNKYAKVTEEKDFFARQHMHNRSLLDLFKWTENEFLKNTEGSAIRRIGYRKWKRNIAVGLGNQIAKTPQETQEIKSALENALDFPDEMVQEHIQWALAEVMQSDVQPINTNVARNKEEDGSASDGSLGKNTVNRKTQRLARSVEKGMPKHK

SEQ ID NO: 77036 - protein, 377 aa, Glaciimonas sp.
  misc_feature (1)..(377): tr|A0A2T6FB89|A0A2T6FB89_9BURK Epoxyqueuosine reductase OS=Glaciimonas sp. PCH181 OX=2133943 GN=queG PE=3 SV=1
MSQSSFTESENNPVNPAPLALTALAVTIKAWGRELGFADVRITDVDLSQQEAGFQAWLALGYHGEMDYMAAHGLKRARPAELVPGTIRSISVRMDYLPQDTDAAWRAYEKNRLNPEAAATATVSLYARGRDYHKVLRSRLQQLADRITAEIGPFGYRVFTDSAPVMEVALAQKAGLGWRGKHTLLLNREAGSLFFLGEMLTDLPLPTDTPITPHCGQCSACIDVCPTKAIIAPYTLDARRCISYLTIELKGSIPLEFRPLIGNRVYGCDDCQLFCPWNKFAQPSTLSDFDVRNGLDQATLVELFSWTEEQFNQRLQGSPIRRIGHERWLRNIAVGLGNAATSATEIIAALKARADDPSALIREHVEWALQQHGLPPL

SEQ ID NO: 77037 - protein, 393 aa, Globicatella sanguinis
  misc_feature (1)..(393): tr|A0A2I1PHF6|A0A2I1PHF6_9LACT tRNA epoxyqueuosine(34) reductase QueG OS=Globicatella sanguinis OX=13076 GN=qu eG PE=4 SV=1
MVTASAQLKEEIIAAAKEIGIDKIGFSTAEPFAHLKASLEEQKAKGHTSGFEHPNIDERLYPELIFDGPKSIISIALAYPSRIKNPYPQDRENRRGMFARASWGTDYHHILQDRLDKLIAFIKTKTETANFKPMVDTGELIDVAAAQRAGLGFIGKNGLLITKEFGSYVYLGEIITDIEFEPDTPVENGCGECTRCIDACPTNALLGDGRMNAQLCLSYQTQTKGYMPKEFRRKITHVIYGCDICQIVCPYNQGIDSHIHPEMEPNPDQVQPLLKPMLTMSNKEFNAKFGEMAGSWRGKKPLQRNAIIALANYRDRTALPLLLEIMEQDPRPMIRGTAAWAIAQIQRYYNVSMIQCVADQLEKETDPETIQEMTEALQTLKNKRMPRDEKKVE

SEQ ID NO: 77038 - protein, 393 aa, Globicatella sp.; identical to SEQ ID NO: 77037
  misc_feature (1)..(393): tr|A0A1E8YJU4|A0A1E8YJU4_9LACT Epoxyqueuosine reductase OS=Globicatella sp. HMSC072A10 OX=1739315 GN=HMPREF281 1_01490 PE=4 SV=1

SEQ ID NO: 77039 - protein, 410 aa, Globicatella sulfidifaciens
  misc_feature (1)..(410): tr|A0A1T4NFI1|A0A1T4NFI1_9LACT Epoxyqueuosine reductase OS=Globicatella sulfidifaciens DSM 15739 OX=1121925 GN =SAMN02746011_01741 PE=4 SV=1
MEVGAQVSTFFIERGMVMVTASAQLKEEIIAAAKEIGIDKIGFSTAEPFAHLKASLEEQKAKGHTSGFEHPNIDERLYPELIFDGPKSIISIALAYPSRIKNPYPQDRENRRGMFARASWGTDYHHILQDRLDKLISFIKTKTETANFKPMVDTGELIDVAAAQRAGLGFIGKNGLLITKEFGSYVYLGEIITDIEFEPDTPVENGCGECTRCIDACPTNALLGDGRMNAQLCLSYQTQTKGYMPKEFRRKITHVIYGCDICQIVCPYNQGIDSHIHPEMEPNPDQVQPLLKPMLTMSNKEFNAKFGEMAGSWRGKKPLQRNAIIALANYRDRTALPLLLEIMEQDPRPMIRGTAAWAIAQIQRYYNVSMIQCVANQLEKETDPETIQEMTEALETLKNKRMPRDEKKVE

SEQ ID NO: 77040 - protein, 309 aa, Gloeobacter kilaueensis
  misc_feature (1)..(309): tr|U5QIV1|U5QIV1_9CYAN Epoxyqueuosine reductase OS=Gloe obacter kilaueensis JS1 OX=1183438 GN=queG PE=3 SV=1
MAPTAGQIKAQAQQLGFHKVGIAHADALTADPDWLREWLAQGYAADMQWMHDPRRQDIQQVLPGVQSVICVALNYSVPQEDPCPDQARIARYALGRDYHKVLGRPLKALARWIEASAPGHRAIAYVDTGPIQEKAWAQAAGLGWIGKNACLITLEYGSWVFLGEVLTTVELEPDGAHANYCGSCTRCLAACPTAAIVRPAQVDARACLAYHTIENRAERLPATISSQQHNWVVGCDLCQSCCPYNQRAERWGHYSDVADFAPREPWQRLDLQRAQQMSDDEFDRLSTGSAIRRVRASGLRRNAQSALGE

SEQ ID NO: 77041 - protein, 319 aa, Gloeobacter violaceus
  misc_feature (1)..(319): sp|Q7NKL3|QUEG_GLOVI Epoxyqueuosine reductase OS=Gloeob acter violaceus (strain ATCC 29082 / PCC 7421) OX=25122 1 GN=queG PE=3 SV=1
MAPTAAQIKSRARALGFHKVGIARADALDGEAAERLGGWLAAGYAGEMRWMHDPRRRDIQQVLPGVRSVICVALSYNTAQGEPAPGQARISRYALGRDYHKVLGKPLKELARWIEASDPGCRAVAYVDTGPVQEKAWAEAAGLGWIGKNACLITLEYGSWVFLGEILTTLDLEANDPHPNYCGTCTRCLSACPTAALVEPAVVDARKCLAYHTIENRAPELPEAIAEHQHGWVVGCDLCQTCCPFNLRAERWGRYSEVADFAPRDPWNEITLDQLADLSDAEFERWSEGSAIRRVKASGLRRNARSALGASGDSLAQAH

SEQ ID NO: 77042 - protein, 309 aa, Gloeocapsa sp.
  misc_feature (1)..(309): tr|L8LJQ1|L8LJQ1_9CHRO Epoxyqueuosine reductase OS=Gloe ocapsa sp. PCC 73106 OX=102232 GN=queG PE=3 SV=1
MSFLDSEAIKTKILAMGFDRVGIAPVEAQNEDDANSQLKTWLALGYHGDLSWMENPKRLDIKACLPEVQSVICVALNYYTPVERPVGKEYGKISRYAWGRDYHKIMHKKLKQVCDWLESQCETIKTRYYSDTGPIQDKAWAQRAGLGWIAKNANLITRNYGSWVFLGEILINVPLQPDQPHTEHCGSCTRCLDACPTQAITQPFVVDANLCIAYHTIENRAEELPSQIAQNLQGWVAGCDICQDVCPWNQRFAKPTDKIEFNPYPHNVGPKLTELANLTELEWDWRFRSSALRRIKPAMFRRNARANLS

SEQ ID NO: 77043 - protein, 316 aa, Gloeocapsa sp.
  misc_feature (1)..(316): tr|K9XDD9|K9XDD9_9CHRO Epoxyqueuosine reductase OS=Gloe ocapsa sp. PCC 7428 OX=1173026 GN=queG PE=3 SV=1
MSIDTTQIKQKALELGFHRVGIAAVDKGVTEPQHLQAWLALGYQADMAWMANPKRQDIKLVMPDVRSLICVAINYYTPHQRPQEAKYAKISRYGWGRDYHKVLHKKLKLFSTWLEAQAEGIKARYYADTGPVQDKVWAQQAGIGWIAKNGNVITREYGSWVFLGEVLTNLSLTPDQPHTEHCGTCTRCLDACPTDAIAQPFVVDANRCIAYHTIENRSEELPDAVAAQLHGWVAGCDICQDVCPWNQRFAKETDVAEFQPYPWNISPTLAELAEISDAEWDKRFPASALRRIKPEMLRRNAKANLQGAAIMSTSQE

SEQ ID NO: 77044 - protein, 333 aa, Gloeomargarita lithophora
  misc_feature (1)..(333): tr|A0A1J0AA94|A0A1J0AA94_9CYAN Epoxyqueuosine reductase OS=Gloeomargarita lithophora Alchichica-D10 OX=1188229 GN=queG PE=3 SV=1
MLTAEAVKAEASRLGFHRVGIASVTPAPNSHLSEWLAAGYQGDMAWLSDERRHDLERVLPGVRSVIAVALNYYWPGAQPAVGKIARYAWGRDYHRVVGRRLKAFAHWLQQSAPDTQTRAYVDTGPVAEKLWAEWAGLGWVGKHSNLITRQYGSWVVLGEVLTTLELTPDAPHREHCGTCTRCLEACPTQAIVRPFVVDSRRCIAYHTIENRQAELPPAIAANLQGWLAGCDICQEVCPWNQRFAQPTDIQEFAPRLPPWSLRVWAALDVETWDQSLRGSALRRIKPAMWRRNAQALLANTPPEPASRSIPFGGQSSEETPSPSCAPGVAPCLE

SEQ ID NO: 77045 - protein, 306 aa, Gloeothece citriformis
  misc_feature (1)..(306): tr|B7KL35|B7KL35_GLOC7 Epoxyqueuosine reductase OS=Gloe othece citriformis (strain PCC 7424) OX=65393 GN=queG P E=3 SV=1
MVKEEQIKQEAIALGFHKVGIAQVNAQETAVTRLKAWLSLGYHGDMAWMANPKRFDVRACMPEVKSIICVALNYYTPHQRPQGDEYGKISRYSWGRDYHRVMDKKLKELSRWLEGQEKGIKTRYYADTGPIQDKVWAQQAGIGWIAKNGNVITRDYGSWVFLGEILTNLQLTPDQPHTEHCGTCRRCIDACPTGAITQPFIVDANRCIAYHTIENRSETIPEAIASHLEGWVAGCDICQDVCPWNQRFAKTTDIDEFQPYSGNIAPKLTELAQLSEQEWNERFPASALRRIKPQMWRRNARANLEK

SEQ ID NO: 77046 - protein, 306 aa, Gloeothece verrucosa
  misc_feature (1)..(306): tr|E0UCU4|E0UCU4_GLOV7 Epoxyqueuosine reductase OS=Gloe othece verrucosa (strain PCC 7822) OX=497965 GN=queG PE =3 SV=1
MILRDQIKQQAIRLGFHKVGIAAAKGQEAAVSQLKAWLSLGYQADMEWMANPKRFDVRACMPEVKSIICVALNYYTAHQRPEGKEYGKIARYGWGRDYHRVMHKKLKALSQWLEGHEPGIQTRYYADTGPIQDKVWAQEAGMGWLAKNGNVITREYGSWVFLGEILTNIELKPDQPHTAHCGTCQRCIEACPTGAITQPFVVDANRCIAYHTIENRQEKLPEAITSNLGGWVAGCDICQDVCPWNQRFAVETDVEDFQPLPGNVAPKLTELAQMSEQEWNDRFPASALRRIKPQMWRRNARANLET

SEQ ID NO: 77047 - protein, 357 aa, Gluconacetobacter diazotrophicus
  misc_feature (1)..(357): tr|A9HBJ5|A9HBJ5_GLUDA Epoxyqueuosine reductase OS=Gluc onacetobacter diazotrophicus (strain ATCC 49037 / DSM 5 601 / PAl5) OX=272568 GN=queG PE=3 SV=1
MEGGLPPGRAAILRDAIRDRALALGFDAVGFCEAALGDEARARLADFLAAGHHGSMGWLAERSAQRGDPRALWPEARSVIALGLSYAPGTDALATVGRADRGNISVYARNRDYHDVVKGMLKHVAQFVVAEGARAGAATGVKVFVDTAPVLEKPLAERAGLGWQGKHTNLVSRRHGSWLLLGEIYTTLALPRTDPSGGGCGTCRRCLDACPTNAFPEPYRMDARRCISYLTIENPGPIPLEFRAAMGNRIYGCDDCLAVCPWNRFATASRQMKLQARDDLTAPRLGALARLDDAAFRALFSGSPVKRIGRDRFVRNVLVAIGNSGLAALRPVAQDLCGDPDPVVAEAARWAVERLPS

SEQ ID NO: 77048 - protein, 357 aa, Gluconacetobacter diazotrophicus
  misc_feature (1)..(357): tr|B5ZGL6|B5ZGL6_GLUDA Epoxyqueuosine reductase OS=Gluc onacetobacter diazotrophicus (strain ATCC 49037 / DSM 5 601 / PAl5) OX=272568 GN=queG PE=3 SV=1
MEGGLPPGRAAILRDAIRDRALALGFDAVGFCEAALGDEARARLADFLAAGHHGSMGWLAERSAQRGDPRALWPEARSVIALGLSYAPGTDALATVGRADRGNISVYARNRDYHDVVKGMLKHVAQFVVAEGARAGAATGVKVFVDTAPVLEKPLAERAGLGWQGKHTNLVSRRHGSWLLLGEIYTTLALPRTDPSGGGCGTCRRCLDACPTNAFPEPYRMDARRCISYLTIENPGPIPLEFRAAMGNRIYGCDDCLAVCPWNRFATASRQMKLQARDDLTAPRLAALARLDDAAFRALFSGSPVKRIGRDRFVRNVLVAIGNSGLAALRPVAQDLCGDPDPVVAEAARWAVERLPS

SEQ ID NO: 77049 - protein, 365 aa, Gluconacetobacter entanii
  misc_feature (1)..(365): tr|A0A318Q5Q2|A0A318Q5Q2_9PROT Epoxyqueuosine reductase OS=Gluconacetobacter entanii OX=108528 GN=queG PE=3 SV =1
MARARPVTYSPDAQGRLARRIHERALAVGFDAVGFAPAMLDDATRARLREFVATGHHGAMDWMAQRMAWRGDPRALWPEARSVISLGLSYAPEGDALATLRDPMAGNISVYARHRDYHDVVKGMLKQVAQFVVAEGRRQHGDDAPPPGVKVFVDTAPVMEKPLAERAGLGWQGKHTNLVSRTHGSWLFLGEIYTTLDLPHSAPSGGGCGTCTRCLDVCPTSAFPAPGQMDARRCISYQTIENPDPIPHDLRPLMGNHIYGCDDCLAVCPWNRFAQATRQMKLRARPDLVAPALRDLAVLDDAAFRALFSGSPVKRIGRARFVRNVLVAIGNSARADLRCVAQALCDDPDPVVADAARWAVGCLPS

SEQ ID NO: 77050 - protein, 357 aa, Gluconacetobacter liquefaciens
  misc_feature (1)..(357): tr|A0A370FXF1|A0A370FXF1_GLULI Epoxyqueuosine reductase OS=Gluconacetobacter liquefaciens OX=89584 GN=queG PE= 3 SV=1
MENGPPPGRAVALRDAIRDKALALGFDAVGFCAAALGDDARRHLADFLAAGHHGAMGWLADRVEQRGDPRALWPEARSVIALGLSYAPAGDALATTRLADRGNISVYARHRDYHDVVKGMLKHLAQFVVAQGARAGVTPEVKVFVDTAPVMEKPLAEQAGLGWQGKHTNLVSRRHGSWLFLGEIYTSLELPASDESGGRCGSCHRCLDACPTDAFPAPYQLDARRCISYLTIESSGPIPEPFRAAMGNRIYGCDDCLAVCPWNRFATESRHMKLRAREDLTMPRLADLARLDDAGFRALFSGSPVKRIGRDRFVRNVLVAVGNSGQAALVPVAQDLCEDANAVVAETARWAVGRLPR

SEQ ID NO: 77051 - protein, 357 aa, Gluconacetobacter sp.
  misc_feature (1)..(357): tr|F3S4J2|F3S4J2_9PROT Epoxyqueuosine reductase OS=Gluc onacetobacter sp. SXCC-1 OX=1004836 GN=queG PE=3 SV=1
MARAACAHDPAALAARIADHARRLGFDAVGFTPARLDDGTRARLAAFVENGFAGSMGWMAQRMEQRGDPRGLWPEVRSVIALGVSYTPDGDPLATTRVPDAGNISVYARNRDYHDVVKGMLKHLAQFVVNEGRRQGSDTEVKVFVDTAPVMEKPLARDAGLGWQGKHTSLVSRQHGSWLFLGEVYTTLDLPQSAPSGGGCGTCTRCLVACPTDAFPAPGVMDARRCLSYLTIENRGPIPHALRPAMGNRIYGCDDCLAACPWNRFAQATRHMKLAARDDLRAPALRELAALDDGGFRRRFSGSPIKRIGRERFVRNVAVAIGNSGQPALRSAAMALCSDPDPVVAEAARWAVARLPR

SEQ ID NO: 77052 - protein, 352 aa, Gluconobacter albidus
  misc_feature (1)..(352): tr|A0A1U9L007|A0A1U9L007_9PROT Epoxyqueuosine reductase OS=Gluconobacter albidus OX=318683 GN=queG PE=3 SV=1
MPDFPTPNTGLETRIADHARHLGFDAVGFCKAELGPEVAQGLREFVAQGHHGTMEWMETRIEERAHPQALWPEVRSVISLGLSYAPAQGPTTDPECGNISVYARNRDYHDVIKGMLKHLAQYVVKLGGPETQVKVFVDTAPVSERALAEKAQLGWTGKHTCLVSREHGSWLLLGEIYTTLELAPSEPKGGSCGSCTRCLTACPTDAFTAPYRMDARRCISYLTIEHKGPIPHELRAKIGNHIYGCDDCLSVCPWNRFAESARHIKLQARPELVAPKLDELVRLDDATFRTFFSGSPIKRIGRNRFVRNVLIAIGNSADPSLLPAARDLLADPDPDVAETAHWAITCLEDHPA

SEQ ID NO: 77053 - protein, 352 aa, Gluconobacter albidus
  misc_feature (1)..(352): tr|A0A149TL79|A0A149TL79_9PROT Epoxyqueuosine reductase OS=Gluconobacter albidus OX=318683 GN=queG PE=3 SV=1
MPDFPTPNTGLETRIADHARHLGFDAVGFCKAELGPEVAQGLQEFVAQGHHGTMEWMETRIEERAHPQALWPEVRSVISLGLSYAPAQGPTTDPECGNISVYARNRDYHDVIKGMLKHLAQYVVKLGGPETQVKVFVDTAPVSERALAEKAQLGWTGKHTCLVSREHGSWLLLGEIYTTLELAPSEPKGGSCGSCTRCLTACPTDAFTAPYRMDARRCISYLTIEHKGPIPHELRAKIGNHIYGCDDCLSVCPWNRFAESARHIKLQARPELVAPKLDELVRLDDATFRTFFSGSPIKRIGRNRFVRNVLIAIGNSADPSLLPAARDLLADPDPDVAETAHWAITCLEDHPA

SEQ ID NO: 77054 - protein, 354 aa, Gluconobacter cerinus
  misc_feature (1)..(354): tr|A0A1B6VJU3|A0A1B6VJU3_9PROT Epoxyqueuosine reductase OS=Gluconobacter cerinus OX=38307 GN=queG PE=3 SV=1
MTSRPSPSRPGRSLEERIEDHARHLGFDAVGFCAAELGPDVEAGLRAFVAHGHHGTMEWMETRIEQRSHPQTLWPEARSVISLAVCYAPAEDPDATLRQPDRGNISVYARNRDYHDVIKGMLKHLAQFVVKLGDETTQVKVFVDTAPVSERALAEKAHLGWQGKHTCLVSRTHGSWLLLGEIYTTLDLSPSEPKGGSCGTCTSCLTACPTDAFLGPYRMDARRCISYLTIEHKGPIPHDLREKMGNHIYGCDDCISACPWNRFAEASRHIKLQARPELIDPKLAELAALDDAAFRTLFSGSPVKRIGRNRFVRNVLIAIGNSNDPALVPSAQALQSDPDPDIAETAGWALERLT

SEQ ID NO: 77055 - protein, 354 aa, Gluconobacter frateurii
  misc_feature (1)..(354): tr|A0A0D6PSL8|A0A0D6PSL8_9PROT Epoxyqueuosine reductase OS=Gluconobacter frateurii M-2 OX=1231354 GN=queG PE=3 SV=1
MTSRPSLSRAGRSLEERIEDHARHLGFDAVGFCTAELGPDVEAGLRAFVAQGHHGTMEWMETRIEQRSHPQALWPEARSVISLALCYAPAEDPDATLRQPDRGNISVYARNRDYHDVIKGMLKHLAQFVVKLGDETTQVKVFVDTAPVSERALAEKAHLGWQGKHTCLVSRTHGSWLLLGEIYTTLDLSASEPKSGSCGTCTSCLTACPTDAFLGPYRMDARRCISYLTIEHKGPIPLDLREKMGNHIYGCDDCIAACPWNRFAEASRHIKLQARPDLVEPKLADLAALDDAAFRTFFSGSPVKRIGRNRFVRNVLIAIGNSNDPGLVPSAQALQSDPDPDIAETARWALERLT

SEQ ID NO: 77056 - protein, 354 aa, Gluconobacter frateurii
  misc_feature (1)..(354): tr|A0A0S6TDF7|A0A0S6TDF7_9PROT Epoxyqueuosine reductase OS=Gluconobacter frateurii NBRC 103465 OX=1307834 GN=q ueG PE=3 SV=1
MTSRPSPSRPGRSLEERIKDHARHLGFDAVGFCAAELGPDVEAGLRAFVAQGHHGTMEWMETRIEQRSHPQALWPEARSVISLAVCYAPAEDPDATLRQPDRGNISVYARNRDYHDVIKGMLKHLAQFVVKLGDETTQVKVFVDTAPVSERALAEKAHLGWQGKHTCLVSRTHGSWLLLGEIYTTLDLRPSEPKGGSCGTCTSCLTACPTDAFLGPYRMDARRCISYLTIEHKGPIPHDLREKMGNHIYGCDDCIAACPWNRFAEASRHIKLQARPELIEPKLAELAALDDAAFRTLFSGSPVKRIGRNRFVRNVLIAIGNSNDPELVPSAQALQSDPDPDIAETACWALERLT

SEQ ID NO: 77057 - protein, 354 aa, Gluconobacter japonicus
  misc_feature (1)..(354): tr|A0A149SHD8|A0A149SHD8_GLUJA Epoxyqueuosine reductase OS=Gluconobacter japonicus OX=376620 GN=queG PE=3 SV=1
MTSRPSPSRPGRSLEERIEGHARHLGFDAVGFCAAELGPDVEAGLRAFVAQGHHGTMEWMETRIEQRSHPQALWPEARSVISLAVCYAPAEDPDATLRQPDRGNISVYARNRDYHDVIKGMLKHLAQFVVKLGDETTQVKVFVDTAPVSERALAEKAHLGWQGKHTCLVSRTHGSWLLLGEIYTTLDLRPSEPKGGSCGTCTSCLTACPTNAFIGPYRMDARRCISYLTIEHKGPIPHDLREKMGNHIYGCDDCIAACPWNRFAEASRHIKLQARPELIEPKLAELAALDDAAFRTLFSGSPVKRIGRNRFVRNVLIAIGNSNDPELVPSAQALQSDPDPDIAETACWALERLI

SEQ ID NO: 77058 - protein, 354 aa, Gluconobacter japonicus
  misc_feature (1)..(354): tr|A0A149SHW7|A0A149SHW7_GLUJA Epoxyqueuosine reductase OS=Gluconobacter japonicus OX=376620 GN=queG PE=3 SV=1
MTSRPSPSRPGRSLEERIEDHARHLGFDAVGFCAAELGPDVEAGLRAFIAQGHHGTMEWMETRIEQRSHPQALWPEARSVISLAVCYAPAEDPAATLRQPDRGNISVYARNRDYHDVIKGMLKHLAQFVVKLGDETTQVKVFVDTAPVSERALAEKAHLGWQGKHTCLVSRTHGSWLLLGEIYTTLDLRPSEPKGGSCGTCTSCLTACPTDAFLGPYRMDARRCISYLTIEHKGPIPHDLREKMGNHIYGCDDCIAACPWNRFAEASSHIKLQARPELIEPKLAELAALDDAAFRTFFSGSPVKRIGRNRFVRNVLIAIGNSNDPELVPSAQALQSDPDPDIAETARWALERLT

SEQ ID NO: 77059 - protein, 352 aa, Gluconobacter kanchanaburiensis
  misc_feature (1)..(352): tr|A0A511B9R3|A0A511B9R3_9PROT Epoxyqueuosine reductase OS=Gluconobacter kanchanaburiensis NBRC 103587 OX=1307 948 GN=queG PE=3 SV=1
MRTSQKADTGLETRITDHARHLGFDAVGFCKAELGPEVAQGLREFVAQGHHGTMEWMETRIEERAHPQALWPEVQSVISLGLSYAPAEGPTTDPECGNISVYARNRDYHDVIKGMLKHLAQYVVKLGGPETQVKVFVDTAPVSERALAEKAQLGWTGKHTCLVSREHGSWLLLGEIYTTLELTPSQPTGGSCGSCTRCLTACPTDAFTAPGKMDARRCISYLTIEHKGPIPHDLRPKIGNHIYGCDDCLSVCPWNRFAESARHIKLQARPELVAPKLDELVRLDDVAFRTFFSASPIKRIGRNRFVRNVLIAIGNSADPTLASSARALLNDPDPDISETAHWALNRLEGQSA

SEQ ID NO: 77060 - protein, 358 aa, Gluconobacter morbifer
  misc_feature (1)..(358): tr|G6XMQ6|G6XMQ6_9PROT Epoxyqueuosine reductase OS=Gluc onobacter morbifer G707 OX=1088869 GN=queG PE=3 SV=1
MICMSSSAKSSATTRSFLEDRIAEQARRLGFDAVGFCEARLDPEIEKTLRVFVGDGHHGTMEWMETRIEQRAQPRVLWPEVRSIIVLGVSYAPADNALETLGNPDCGNISVYARNRDYHDVIKGMLKHLAQFVVKLGDNDTQVKVFVDTAPVSERALAEKAQLGWTGKHTCLVSRTQGSWLLLGEIYTTLDLRPSAPQGGSCGTCSRCLTACPTEAFLGPYQMDARRCISYLTIEHKGPIPHELREKVGNRIYGCDDCLAVCPWNRFAAASRHIKMQPRPELVAPKLDELAALDDAAFRRLFSGSPVKRIGRDRFVRNVLIAIGNSGDRALAPSARALLADADEDVAETARWALEKLI

SEQ ID NO: 77061 - protein, 405 aa, Gluconobacter oxydans
  misc_feature (1)..(405): tr|A0A4R3ZVN3|A0A4R3ZVN3_GLUOY Epoxyqueuosine reductase OS=Gluconobacter oxydans OX=442 GN=queG PE=3 SV=1
MARRCRPVPDVASHFQIVTNAVCISRSGQQKSWSVCLPDGITAPRSPARPVPSMPASPKPDTGPEARIAAHARHLGFDAVGFCKAELGPDVARNLREFVAQGHHGTMEWMETRLEERAHPKALWPEVRSVISLGLSYAPAEGPTTDPECGNISVYARNRDYHDVIKGMLKHLAQFVVKLGGPETQVKVFVDTAPVSERALAEKAHLGWTGKHTCLVSREHGSWLLLGEIYTTLELTPSEPTGGSCGSCTRCLTACPTEAFTGPGKMDARRCISYLTIEHKGPIPHDLRPKIGNHIYGCDDCLSVCPWNRFAETARHIKLQARPELIAPKLDELVRLDDATFRTFFSGSPVKRIGRNRFVRNVLIAIGNSADPSLVSSARDLLNDPDPDVSETAQWALSRLEEQPA

SEQ ID NO: 77062 - protein, 354 aa, Gluconobacter oxydans; identical to SEQ ID NO: 77055
  misc_feature (1)..(354): tr|K7T9F4|K7T9F4_GLUOY Epoxyqueuosine reductase OS=Gluc onobacter oxydans H24 OX=1224746 GN=queG PE=3 SV=1

SEQ ID NO: 77063 - protein, 352 aa, Gluconobacter roseus
  misc_feature (1)..(352): tr|A0A4Y3MF55|A0A4Y3MF55_9PROT Epoxyqueuosine reductase OS=Gluconobacter roseus NBRC 3990 OX=1307950 GN=queG P E=3 SV=1
MSASARSDTAIENRIADHARHLGFDAVGFCKAELGPDVAEGLREFVAQGHHGTMEWMETRLDERAHPQALWPEVQSVISLGLSYAPAEGPTTDPECGNISVYARNRDYHDVIKGMLKHLAQFVVKLGGPDTQVKVFVDTAPVSERALAEKAHLGWTGKHTCLVSREHGSWLLLGEIYTTLELTSSDPMGGSCGSCTRCLTACPTEAFTGPGKMDARRCISYLTIEHKGPIPHELRPKIGNHIYGCDDCLAVCPWNRFAESAHHIKLQARPELIAPKLDELVRLDDATFRTFFSGSPVKRIGRNHFVRNVLIAIGNSADLSLVPAARNLLTDPDPDVSETAQWAINRLEGLSA

SEQ ID NO: 77064 - protein, 354 aa, Gluconobacter sp.
  misc_feature (1)..(354): tr|A0A252BNF5|A0A252BNF5_9PROT Epoxyqueuosine reductase OS=Gluconobacter sp. DsW_058 OX=1511210 GN=queG PE=3 S V=1
MTSRPSPSRPGRSLEERIEDHARHLGFDAVGFCAAELGPDVEAGLRAFVAQGHHGTMEWMETRIEQRSHPQALWPEARSVISLALCYAPAEAPDATLRQPDRGNISVYARNRDYHDVIKGMLKHLAQFVVKLGDETTQVKVFVDTAPVSERALAEKAHLGWQGKHTCLVSRTHGSWLLLGEIYTTLDLSPSEPKGGSCGTCTSCLTACPTDAFLGPYRMDARRCISYLTIEHKGPIPHDLREKMGNHIYGCDDCISACPWNRFAEASRHIKLQARPDLIEPKLAELAALDDAAFRTLFSGSPVKRIGRNRFVRNVLIAIGNSDDPALVPSAQALQSDPDPDIAETARWALERLT

SEQ ID NO: 77065 - protein, 352 aa, Gluconobacter sphaericus
  misc_feature (1)..(352): tr|A0A4Y3QCV2|A0A4Y3QCV2_9PROT Epoxyqueuosine reductase OS=Gluconobacter sphaericus NBRC 12467 OX=1307951 GN=q ueG PE=3 SV=1
MPTSPKPDTGLEARIAAHALHLGFDAVGFCKAELGPEVARNLREFVAQGYHGTMDWMETRIEERSHPQALWPEVRSVISLGLSYAPAEGPTTNPECGNISVYARNRDYHDVIKGMLKHLAQFVVKLGGPETQVKVFVDTAPVSERALAEKAHLGWTGKHTCLVSREHGSWLLLGEIYTTLELTPSAPMGGGCGSCTRCLTACPTEAFTGPGKMDARRCISYLTIEHKGPIPHELRPKIGNHIYGCDDCLAVCPWNRFAESARHIKLQARPELIAPKLDGLVRLDDATFRTFFAGSPVKRIGRNRFVRNVLIAIGNSADPSLISSARELLSDPDPDVSETAQWALNRLEAQPK

SEQ ID NO: 77066 - protein, 354 aa, Gluconobacter thailandicus
  misc_feature (1)..(354): tr|A0A5C0A168|A0A5C0A168_GLUTH Epoxyqueuosine reductase OS=Gluconobacter thailandicus OX=257438 GN=queG PE=3 S V=1
MTSRPSPSRPGRSLEERIEDHARHLGFDAVGFCAAELGPDVEAGLRAFVAQGHHGTMEWMETRIEQRSHPQALWPEARSVISLALCYAPAEDPDATLRQPDRGNISVYARNRDYHDVIKGMLKHLAQFVVKLGDETTQVKVFVDTAPVSERALAEKAHLGWQGKHTCLVSRTHGSWLLLGEIYTTLDLSASEPKGGSCGTCTSCLTACPTDAFLGPYRMDARRCISYLTIEHKGPIPLDLREKMGNHIYGCDDCIAACPWNRFAETSRHIKLQARPDLIEPKLADLAALDDTAFRTLFSGSPVKRIGRNRFVRNVLIAIGNSNDPGLVPSAQALQSDPDPDIAETARWALERLT

SEQ ID NO: 77067 - protein, 354 aa, Gluconobacter thailandicus; identical to SEQ ID NO: 77055
  misc_feature (1)..(354): tr|M9M7B8|M9M7B8_GLUTH Epoxyqueuosine reductase OS=Gluc onobacter thailandicus NBRC 3255 OX=1291534 GN=queG PE= 3 SV=1

SEQ ID NO: 77068 - protein, 330 aa, Gluconobacter wancherniae
  misc_feature (1)..(330): tr|A0A511B2U0|A0A511B2U0_9PROT Epoxyqueuosine reductase OS=Gluconobacter wancherniae NBRC 103581 OX=656744 GN= queG PE=4 SV=1
MGFDAIGFCKAELDPGVEKGLRAFVLQGHHGTMEWMETRIEERAQPKVLWPEVQSVISLALSYAPAEDPHATLRQPDRGNISVYARNRDYHDVLKGMLKQLAQFVVKSGGEQTQVKVFVDTAPVSERALAEKAQLGWHGKHTCLVSRSSGSWLLLGEIYTTLDLTPSEPKAGSCGTCNRCMVACPTDAFPAPYRLDARRCISYLTIEHKGPIPLDLRQKIGNRIYGCDDCIAACPWNRFASASHHIKMQARPELIEPRLADLAALDDAAFRKLFSGSPVKRIGRNRFVRNVLIAIGNSQDQSLIPSAIALMGDPDPDIVETAHWALEQLQ

SEQ ID NO: 77069 - protein, 373 aa, Glycocaulis alkaliphilus
  misc_feature (1)..(373): tr|A0A3T0E5L8|A0A3T0E5L8_9RHOB Epoxyqueuosine reductase OS=Glycocaulis alkaliphilus OX=1434191 GN=queG PE=3 SV =1
MTSGELSNRVRALARDAGFDAVRITRADAPWEAGERLRAFVEAGHHGSMGWMEETLDRRVHPTAMWAEARSAVVVGLNYGPEHNPLVDLAHTDRAVISVYARNRDYHDLLKKRLKQMARAFHGETGEGVKVFVDTAPLMEKPLAARSGLGWQGKHTNLVSRDWGSWLFLGVMLTEAELVPDTAETDHCGSCRACLDICPTDAFPAPYKLDARRCISYLTIEHKGPIPVEFRAAMGNRIYGCDDCLAVCPWNKFAARTEETAFHARAELEAPLLGALSRLDDAGFRALFTASPVKRIGRDRFVRNVLIALGNDTGPDALEAVLARLDDDSALVRGAAVWALSRLDQARFQAEREVRLAAETDSDVCAEWNADPC

SEQ ID NO: 77070 - protein, 370 aa, Glycocaulis sp.
  misc_feature (1)..(370): tr|A0A550KKH9|A0A550KKH9_9RHOB Epoxyqueuosine reductase OS=Glycocaulis sp. ZYF765 OX=2518983 GN=queG PE=3 SV=1
MSQPLDARAVKALAREIGFDAARIARADAPWAAGRRLSDFVEAGRHGEMGWMEDTLARRSHPTAMWPDAKSAVVVGLNYGPDRDPLEILDRRDEAAISVYAQNRDYHDLIKKRLKRLARAFHQKTGEAVKVFVDTAPLMEKPLAQTSGLGWQGKHTNLVSREWGSWLFLGVMLTAAELEPDPPETDHCGSCRKCLDVCPTDAFPAPYQLDARRCISYLTIELKGPIPAQFRAPMGNRIYGCDDCLAVCPWNKFAAATQETAFHPREALTGPKLAELAELDDTAFRALFTASPVKRIGRDRFLRNVMIALGNSADPALVSAVLPRLDDDSALVRGAAVWALSKLDPARFEAERARRAERERDAEVRAEWEG

SEQ ID NO: 77071 - protein, 364 aa, Gottschalkia acidurici
  misc_feature (1)..(364): tr|K0AY03|K0AY03_GOTA9 4Fe-4S ferredoxin, iron-sulpur b inding domain protein OS=Gottschalkia acidurici (strain ATCC 7906 / DSM 604 / BCRC 14475 / CIP 104303 / NCIMB 10678 / 9a) OX=1128398 GN=Curi_c10750 PE=4 SV=1
MNIKKYIIDKCKEVGIDIIGFTNSNEFTELSEFLKNRKEKNYETEFEEKDIEKRISPRKIMGEGETIIVIGVSYDKSGVMYEGISKSSVGTDYHIVLNEKMNKLIDEIKKVQKDFKYFSGVDTTPLIDRYLAKKSGIGWFGRNCSIINDEYGSFIFIGYIITNLKLEEDREVESKCKDCDLCIRSCPVGAIKPNYELNAKRCISYLTQTKETIPYELRDKMENKIYGCDTCQLVCPKNKDIIEKRTSQWEGAYKNIDLEELFKMTNKEFTEKYGHMAFSWRGKNIIKRNIIIKMGNLKNKDYMKLLKVALKDNSPMIRKYSAWSILKIDFNSGLNILEEHIKNEKDGDVISEINNLIDYFKNLG

SEQ ID NO: 77072 - protein, 375 aa, Gottschalkia purinilytica
  misc_feature (1)..(375): tr|A0A0L0WFD7|A0A0L0WFD7_GOTPU Epoxyqueuosine reductase QueG OS=Gottschalkia purinilytica OX=1503 GN=queG PE=4 SV=1
MNLKEYIKNKSKDLNIDIVGFTNGEKFSHLDKFLLNRREKKYETEFEEKDIDLRLNPLNTLNEVKTIIVIGISYNVDYETKKRPYLSGRLSKSSLGEDYHNVLKHKMNMLVNEIKKVTDFKYFIGVDTGPLIDRELASKSGIGWYGKNCCIVNDIYGSFIFIGYILTDLDIECDERIKAKCDDCTLCLKACPTNAIGDNYEINARRCISYLTQTKDKIPYELRDKMGTKIYGCDTCQLVCPKNKGITKGKNKDFIPMSTNGYIEIKELFQLSNKEFKEKYGHMAGSWRGKNVLKRNAIIALGNIGDKDSIGLIEQGLKDDSSMIREYAAWALLKIDLDEGTKILKKHILKEKNETVIDEINNLIKYFSTLSSHKR

SEQ ID NO: 77073 - protein, 372 aa, Gottschalkiaceae bacterium
  misc_feature (1)..(372): tr|A0A521J3X8|A0A521J3X8_9FIRM tRNA epoxyqueuosine(34) reductase QueG OS=Gottschalkiaceae bacterium OX=2527676 GN=queG PE=4 SV=1
MDLKEYIAHKSKIVGIDIIGFTKPEKMDNLIGFLEKRKEKEYNTEFEESNILSRTNPLALMPESRTIIAIGVSYNIEYKSVPHESGKGTGLLSKSSWGEDYHKVLKNKMEDLVKEIKKEIDFKYIICVDTSPLIDREISKSAGIGWYGKNCSIINDDYGSFIFLGYILTDLDLEENERIEEKCGNCRLCIDACPTQAIEEGYIINAKRCISYMTQTKKKIPYDLREKIGMKIYGCDTCQLVCPKNDKVIKGSSKEFVPQLTKGIIPVEEIITISNKDFKEKYGSMSGAWRGKNILKRNAIIALGNIRDKSSIKLLKTALHDESPMIREYAAWSLIRIDKEEGVKLIRERLFKENDIEAFEEMRRLIHLFGHD

SEQ ID NO: 77074 - protein, 380 aa, Gracilibacillus boraciitolerans
  misc_feature (1)..(380): tr|W4VGG9|W4VGG9_9BACI Iron-sulfur cluster-binding prot ein OS=Gracilibacillus boraciitolerans JCM 21714 OX=129 8598 GN=JCM21714_871 PE=4 SV=1
MAYQQLKEELIAFSKEIGIEKIGFASAEPFSDLKSRLEEQQTLGYASGFEKGTNEERTEPKRLMPQAESIIAIALAYPTRIKNDPKSVKGDRRGMFCRASWGTDYHLVLQEKLDQLASFLQEKVEDFQYSSMVDTGGELSDRAVAERAGIGFSGKNTLIISPEYGSYIYLGEMITNLPFPPDQPLTDGCGTCTKCIDACPTGALVEPGRLNAQQCLAYLTTTKGFMPEEHRDKLGNFIYGYETCQVVCPYNKGIDFHHHPEFEPDPDLVKPRLVDLLAISNREFKEKFGKMAGSWRGKKPLQRNAILALGHYKEVAALDTLIDVMNQDPRPVIRGTAAWAIAKIGEERGFEAIRGAKGHENNAEVIEEMNKGLEMEILSH

SEQ ID NO: 77075 - protein, 384 aa, Gracilibacillus dipsosauri
  misc_feature (1)..(384): tr|A0A317L2L6|A0A317L2L6_9BACI Epoxyqueuosine reductase OS=Gracilibacillus dipsosauri OX=178340 GN=queG PE=3 S V=1
MAYNQLKQQLIEYSKEIGIDKIGFTSASPFSELKSRLKEQQDLGYASGFEKGTIEERTEPQKLMQGAESIIAIALAYPTKIPNAPRSKKGERRGMFCRASWGTDYHIVLQEKLQKLADFLEERIANFQYSSMVDTGELSDRAVAERAGIGFSGKNTLLISPELGSYIYLGEMITNIPFTPDQPLSEGCGTCTKCLDACPTGALVEPGRLNAQQCLAFLTQTKGYMPEEHRDKLGNFIYGFETCQVVCPYNYRVDFHHHPEFEPDPDLVKPKLVDLLFISNRDFKKKFGKMAGSWRGKKPLQRNAILALAHYQEKDAIEKLIQLMNEDPRPVIRGTAAWAIGKIGTIEGYQAIEKAMEEENDQEVLIEMKKGLNFRDEKKRGISK

SEQ ID NO: 77076 - protein, 380 aa, Gracilibacillus halophilus
  misc_feature (1)..(380): tr|N4WBK6|N4WBK6_9BACI Iron-sulfur cluster-binding prot ein OS=Gracilibacillus halophilus YIM-C55.5 OX=1308866 GN=J416_09614 PE=4 SV=1
MAYEQLKQEVIAYSKEIGIDKIGFASAEPFAELKARLKEQQELGYASGFEKGTIEERTEPKRLMPGAESLIAIALSYPTRMKNEPKSVKGDRRGMFARASWGTDYHIVLKEKLDKLAAFLQEKLAGFESRSMVDTGELSDRAVAERAGIGFSGKNTLMISPEYGSYIYLGEMITNVPFTPDDTITDGCGTCTKCIDACPTGALVEPGRLNSQACMAFQSLTKGFMPDEHRNKLGNLIYGYETCQVVCPYNRDVDFHHHEEFEPDPELVKPRLLDLLSISNREFKEKFGKMAGSWRGKKPLQRNAILSLAHYKEKAATDKLIELMQQDPRPVIRGTAAWAIGKIGEEKGFDAIEEAMKRESDHEVLVEMEKGLDFRIEHTN

SEQ ID NO: 77077 - protein, 379 aa, Gracilibacillus kekensis
  misc_feature (1)..(379): tr|A0A1M7PXD3|A0A1M7PXD3_9BACI Epoxyqueuosine reductase OS=Gracilibacillus kekensis OX=1027249 GN=queG PE=3 SV =1
MAYAQLKEELIQFSKEIGIDKIGFASVDTFSTLKSRLEEQQALGYASGFEKGSNEERTEPKRLLPQAESIIAIALAYPTRIKNDPKSVKGDRRGMFCRASWGTDYHLVLQEKLDQLADFLQEKIGDFQYSSMVDTGELSDRAVAERAGIGFSGKNTLIISPEYGSYMYLGEMITNIPFEADQPLQEGCGTCTKCLDACPTGALVEAGRLNAQQCLAYLTQTKGFLPDEHRDKLGNFIYGYETCQVVCPYNKGVDFHHHEQFEPDPDLVKPRLVDLLSISNKEFKSKFGKMAGSWRGKKPLQRNAIIALGHYKEVAALDVLIELMQQDPRPVIRGTAAWSIGKIGEKRGFQAIRDAKIQETNEEVINEMNKGLEMEKEFL

SEQ ID NO: 77078 - protein, 379 aa, Gracilibacillus orientalis
  misc_feature (1)..(379): tr|A0A1I4IKV9|A0A1I4IKV9_9BACI Epoxyqueuosine reductase OS=Gracilibacillus orientalis OX=334253 GN=queG PE=3 S V=1
MAYQKLKEELIAYSKEIGIDKIGFASAKPFSEFKSRLEEQQALGYASGFEKGTNEERTEPERLMPGSESIIAIALAYPTKIKDEPKSVKGDRRGLFARASWGTDYHIVLKEKLDKLASFLQEKEPEVQFSSMVDTGELSDRAVAERAGIGFSGSNTLIISPELGSYMYLGEMITNIPFSADQPLDEGCGTCTKCIDACPTGALVEPGRLNAQKCLAFLTQTKDFMPDDHREKLGNYIYGYETCQVVCPYNKGVDFHNHEEFEPDPELVKPRLVDLLSVSNREFKENFGKMAGSWRGKKPLQRNAILALAHYKEVAAIDKLIELMKDDPRPVIRGTAAWAIGKIGEVRGFRAIEQAMEQEKDSEVIAEMEKGLQFESISK

SEQ ID NO: 77079 - protein, 376 aa, Gracilibacillus ureilyticus
  misc_feature (1)..(376): tr|A0A1H9PJ00|A0A1H9PJ00_9BACI Epoxyqueuosine reductase OS=Gracilibacillus ureilyticus OX=531814 GN=queG PE=3 SV=1
MAYEKLKEEIITYSKEIGIDKIGFASAAPFSQFKARLEEQQELGYASGFEKGTIEERTEPSLLLSGAESIIAIALAYPTRMKNSPKSVKGDRRGMFCRASWGTDYHIVLNEKLEKLSEFIKDRVEGFTCRSMVDTGELSDRAVAERAGIGFSGKNTLMIAPELGSYIYLGEMITNIPFPPDQPLDDGCGDCTKCLDACPTGALVEPGRLNAQQCLAFLTQTKGFMPDEHRDKLGNLIYGFETCQVVCPYNRGIDLHFHEEFEPDPELVKPRLVDLLNISNREFKEKFGKMAGSWRGKKPIQRNAILALAHYKETSAMEDLIRLMEEDPRPVIRGTAAWAIGKIGEEDGFKKIEAAMALEESDEVIEEMKKGLAFRK

SEQ ID NO: 77080 - protein, 317 aa, Gracilimonas mengyeensis
  misc_feature (1)..(317): tr|A0A521D8C2|A0A521D8C2_9BACT Epoxyqueuosine reductase OS=Gracilimonas mengyeensis OX=1302730 GN=queG PE=3 SV =1
MLKQQKITEQIRAHALQLGFDACGFAQAQHLPQEARRLEEWLTQNRNGEMGWMENHFEKRVDPTLLVPGSKTVVSVLASYHHPKHNEQIGVTDRPLISKYAQGRDYHKVLKKKLKHLFQFTEELLGGLEGRIFTDSAPVLDKVWAQRAGLGWIGKNSNLLNKNIGSFFFIGEMIIDAELSYDTPVTDHCGSCTRCLDACPTDAIYEPYRVDATKCISYLTIELKEQMEEELQSKVQNWLYGCDICQDVCPWNSKSILASFTDLHPREYVTDHDLEYWKNLTPDQYNDIFEGSAIRRAKFDKFSSNVDVVARNLERKF

SEQ ID NO: 77081 - protein, 315 aa, Gracilimonas sp.
  misc_feature (1)..(315): tr|A0A316TT39|A0A316TT39_9BACT Epoxyqueuosine reductase OS=Gracilimonas sp. 8A47 OX=2079485 GN=queG PE=3 SV=1
MDPLAATIKVRHKALELGFDQCGFARAEPLDEEARRLEQWLHEHRHGSMEWMERHFDKRIDPTLLVPGSKSVVSVIAGYRFRENEQFDRQHPDAPKIAKYARGRDYHKVFKSKLKKLFRYTEELIGDIQGRIFVDSAPVMDKAWARRAGLGWIGKNSNLLNKSHGSWFLIGEMILDAAFVYDAPETDHCGSCTQCIDACPTDAIYEPFKVDSNRCISYLTIELKENIPDRYHEDLGDWMFGCDICQDVCPWNRKSEYGHIHDLKPRGRVLHPPDRNWSSITEDEFDKLFEGSPVRRAGYERFVKQAEIVKKNLDK

SEQ ID NO: 77082 - protein, 300 aa, Gramella flava
  misc_feature (1)..(300): tr|A0A1L7I4Z3|A0A1L7I4Z3_9FLAO Epoxyqueuosine reductase OS=Gramella flava JLT2011 OX=1229726 GN=queG PE=3 SV=1
MIKSEAKRLGFLSCGISKAEFLEEEAPRLESWLEQNMHGEMRYMENYFDKRLDPTKLVPGSKSVISLLLNYYPSELQNQDSYKISKYAYGRDYHFVIKDKLKQLLSGLQEQIGDFHGRAFVDSAPVLDKAWAAKSGLGWIGKHSNLLSKKTGSFYFIAELIVDLDLEYDTAVTDHCGSCTACIDACPTNAIVEPYKVDGSKCISYFTIELKDEIPYSMAGQFDDWMFGCDVCQDVCPWNRFSKAHREPLFDPHPAILEYDKKDWEEITRETFNEIFRKSAVKRTKFEGLRRNMEFLKKRT

SEQ ID NO: 77083 - protein, 307 aa, Gramella forsetii
  misc_feature (1)..(307): tr|A0LXR9|A0LXR9_GRAFK Epoxyqueuosine reductase OS=Gram ella forsetii (strain KT0803) OX=411154 GN=queG PE=3 SV =1
MSVKSKHTEFIKAEAKRLGFLSCGISKAEFLEEEAPRLENWLNNNMHGEMRYMENYFDKRLDPTKLVPGSKSVISLLLNYYPSDFQNKDSYKISKYAYGRDYHFVIKDKLKQLLSTLQDEIGDFHGRAFVDSAPVLDKAWAAKSGLGWIGKHSNLLSKQTGSFYFIAELIVDLDLEYDTPVTDHCGSCTACIDACPTDAIVEPYKVDGSRCISYFTIELKDELPDSMKNQFDDWMFGCDVCQDVCPWNRFSKPHNEPLFNPHPELLENDKKDWEEITRETFNEIFRKSAVKRTKFEGLKRNISFLKD

SEQ ID NO: 77084 - protein, 308 aa, Gramella gaetbulicola
  misc_feature (1)..(308): tr|A0A2T6AKV7|A0A2T6AKV7_9FLAO Epoxyqueuosine reductase OS=Gramella gaetbulicola OX=703340 GN=queG PE=3 SV=1
MNGNKRSNTELIKAEAKRLGFLSCGISKAEFLEEEAPRLESWLNNNMHGEMRYMENYFDKRLDPTKLVPGSKSVISLLFNYYPHEFQNQDSYKISKYAYGRDYHFVIKDKLKELLSTLQDEIGDFHGRAFVDSAPVLDKAWAAKSGLGWIGKHSNLLSKQTGSFYFIAELIVDLDLEYDTPVTDHCGSCTACIDACPTNAIVEPYKVDGSKCISYFTIELKDELPNSYKDKFDDWMFGCDVCQDVCPWNRFSKPHNEPLFNPHPDLLSNEKKDWEEITRETFNEIFRKSAVKRTKFEGLKRNISFLKE

SEQ ID NO: 77085 - protein, 308 aa, Gramella salexigens
  misc_feature (1)..(308): tr|A0A1L3J5K1|A0A1L3J5K1_9FLAO Epoxyqueuosine reductase OS=Gramella salexigens OX=1913577 GN=queG PE=3 SV=1
MNTRAKYTEFIKAEAKRLGFLSCGISKAGFLEEEAPRLESWLNDNMHGEMRYMENYFDKRLDPTKLVPGSKSVISLLLNYYPHELQNEDSYKISKYAYGKDYHFVIKDKLKHLLTSLQDEIGDFHGRAFVDSAPVLDKAWAAKSGLGWIGKHSNLLSKKTGSFYFIAELIVDLDLEYDTPVTDHCGSCTACIDACPTNAIVEPYKVDGSKCISYFTIELKDDLPPSFKDKFDEWMFGCDVCQDVCPWNRFSKPHNEPLFDPHPQLLENDKKDWEEITRETFNEIFRKSAVKRTKYEGLKRNISFLKKD

SEQ ID NO: 77086 - protein, 307 aa, Gramella sp.
  misc_feature (1)..(307): tr|A0A2D8KQR2|A0A2D8KQR2_9FLAO Epoxyqueuosine reductase OS=Gramella sp. OX=1931228 GN=queG PE=3 SV=1
MSSKYSELIKSEAKRLGFLSCGISKAEFLEEEAPRLESWLEQNMHGEMRYMENYFDKRLDPTKLVPGSKSVISLLLNYYPSELQNQDSYKISKYAYGRDYHFVIKDKLKQLLSSLQEQIGDFHGRAFVDSAPVLDKAWAAKSGLGWIGKHSNLLSKKTGSFYFIAELIVDLDLEYDTPVTDHCGSCTACIDACPTNAIVEPYKVDGSKCISYFTIELKDEIPYSMAGQFDDWMFGCDVCQDVCPWNRFSKAHREPLFDPHPAILEYDKKDWEEITRETFNEIFRKSAVKRTKFEGLRRNMEFLKKRT

SEQ ID NO: 77087 - protein, 307 aa, Gramella sp.
  misc_feature (1)..(307): tr|A0A2R3Z4W0|A0A2R3Z4W0_9FLAO Epoxyqueuosine reductase OS=Gramella sp. SH35 OX=2126553 GN=queG PE=3 SV=1
MNTKQKHTRLIKAEAKRLGFMSCGISKAEFLEEEAPRLEKWLSEERHGEMRYMENHFDKRLDPTKLVPDSKSVISLLLNYYPEKFQREDSYKISKYAYGRDYHFIIKDKLKSLLSFLQDEIGEIHGRAFVDSAPVLDKAWAAKSGLGWIGKNSNLLTKQVGSFYFIAELIVDLELEYDTPVTDHCGSCTACIDACPTNAIYEPYRVDGSKCISYFTIELKDELPGSYRDKFEDWMFGCDICQDVCPWNRFSKSHNEPLFDPHPKLLENDKKDWEEITRETFNEIFRKSAVKRTKYEGLKRNIRFLKD

SEQ ID NO: 77088 - protein, 366 aa, Granulibacter bethesdensis
  misc_feature (1)..(366): tr|W6I1Q0|W6I1Q0_9PROT Epoxyqueuosine reductase OS=Gran ulibacter bethesdensis OX=364410 GN=queG PE=3 SV=1
MFVTKQPDPLQSALTLKTQKKAKQDIAAYAQELGFASVGFSPATLTQTAQDGLAAFLEAGGHGTMGWMAERSDQRADPKILWPETGTVIALGMSYAPVENPLANLDQPQIGNISVYARNRDYHDIIKGKLKQIAQRIVSRHGGMVKVFVDTAPVMEKPLARQAGLGWQGKHSNLVSRQHGSWLLLGEIFTTLVLPEDDPHPDRCGTCRRCLDACPTGAFPAPYRLDATRCVSYYTIEFHGPVPEPFRRAMGNRIYGCDDCLAVCPWNRFAVQASEAKLKARPELVAPRLDQLVQLDDTSFRLLFSGSPIKRIGRDRFIRNVLYAIGNSGDSSLLPKAQALTDDASDIVADAARWAVARLAEAQSPS

SEQ ID NO: 77089 - protein, 366 aa, Granulibacter bethesdensis
  misc_feature (1)..(366): tr|Q0BVF9|Q0BVF9_GRABC Epoxyqueuosine reductase OS=Gran ulibacter bethesdensis (strain ATCC BAA-1260 / CGDNIH1) OX=391165 GN=queG PE=3 SV=2
MFVTKQPDPLQSALTLKMQKKAKQDIAAYAQELGFASVGFSPATLTQTAQDGLAAFLEAGGHGTMGWMAERSDQRADPKILWPETGTVIALGMSYAPVENPLGNLDQPQIGNISVYARNRDYHDIIKGKLKQIAQRIVSRHGGMVKVFVDTAPVMEKPLARQAGLGWQGKHSNLVSRQHGSWLLLGEIFTTLVLPHDDPHPDRCGTCRRCLDACPTGAFPAPYRLDATRCVSYYTIEFHGPVPEPFRHAMGNRIYGCDDCLAVCPWNRFAVQASEAKLKARPELVAPRLDQLVQLDDTSFRLLFSGSPIKRIGRDRFIRNVLYAIGNSGDSSLLPKAQALTDDASDIVADAARWAVARLAEAQSPS

SEQ ID NO: 77090 - protein, 402 aa, Granulicatella adiacens
  misc_feature (1)..(402): tr|C8NJ02|C8NJ02_9LACT Putative iron-sulfur cluster-bin ding protein OS=Granulicatella adiacens ATCC 49175 OX=6 38301 GN=HMPREF0444_1897 PE=4 SV=1
MDTAVLKQKIIAKSKELGIDKIGFASAEPFTHLEESMRRSKELGHTTGFEHPVLEERIYPEKIFDTPKTIISIALAYPTLPKNKPERVKGERRGAFARASWGEDYHFILSRRMEALINYIKEEVQDDDSRFKPMVDTGELIDVRVAERAGIGFVGKNGLLITKEFGSYVYLGELITNIEFPTDEMVDYGCGDCTRCVDFCPTGALLGDGRMNAMRCLSYQTQTKGFMPQEFRKKIGHVIYGCDICQQVCPYNKGKDFHLHPEMEPSVEETHPLLKPLVTISNKEFKERFGQMAGSWRGKKPLQRNAIIALANYRDKSAVPLLLRVMKEDMRPVMKGTAAWAVAEIVNESNQEMIDYFNEQKEAAVKKRDSLENPTKEDIELIEELEKAIVVLQEKYREEANK

SEQ ID NO: 77091 - protein, 403 aa, Granulicatella elegans
  misc_feature (1)..(403): tr|D0BLT8|D0BLT8_9LACT Putative iron-sulfur cluster-bin ding protein OS=Granulicatella elegans ATCC 700633 OX=6 26369 GN=HMPREF0446_00941 PE=4 SV=1
MDTALLKEKIQKKSKELGIDKIGFASAAPFDHLAQGMQESKELGHTTGFEHPILEERIYPEKIFDSPKTIISIALAYPTLPSQKPERVKGERRGAFARASWGEDYHFILSRRMEALIEYIKSEVNQEDVAFKPMVDTGELIDVRVAERAGIGFVGKNGLLVTKEFGSYVYLGELITNIEFPVDAPVDYGCGDCTRCVDFCPTNALLGNGKMNAQRCLSYQTQTKGFMPKEYRKKMGHVIYGCDICQQVCPYNKGKDFHLHPEMEPSVEETHPLLKPLVTISNKEFKERFGKMAGSWRGKKPLQRNAIIALANYRDKTAVPLLLKVMKEDMRPVIKGTAAWAVSEIISESSEELIHYFTEMLEKAQKIEATTKEEADLVVELEEAIQTLHEKLPKNPEEGSYDD

SEQ ID NO: 77092 - protein, 403 aa, Granulicatella sp.
  misc_feature (1)..(403): tr|A0A420YTL0|A0A420YTL0_9LACT tRNA epoxyqueuosine(34) reductase QueG OS=Granulicatella sp. OX=2049028 GN=queG PE=4 SV=1
MDTALLKEKIQKKSKELGIDKIGFASAAPFDHLAQGMQESKELGHTTGFEHPILEERIYPEKIFDSPKTIISIALAYPTLPSQKPERVKGERRGAFARASWGEDYHFILSRRMEALIEYIKSEVNQEDVAFKPMVDTGELIDVRVAERAGIGFVGKNGLLVTKEFGSYVYLGELITNIEFPVDAPVDYGCGDCTRCVDFCPTNALLGNGKMNAQRCLSYQTQTKGFMPKEYRKKMGHVIYGCDICQQVCPYNKGKDFHLHPEMEPSVEETHPLLKPLVTISNKEFKERFGKMAGSWRGKKPLQRNAIIALANYRDKTAVPLLLKVMKEDMRPVIKGTAAWAVSEIISESSEELIHYFTEMLEKARKIEATTKEEADLVIELEEAIQTLHEKLPKNPEEGSYDD

SEQ ID NO: 77093 - protein, 384 aa, Granulicatella sp.
  misc_feature (1)..(384): tr|A0A4Y9J5S6|A0A4Y9J5S6_9LACT tRNA epoxyqueuosine(34) reductase QueG OS=Granulicatella sp. WM01 OX=2558277 GN =queG PE=4 SV=1
MTLNLKQKIIQEAKALGIDKIGFTSAQPFDYLKKSLQEQKDLGRTTGFEHENIDERVYPHLIFEQPKSIIAIALAYPSRLNQALNQDKEDRRGSFARASWGQDYHDILKDRMNKLIAYIKTQASTATFKPMVDTGELIDVAVAQRAGLGFIGKNGLLITEEFGSYVYLGEIITNIEFEPDTPIPDGCGDCIRCLRACPPKALLGDGRLDGKRCLSYQTQTKGYMPEEYRKKMTHVIYGCDICQMVCPYNQGKDFHLHQEMEPVPSHVQPSLKKMLTLSNKEFKQEFGYMSGSWRGKKPLQRNAIIALANYRDQSALPKLIEIMECDVRPVIRGTAAWAISQIQRDYNELIIECMQAQLEKEDDRETIEEMQKAIDVLKQKKKRG

SEQ ID NO: 77094 - protein, 371 aa, Granulicella mallensis
  misc_feature (1)..(371): tr|G8NTW5|G8NTW5_GRAMM 4Fe-4S ferredoxin-type domain-co ntaining protein OS=Granulicella mallensis (strain ATCC BAA-1857 / DSM 23137 / MP5ACTX8) OX=682795 GN=AciX8_32 20 PE=4 SV=1
MLMRADRDWIQARAQAAGFDLAGIAAVPAESSPEADTNDRRFAEWIAAGRAGEMEYLKRANEAGELLRGDLHRAMPWAQSVIVCAVNYNAEEPRSIDPAPATAGWIARYAWSGRESADASHEAKGSDYHEVLLPKLRAVEAELKQRFGESCETRCYVDTGPILERGYAERAGVGWIGKNTCVINQQQGSWLLLGVIVTSLQLATDAWAVPAADRCGSCTRCIDACPTDALVAPRQMDASRCIAYLTIEKKGSLDEDLLPLMGRQVFGCDICQDVCPWNRRAPVAASPALPARRELVNPALEWLAGMDGPTFNRWFRGSPLERTRRKRVLRNIAIAMGNSGEHEFLPQLESWAAGDDAVLAEAAAWAIRRLS

SEQ ID NO: 77095 - protein, 368 aa, Granulicella pectinivorans
  misc_feature (1)..(368): tr|A0A1I6M4D7|A0A1I6M4D7_9BACT Epoxyqueuosine reductase OS=Granulicella pectinivorans OX=474950 GN=SAMN0542177 1_1808 PE=4 SV=1
MRTSYPEEVLEPAWNPDLTAWLTAAAAASGFDASGVAPAESPENAERFAAWIDQGRAGEMDWLKRRDEQGTLVRSSVRVAIPWARSVVVCAMNYNAAAPRSIDPADADQGWIARYAWSGSEGKPVDYHDDLLARLRTIEAGLQEKAPCQTRCYVDTGPLVERNAAVQAGIGWVGKNTCVIRQGIGSWMLVGVILTSLPLEETPALVADRCGSCTRCLDACPTHALVAPREMDASLCIAYLTIEKKGSIPETLREAIGRQLFGCDICQDVCPWNRKAPIAAKSGLETRSELVNPALDWLASLDSAGFRRLFRGSPLERTGKKRLHRNVAIAMGNSGDARFVPQLDIWSKAEDPVLAETAAWALGRLRTS

SEQ ID NO: 77096 - protein, 369 aa, Granulicella rosea
  misc_feature (1)..(369): tr|A0A239IMC4|A0A239IMC4_9BACT Epoxyqueuosine reductase OS=Granulicella rosea OX=474952 GN=SAMN05421770_103184 PE=4 SV=1
MRAQAVAAGFDLAGVAPAHSAGEPAGALTAERFAAWVEAGRAGEMEYLKRRDEAGELLRTSVQVAIPWARSVLVCAMSYNAAAPRSVEPAPATAGWIARYAWSGTPDGAPMDYHDDMLARLRVVEAALLGKTGCETRCYVDTGPILERDLAAKAGIGWIGKNTCVLNQQLGSWLLLGVIATSLPAFEGELALAPDRCGSCTRCIDACPTDALIAPRQMDASLCIAYLTIEKKGMIAEELRAKVGRQVFGCDICQDVCPWNRRSPVAVKQGLMTRTELVNPDLEQLASLDAAEFKLWFKGSPLERTKRHRLHRNVAIAMGNSGDRRFAARLERWSASEDAVLAEAARWALTRLAILTEESNLAEESKDRL

SEQ ID NO: 77097 - protein, 386 aa, Granulicella sibirica
  misc_feature (1)..(386): tr|A0A4Q0T3J2|A0A4Q0T3J2_9BACT Epoxyqueuosine (OQ) redu ctase QueG OS=Granulicella sibirica OX=2479048 GN=GRAN_ 2978 PE=4 SV=1
MSLCEWTEGLIAWVKDASRQTGFDVSGVTAADNPIDGARFVDWVEAGRAGEMDWLKRRDERGALVRSAVKVALPWARSVVVCAMNYNAAAPLSLDVAEPGAGWIGRYAWSGRKVGEAVQAVDYHDDLLARLREVEAGLKVRSECETRCYVDTGPLVERGMATKAGIGWVGKNTCVIREGMGSWMLMGVIVTSLPLAETTVISLPAEDRCGSCTRCLEACPTGALVAPREMDASLCIAYLTIEKKGSITEDLREAVGRQVFGCDICQDVCPWNRKAPIAWKQGLETRRELVNPALEWLAQLDSAGFRRVFKGSPLERTGKKRLHRNVAIAMGNSGQSQFIPQLEVWAAGEDAVLAESAVWALGRLRRSGSSEDPVGSVENASSASIG

SEQ ID NO: 77098 - protein, 389 aa, Granulicella sp.
  misc_feature (1)..(389): tr|A0A3N1JNR2|A0A3N1JNR2_9BACT Epoxyqueuosine reductase OS=Granulicella sp. GAS466 OX=2485170 GN=EDE14_1609 PE =4 SV=1
MTGEWTPELEKWVRDSALEAGFDEAGVAPIVGLECDEERVEAERFTAWVDAGRAGEMEYLKRRDERGILLRSVAQAAMPWARSVIVGAMNYNSQAPLSIEDAPEGTGWIARYAWSGKGDGAGKSVPTDYHDDLLRRLRKVESAVKLKFDCETKCYVDTGPLVERAIAVRAGVGWIGKNTCVLNQRLGSWLLLGVVVTSLPVPEKLPLHVAADRCGSCTRCIDACPTDALVAPREMDASRCIAYLTIEKKETIAEELRGLMGRQVFGCDICQDVCPWNRRSPVAVKEGMRPRPELVNPALEWLAGMDAVEFRRWFKGSPLERTRLKRLQRNVAIAMGNSGDERFLPQLELWGMGDEEVLAESARWAIERISTHGCKLDEERKINGIASES

SEQ ID NO: 77099 - protein, 377 aa, Granulicella sp.; identical to SEQ ID NO: 74013
  misc_feature (1)..(377): tr|A0A1D2UF79|A0A1D2UF79_9BACT tRNA epoxyqueuosine(34) reductase QueG OS=Granulicella sp. SCN 62-9 OX=1660100 GN=ABT04_01855 PE=4 SV=1

SEQ ID NO: 77100 - protein, 682 aa, Granulicella tundricola
  misc_feature (1)..(682): tr|E8X1U3|E8X1U3_GRATM Ribonuclease BN OS=Granulicella tundricola (strain ATCC BAA-1859 / DSM 23138 / MP5ACTX9 ) OX=1198114 GN=AciX9_2059 PE=4 SV=1
MGSAWSSELVEWVRGSAVGAGFDLCGVAGAPASGESEGVLTAERFSEWVAGGRAGEMEYLKRRDEAGELLRRSARVAMPWVRSVVVCALNYHAEGPLSVDAAAKGAGWIGRYAWSGGEDGEPVDYHDDLMRRLKVVEAGLVARVSSETLQTKCYVDTGPLLERDFAARAGVGWVGKNTCVINQGVGSWLLLGVIVCSLEVETEAAALVAADRCGSCTRCIEACPTGALVASREMDASLCIAYLTIEKKGAIAEELREKMGRQVFGCDICQDVCPWNRKAPVGDHVGFRARGELVNPSLDWLGGMSADEFRRWFKGSPLERTKRHRVQRNVAIAMGNSGDESFVPKLMEWAGGEDAVLAESAGWALRRLGLLASRQRAWMLSEDVKKSEAEPEVKPIEAVKPTVREDGAWPQVKALAMYMASTEVHTYAFSVAANVILSLFPFIVLLLTLAQKVFHSPAMVAVVGDLLRTILPNNQDFIVRNMTSLVHPHGSTRVFSVVMLLITSTGVFLPLEVALNNVWGVKENRNYLQNQMVSLGLAAAVGALAMASVALATGQQRITTWIFFGHTDNIFFNFLAGGVLKICAVVMSVLLFFLIYWVLPHRKIPAMAVLPTAIVIGLSWEVAKYLYVLALPHLDFESVYGPFKVSVGLMMWAFLSGLMLLAGAHFSATRYTLRLAREAEAE

SEQ ID NO: 77101 - protein, 356 aa, Granulosicoccus antarcticus
  misc_feature (1)..(356): tr|A0A2Z2NYY4|A0A2Z2NYY4_9GAMM Epoxyqueuosine reductase OS=Granulosicoccus antarcticus IMCC3135 OX=1192854 GN= queG PE=3 SV=1
MATITEAPAELASFVKKSAAELGLSHCAITDTQLDTHETHLLNWLDAGFHGEMDYMQRHGTRRSRPADLLPGTIRIISVRLDYYPPDSADAESVLADPSLGYVSRYALGRDYHKVLRNRLQKLAQLISEQYGAFGYRAFVDSAPVLEKALAEKAGLGWIGKHSNLLSSKAGSWFFLGELYTDLPLPIDEPLPRSHCGSCSACIQACPTDAIVAPYRVDARRCISYLTIELKGTIPIEFRKAMGNRIYGCDDCQLVCPFNKFSKDTLEEDFNVRNQLDSPSLTALFRWSEQDFKSRMAGSPIYRIGHESWIRNIAIALGNAPATTDVIAALESRSNDPSEIIREHVTWALQQTALTL

SEQ ID NO: 77102 - protein, 379 aa, Grimontella sp.
  misc_feature (1)..(379): tr|A0A318GL04|A0A318GL04_9GAMM Epoxyqueuosine reductase OS=Grimontella sp. AG753 OX=2183905 GN=queG PE=3 SV=1
MSEPLDLNQLAHSIKQWGTELGFQQVGIADTDLSASEPKLQAWLDKQYHGEMEWMARHGMMRARPHELLPGTLRVISVRMNYLPANAAFASTLKNPALGYVSRYALGRDYHKLLRNRLKQLGEKIQQHCASLNFRPFVDSAPILERPLAEKAGLGWVGKHSLILNRQAGSFFFLGELLIDLPLPVDQPVEEDCGRCVACLTICPTGAIVEPYTVDARRCISYLTIELEGAIPEEFRPLIGNRIYGCDDCQLICPWNRFSQLTDEADFSPRKALHSPELIELFAWSESWFLKVTEGSAIRRIGHLRWLRNIAVALGNAPWDEANIRALEQRRGEHPLLDEHIEWAIAQQVEKRNACVVEVQTPKKQRLVRVIEKGLIRDA

SEQ ID NO: 77103 - protein, 384 aa, Grimontia celer
  misc_feature (1)..(384): tr|A0A128FCI2|A0A128FCI2_9GAMM Epoxyqueuosine reductase OS=Grimontia celer OX=1796497 GN=queG PE=3 SV=1
MPESRSLSSINFTQLAENIRQWGHELGFQHIGITDVDLSQHEAQLQRWLDNGYHGEMDWMTRHGMMRARPQELVEGTVRVISARMNYLPPDAGFAKTLETPSLAYISRYALGRDYHKLIRNRLKKLGQRIEEEVGKFGYRPFVDSAPVLERPLAEKAGLGWTGKHSLLLSEDVGSWFFLGELLIDLPLPVDEPTVSQCGKCVACITSCPTDAIVGDTIVDARRCISYLTIELDGEIPEEFREAMGNRIYGCDDCQLVCPYNREAELTNESDFYGRESLVQQPLKTLFSWDESTFLKETEGSAIRRIGHEKWRRNLSVAMGNAPYDPEIIELLESAKGFSAMLDQHLDWALEQQIKRRNEHAVDVLSSSTKRLVRIVQKGLPRDA

SEQ ID NO: 77104 - protein, 384 aa, Grimontia hollisae
  misc_feature (1)..(384): tr|A0A377HJ33|A0A377HJ33_GRIHO Epoxyqueuosine reductase OS=Grimontia hollisae OX=673 GN=queG PE=3 SV=1
MSESRSLSSINLTQLAENIRQWGRELGFQHIGITDVDLRQHEEQLQRWLDNGYHGEMDWMARHGMMRARPQELVEGTVRVISARMNYLPPDAGFAKTLDNPSLAYISRYALGRDYHKLIRNRLKKLAQRIEEEVGKFGYRPFVDSAPVLERPLAEKAGLGWTGKHSLLLSQDVGSWFFLGELLIDLPLPVDEPSQGNCGKCVACMTSCPTGAIVDETVVDARRCISYLTIELDGEIPEAFRKAIGNRIYGCDDCQLVCPYNREAELTTEPDFYSRNSLVQRPLKVLFGWDEATFLRETEGSAIRRIGHEKWRRNLSVAMGNAPYDPEIVELLESAKGFSAMLDQHLDWALEQQIKRRNENAIDVLPASTKRLVRIVKKGLPRDA

SEQ ID NO: 77105 - protein, 384 aa, Grimontia hollisae; identical to SEQ ID NO: 77104
  misc_feature (1)..(384): tr|D0I8R9|D0I8R9_GRIHO Epoxyqueuosine reductase OS=Grim ontia hollisae CIP 101886 OX=675812 GN=queG PE=3 SV=1

SEQ ID NO: 77106 - protein, 325 aa, Grimontia indica
  misc_feature (1)..(325): tr|R1INQ8|R1INQ8_9GAMM Iron-sulfur cluster-binding prot ein OS=Grimontia indica OX=1056512 GN=D515_02019 PE=4 S V=1
MVRHGMMRARPQELVEGTVRVISARMNYLPPDAGFAKTLETPSLAYISRYALGRDYHKLIRNRLKKLGQRIEEEVGKFGYRPFVDSAPVLERPLAEKAGLGWTGKHSLLLSEDVGSWFFLGELLIDLPLPVDEPTESQCGKCVACITSCPTDAIVGDTIVDARRCISYLTIELDGEIPEEFREAMGNRIYGCDDCQLVCPYNREAELTNESDFYGRESLVQQPLKTLFSWDESTFLKETEGSAIRRIGHEKWRRNLSVAMGNAPYDPEIIELLESAKGFSAMLDQHLDWALEQQIKRRNEHAVDVLPSSTKRLVRIVQKGLPRDA

SEQ ID NO: 77107 - protein, 384 aa, Grimontia marina
  misc_feature (1)..(384): tr|A0A128FE70|A0A128FE70_9GAMM Epoxyqueuosine reductase OS=Grimontia marina OX=646534 GN=queG PE=3 SV=1
MSESRSSSSINFTQLAENIRQWGHELGFQHIGITDVDLRQHEEQLQRWLDNGYHGEMDWMARHGMMRARPQELVEGTVRVISARMNYLPPDAGFAKTLETPSLAYISRYALGRDYHKLIRNRLKKLGQCIEEEVGKFGYRPFVDSAPVLERPLAEKAGLGWTGKHSLLLSKDTGSWFFLGELLIDLPLPVDEPSENQCGKCVACITSCPTEAIVGDTIVDARRCISYLTIELDGEIPEEFREAMGNRIYGCDDCQLVCPYNREADLTNESDFYGRESLIQQPLKTLFSWDEATFLKETEGSAIRRIGHEKWRRNLSVAMGNAPYDPEIIELLESARGFSAMLDQHLNWALEQQMKRRSGHFIDVLPSSTKRLVRIVQKGLPRDA

SEQ ID NO: 77108 - protein, 384 aa, Grimontia sp.
  misc_feature (1)..(384): tr|A0A0F6A477|A0A0F6A477_9GAMM Epoxyqueuosine reductase OS=Grimontia sp. AD028 OX=1581149 GN=queG PE=3 SV=1
MSESRSSSSINFTQLAENIRQWGHELGFQHIGITDVDLSQHEAQLQRWLDNGYHGEMDWMARHGMMRARPQELVEGTVRVISARMNYLPPDAGFAKTLETPSLAYISRYALGRDYHKLIRNRLKKLGQRIEEEVGKFGYRPFVDSAPVLERPLAEKAGLGWTGKHSLLLSEDVGSWFFLGELLIDLPLPVDEPTESQCGKCVACITSCPTDAIVGDTIVDARRCISYLTIELDGEIPEEFREAMGNRIYGCDDCQLVCPYNREAELTNESDFYGRESLVQQPLKTLFSWDESTFLKETEGSAIRRIGHEKWRRNLSVAMGNAPYDPEIIELLESAKGFSAMLDQHLDWALEQQIKRRNEHAVDVLPSSTKRLVRIVQKGLPRDA

SEQ ID NO: 77109 - protein, 365 aa, Gulbenkiania indica
  misc_feature (1)..(365): tr|A0A0K6GSF8|A0A0K6GSF8_9NEIS Epoxyqueuosine reductase OS=Gulbenkiania indica OX=375574 GN=queG PE=3 SV=1
MTLPRSENANYRELARQIKDWAREDGFADARISRAALPPEAEQRLARWLEKGYHGEMDYMARHGVLRLRPAELVPGTLSVISVRMNYWPAEAAPAEAVLADGSRAYISRYALGRDYHKVLRNRLQRLAEKVTQAVGQHGYRVFTDSAPVAEVALAAQAGMGWRGKHTLLLNRSEGSLFFLGEILTDLPLPEDASEAGHCGRCTRCIEVCPTGAIVAPYEVDARRCISYLTIELKGPIPEPLRPLIGNRVYGCDDCQLVCPWNRFAVPTREGDFAVRHGLDNSTLAELFTWTEETFRLRMAGSPIWRIGYEKWLSNLAIGLGNAPSTPEVLAALALRRNHPSALVREHVAWALARHDGRGKEGAAG

SEQ ID NO: 77110 - protein, 356 aa, Guyparkeria sp.
  misc_feature (1)..(356): tr|A0A426QPD3|A0A426QPD3_9GAMM Epoxyqueuosine reductase OS=Guyparkeria sp. SCN-R1 OX=2341113 GN=queG PE=3 SV=1
MTTRLSPQRLKESIRDWAAELGFTEARVTDTDLSAYEAGFERWLAEGHAGTMGFFQRHGLMRFHPEELVPGTRRVLMVTRDYLPPESLGPSKVLGEPELGYVSRYALGRDYHKLVRKRLAQLAQRISESVGPFTYRAFCDSAPVYETGLAERAGVGWKGKHSLVLNRSGGSWFFLGALFLDIDLPVDEPVQPHCGSCTACLDVCPTGAIVADGVVDARRCISYLTIESHDDIPESLRPLMGNRIYGCDDCQLVCPWNRFARTTDDADFHARQGLDAPDLVELFGWDEQTFLTRTEGSAIRRIAWWRWRRNLAVALGNLPAGHPRVPAALAVLRGGLGEAGDQVDRHINWALARLAD

SEQ ID NO: 77111 - protein, 358 aa, Gynuella sunshinyii
  misc_feature (1)..(358): tr|A0A0C5VVC3|A0A0C5VVC3_9GAMM Epoxyqueuosine reductase OS=Gynuella sunshinyii YC6258 OX=1445510 GN=queG PE=3 SV=1
MSQISALNLDLVKDQIKQFASELGFQACSFSVPDVSVYADLHKQHIDSGYHGTMLWLENNQHVRYDPRLLVDGVKTIVSVRMNYRPDSVTRMRELLSQPDKAYVARYALGRDYHKVMRNKLQTLGEKINTELEATRFRAFVDSAPVLERELAEQSGLGWIGKNTLLLNEQAGSWFFLGELFLTLELPPDPSVSGKHCGSCQQCLTECPTGAFVGAGVLDARKCISYLTIEHDGTIPESLRPLMGNRIYGCDDCQIVCPFTKFSQLTEELDYQSRHALDEPSLADLWHWNEQQFLDRMQGSPIRRIGYEKWTRNLAVAIGNSGEWGWVDMLLQKLGEVSPMVDEHIDWAAGRLRQQQPD

SEQ ID NO: 77112 - protein, 351 aa, Haematobacter genomosp.
  misc_feature (1)..(351): tr|A0A212AGX9|A0A212AGX9_9RHOB Epoxyqueuosine reductase OS=Haematobacter genomosp. 1 OX=366618 GN=queG PE=3 SV =1
MPISTSELKARLVAQALAEGFSAARLCRPTDIPEVPERYRAFLDAGFHGQMGWLAERVPWRTDPAALWPEARSVIMLAESYTPEENPMAAVARRDRGAISVYARGKDYHDLVKKRLKRLARWLIAEGGGEVKVFVDTAPVPEKPLAQAAGLGWQGKHTNLVSREMGNWFFLGAIFTTLDLPVDGAEADHCGSCTRCQTACPTDAFPAPYQLDARRCISYLTIEHHGPVEESLRQRMGNRIYGCDDCLAACPWNKFAVEARETRYAAREDLVSPPLAELALLDDAAFRARFSGSPIKRIGRNRFVRNVLYAIGNSAESRLMPSAMALCSDPDPVVAEAAEWAVNRLSMQRDQ

SEQ ID NO: 77113 - protein, 349 aa, Haematobacter massiliensis
  misc_feature (1)..(349): tr|A0A086Y890|A0A086Y890_9RHOB Epoxyqueuosine reductase OS=Haematobacter massiliensis OX=195105 GN=queG PE=3 S V=1
MPTSTSDLKTRLVAQALAEGFSAARLCRPTDIPEVPERYQAFLDAGFHGQMGWLAERVHWRTEPAALWPEARSVIMLAESYTPEENPMAAVARRDRGAISVYARGKDYHDLVKKRLKRLARWLIAEGGGEVKVFVDTAPVPEKPLAQAAGLGWQGKHTNLVSREMGNWFFLGAIFTTLDLPSDAPEVDHCGSCTRCQVACPTDAFPAPYQLDARRCISYLTIEHRGPVEEPLRERMGNRIYGCDDCLAACPWNKFAVEARETRYAAREDLVSPPLAELALLDDEAFRERFSGSPIKRIGRDRFVRNVLYAIGNSGMAALAPVARDRLCDPDPVVAEAAAWALARLTPPG

SEQ ID NO: 77114 - protein, 351 aa, Haematobacter missouriensis
  misc_feature (1)..(351): tr|A0A225CUU4|A0A225CUU4_9RHOB Epoxyqueuosine reductase OS=Haematobacter missouriensis OX=366616 GN=queG PE=3 SV=1
MPISTSDLKERLVAQALVEGFSAARLCRPTDIPEVPERYRAFLDAGFHGQMGWLAERVHWRTDPAALWPEARSVIMLAESYTPEENPMAAVAQRDRGAISVYARGKDYHDLVKKRLKRLARWLIAEGGGEVKVFVDTAPVPEKPLAQAAGLGWQGKHTNLVSREMGNWFFLGAIFTTLDLPVDGPEADHCGSCTRCQTACPTDAFPAPYQLDARRCISYLTIEHHGPVEESLRQRMGNRIYGCDDCLAACPWNKFAVEARETRYAAREDLVAPPLAELALLDDAAFRARFSGSPIKRIGRDRFVRNVLYAIGNSADSRLMPSAMALRSDPDPVVAEAAEWAVNRLSTQRDQ

SEQ ID NO: 77115 - protein, 382 aa, Haematospirillum jordaniae
  misc_feature (1)..(382): tr|A0A143DDD1|A0A143DDD1_9PROT Epoxyqueuosine reductase OS=Haematospirillum jordaniae OX=1549855 GN=queG PE=3 SV=1
MQTGTDQIKERIRKAAIKEGFDCIGFARAELNEKTRRRLSSWLAQGCHGTMGWMAETQSRRTDPRALWPEAATVISLGTNYAPGHNPLSGLMHHSRGYISVYARNRDYHDLIKGRLKQLGARIQHICDQDIKVFVDTAPLMEKPLAAAAGLGWQGKHTNIVSRRFGSWLFLGEILTTLDLPPDSPASEHCGRCTRCLDICPTSAFDAEGRIDARKCISYLTIEHKGPIPYALRSRFGNRIYGCDDCTAVCPWNRFAPPTPHDAFKPRVELTAPRLADLLELDDASFRTLFSASPVKRISRPRFIRNVLIAAGNSGDAAITKKITPHLNDPNPVIRGAAVWALSRLLDIRDFHDLAEAYGKDESDPCVREEWMLGGKPSSIQP

SEQ ID NO: 77116 - protein, 381 aa, Hafnia alvei
  misc_feature (1)..(381): tr|A0A2J9GZ34|A0A2J9GZ34_HAFAL Epoxyqueuosine reductase OS=Hafnia alvei OX=569 GN=queG PE=3 SV=1
MTHPLDLNQLAQHIKQWGQSLGFQQVGICDTDLSVEEPRLQAWLDKQYHGEMEWMARHGMMRARPHELHPGTLRVISVRMNYLPANASFAKTLKNPQLGYVSRYALGRDYHKLLRNRLKRLGDMIQEYCVGIDVNSRPFVDSAPILERPLAAKAGIGWVGKHSLILNKEAGSWFFLGELLLDLPLPVDKPQEEQCGRCVACITTCPTGAIVEPYVVDARRCISYLTIELESAIPEEFRPLMGNRIYGCDDCQMICPWNRFSQLTEEGDFSPRQNLHTPELIALFQWDEKTFLKITEGSAIRRIGHLRWLRNISVALGNAPYDAQIIPLLQSRMGLSEVLDEHIEWAVKQQQEKRSENAIEIQTSQQKRLIRAIEKGLPRDA

SEQ ID NO: 77117 - protein, 381 aa, Hafnia alvei
  misc_feature (1)..(381): tr|A0A097QYD2|A0A097QYD2_HAFAL Epoxyqueuosine reductase OS=Hafnia alvei FB1 OX=1453496 GN=queG PE=3 SV=1
MTHPLDLNQLAQHIKQWGQSLGFQQVGICDTDLSVEEPRLQAWLDKQYHGEMEWMARHGMMRARPHELHPGTLRVISVRMNYLPANASFAKTLKNPQLGYVSRYALGRDYHKLLRNRLKRLGDMIQEYCVGIDVNSRPFVDSAPILERPLAAKAGIGWVGKHSLILNKEAGSWFFLGELLLDLPLPIDKPQDEQCGRCVACITTCPTGAIVEPYVVDARRCISYLTIELESAIPEEFRPLMGNRIYGCDDCQMICPWNRFSQLTEEGDFSPRQNLHTPELIALFQWDEKTFLKITEGSAIRRIGHLRWLRNISVALGNAPYDAQIIPLLQSRRGLSEVLDEHIEWAVKQQQEKRSENVIEIQTSQQKRLIRAIEKGLPRDA

SEQ ID NO: 77118 - protein, 381 aa, Hafnia paralvei
  misc_feature (1)..(381): tr|A0A4Q9EXP8|A0A4Q9EXP8_9GAMM Epoxyqueuosine reductase OS=Hafnia paralvei OX=546367 GN=queG PE=3 SV=1
MTHPLDLNQLAQHIKQWGQSLGFQQVGICDTDLSVEEPRLQAWLDKQYHGEMAWMERHGMMRARPHELQPGTLRVISVRMNYLPTHAFLAKTLKNPQLGYISRYALGRDYHKLLRNRLKRLGEMIQEYCEGIDINFRPFVDSAPILERPLAAKAGIGWVGKHSLILNQEAGSWFFLGELLIDLPLPVDQPQEEQCGRCVACMTTCPTGAIVEPYVVDARRCISYLTIELESAIPEEFRPLMGNRIYGCDDCQMICPWNRFSQLTNEDDFSPRQKLHTPELIELFQWDEPTFLKITEGSAIRRIGHLRWLRNISVALGNAPYESQIIPLLESRLGMSDVLDEHIVWAVKQQLEKRGENAIEIQTSQQKRLIRAVEKGLPRDA

SEQ ID NO: 77119 - protein, 381 aa, Hafnia paralvei
  misc_feature (1)..(381): tr|A0A4S1D260|A0A4S1D260_9GAMM Epoxyqueuosine reductase OS=Hafnia paralvei OX=546367 GN=queG PE=3 SV=1
MTHPLDLNQLAQHIKQWGQSLGFQQVGICDTDLSVEEPRLKAWLDKQYHGEMAWMERHGMMRARPHELQPGTLRVISVRMNYLPAHAFFAKTLKNPQLGYISRYALGRDYHKLLRNRLKRLGEMIQEYCEGIDINFRPFVDSAPILERPLAAKAGIGWVGKHSLILNQEAGSWFFLGELLIDLPLPVDKPLEEQCGRCVACMTTCPTGAIVEPYVVDARRCISYLTIELESAIPEEFRPLMGNRIYGCDDCQMICPWNRFSQLTNEDDFSPRQKLHTPELIELFQWDEPTFLKITEGSAIRRIGHLRWLRNISVALGNAPYEAQIIPLLESRLGMSDVLDEHIVWAVKQQLEKRGENAIEIQTSQQKRLIRAVEKGLPRDA

SEQ ID NO: 77120 - protein, 374 aa, Hahella chejuensis
  misc_feature (1)..(374): tr|Q2SBB5|Q2SBB5_HAHCH Epoxyqueuosine reductase OS=Hahe lla chejuensis (strain KCTC 2396) OX=349521 GN=queG PE= 3 SV=1
MTNDTYSQPQLNQLAGDIKQWAQELGFQQCGVTDVDLGHHEDALKDWLSKGYHGSMNYMADHGNKRSRPAELLPGALRVISVRMDYWPEQKGKAQARLEQDQSAYVSRYAVGRDYHKLMRKRLAQLGKRIQEEIAESAYRVFVDSAPVLERALAQKAGLGWIGKNTMLINPKAGSYFFLGELFTDLPLPIDAPYPKYHCGSCSACLDLCPTKAFVAPHILDARRCISYLTIELKGDIPEELRPMMGNRIFGCDDCQMVCPWNKFSRLTGEKDFSPRHRLDSAELLELFEWTEEQFLNNTEGSAIRRTGHESWLRNIAVALGNAPTTPTIIAALKGKLSHPSVIVQEHVRWALARHGEPLAETTERQETDKSSVR

SEQ ID NO: 77121 - protein, 357 aa, Hahella sp.
  misc_feature (1)..(357): tr|A0A261GJ65|A0A261GJ65_9GAMM Epoxyqueuosine reductase OS=Hahella sp. CCB-MM4 OX=1926491 GN=queG PE=3 SV=1
MSYTDFTSLAKSIKSWALELGFQQCGITDVDLGDHADHFQQWLANDHHGTMDYMASHGSKRYKPDELVPGTIRVISVRMDYWPQKDNAANAEKTLAEDSKAYVSRYTLGRDYHKLIRKRLAHLAERVQKKIESTQYRVFVDSAPVLERALAQKAGLGWIGKNTMLINPKAGSYFFLGEIFTDLPLPVDDPFDSHHCGSCSACMDFCPTNAFVGPQELDARRCISYLTIELKGSIPTELRPLMGNRIFGCDDCQMVCPWNKFNHPTVEEDFTPRHQLDSSELLKLFNWTEEEFLTNTQGSAIRRTGYESWLRNIAVALGNATPSREILTALEEKANHPSAIVREHVAWALERLNRVPS

SEQ ID NO: 77122 - protein, 374 aa, Hahella sp.
  misc_feature (1)..(374): tr|A0A3T0VHX5|A0A3T0VHX5_9GAMM Epoxyqueuosine reductase OS=Hahella sp. KA22 OX=1628392 GN=queG PE=3 SV=1
MTNDTYSQSQLSQLAGDIKQWAQELGFQQCGVTDVDLGRHEEALRDWLSKGYHGSMGYMADHGDKRSRPAELLPGTLRVISVRMDYWPEKKGEAQARLEQDQSAYVSRYAVGRDYHKLMRKRLAQLGKRIQEEITESAYRVFVDSAPVLERALAQKAGLGWIGKNTMLINPKAGSYFFLGELFTDLPLPVDPPYPKNHCGSCSACMDFCPTKAFVAPNVLDARRCISYLTIELKGKIPEDLRPMMGNRIFGCDDCQMVCPWNKFSRLTGEKDFSPRHRLDSAELLELFAWTEEEFLSNTEGSAIRRTGHESWLRNIAVALGNAPTSPAIIAALKEKLLHPSAIVQEHVRWALTQHGEPLADMAERQEAEKTSVR

SEQ ID NO: 77123 - protein, 377 aa, Hahellaceae bacterium
  misc_feature (1)..(377): tr|A0A2D8R7V9|A0A2D8R7V9_9GAMM Epoxyqueuosine reductase OS=Hahellaceae bacterium OX=2048971 GN=queG PE=3 SV=1
MTDLREAPSADPLIMRELRRKLDIWANELGFQQLGVSGIQLGDHPEALQRWLDKGYHGQMSYMAERASLRAAPETLFENAASIISVRMDFWPAKRAKKGLPPALDDGETAYVASYALGRDYHKLMRSRLKKLADRVRDFAGDYDMRPFVDSAPVLERGVAQQAGLGWIGKNTMLINPAAGSHFFLGELFTSLPLPADKPFTDQHCGSCRACLDVCPTSAFPEPGVLDARRCISYLTIEHRGSIDEALRPLMGNRVFGCDDCQAICPWNKFAHFTKEADFHPRQQISDRKMVELFNWSEETFLKQTEGSAIRRTGYESWLRNLAIGLGNALAGRGVLGKAAPMADKDAIRRALETRLDHESAVVREHVRWALSQQAPS

SEQ ID NO: 77124 - protein, 379 aa, Halalkalibacillus sp.
  misc_feature (1)..(379): tr|A0A2I0QV49|A0A2I0QV49_9BACI tRNA epoxyqueuosine(34) reductase QueG OS=Halalkalibacillus sp. B3227 OX=201804 2 GN=queG PE=4 SV=1
MDVAQLKQELIEYSKEINIQEIGFTSADTFDSLKQRLIVQQSLKFQSGFEKGSVEERTTPSELMPKARSIISIALAYPSKMKGAPKSTKQEPRGVFARASWGQDYHDVLREKLRLLGEFLQEKVDGVAYKAMVDTGELHDRAVAERAGVGFVGKNCALITEDYGSYVYLGELITNIPFQPDEPIEEGCGDCNICVDTCPTGALVQGGQLNAQRCIAYLTLTKGFLEDEFRTKIGNRVYGCDTCQVVCPKNKSKDFHLHPEMEPDPELVKPKLQPLLKISNREFKEKYGYMSGSWRGKKPIQRNAIIALAHYKNEDSVDDLADLMNNDPRPVIRGTAAWAIGKIGRSDSEELILKAKERESDEQVINEMEKGLSFKHQTV

SEQ ID NO: 77125 - protein, 365 aa, Halanaerobium congolense
  misc_feature (1)..(365): tr|A0A1G6HTB3|A0A1G6HTB3_9FIRM Epoxyqueuosine reductase OS=Halanaerobium congolense OX=54121 GN=C7954_10174 PE =4 SV=1
MQINKLVKECAAELNIDICRVTDNQKLETEFEILKERSQGQFWPQPFANQNLEELTTPVLHFPNLKSIIAAAVSYNHNEANLFLSNYVTVEDYHSYLENKLEKLASRLQQKLNYSFNYKIFVDQAPFLEKALAQKAGLGFIGKNTLLINPKLGSNLFLGEIFTDLEIAVDQPLDLDCGSCRLCLESCQVQALKEANLLAAEDCTAYLTQKKGILTESEIKKIGHHIWGCDDCKDVCPYNKKSKASAAKKLQFFNKNLEYFLNLESKEVPAELDNTAVTWRGSRILLRNAMLAAANLKEKRFFNKIKQKLNDNSPIIRYYAAYSLLKIDFKKAKKIVKEYLNQEQNSEYKNKIKKILVSEEDNNGS

SEQ ID NO: 77126 - protein, 365 aa, Halanaerobium congolense
  misc_feature (1)..(365): tr|A0A1G9P064|A0A1G9P064_9FIRM Epoxyqueuosine reductase OS=Halanaerobium congolense OX=54121 GN=BY453_10519 PE =4 SV=1
MQINKLVKECAAELNIDICRVTDNQKLETEFEILKERSQGQFWPQPFANQNLEELTTPVLHFPNLKSIIAAAVSYNHNEANLFLSNYVTVEDYHSYLENKLEKLASRLQQKLNYSFNYKIFVDQAPFLEKALAQKAGLGFIGKNTLLINPKLGSNLFLGEIFTDLEIAVDQPLDLDCGSCRLCLESCQVQALKEANLLAAEDCTAYLTQKKGILTESEIKKIGHHIWGCDDCKDVCPYNKKSKASAVKKLQFFNKNLEYFLNLESKEVPAELDNTAVTWRGSRILLRNAMLAAANLKEKRFFNKIKQKLNDNSPIIRYYAAYSLLKIDFKKAKKIVEEYLNQEQNSEYKNKIKKILVSEEDNNGS

SEQ ID NO: 77127 - protein, 358 aa, Halanaerobium hydrogeniformans
  misc_feature (1)..(358): tr|E4RLP0|E4RLP0_HALHG DUF1730 domain-containing protei n OS=Halanaerobium hydrogeniformans OX=656519 GN=Halsa_ 1529 PE=4 SV=1
MIKKELIKNIASELEIDICRITDGGGLKKYRKILEQRKKTGLWPQAFTEEDIDKLCNPSLHFEGLKSIIVIAINYHNNSKQINKCLSNYVTQKDYHIYLKEVMEIMVKKIKAKIKKDFNYKIFVDNAPFLEKALAERAGAGFIAKNSLLINPDFGSYIFLGEIFTDLEIEKDKALDLDCGECTICLENCAGNALTAPYQLEADKCIAYLTQKKGIIPLAERKKMGGHIWGCDICQIICPYNKNTSKSSKKELQYFERGIEYFLKIDRNNPPEELKNTAIFWRGSRILIRNALITAANLQKEEYFDLIKTKLNDNSSLIRYYAVWSLSEIDYQKSLSILKKHLLKEKNKEVKQVIKNIL

SEQ ID NO: 77128 - protein, 252 aa, Halanaerobium kushneri
  misc_feature (1)..(252): tr|A0A1N6P8U5|A0A1N6P8U5_9FIRM Epoxyqueuosine reductase QueG (Queuosine biosynthesis) OS=Halanaerobium kushner i OX=56779 GN=SAMN05421834_1011 PE=4 SV=1
MKQEIENLIHDFIANYQEKDDIKSSWKEPIIKYAAADDPMFGELKKAVSEDHLMPEDLMPGARTIIAYFIPFSKGIADSNIEGKYSSDQWAKAYIETNQLIADLNQHLKEKLSKKGYQASLIAATNNFDKERLISDWSHRHAAYIAGLGTFGLNNMLITEKGCAGRIGTLVTDLNIEASERSEQDKCLNKAGFNCSKCVDRCVNGSLQKDSFDRHQCYQLLSENDKIHPESELTDVCGKCSVDLPCSFSSPV

SEQ ID NO: 77129 - protein, 361 aa, Halanaerobium kushneri
  misc_feature (1)..(361): tr|A0A1N7BH35|A0A1N7BH35_9FIRM Epoxyqueuosine reductase OS=Halanaerobium kushneri OX=56779 GN=SAMN05421834_131 17 PE=4 SV=1
MRINNLVKETAAELNIDLCGITDGSDLNDERKKLKKRIQTKYWPQPFASQQLDLLTKPSLQFKNLQSIIVIAMSYNNGASSSFLSNYVTVKDYHNFLQEKLEKMASVLQNKLKKKFDYKIFVDTAPFLERALAKRAGIGFIGKNSMLINPKFGSYLFLGELFTDLEIKKDQPLNLDCGECQICIKNCEGKALKDEYLLDGEVCISYLTQKKGVLSAAEINKIGTHVWGCDACQNKCPYNINKTENSEPELNFFNKNLEYFLELDRKVPPSELKNTAIMWRGSRILQRNALIAVYNLGEERYFEAVKRKLKDNSPIIRYYSVLALLELNYQRAKKPVEQAIKNEKNSRYKKEMLKLLEQKGE

SEQ ID NO: 77130 - protein, 364 aa, Halanaerobium praevalens
  misc_feature (1)..(364): tr|E3DQX8|E3DQX8_HALPG DUF1730 domain-containing protei n OS=Halanaerobium praevalens (strain ATCC 33744 / DSM 2228 / GSL) OX=572479 GN=Hprae_0799 PE=4 SV=1
MQLNSLVKKSAANLKIDICQITDGNDLVEARKILEQRVKSEYWPQPLTNQNLDELTKPRLQLDNLNSIIVAAISYNNQGGNQYLSNYVTVLDYHNYLENKLEELVNNLKNKIDKDFNYKIFVDTAPFLEREVARKAGVGFIGKNTMLINPNFGSYLFLGEILTDLKIKKDQPLINTCANCKICLENCEGDALKKDYLLAADDCISYLTQKKSLLTEENIKKINNHLWGCDACQEKCPYNKNILTTNNKNLNFFNKNLSYFLNLKRKKIPAELEKTAIVWRGNRILLRNALIVAANLKKEQYFDLIIDKLDDNSPIIRYYAAYALAKINFKRAKKIIKKQLIKEKDQFYQKKITEILEQEAENEA

SEQ ID NO: 77131 - protein, 365 aa, Halanaerobium saccharolyticum
  misc_feature (1)..(365): tr|A0A2T5RK67|A0A2T5RK67_9FIRM Epoxyqueuosine reductase OS=Halanaerobium saccharolyticum OX=43595 GN=C8C76_111 17 PE=4 SV=1
MQINKLVKKTAAELKIDLCGITDGSELTEERLILEKRAETEYWPQPFTNRDLDQLTKPALQFENLNSIIVTAISYNNGGASPFLSNYVTVEDYHDYLQQKLKKLALELQQKLNRDFNYKIFVDTAPFLERALAKRAGIGFIGKNSMLINPELGSYLFLGELFTDLEIEKDEPLELDCGQCQICLQNCEGGALKDEYLLDGEVCISYLTQKKGILSKSEVNKIGTHIWGCDACQTKCPYNVNKEQITQPELSFFDKKLNYFLEIERNNPPSELKNTAIMWRGSRILLRNALIAVSNLEDEKYFEAVQKKLQDNSPIIRYYAVLALLKINYQRAKELVKKTAAAENNSKYQKLIFSLLEQKGEENEY

SEQ ID NO: 77132 - protein, 365 aa, Halanaerobium saccharolyticum
  misc_feature (1)..(365): tr|M5E029|M5E029_9FIRM Epoxyqueuosine (OQ) reductase Qu eG OS=Halanaerobium saccharolyticum subsp. saccharolyti cum DSM 6643 OX=1293054 GN=HSACCH_01351 PE=4 SV=1
MQINNLVKECAAKLNIDLCRITDNGELKQERKILEKRSKDKYWPQPFANQDIAELTNPAFHFPNLKSIIVAAVSYNKNGTNPFLSNYVTIEDYHVYLENKLEKLAARLQKKLNKSFNYKIFVDEAPFLEKALARKAGIGFIGKNTLLINPELGSNLFLGEIFTDLEITKDQPLADDCGDCRRCIDNCQVDALKSEYLLAAEECTAYLTQKKGILSEAEIKKIGHHIWGCDDCKDVCPYNKKADKLTASELMIFDKGLQYFLNLERKELPEELANTAITWRGSRILIRNAMLAAANLKELKYFNLIKEKLNDNSPVIRYYAALSLLEIDFKEAKGVIEKHIAQENNKEYKNKIKNILAAKEENHGY

SEQ ID NO: 77133 - protein, 369 aa, Halanaerobium salsuginis
  misc_feature (1)..(369): tr|A0A1I4EM68|A0A1I4EM68_9FIRM Epoxyqueuosine reductase OS=Halanaerobium salsuginis OX=29563 GN=SAMN02983006_0 0048 PE=4 SV=1
MLKNKIIKNVAYQNGLDICRITDGNELIAAREKLQARAETEYWPQPLANQNITELTTPSLFLTNLKSIIVLGVNYYNQGVFNQKLSSYITAVDYHNYLQNKLEKLVEQLKLKFNFDFSYKIFVDTAPFLEREVARKAGVGFIGKNTMLINPQYGSYLFLAEILTDLEIEIDYPLTNNCGSCQICLNNCEGGALKEEYLLAGKDCISYLTQKKGMLTEAARKKIGTHFWGCDICQQKCPYNQQLSYNKQAELQFFAKDLSYFLELERNNLPAELEKTALSWRGARILQRNALIVAANLQEEKYFELIRKYLTDNSPIIRCYAVWALSKLDYARSVDLLQKQLVKENDRLVKKEIKAILFNGGDRINEYSN

SEQ ID NO: 77134 - protein, 192 aa, Halanaerobium sp.
  misc_feature (1)..(192): tr|A0A315QSX1|A0A315QSX1_9FIRM Uncharacterized protein (Fragment) OS=Halanaerobium sp. OX=1895664 GN=CI947_230 3 PE=4 SV=1
MCIRDRCQICLQNCEGGALKDEYLLDGEVCISYLTQKKGILAKSEVNKIGTHIWGCDACQTKCPYNVNKEQITQPELSFFDKKLSYFLEIERNNPPSELKNTAIMWRGSRILLRNALIAVSNLEDEKYFEAVQKKLQDNSPIIRYYAVLALLKINYQRAKELVKKTAAAENNSKYQKLIFSLLEQKGEENEY

SEQ ID NO: 77135 - protein, 365 aa, Halanaerobium sp.
  misc_feature (1)..(365): tr|A0A139D969|A0A139D969_9FIRM 4Fe-4S ferredoxin-type d omain-containing protein OS=Halanaerobium sp. T82-1 OX= 1794808 GN=AWL62_481 PE=4 SV=1
MQINKLVKECAAELNIDICRVTDNQKLETEFEILKERSQGQFWPQPFANQNLEELTTPVLHFPNLKSIIAAAVSYNHNEANLFLSNYVTVEDYHSYLENKLEKLASRLQQKLNYSFNYKIFVDQAPFLEKALAQKAGLGFIGKNTLLINPKLGSNLFLGEIFTDLEIAVDQPLDLDCGSCRLCLESCQVQALKEANLLAAEDCTAYLTQKKGILTESEIKKIGHHIWGCDDCKDVCPYNKKSKASAAKKLQFFNKNLEYFLNLESKEVPAELDNTAVTWRGSRILLRNAMLAAANLKEKRFFNKIKQKLNDNSPIIRYYAAYSLLKIDFKKAKKIVEEYLNQEQNSEYKNKIKKILVSEEDNNGS

SEQ ID NO: 77136 - protein, 393 aa, Halarsenatibacter silvermanii
  misc_feature (1)..(393): tr|A0A1G9NW16|A0A1G9NW16_9FIRM Epoxyqueuosine reductase OS=Halarsenatibacter silvermanii OX=321763 GN=SAMN0448 8692_11143 PE=4 SV=1
MTTSMDNFELEKKARQHGFEAVGSVSIDVLKKIKSRGDTKKYIPENTETFFIFFQSYPLADPINFKDYSEEIRIAYFARIYDYHDILKRKLKEISQELTAETGRFHSWWGADDHSLPEKYLAKKAGLGFWGLNTLLINRDLGSFGFLGVIASPLKFEEVQEQKSSPVEKAHIEKTDSCCYKPARICEDCFKCLKACPVDALSKEKIKLDSDKCISSLTQRRGRFDWRRLAQFQNHFWGCDICQQVCPCNKILDYGRKNYGDYDAGNRGISADHWPRVGPMTVNEVLKLRRRDLPSCWSSYAFGWRGTRILVRNMLIVLANNLKPVYVKEIEEMTRDPSPIIRFYAFYCLYRWYWQENKDRAKNFIAEKIEEEKNSKNLQTLKNIWNSREEFVT

SEQ ID NO: 77137 - protein, 445 aa, Haliangium ochraceum
  misc_feature (1)..(445): tr|D0LI60|D0LI60_HALO1 Uncharacterized protein OS=Halia ngium ochraceum (strain DSM 14365 / JCM 11303 / SMP-2) OX=502025 GN=Hoch_3940 PE=4 SV=1
MSPDAGETRPERLRELLVRGARARGFHRVATAPLTPPRRFAAYRAWLAQDMHGGMGYMAEDAHIAGRAEPASLLAEARSVAIVALAYPAEDGPGAPDAPDAPDASEADAPPGDEDGVIRGFVARYARGRDYHNVLKERLFALAEELAEAVGAPVAARPCVDSAPVLERDLAESAGLGFTGKNTMLITPGLGSYTVLGELLLAAEVAPTLVQVSENKQRCGSCRACLDACPTNAFPAPFVLDARRCVSYLTIEHEGAIPLALRPGLGTRIFGCDVCQEVCPFNARAPARTPADPELSAAAAPAARGTGPAAAVGPRAAPDLVRLLGLGANQRRRYVDGTAMRRASRERLSRNVCVALGNAGDVRAIPALLGALAERSPVVRAHAAWALGRLGAREELRAALADETEAEVRAEMRAALDALASGGDALADAGGDAHAGAGNGADEDR

SEQ ID NO: 77138 - protein, 198 aa, Haliea salexigens
  misc_feature (1)..(198): tr|A0A3C1KMM6|A0A3C1KMM6_9GAMM tRNA epoxyqueuosine(34) reductase QueG (Fragment) OS=Haliea salexigens OX=28748 7 GN=queG PE=4 SV=1
PLDADPPQASKHCGSCSACLSVCPTDAFAGPFELDARRCISYLTIEHHGSIDPSLRPLLGNRVFGCDDCQLVCPWNKFARHSDETDFQPRHNLQNSELVTLFLWDEETFLQRTEGSAIRRIGHERWLRNLAVGLGNGPATPRAIAALEARLTHPSALVREHVGWALEVLRARAENAPGSSAARQPIHEYHPAPGGSRP

SEQ ID NO: 77139 - protein, 352 aa, Haliea sp.
  misc_feature (1)..(352): tr|A0A2D5F9V4|A0A2D5F9V4_9GAMM Epoxyqueuosine reductase OS=Haliea sp. OX=1932666 GN=queG PE=3 SV=1
MPQDQDFQQLRQALEAQAREAGFQALAVADIDLAEHEAHLERWLAAGHHGSMDYMQRHGRKRSRPEELVPGTCRVITLRLDYLPVGREPEATLQQSDRAYISRYALGRDYHKLMRKRLARLADWLREQAGGQYRVFVDSAPVLERALAERGGLGWIAKNTMLINERAGSWFFLGEIYTDLPLAADPPREQKHCGSCRACLDICPTRAFVGPFQLDARRCISYLTIEHRGSIDPELRPLMGNRIYGCDDCQLVCPWNKFARHSAEDDFQPRHGLDDIELVTLFAWDEETFLQRTEGSAIRRIGHVCWLRNIAVALGNAATSEAVLNALHSRRDHPSDLVREHVAWALARHGAL

SEQ ID NO: 77140 - protein, 351 aa, Haliea sp.
  misc_feature (1)..(351): tr|A0A4Z0M140|A0A4Z0M140_9GAMM Epoxyqueuosine reductase OS=Haliea sp. SAOS-164 OX=2562682 GN=queG PE=3 SV=1
MPATQADSLLDQIRDWAAEFGFGQLGVADIDLGEHPAYLRKWLDAGYHGSMDYMARHADKRAQPAELVPGTCRVISVRMDYLADTQAEQVLDDPQRAYISRYALGRDYHKLLRRRLAHLAKRIEERAGGGHYRAFVDSAPVLERAVAERAGLGWIAKNTMLINSDAGSWFFLGEIYTDLPLPTTAPQQTKHCGSCTRCLEICPTQAFVGPFELDARRCISYLTIEHRGSIDPALRPLLGNRVFGCDDCQLVCPWNKFAQPSPEEDFRPRHGLDNSTLVELFEWDEDTFLANTEGSAIRRIGYECWLRNLAVGLGNGPPDPAALSALRSRMEHPSALVREHVAWALTRLEAA

SEQ ID NO: 77141 - protein, 144 aa, Halieaceae bacterium
  misc_feature (1)..(144): tr|A0A3C7VXZ2|A0A3C7VXZ2_9GAMM tRNA epoxyqueuosine(34) reductase QueG (Fragment) OS=Halieaceae bacterium OX=20 26743 GN=queG PE=4 SV=1
PGPFELDARRCISYLTIEHKGSIDEALRPLMGNRVFGCDDCQLVCPWNKFASPTAEDDFRPRHGLDAPGLAELFAWDEATFLKRTAGSPIRRVGFERWLRNLAVGLGNAPTSAPVVEALRGRRDHPSALVREHVEWALARHGAL

SEQ ID NO: 77142 - protein, 366 aa, Halieaceae bacterium
  misc_feature (1)..(366): tr|A0A2A5WS42|A0A2A5WS42_9GAMM Epoxyqueuosine reductase OS=Halieaceae bacterium MED-G26 OX=1986253 GN=queG PE= 3 SV=1
MRRVYLGQPPICHNVVVNNAEHNELVDTIRDWAKALGFQDIGFTGIELNEHEAYLQKWLDAGYHGTMDWMDRHGTKRSRPSELVPGTCTVISCRMDYQPEAKDAWQVLDTSDKGFVSRYAVGRDYHKIIRSRLAKLADRIRSELGSGDFRAFVDSAPVLERAIAEQSGLGWIAKNTMLINESAGSYFFLGEIYTDIPLPRSEPKQEKHCGSCSACLTACPTDAFVGPFVLDARRCISYLTIEHEGSIAEELREKMGNRIYGCDDCQLVCPWNKFAAISNEADFAPRWDLDNPNLVELFSWTEVEFLDRLQGSPIRRIGYEKWLRNIAVALGNAETSPEILQALKSREHHASSLVREHVTWALSQHG

SEQ ID NO: 77143 - protein, 352 aa, Halioglobus japonicus
  misc_feature (1)..(352): tr|A0A2N5Y8Y0|A0A2N5Y8Y0_9GAMM Epoxyqueuosine reductase OS=Halioglobus japonicus OX=930805 GN=queG PE=3 SV=1
MSDQPSQLLADIRAHAAQLGFQQLGVTDVNLAEHEAYLQKWLDAGYHGSMDYMAKHGTKRSRPDELVPGTCRVLSLRMDYHVPEAGAEDVLASSEKAYISRYTLGRDYHKLIRKRLSQLAKYIQEKAGGGHYRAFVDSAPVLERAIAEQAGLGWIAKNTMLINSDAGSWFFLGEIYTDLPLPADPPQPSKHCGTCTACLEACPTDAFVGPFELDARKCISYLTIEHHGSIDEALRPLMGNRVFGCDDCQLVCPWNKFAQPTDKDDFKPRHGLESADLVTLFEWDEETFLTRTEGSAIRRIGYERWLRNLAIGLGNGPASPAAISALKHRSGHPSPLVREHIAWALKTLGSGL

SEQ ID NO: 77144 - protein, 359 aa, Halioglobus lutimaris
  misc_feature (1)..(359): tr|A0A2N5X1L9|A0A2N5X1L9_9GAMM Epoxyqueuosine reductase OS=Halioglobus lutimaris OX=1737061 GN=queG PE=3 SV=1
MPAQDAPQITMPDADALLQQVQQWAEELGFQQLGISDVDLGEHEAYLQKWLDAGYHGSMDYMARHGSKRSRPAELVPDTCRVLSLRMDYLVDEQAERVLASPEKAYISRYTLGRDYHKLMRKRLSQLAQRIANRAGGGQFRAFVDSAPVLERAIAEQAGLGWIAKNTMLINSGAGSWFFLGEIYTDLPLPPTQAQASKHCGSCTACLDICPTDAFVGPFQLDARRCISYLTIEHQGSIDPTLRPLLGNRVFGCDDCQLVCPWNKFAQLTDETDFRPRHGLDDASLVALFLWDESTYLARTEGSAIRRIGFERWLRNLAVGLGNGPASAEAIAALRSRLDYPSELVREHVAWALARLQAN

SEQ ID NO: 77145 - protein, 409 aa, Halioglobus sp.
  misc_feature (1)..(409): tr|A0A2E0Z1T7|A0A2E0Z1T7_9GAMM Epoxyqueuosine reductase OS=Halioglobus sp. OX=2024834 GN=queG PE=3 SV=1
MAVPDTRPTPAARSNIAAYAARPFWQNYTSSSRPVTPLSDQPPQASPQQLDQLARDIRGWAAELGFAQVGIAGTDPGEHERYLQRWLDAGHHGQMDWMARHGSKRSRPPELVPGTCRVICLRMDYLAPDTRPEQVLASPDKAYISRYALGRDYHKRVRGRLARLARRIEDAAQAGHYRAFVDSAPVLERAFAEQAGLGWIAKNTMLINSDAGSWFFLGEIYTDLPLPLDEPQRDKHCGSCTACLDVCPTNAFKGPFELDARRCISYLTIEHEGSIDPELRPLMGNRVFGCDDCQLCCPWNKFATPTTAEDFAPRHGLDAAQLAQLMLWEEEDYLRRTEGSAIRRIGYERWLRNLAIALGNAPGEDAVIDALQRRRDHPSALVREHVAWALQRHGVTPGAGSARGSSASR

SEQ ID NO: 77146 - protein, 363 aa, Halioglobus sp.
  misc_feature (1)..(363): tr|A0A3L7E2E6|A0A3L7E2E6_9GAMM Epoxyqueuosine reductase OS=Halioglobus sp. U0301 OX=2283635 GN=queG PE=3 SV=1
MSDSGDPKISVPQASELLQDVRRWAAELGFQQVGVSSVDLGDHEAYLQKWLDAGYHGSMDYMARHGSKRSRPAELVPETCRVISLRMDYLTDDSANAVLASSEKAYISRYALGRDYHKLVRKRLAQLAARIEAEAGGGRFRAFVDSAPVLERALAEQAGLGWIAKNTMLINPEAGSWFFLGEIYTDLPLPETAAQESKHCGTCTACLTACPTDAFVAPFQLDARRCISYLTIEHHGSIDPQLRPLMGNRVFGCDDCQLVCPWTKFAGASGEDDFQPRHGLADAELVALFLWDEDTFLARTAGSPIRRIGYERWLRNLAVGLGNGPATAAAIAALRQRQAHPSALVREHVAWALARLNPKGSGL

SEQ ID NO: 77147 - protein, 310 aa, Haliscomenobacter hydrossis
  misc_feature (1)..(310): tr|F4L4H9|F4L4H9_HALH1 Epoxyqueuosine reductase OS=Hali scomenobacter hydrossis (strain ATCC 27775 / DSM 1100 / LMG 10767 / O) OX=760192 GN=queG PE=3 SV=1
MQTAQTHTTMIRAEAQRLGFDQVGMAKAEFMEEEARHLEQWLQQGMHGQMHYMANHFDKRIDPTQLVPGAKSVISLVYNYYNPAKQEDPTAPKISQYAYGKDYHFVVKDKLKALLHFIQQEIGEVQGRCFVDSAPVLERDWAKRAGLGWIGRNTLLINPKAGSYFFLAELILDLELEYDAPMRDYCGTCRRCIDACPTEAISPEGYLVDGSKCISYLTIELREAIPDEFKGKMDNWMFGCDICQDVCPWNRFSEPHHEPAFAPHPDLLSMRKADWEEITQEVFNQVFQHSAVKRTKWDGLQRNIKFLQEE

SEQ ID NO: 77148 - protein, 377 aa, Halobacillus aidingensis
  misc_feature (1)..(377): tr|A0A1H0V997|A0A1H0V997_HALAD Epoxyqueuosine reductase OS=Halobacillus aidingensis OX=240303 GN=queG PE=3 SV= 1
MDFHQFKEEVIAYSKEIGIDKIGFASADVFGELKARLKRQQELGYQSGFEKGSVQERTEPGRLLPGAQSIISIALAYPSKMHDAPKSKKGDRRGIFCRASWGQDYHDVVRDRLNRLGAFLQEKFPDVELKSMVDTGELSDRAVAERAGIGFSGKNCAVITPEFGSYVYLGELVTNIPFAPDEPVDDSCGDCNICVDACPTDALVQGGQLNANRCIAFLTQTKDFLPDEFRTKIGNRLYGCDTCQTVCPKNRKKDFHNHEEFEPDPEIVKPKLTPLLSISNRQFKEKFGFISGSWRGKKPIQRNAILALAHYRDETAIDELIRLMKEDPRPVIRGTAAWGLGKIGKPECFAAIEEAMGREENEQVLYEMEKGVQFQEQ

SEQ ID NO: 77149 - protein, 377 aa, Halobacillus alkaliphilus
  misc_feature (1)..(377): tr|A0A1I2QGD8|A0A1I2QGD8_9BACI Epoxyqueuosine reductase OS=Halobacillus alkaliphilus OX=396056 GN=queG PE=3 SV =1
MDYHELKEQVIAYSKEIGIDKIGFASADVFGELKARLKRQEALGYQSGFEKGDVDERTDPGRLLPGAQSIISIAMAYPSKMHDAPKSRKGDRRGLFCRASWGEDYHTVLRDRLNKLGAYLQELFPDVELKSMVDTGELSDRAVAERAGIGFSGKNCAIITPEFGSYVYLAELVTNIPFAPDEPVQEGCGDCNICVDACPTGALVQGGQLNAQRCIAFLTQTKDFLPDEFRSKIGNRLYGCDTCQTVCPINRKKDFHHHEEFEPDPEVVKPKLTPLLSISNRQFKEKFGFISGSWRGKKPIQRNAILALAHYRDETSISELIRLMNEDPRPVIRGTAAWGLGKIGTVDCFTAIKDAMINEKDEQVIYEMEKGLQFEKI

SEQ ID NO: 77150 - protein, 377 aa, Halobacillus dabanensis
  misc_feature (1)..(377): tr|A0A1I3SRP1|A0A1I3SRP1_HALDA Epoxyqueuosine reductase OS=Halobacillus dabanensis OX=240302 GN=queG PE=3 SV=1
MDFHQFKEEVIAYSKEIGIDKIGFASADVFGELKSRLKRQEELQYQSGFEKGSVEERTEPVRLLPGAQSIISIALAYPSKMHNAPKSKKGDRRGIFCRASWGQDYHDVLRDRLQRLGAFLQEKFPEVELKSMVDTGELSDRAVAERAGIGFSGKNCAVITPEFGSYVYLGELVTNIPFVPDEPVDDSCGDCNICVDACPTGALIQGGQLNAQRCIAFLTQTKDFLPDEFRTKIGNRLYGCDTCQTVCPKNRKIDFHHHEEFEPDPEVVKPKLTPLLSISNRQFKEKFGFISGSWRGKKPIQRNAILALAHYRDETAVGELIRLMKDDPRPVIRGTAAWGLGKIGKPECFQAIEEAREHEQDEQVLFEMEKGVRFQQQ

SEQ ID NO: 77151 - protein, 377 aa, Halobacillus faecis
  misc_feature (1)..(377): tr|A0A511WVR4|A0A511WVR4_9BACI Epoxyqueuosine reductase OS=Halobacillus faecis OX=360184 GN=queG PE=3 SV=1
MDFHQFKEEVIAYSKEIGIDKIGFASADVFGELKARLKRQQELGYQSGFEKGSVQERTEPGRLLPGAQSIISIALAYPSKMHDAPKSKKGERRGIFCRASWGQDYHDVLRDRLHRLGAFIQEKFPEVELKSMVDTGELSDRAVAERAGIGFSGKNCAVITPEFGSYVYLGELVTNIPFAPDEPVDDSCGDCNICVDACPTDALVQGGQLNANRCIAFLTQTKGFLPDEFRTKIGNRLYGCDTCQTVCPKNRKKDFHNHEEFEPDPEIVKPKLTPLLSISNRQFKEKFGFISGSWRGKKPIQRNAILALAHYRDETAIDELIRLMKEDPRPVIRGTAAWGLGKIGKPECFAAIEEAMGKEEDEQVLYEMEKGVQFQEQ

SEQ ID NO: 77152 - protein, 377 aa, Halobacillus halophilus
  misc_feature (1)..(377): tr|I0JJX2|I0JJX2_HALH3 Epoxyqueuosine reductase OS=Halo bacillus halophilus (strain ATCC 35676 / DSM 2266 / JCM 20832 / NBRC 102448/ NCIMB 2269) OX=866895 GN=queG PE= 3 SV=1
MDYHELKEQVIAYSKEIGIDKIGFASADVFGELKARLKRQEALGYQSGFEKGDVDERTEPGRLLPGAQSIISIAMAYPSKMHDAPKSRKGDRRGLFCRASWGEDYHTVLRDRLNKLGAYLQELFPDVELKSMVDTGELSDRAVAERAGIGFSGKNCAIITPEFGSYVYLAELVTNIPFAPDEPVQEGCGDCNICVDACPTGALVQGGQLNAQRCIAFLTQTKDFLPDEFRSKIGNRLYGCDTCQTVCPINRKKDFHHHEEFEPDPEVVKPKLTPLLSISNRQFKEKFGSISGSWRGKKPIQRNVILALAHYRDETSISELIRLMNEDPRPVIRGTAAWGLGKIGTSDCFTAIKDAMINEKDEQVIYEMEKGLQFEKI

SEQ ID NO: 77153 - protein, 377 aa, Halobacillus karajensis
  misc_feature (1)..(377): tr|A0A024P7X4|A0A024P7X4_9BACI Epoxyqueuosine reductase OS=Halobacillus karajensis OX=195088 GN=queG PE=3 SV=1
MDFHQFKEEVIAHSKEIGIDKIGFASADVFGELKARLKRQQELGYQSGFEKGSVQERTEPGRLLPGAQSIISIALAYPSKMHDAPKSKKGDRRGIFCRASWGQDYHNVLRDRLHRLGAFLQEKFPEVELKTMVDTGELSDRAVAERAGIGFSGKNCAVITPEFGSYVYLGELVTNIPFAPDDPVEDSCGDCNICVDACPTDALVQGGQLNAQRCIAFLTQTKDFLPDEFRTKIGNRLYGCDTCQTVCPKNRKKDFHNHEEFEPDPDVVKPRLTPLLSISNRQFKEKFGFISGSWRGKKPIQRNAILALAHYRDETAIDELIRLMKEDPRPVIRGTAAWGLGKIGNPECFQAIEEAKRLEEDEKVLYEMEKGLQFLEQ

SEQ ID NO: 77154 - protein, 377 aa, Halobacillus litoralis
  misc_feature (1)..(377): tr|A0A410MAQ6|A0A410MAQ6_9BACI Epoxyqueuosine reductase OS=Halobacillus litoralis OX=45668 GN=queG PE=3 SV=1
MDFHQFKEEVIAYSKEIGIDKIGFASADVFGELKARLKRQQELEYQSGFEKGSVEERTEPGRLLPGAQSIISIALAYPSKMHDAPRSKKGDRRGIFCRASWGQDYHNVLRDRLQKLGAFLQEKFPEVELKSMVDTGELSDRAVAERAGIGFSGKNCAVITPEFGSYVYLGELVTNIPFAPDEPVNDSCGECNICVDACPTGALVQGGQLNAQRCIAFLTQTKDFLPDEFRTKIGNRLYGCDTCQTVCPKNRKKDFHNHEELEPDPEVSKPKLTPLLSISNRQFKDKFGFISGSWRGKKPIQRNAILALAHYRDETAIDELVRLMNEDPRPVIRGTSAWGLGKIGKPECFAAIEEAMEREEDEQVLFEMEKGVQFQKQ

SEQ ID NO: 77155 - protein, 377 aa, Halobacillus mangrovi
  misc_feature (1)..(377): tr|A0A1W5ZY77|A0A1W5ZY77_9BACI Epoxyqueuosine reductase OS=Halobacillus mangrovi OX=402384 GN=queG PE=3 SV=1
MDFHKFKEEVIAYSKEIGIDKIGFASADVFGELKARLKRQEALGYQSGFEKGSVNERTEPSRLLPGAQSIISIALAYPSKMHDAPKSRKGDRRGIFCRASWGQDYHDVLRDRLNKLGAFIQEHFPEVELKSMVDTGELSDRAVAERAGIGFSGKNCAVITPEFGSYVYLGELVTNIPFAPDDPVDDSCGDCNICVDACPTGALVQGGQLNAQRCIAFLTQTKGFLPDEFRTKIGNRLYGCDTCQTVCPKNRKKDFHHHQEFEPDPEIVKPKLTPLLSISNRQFKEKFGFISGSWRGKKPIQRNAILALAHYRDETSISELIRLMNDDPRPVIRGTAAWGLGKIGTPECFEAVEKAMAKEDDEQVLYEMEKGLQFAKL

SEQ ID NO: 77156 - protein, 377 aa, Halobacillus salinus
  misc_feature (1)..(377): tr|A0A4Z0H4Q5|A0A4Z0H4Q5_9BACI Epoxyqueuosine reductase OS=Halobacillus salinus OX=192814 GN=queG PE=3 SV=1
MNYHDFKEEVIAYSKEIGIDKIGFASADVFSELKGRLIRQQENSYQSGFEKGTVEERTEPSRLLPGSQSIISIALAYPSKMKDAPKSKKGERRGIFARASWGRDYHDVLRDRLNKLGAYLQEHFPEVELKSMVDTGELSDRAVAERAGIGFSGKNCAIITPEFGSYVYLGEIVTNIPFPPDEPVDDSCGDCNICVDACPTGALVQGGQLNAQRCIAFLTQTKDFLPDEFRTKIGNRLYGCDTCQTVCPKNRKKDFHLHEEFEPDPEVVKPKLIPLLSISNRQFKETFGPISGSWRGKKPIQRNAILALGHYKDETAVDELIRLMNEDPRPVIRGTAAYSLGKIGNEDCYKAIKDAIIKEEDSKVIVEMEKGLEFELQ

SEQ ID NO: 77157 - protein, 377 aa, Halobacillus sp.
  misc_feature (1)..(377): tr|L5NA71|L5NA71_9BACI Epoxyqueuosine reductase OS=Halo bacillus sp. BAB-2008 OX=1246484 GN=queG PE=3 SV=1
MDYQQLKDEVIAYSKEIGIDKIGFAAADVFGELKARLIRQEELGYQSGFEKGSAEERTEPSRLLPGAQSILSIALAYPSKMKDAPKSRKGERRGLFCRASWGQDYHDVLRDRLQKLGEFLKQKVPDAELKMMVDTGELSDRAVAERAGIGFSGKNCAVITPEFGSYVYLGEIVTNIPFAPDEPVDDSCGDCSICVDACPTDALVQGGQLNAQRCIAFLTQTKDFLPDEFRTVIGNRLYGCDTCQTVCPKNRKKDFHNHEEFEPDPEVVKPKLVPLLSISNREFKNTYGSISGSWRGKKPIQRNAILALAHYRDETAVPELIRLMKEDPRPVIRGTSAWALGKIGTEDGREEILKAMEKEENDQVRVEMEKGLQFEKL

SEQ ID NO: 77158 - protein, 380 aa, Halobacillus sp.
  misc_feature (1)..(380): tr|A0A444Q2C4|A0A444Q2C4_9BACI Epoxyqueuosine reductase OS=Halobacillus sp. SKP4-6 OX=2498856 GN=queG PE=3 SV= 1
MDFHQFKEEVIAYSKEIGIDKIGFASADVFGELKGRLIRQQELGYSSGFEKGNVEERTEPGRLLPGAQSIISIALAYPSKMQDAPKSKKGARRGIFCRASWGRDYHDVLRDRLNKLGAFLQEHFPDVELKSMVDTGELADRAVAERAGIGFSGKNCAVITPEFGSYVYLGEIVTNIPFAPDEPVDDSCGDCNICVDACPTGALVEGGQLNAQRCIAFLTQTKDFLPDEFRSKIGNRLYGCDTCQTVCPKNRKKDFHRHEEFEPDPEVAKPLLTPLLSISNREFKETFGPMSGSWRGKKPIQRNAILALGHYRDETAIDELIRLMNHDPRPVIRGTAAWSLGKIGKKDCFEAIKDAIIKEEDEQVIYEMKKGLQFELQYNG

SEQ ID NO: 77159 - protein, 377 aa, Halobacillus trueperi
  misc_feature (1)..(377): tr|A0A3D8VN96|A0A3D8VN96_9BACI Epoxyqueuosine reductase OS=Halobacillus trueperi OX=156205 GN=queG PE=3 SV=1
MDFHQFKEEVIAYSKEIGIDKVGFASADVFGELKARLKRQQELGYQSGFEKGSVQERTEPGRLLPGAQSIISIALAYPSKMHDAPKSKKGDRRGIFCRASWGQDYHDVVRDRLNRLGAFLQEKFPDVELKSMVDTGELSDRAVAERAGIGFSGKNCAVITPEFGSYVYLGELVTNIPFAPDEPVDDSCGDCNICVDACPTDALVQGGQLNANRCIAFLTQTKDFLPDEFRTKIGNRLYGCDTCQTVCPKNRKKDFHNHEEFEPDPEIVKPKLTPLLSISNRQFKEKFGFISGSWRGKKPIQRNAILALAHYRDETAINELIRLMMEDPRPVIRGTAAWGLGKIGKPECFAAIEEAMGREENEQVLYEMEKGVQFQEQ

SEQ ID NO: 77160 - protein, 377 aa, Halobacillus trueperi
  misc_feature (1)..(377): tr|A0A3E0J224|A0A3E0J224_9BACI Epoxyqueuosine reductase OS=Halobacillus trueperi OX=156205 GN=queG PE=3 SV=1
MDFHQFKEEVIAYSKEIGIDKIGFASADVFGELKARLKRQQELGYQSGFEKGSVQERTEPGRLLPGAQSIISIALAYPSKMHDAPKSKKGDRRGIFCRASWGQDYHDVVRDRLNRLGAFLQKKFPDVELKSMVDTGELSDRAVAERAGIGFSGKNCAVITPEFGSYVYLGELVTNIPFAPDEPVDDSCGDCNICVDACPTDALVQGGQLNANRCIAFLTQTKDFLPDEFRTKIGNRLYGCDTCQTVCPKNRKKDFHNHEEFEPDPEIVKPKLTPLLSISNRQFKEKFGFISGSWRGKKPIQRNAILALAHYRDETAIDELIRLMKEDPRPVIRGTAAWGLGKIGKPECFAAIEEAMGREENEQVLYEMEKGVQFQEQ

SEQ ID NO: 77161 - protein, 318 aa, Halobacteriovoraceae bacterium
  misc_feature (1)..(318): tr|A0A2E3W1L7|A0A2E3W1L7_9PROT tRNA epoxyqueuosine(34) reductase QueG OS=Halobacteriovoraceae bacterium OX=202 6745 GN=queG PE=4 SV=1
MSLLNLSDEFLKGIQIVDWGYTEASTPVTFNHFDKWAQSGLDGGLKYLTDHRKDLRKDLKEVFPEFKSALVFLFEYASEKKRLQESDSPLKIASYVTGFDGMDYHHWIREKLDSITAKLSEELSDLETFYSIDAQPVLERDLAYRAGLGWFGKNSMLISKKHGSYFIIGTLLLNQKLSLPTKLSVEPDHCGNCTACIDHCPTDAIVANKVVDASKCISTYTIEMFKEAQAPKGYPSQSNEVFGCDICQEVCPWNNKPLKRVEASEEVDWVKFFERNPKLILSELEDMSNRQYRKKFKGTPLERTGIVGMIKNLNKLKS

SEQ ID NO: 77162 - protein, 321 aa, Halobacteriovoraceae bacterium
  misc_feature (1)..(321): tr|A0A2E4DC94|A0A2E4DC94_9PROT tRNA epoxyqueuosine(34) reductase QueG OS=Halobacteriovoraceae bacterium OX=202 6745 GN=queG PE=4 SV=1
MKDLFSLTPENLQTMQIVDWGYTEQMQATSFDKLQNWVENNEHEPLGYLADERMLKRKNLELIYPFAKSAFVFLFDYTSSKKSLEELAPENKVASYALGFEDQDYHYWIQEKLHLIQAELKKEVGEFEFGISLDIHPVLERDLAYRSGLGWFGKNSMLISRSLGSYFLIGSIIIDRKLNLNQRELETDHCGSCTRCLEACPTKAINNDRTVNAKKCISTYTIELFKDAPAPEGYPTATHEVFGCDICQEVCPWNLKPMARADETQFSENSLIEFFNRPIEVIYDQVNQMSNREYKRFFAKTSLERLGKKGLLKNLDKFITD

SEQ ID NO: 77163 - protein, 342 aa, Halobacteriovorax marinus
  misc_feature (1)..(342): tr|A0A1Y5FCK3|A0A1Y5FCK3_9PROT Uncharacterized protein OS=Halobacteriovorax marinus OX=97084 GN=A9Q84_09535 PE =4 SV=1
MKNQLIREVLNDSLFKKFDIVDWGCTTDPRPVTWEHFSAWVEKGHNGILKYLEGDRKEKRESIKNYFPEFESALVFQFSYADQKFALDNFYNSSESNGLKVAGYVMGFDGVDYHHVLKERLDAIGKLIQAVDPEVEYKISLDIHPVLERDLAYRAGLGFFGKNSMFISKSKGSFFLLGSLLLSKDYDFESKPIETDHCGSCTRCIDACPTVAIDPNTRTIISDKCISTYTIELFKDLGEAPVGMENSDGEVFGCDICQDVCPWNKRLLRINRDVDREESKSETYQSIMDFFLKRPIAKIIEDLEALSNRKFQKLFFGTPLQRTGRVGLLKNIRFFSNKSKKS

SEQ ID NO: 77164 - protein, 339 aa, Halobacteriovorax marinus
  misc_feature (1)..(339): tr|E1X5H0|E1X5H0_HALMS Putative 4Fe-4S binding protein OS=Halobacteriovorax marinus (strain ATCC BAA-682 / DSM 15412 / SJ) OX=862908 GN=yjeS PE=4 SV=1
MRERLLKEVLNSENLKKYGIVDWGVTTESRPKTWKYYYSWVEKGLNGILKYLEGERRDKREDLRKYYPEFKSAIVFQFSYANKKYELDKFYKSPLSNGLKIASYVLGFGGVDYHFKLREALEDIAHQIKAIDPTLDYKLSLDTQPILERDLAFRAGLGWFGKNSMFISKSEGSFFILGSLLLSKDYELSQRELEVDHCGQCTRCADSCPTLAIDIETRTLNSNLCISTYTIEDFKGVQEAPKGMEDSNGEIFGCDICQEVCPWNKRLLRVGKVSINENEISDKEREMREFFLERAPEDVILDLENMSNRGFQRKFKSTPIERTGRVGLLKNLRFFSGKR

SEQ ID NO: 77165 - protein, 328 aa, Halobacteriovorax sp.
  misc_feature (1)..(328): tr|A0A2E6H022|A0A2E6H022_9PROT Uncharacterized protein OS=Halobacteriovorax sp. OX=2020862 GN=CME70_03745 PE=4 SV=1
MRKLLDLDQKLLEDLGIVDWGYTEEAVPKSFDRYESWVEKGNHGPLGYLSDHRKDLRKSLEAVKENFESAIVFLFSYAPEKAALEKFYKSKDSNGLKVAGYSVSFEGHDYHYKIKEKLELLGHKIDKPFKISLDIQPVLERDLAYRSGLGWFGKNSMLINRKKGSFNMIGALLFEEKLPISKQPIETDHCGQCTACFDICPTDAIDLPNRQIIANKCISTFTIELFKESEAPVGYDKADEIFGCDLCQDICPWNKRMEREGEFSIDHSWPTQRSKELVEFFLARPPLEIKNELESMSNKAYIRKFKGTSFERTGRLGLLKNLKKFFAL

SEQ ID NO: 77166 - protein, 330 aa, Halobacteriovorax sp.
  misc_feature (1)..(330): tr|A0A4Z0KWD4|A0A4Z0KWD4_9PROT tRNA epoxyqueuosine(34) reductase QueG OS=Halobacteriovorax sp. Y22 OX=2505978 GN=queG PE=4 SV=1
MIKRDDIQNILNGQGLKVWGVVSESKPKSLDRFKKWVSDGLYGALGYLADERAIKREDLKNYYPDIKSTLVIAFDYSHIARSAKKFYESSESNGLKIANYVVGFKGRDYHYEVRDKLQAIGEELQKLDPNLEFKFSLDTQPILERDFAYQSGLGWYGKNSMLINRHIGSYFIIGSLLLNKEVEAPNDKFETDHCGQCTRCADACPTDAIDLEKRTIVADKCISTFTIEHFKDIQAPEGFDKARGEFFGCDICQDVCPWNKRLERKLESDSEAFKESGRQFIDFFLTRPVDEIINDLEAMSNREYRRQFKGTPLERTGRVGMLKNLRYYLD

SEQ ID NO: 77167 - protein, 374 aa, Halobacteroides halobius
  misc_feature (1)..(374): tr|L0K5R4|L0K5R4_HALHC Iron-sulfur cluster binding prot ein, putative OS=Halobacteroides halobius (strain ATCC 35273 / DSM 5150 / MD-1) OX=748449 GN=Halha_0327 PE=4 S V=1
MKLKSKINQYATKLGIDKIGITTTDDFSRLRDFLYKMREKEFLSKFVKKDLELITDPKEVLSNAKSVIVCAISYQVDDVYITESKEKTTKELRGKLSRFAWGQDYHHVLGKKLDKLVQFLQREEENLKAKTFVDTGPTIDRALARRAGIGWQGKNCSIINPEYGSWIFIGGIITNLDLEIDQPIEDQCGDCRKCLDACPTGALKAPYTLDSRKCLGYLTLKRGYIDRDNRKKFGTRLWGCDTCQEVCPSNQEVEIGDHKEFRPQKLAAYPKLPQLLSLTKSEYRDKFGPTPMNWRGKRPIQRNAAIILGNLGDKEAVPYLIEALEDPKPIVRAHAAWALAEIGDGSVVDDLKKVLVKEKEERVKEEVQEAINQF

SEQ ID NO: 77168 - protein, 373 aa, Halocella sp.
  misc_feature (1)..(373): tr|A0A3S9H2C1|A0A3S9H2C1_9FIRM tRNA epoxyqueuosine(34) reductase QueG OS=Halocella sp. SP3-1 OX=2382161 GN=que G PE=4 SV=1
MWILAGERVDIMPNLAKIIKKKAINIGFDLVGITSAEPFEDTAKRLNNRKLSSFIKNDIELLTKPRLHLPSARSIIAVALSYASSQKYNGDCYISIYARGRDYHHVMKNKLEKLMGFIREIVPGVDMLAYSDTGPLLDRMIASRAGLGWIGKNNNLINPVYGSYLFLGEILTNLELEHNQPLNNQCCDCNLCIKNCPSSALMEAYHLKADRCISYLTQKKGIIPEEEREVINNHLWGCDNCQDFCPYNKNVPTDLHEEFTPLLKAELSEILRIDNLAERDLWTNSALYWRGPRILKRNAIINIANNGDRCYLSDLIQKIDDPSPIIRFYTAWAVGKIASKEYIKTLNNRLLEEKDKDVRNELKKAINRIKRRI

SEQ ID NO: 77169 - protein, 327 aa, Halocynthiibacter arcticus
  misc_feature (1)..(327): tr|A0A126V780|A0A126V780_9RHOB Epoxyqueuosine reductase OS=Halocynthiibacter arcticus OX=1579316 GN=RC74_07175 PE=4 SV=1
MGVCRPDSIPEIAARLEAFVSKERHGQMSWMAERMHWRGAPDALWPEAKSVIMLAEPYTQTHDPRHVLSKRDCGAISVYAQNRDYHDIVKKRLKRVGRWLLEQDPDAQIKVFVDTAPVMEKPLAASAGLGWQGKHTNLLSRDLGSWFFLGAIFTTIELPVDSPARENCGSCTSCLDACPTKAFPAPFQLDARRCISYLTIEHHGPVDEELRALMGNHIYGCDDCLAACPWNKFAVEAQELRYAAKDDLIAPPLDVLVTLTDTQFREKFSGSPIKRIGRNRFIRNVLYAIGNSGETRFRPAIEPLLSDDDAVVRDAAIWAKARLSMVS

SEQ ID NO: 77170 - protein, 392 aa, Halolactibacillus alkaliphilus
  misc_feature (1)..(392): tr|A0A511X1S7|A0A511X1S7_9BACI Epoxyqueuosine reductase OS=Halolactibacillus alkaliphilus OX=442899 GN=queG PE =4 SV=1
MAYDELKQTIIDYAHSIGIDKIGFGSIDPFTQMKARLKAQQDQNYQSGFEKGTIEERTEPAMHLAGAESIIAVALSYPSRMRERPENKKGARRGTVCRASWGVDYHVVLNDKLQQLHAFLAEKVPGFRSKIMVDTGELPDRAVAERAGIGFSGKNCAIITPEFGSYVYLGEMITNIPLEPDDMLEDACGDCTKCIDACPTGALVGPGQLNAKNCIAYLTQTKDFLPDQFREKLGNQLYGFDTCQLVCPYNKGVDFHLHEAFEPKPELAKPELLPLLTISNREFKETFGEMSGAWRGKKPLQRNAILALGHYREVASLETLEELMTKDPRPVIRGTAAYAIGKIGHVDSYLMIERAKVKETDPEVIEEMDKGLRFEKVYREKGKIKIDQIKPD

SEQ ID NO: 77171 - protein, 395 aa, Halolactibacillus halophilus
  misc_feature (1)..(395): tr|A0A1I5MVF4|A0A1I5MVF4_9BACI Epoxyqueuosine reductase OS=Halolactibacillus halophilus OX=306540 GN=SAMN05421 839_106110 PE=4 SV=1
MAYGTLKQDIIDYAKQIGIDTIGFGSVDPFTQMKARLKAQQEKNYQSGFEKGTIEERTEPALHLTGAESIISIALAYPSRMRDRPENKSGTRRGNVCRASWGVDYHVVLNDKLNQLHAYLEERIPGFRSKIMVDTGELPDRAVAERAGIGFSGKNCSIITPEFGSYVYLGEMITNIPLEPDTMLEDGCGDCTKCIDACPTGALVGPGQLNTANCIAFLTQTKDYLPDEFRSVLGNQLYGFDTCQLVCPYNKGVDFHLHADFEPKPDLAKPELLSLLTISNREFKETFGEMAGSWRGKKPLQRNAILALGHYREVSSIETLATLMRKDPRPVIRGTAAFSIGKIGREDSYALIREAMTKEEDETVRLEMEKGLQFEAIYLEKGKIKAASAQAQLET

SEQ ID NO: 77172 - protein, 389 aa, Halolactibacillus miurensis
  misc_feature (1)..(389): tr|A0A1I6TMZ0|A0A1I6TMZ0_9BACI Epoxyqueuosine reductase OS=Halolactibacillus miurensis OX=306541 GN=SAMN054216 68_11653 PE=4 SV=1
MAYNTLKQDIIDYAEKIGIDKIGFGSVDPFTQMKARLKAQQEKNYQSGFEKGTIEERTEPAMHLTGAESIISIALAYPSRLTDRPANKRGARRGNVCRASWGVDYHVVLNEKLNRLHAFLENRVPGFRSKIMVDTGELPDRAVAERAGIGFSGKNCSIITPEFGSYVYLGEMITNIPLEPDEMLEDGCGDCTKCIDACPTGALVGPGQLNTTNCIAFLTQTKDYLPDEFRSVLGNQLYGFDTCQLVCPYNKGVDFHLHEAFEPKPDLAKPELLPLLTISNREFKETFGEMAGSWRGKKPLQRNAILALGHYREVSSIETLATLMRKDPRPVIRGTAAFAIGKIGREDSYELIREAMIKEEDATVMKEMEKGLEFEAIYADNGKLKARTE

SEQ ID NO: 77173 - protein, 314 aa, Halomicronema excentricum
  misc_feature (1)..(314): tr|A0A4Q7E4P6|A0A4Q7E4P6_9CYAN Epoxyqueuosine reductase OS=Halomicronema excentricum str. Lakshadweep OX=22940 35 GN=queG PE=3 SV=1
MTLDIDVIRQQAHHVGFHRVGIARIDHSQPAAIAANTALQNWLHQGYQADMAWMSNPKRQDIQQVMPGVRSLICVALNYYTPHQHSDNAQHGKISRYGWGRDYHRVMQKKLKALSEWLRSHHPDIQTRFYVDTGPVSDKFWAQQAGIGWIAKNGNVITRDYGSWVFLGEILTNLDLPADTPHTAHCGTCTRCIEACPTDAIAAPFVVDANRCIAYHTIENRDPTLPPNIAQNLHGWVAGCDICQDVCPWNQRFAQPTDVKDFQPYPDNVAPNLAELTNLSEVDWNRRFPASALRRIKPSMWRRNARAAQQSRPS

SEQ ID NO: 77174 - protein, 316 aa, Halomicronema hongdechloris
  misc_feature (1)..(316): tr|A0A1Z3HSC7|A0A1Z3HSC7_9CYAN Epoxyqueuosine reductase OS=Halomicronema hongdechloris C2206 OX=1641165 GN=que G PE=3 SV=1
MSALTAEAIKQQAKTLGFHRVGIAAVPPPEAEGEAIAQMRTALQRWLTQGYQADMAWMANPKRQDIHQVMPEVRSLVCVALNYYTDHERPPGDAYGKISRYGWGRDYHRVMTQKLKALVGWMRSQAPSSQLRYYVDTGPVQDKFWAQQAGLGWIAKNGNLITRDYGSWVFLGEILSDLELAADRPHTEHCGSCTRCLEACPTNAIPHPFVVDANRCIAYHTIENRADTLPAEIQKNLHNWVAGCDICQDVCPWNQRFAQETDTVEFRPYPENVAPSLAELATLSEAEWNRRFTASALRRIKPEMWRRNARAALGNP

SEQ ID NO: 77175 - protein, 370 aa, Halomonadaceae bacterium
  misc_feature (1)..(370): tr|A0A139CBV3|A0A139CBV3_9GAMM Epoxyqueuosine reductase OS=Halomonadaceae bacterium T82-2 OX=1783518 GN=queG P E=3 SV=1
MSASQSSSVREPIDLDTLAERIKQWGRELGFQQIGITDTDLESHEHHLERWLAAGHHGEMDYMARHGTKRTRPAELVPGTLRVISARMDYLPPEVETTQVLGRPEKAYVSRYALGRDYHKLIRKRLAELAKRIEAEVGAFGYRAFVDSAPVMERALAQKAGLGWFGKNAMLLNPRAGSLFFLGELYTDLPLPVDAPFEGEHCGSCSACRTACPTGAIVDDKVVDSRRCISYLTIELHGSIPERYREAIGNRVYGCDDCQLVCPFTRFTRVSREGDFAPRHDLDRADLLTLFAWSEAEFLDRTAGSAIRRIGYERWLRNLAVGLGNAPWSRAVEAALRARLAYPSDLVREHVRWALARQRDKRQARIASDA

SEQ ID NO: 77176 - protein, 367 aa, Halomonas aestuarii
  misc_feature (1)..(367): tr|A0A1J0VDD3|A0A1J0VDD3_9GAMM Epoxyqueuosine reductase OS=Halomonas aestuarii OX=1897729 GN=queG PE=3 SV=1
MTPVPPPGDEPDMAALAETIKTWGRELGFQQLGITDVDLAEDEAHLEAWLAAGHHGEMGFMAKHGTKRTRPEELVPGTRRVISVRLDYLPAEVETTKVLGRPSLAYVSRYATGRDYHKLMRKRLATLAKWIEAEVGAFGYRAFVDSAPVMERALARKAGLGWFGKNAMLLNPRAGSLFFLGELYTDLPLPVDEPFETDHCGSCSACRTACPTQAIVEDRVVDARACISYLTIELFGAIPERYREAMGNRVFGCDDCQLVCPYTRFTRVSREGDFAPRHDLDRASLVSLFAWSEEEFLEKTAGNPIRRIGYERWLRNLAVGLGNAPWSRAVEAALMARLPYPSDLVREHVRWALDRQREKRRQRIASA

SEQ ID NO: 77177 - protein, 377 aa, Halomonas alkaliantarctica
  misc_feature (1)..(377): tr|A0A4R7YQC2|A0A4R7YQC2_9GAMM Epoxyqueuosine reductase OS=Halomonas alkaliantarctica OX=232346 GN=queG PE=3 S V=1
MSNSTAFARSDGAMTDQKLARLADLIKIWGRELGFQQVGITDTELSAHEDHLDAWLEKGYHGEMGFMAKHGTKRTRPEELEPGTQRIISVRMDYLPAEVESTKVLGQPSRAYVSRYALGRDYHKLIRKRLALLAKKIEQEVGDFGYRAFVDSAPVMERALAQKAGLGWFGKNAMLLNPKAGSLFFLGELYTDLPLPIDAPFEHEHCGSCSACRTACPTGAIVDDKVVDSRKCISYLTIELHGAIPVEFRRAMGNRIYGCDDCQLVCPFTRFTHITQEDDFAPRHDLDRASLISLFGWGEAEFLDKTAGSPIRRIGYQRWLRNIAIGLGNAPWSEAVEAALWARRAYPSALVREHVAWALEEQRRKHGERIATDTCSS

SEQ ID NO: 77178 - protein, 370 aa, Halomonas alkaliphila
  misc_feature (1)..(370): tr|A0A386X2L8|A0A386X2L8_9GAMM Epoxyqueuosine reductase OS=Halomonas alkaliphila OX=272774 GN=queG PE=3 SV=1
MQNSTTFSLSDDDLTRLAALIKTWGRELGFQQVGITDTQLAAHEKHLDAWLEKGHHGDMSFMAKHGTKRTRPEELEPGTQRVISVRMDYLPAEVESTKVLGQPSRAYVSRYALGRDYHKLMRKRLAQLAKKIEQQVGAFGYRAFVDSAPVMERALAQKAGLGWFGKNAMLLNPKAGSLFFLGELYTDLPLPIDAPFTQEHCGSCSACRTACPTGAIVDDKVVDSRKCISYLTIELHGAIPTEFRRAMGNRIYGCDDCQLVCPFTRFTRVTQEDDFAPRHDLDRADLLSLFAWGEDEFLDKTAGSPIRRIGYERWLRNLAIGLGNAPWSRAVEAALWARRAYPSSLVREHVAWALEEQRLKRGAKIATDGA

SEQ ID NO: 77179 - protein, 372 aa, Halomonas andesensis
  misc_feature (1)..(372): tr|A0A3S0W9S3|A0A3S0W9S3_9GAMM Epoxyqueuosine reductase OS=Halomonas andesensis OX=447567 GN=queG PE=3 SV=1
MQSFTTFSLSDDDLTRLASLIKTWGRELGFQQVGITDTQLAVHETYLDAWLENGYHGDMGFMAKHGTKRTRPEELEPGTQRVISVRMDYLPAEVESTKVLGQPSRAYVSRYALGRDYHKLMRKRLAQLAKNIEQEVGAFGYRAFVDSAPVMERALAQKAGLGWFGKNAMLLNPKAGSLFFLGELYTDLPLPVDEPFTQEHCGSCSACRTACPTGAIVDDKVVDSRKCISYLTIELHGAIPTEFRRAMGNRIYGCDDCQLVCPFTRFTRITQEDDFAPRHDLDRAELIHLFAWGEDEFLDKTAGSPIRRIGYERWLRNLAIGLGNAPWSRAVEAALWSRRAYPSSLVREHVAWALAEQRLKQEARIETSLISE

SEQ ID NO: 77180 - protein, 370 aa, Halomonas anticariensis
  misc_feature (1)..(370): tr|S2L9A3|S2L9A3_HALAF Epoxyqueuosine reductase OS=Halo monas anticariensis (strain DSM 16096 / FP35) OX=112193 9 GN=queG PE=3 SV=1
MSSLTTALDATDLSALADSIKTWGRELGFQQVGITDTDLETHERYLERWLAAGHHGEMDFMAKHGYKRTRPNELIPGTLRVISVRMDYLPPEVETTKVLGQPDKAYVSRYALGRDYHKLIRKRLARLAQYIEDEVGPFGYRAFVDSAPVMERALAQKAGLGWFGKNSMLLNPQAGSLFFLGELYTDLPLPVDEPFDSEHCGSCSACRTACPTGAIVDDKVVDSRRCISYLTIELHGSIPEAYREAIGNRVYGCDDCQLVCPFTRFTRASHERDFAPRHDLDRAELVTLFAWSEEEFLTKTEGSAIRRIGYERWLRNLAVGLGNAPWSETVEAALRARLAYPSDLVREHVHWALERQREKRERLIAVSRKP

SEQ ID NO: 77181 - protein, 384 aa, Halomonas aquamarina
  misc_feature (1)..(384): tr|A0A1H8FI11|A0A1H8FI11_9GAMM Epoxyqueuosine reductase OS=Halomonas aquamarina OX=77097 GN=queG PE=3 SV=1
MPSSTTFSLSRNQPSREHPTHERLSAEQLRQLAALIKQWGRELGFQQVGITDTDLNDHETHLTNWLDKGYHGEMGFMAKHGTKRTRPDELEPGTRRVISVRMDYLPAEVESAKVLGQPSRAYVSRYALGRDYHKLMRKRLAQLAKHIEQEVGKFGFRAFVDSAPVMERALAQKAGLGWFGKNAMLLNPKAGSLFFLGELYTDLPLPVDAPFAQEHCGSCSACRTACPTGAIVDDKVVDSRKCISYLTIELHGAIPVEYRRAMGNRVYGCDDCQLVCPFTRFTKITQEEDFSPRHDLDRASLIALFSWGEEEFLDKTAGSPIRRIGYERWLRNLAVGLGNAPWSDAVEAALWARRAYPSALVREHVAWALDEQRHKRDARIATRA

SEQ ID NO: 77182 - protein, 363 aa, Halomonas arcis
  misc_feature (1)..(363): tr|A0A1G9ZEB3|A0A1G9ZEB3_9GAMM Epoxyqueuosine reductase OS=Halomonas arcis OX=416873 GN=queG PE=3 SV=1
MLSDDTLADLAELIKTWGRELGFQQVGITDTQLDAHEAHLNAWLDKGYHGEMSFMAKHGTKRTRPAELEPGTQRVICVRMDYLPAEVESTKVLGQPNRAYVSRYALGRDYHKLMRKRLAQLAKQIEHEVGAFGYRAFVDSAPVMERALAQKAGLGWFGKNAMLLNPKAGSLFFLGELYTDLPLPVDAPFEEEHCGSCSACRTACPTGAIVDDKVIDSRKCISYLTIELHGAIPTEYRRAMGNRIYGCDDCQLVCPFTRFTRVTQEEDFAPRHDLDRASLIRLFAWGEEEFLAKTAGSPIRRIGYERWLRNIAVGLGNAPWSEALEAALWSRRAYPSALVREHVAWALEEQRLKRATRIATDVS

SEQ ID NO: 77183 - protein, 336 aa, Halomonas axialensis
  misc_feature (1)..(336): tr|A0A455V442|A0A455V442_9GAMM Epoxyqueuosine reductase OS=Halomonas axialensis OX=115555 GN=queG PE=3 SV=2
MPSSTTFSLSRNQPSREHPTHERLSAEQLRQLAALIKQWGRELGFQQVGITDTDLNDHESHLTNWLDKGYHGEMGFMAKHGTKRTRPDELEPGTRRVISVRMDYLPAEVESAKVLGQPNRAYVSRYALGRDYHKLMRKRLAQLAKHIEQEVGKFGFRAFVDSAPVMERALAQKAGLGWFGKNAMLLNPKAGSLFFLGELYTDLPLPVDAPFAQEHCGSCSACRTACPTGAIVDDKVVDSRKCISYLTIELHGAIPVEYRRAMGNRVYGCDDCQLVCPFTRFTKITQEEDFSPRHDLDRASLIALFSWGEEEFWTKPQAAPFAALAMSAGYVILPSG

SEQ ID NO: 77184 - protein, 369 aa, Halomonas beimenensis
  misc_feature (1)..(369): tr|A0A291PA53|A0A291PA53_9GAMM Epoxyqueuosine reductase OS=Halomonas beimenensis OX=475662 GN=queG PE=3 SV=1
MTQPSPQGDAPDLHRLAERIKTWGRELGFQQVGITDVDLAEDEARLQRWLDAGHHGEMGFMAKHGTKRTRPEELVPGTARVISVRLDYLPAEVETTKMLARPEKAYVSRYAVGRDYHKLMRKRLATLAKWIQSEAGPFGYRAFVDSAPVMERALARKAGLGWFGKNAMLLNPKAGSLFFLGELYTDLPLPVDAPFEAEHCGSCSACRTACPTDAIVEDRVVDARRCISYHTIELFGPIPEEFRAAMGNRVFGCDDCQLVCPFTRFARVSREADFAPRHDLDRAELTALFAWSEEEFLDKTAGSPIRRIGYERWLRNLAVGLGNAPWSESVEAVLRARLPYPSDLVREHVRWALDRQREKRERLIATESA

SEQ ID NO: 77185 - protein, 364 aa, Halomonas boliviensis
  misc_feature (1)..(364): tr|A0A265DXY2|A0A265DXY2_9GAMM Epoxyqueuosine reductase OS=Halomonas boliviensis LC1 OX=1072583 GN=queG PE=3 S V=1
MTDQKLAHLADLIKTWGRELGFQQVGITDTELSVHEAHLDTWLENGYHGEMGFMAKHGTKRTRPGELEPGTQRIISVRMDYLPAEVESTKVLGQPSRAYVSRYALGRDYHKLIRKRLALLAKKIEQEVGDFGYRAFVDSAPVMERALAQKAGLGWFGKNAMLLNPKAGSLFFLGELYTDLPLPIDAPFEHEHCGSCSACRTACPTGAIVDDKVVDSRKCISYLTIELHGAIPVEFRRAMGNRIYGCDDCQLVCPFTRFTRITQEDDFAPRHDLDRASLISLFCWGEAEFLDKTAGSPIRRIGYQRWLRNIAIGLGNAPWSEAVEAALWARRAYPSTLVREHVAWALDEQRLKRDKRIATDILSS

SEQ ID NO: 77186 - protein, 364 aa, Halomonas campaniensis
  misc_feature (1)..(364): tr|A0A246S4X7|A0A246S4X7_9GAMM Epoxyqueuosine reductase OS=Halomonas campaniensis OX=213554 GN=queG PE=3 SV=1
MTDQKLARLADLIKIWGRELGFQQVGITDTELSAHEAHLDAWLEEGYHGEMGFMAKHGTKRTRPAELEPGTQRIISVRMDYLPAEVESTKVLGQPSRAYVSRYALGRDYHKLIRKRLALLAKKIEQEVGEFGYRAFVDSAPVMERALAQKAGLGWFGKNAMLLNPKAGSLFFLGELYTDLPLPIDAPFEHEHCGSCSACQTACPTGAIVDDKVVDSRKCISYLTIELHGAIPVEYRRAMGNRIYGCDDCQLVCPFTRFTRTTQENDFAPRHDLDRASLISLFAWGEEEFLDKTAGSPIRRIGYERWLRNIAIGLGNAPWSVAVESALWARRAYPSELVREHVDWALEEQRLKRGKRIATDIHSS

SEQ ID NO: 77187 - protein, 370 aa, Halomonas campaniensis; identical to SEQ ID NO: 77178
  misc_feature (1)..(370): tr|A0A060B850|A0A060B850_9GAMM Epoxyqueuosine reductase OS=Halomonas campaniensis OX=213554 GN=queG PE=3 SV=1

SEQ ID NO: 77188 - protein, 369 aa, Halomonas caseinilytica
  misc_feature (1)..(369): tr|A0A1M6MDT6|A0A1M6MDT6_9GAMM Epoxyqueuosine reductase OS=Halomonas caseinilytica OX=438744 GN=queG PE=3 SV=1
MSQPSAQGDASPDLQALADSIKTWGRELGFQQVGITDVDLAEDEARLQRWLDLGHHGEMHFMAKHGTKRTRPEELVPGTVRVISVRLDYLPPEVETTRMLARPEKAYVSRYAVGRDYHKLMRKRLATLAKQIQDEIGPFGYRAFVDSAPVMERALARKAGLGWVGKNAMILNPKAGSLFFLGELYTDLPLPVDPPYEGAHCGSCSACRTGCPTDAIVEDRVVDSRRCISYLTIELHGAIPEEFRAAMGNRVFGCDDCQLVCPFTRFTRASRERDFAPRHDLDRADLVSLFAWSEEEFLDKTAGSPIRRIGYERWLRNLAVGLGNAPWSESVESALRARLPYPSDLVREHVRWALARQRAKRTDMIAVEA

SEQ ID NO: 77189 - protein, 387 aa, Halomonas chromatireducens
  misc_feature (1)..(387): tr|A0A120JVQ3|A0A120JVQ3_9GAMM Epoxyqueuosine reductase OS=Halomonas chromatireducens OX=507626 GN=queG PE=3 S V=1
MRNGAFANPPSTHLPGFFSIMTLPATLDDSALAALADTIKTWGRELGFQQVGITDVDLADDERYLQRWLDAGHHGEMGFMAKHGTKRTRPEELIPGTIRVVSVRLDYLPADVESAKVLGQPDTAYVSRYAVGRDYHKLMRKRLATLAKWIEEKAGPYGYRAFVDSAPVMERALARKAGLGWVGKNAMLLNPRAGSLFFLGELYVDLPLPVDPPFESEHCGSCSACRTACPTGAIVEDRVVDARACISYLTIELFGAIPERYREAMGNRVFGCDDCQLVCPFTRFTHATQEADFAPRHDLDRASLVSLFAWGEEEFLEKTAGSPIRRIGYERWLRNLAVGLGNAPWSETVEAALRARLAYPSDLVREHVRWALMRQIEKRRQLISRQI

SEQ ID NO: 77190 - protein, 366 aa, Halomonas cupida
  misc_feature (1)..(366): tr|A0A1M7EP31|A0A1M7EP31_9GAMM Epoxyqueuosine reductase OS=Halomonas cupida OX=44933 GN=queG PE=3 SV=1
MSTPSAITDNDLGALALRIKTWGRELGFQQLGITDVDLAEDEQRLERWLDAGYQGEMHFMAKHGRKRTRPAELEPGTVRVISVRLDYLPPEVETTKVLGQPAKAYVSRYATGRDYHKLMRKRLQTLARRIEAEVGPIGYRAFVDSAPVMERALARKAGLGWFGKNAMLLNPKAGSLFFLGELYTDLPLPVDEPFETEHCGSCNACRTACPTGAIVEDQVVDARACISYLTIELFGAIPEQYRAAMGNRVFGCDDCQLVCPFTRFTRASSEPDFAPRHDLDRAELVTLFGWSETEFLERTAGSPIRRIGYERWLRNLAVGLGNAPWSPTVEAALLVRLAYPSDLVREHVRWALKRQREKRQETIAVG

SEQ ID NO: 77191 - protein, 355 aa, Halomonas daqiaonensis
  misc_feature (1)..(355): tr|A0A1H7U335|A0A1H7U335_9GAMM Epoxyqueuosine reductase OS=Halomonas daqiaonensis OX=650850 GN=queG PE=3 SV=1
MSGLAERIKTWGRELGFQQVGITDVDLAEDERYLQRWLAAGHHGEMGFMAKHGTKRTRPEELVPGTVRVISVRLDYLPAEVETTKVLGQPETAYVSRYATGRDYHKLMRKRLATLAKWMEAEVGSFGYRAFVDSAPVMERALARKAGLGWFGKNAMLLNPKAGSLFFLGELYTDLPLPVDAPFEGDHCGSCNACRTACPTGAIVEDRVVDARACISYLTIELFGSIPERYREAMGNRVFGCDDCQLVCPFTRFTRASREADFAPRHDLDRASLVSLFAWGEEEFLEKTAGSPIRRIGYERWLRNLAVGLGNAPWSEAVESTLMARLPYPSDLVREHVRWALARQREKRQRLIASG

SEQ ID NO: 77192 - protein, 366 aa, Halomonas daqingensis
  misc_feature (1)..(366): tr|A0A1H5TNX9|A0A1H5TNX9_9GAMM Epoxyqueuosine reductase OS=Halomonas daqingensis OX=419596 GN=queG PE=3 SV=1
MTLPAILQDSALDQLATTIKTWGRELGFQQVGIADVDLAEDERHLQRWLEAGYHGEMGFMAKHGSKRTRPEELVPGTLRVISVRLDYLPAEVESAKVLGQPQTAYVSRYAVGRDYHKLMRKRLATLAKWIEDEIGPFGYRAFVDSAPVMERALARKAGLGWVGKNAMLLNPRAGSLFFLGELYVDLPLPVDPPFDGEHCGSCSACRTACPTGAIVEDKVVDARACISYLTIELFGAIPERYREAMGNRVFGCDDCQLVCPFTRFTRATQEEDFAPRHDLDRASLVSLFAWGEEEFLDKTAGSPIRRIGYERWLRNLAVGLGNAPWSESVEAALHARLAYPSDLVREHVRWALERQREKRDRLIASI

SEQ ID NO: 77193 - protein, 375 aa, Halomonas elongata
  misc_feature (1)..(375): tr|A0A329Q6W7|A0A329Q6W7_HALEL Epoxyqueuosine reductase OS=Halomonas elongata OX=2746 GN=queG PE=3 SV=1
MSQPSAQGDASPDLQALAESIKTWGRELGFQQVGITDVDLAEDEARLQRWLDAGHHGEMHFMAKHGTKRTRPEELVPGTVRVISVRLDYLPPEVETTRMLARPEKAYVSRYAVGRDYHKLMRKRLATLAKQIQDEIGPFGYRAFVDSAPVMERALARKAGLGWVGKNAMILNPKAGSLFFLGELYTDLPLPVDPPYEGAHCGSCNACRTGCPTDAIVEDGVVDSRRCISYLTIELHGAIPEEFRAAMGNRVFGCDDCQLVCPFTRFTRVSRERDFAPRHDLDRADLVSLFAWSEEEFLDKTAGSPIRRIGYERWLRNLAVGLGNAPWSESVESALRARLAYPSDLVREHVRWALERQREKRNDVIAVEASPLTQH

SEQ ID NO: 77194 - protein, 375 aa, Halomonas elongata; identical to SEQ ID NO: 77193
  misc_feature (1)..(375): tr|E1V683|E1V683_HALED Epoxyqueuosine reductase OS=Halo monas elongata (strain ATCC 33173 / DSM 2581 / NBRC 155 36 / NCIMB 2198 / 1H9) OX=768066 GN=queG PE=3 SV=1

SEQ ID NO: 77195 - protein, 367 aa, Halomonas endophytica
  misc_feature (1)..(367): tr|A0A2N7U077|A0A2N7U077_9GAMM Epoxyqueuosine reductase OS=Halomonas endophytica OX=2033802 GN=queG PE=3 SV=1
MTPPAPLDDTELANLADTIKTWGRELGFQQVGITDIDLTDDERYLQRWLDAGHHGEMGFMAKHGTRRTRPEALIPGTVRLISVRLDYLPADVESAKVLGQPETAYVSRYAVGRDYHKLMRKRLATLAQWIEARTGPFGYRAFVDSAPVMERAIARKAGLGWVGKNAMLLNPKAGSLFFLGELYVDLPLPVDPPFEADHCGSCSACRTACPTGAIVADRVVDARACISYLTIELFGAIPEQYREAMGNRVFGCDDCQLVCPFTRFARATREADFAPRHDLDRASLVSLFGWGEEEFLDKTAGSPIRRIGYERWLRNLAVGLGNAPWSEAVEAALMARLSYPSDLVREHVRWALGRQREKRGRLIASQG

SEQ ID NO: 77196 - protein, 375 aa, Halomonas eurihalina
  misc_feature (1)..(375): tr|A0A5D9CLT7|A0A5D9CLT7_HALER Epoxyqueuosine reductase OS=Halomonas eurihalina OX=42566 GN=queG PE=3 SV=1
MSQPSAQGDASPDLQALAESIKTWGRELGFQQVGITDVDLAEDEARLQRWLDEGHHGEMHFMAKHGTKRTRPEELVPGTVRVISVRLDYLPPEVETTRMLARPEKAYVSRYAVGRDYHKLMRKRLATLAKQIQDEIGPFGYRAFVDSAPVMERALARKAGLGWVGKNAMILNPKAGSLFFLGELYTDLPLPVDPPYEGAHCGSCSACRTACPTDAIVEDGVVDSRRCISYLTIELHGAIPEEFRAAMGNRVFGCDDCQLVCPFTRFTRVSRERDFAPRHDLDRADLVSLFAWSEEEFLDKTAGSPIRRIGYERWLRNLAVGLGNAPRSESVESALRARLAYPSDLVREHVRWALERQREKRNDVIAVEASPLTQH

SEQ ID NO: 77197 - protein, 369 aa, Halomonas gudaonensis
  misc_feature (1)..(369): tr|A0A1G9ANS1|A0A1G9ANS1_9GAMM Epoxyqueuosine reductase OS=Halomonas gudaonensis OX=376427 GN=queG PE=3 SV=1
MSCVTCATDTDLSGLADTIKQWGRELGFQQVGITDIDLAEDERRLARWLDAGYQGEMGFMAKHGTKRTRPAELVPGTLRVISVRLDYLPAEVESAKVLGQPQTAYVSRYAVGRDYHKLMRKRLATLARWIENEAGPFGHRAFVDSAPVMERALGRKAGLGWVGKNAMLLNPRAGSLFFLGELYVDLPLPVDPPFEGDHCGSCSACRTACPTGAIVEDRVVDARACISYLTIELHGAIPERYREAMGNRVFGCDDCQLVCPFTRFTRASREPDFAPRHDLDRASLLSLFAWGEEEFLDKTAGSPIRRIGYARWLRNLAVGLGNAPWSEAVEAALRARLAYPSDLVREHVRWALARQREKRQQLIAVSREP

SEQ ID NO: 77198 - protein, 394 aa, Halomonas halmophila
  misc_feature (1)..(394): tr|A0A4Y4F0V2|A0A4Y4F0V2_9GAMM Epoxyqueuosine reductase OS=Halomonas halmophila OX=252 GN=queG PE=3 SV=1
MLSVSFSVPDAKRRGAILRGVFTIMSQPSAKDAATPDLEALASSIKTWGRELGFQQVGITDVDLAEDEVRLQRWLDLGYQGEMHFMAKHGTKRTRPEELVPGTLRVISVRLDYLPPEVETTRTLAQPEKAYISRYALGRDYHKLMRKRLGTLAKQIEAEIGPFGYRAFVDSAPVMERALARKAGIGWVGKNAMILNPQAGSLFFLGELYTDLPLPVDPPYAGAHCGSCSACRTACPTDAIVEDRVVDSRRCISYLTIELHGAIPEEFRAAMGNRVFGCDDCQLVCPFTRFTRVSDEPDFAPRHDLDRAELTRLFSWSEEEFLDKTAGSPIRRIGYERWLRNLAVGLGNAPWSERVESALRARLAYPSDLVREHVRWALAQQQQRRAGMIAVEAS

SEQ ID NO: 77199 - protein, 368 aa, Halomonas halophila
  misc_feature (1)..(368): tr|A0A510ZIQ1|A0A510ZIQ1_9GAMM Epoxyqueuosine reductase OS=Halomonas halophila OX=29573 GN=queG PE=3 SV=1
MTQPSPPGDAPDLTQLAERIKTWGRELGFQQVGIADVDLAEDEARLQRWLDAGHHGEMGFMAKHGTKRTRPAELEPGTVRVISVRLDYLPPEVETTKMLARPEKAYVSRYAVGRDYHKLMRKRLASLAKQIQAEIGPFGYRAFVDSAPVMERGLARKAGLGWFGKNAMLLNPKAGSLFFLGELYTDLPLPVDAPFETEHCGSCSACRTACPTDAIVEDKVVDARRCISYHTIELHGAIPEEFRAAMGNRVFGCDDCQLVCPFTRFTRASREADFAPRHDLDRADLVALFAWGEEEFLDRTAGSPIRRIGYERWLRNLAVGLGNAPWSETVEAALRARLAYPSDLVREHVRWALARQQEKKRNMIAVEA

SEQ ID NO: 77200 - protein, 368 aa, Halomonas heilongjiangensis
  misc_feature (1)..(368): tr|A0A2N7TM65|A0A2N7TM65_9GAMM Epoxyqueuosine reductase OS=Halomonas heilongjiangensis OX=1387883 GN=queG PE=3 SV=1
MSAPAPIPDTPPDLQALADRIRTWGRELGFQQVGITDTDLAEDEQRLARWLAAGHHGEMGFMAKHGTKRTRPAELVPGTLRVISVRLDYLPAEVETAKVLGEPSIAYVSRYATGRDYHKLMRKRLASLAQRIEAEAGPFGYRAFVDSAPVMERALARKAGLGWFGKNAMLLNPRAGSLFFLGELYTDLPLPVDEPFESDHCGSCSACRSACPTGAIVEDRVVDARACISYLTIELFGAIPERYREAMGNRVFGCDDCQLVCPFTRFTRVTREADFAPRHDLDRASLVSLFAWGEEEFLDRTAGSPIRRIGYERWLRNLAVGLGNAPWSVAVEAALMARLPYPSDLVREHVRWALARQRQKRRALIAST

SEQ ID NO: 77201 - protein, 366 aa, Halomonas huangheensis
  misc_feature (1)..(366): tr|W1N3V4|W1N3V4_9GAMM Epoxyqueuosine reductase OS=Halo monas huangheensis OX=1178482 GN=queG PE=3 SV=1
MPTPSAITDIDLGALADRIKSWGRELGFQQLGITDVDLAEDEQRLERWLADGHHGEMQFMAKHGRKRTRPAELEPGTVRVISARLDYLPPEVETTKVLGQPTRAYVSRYATGRDYHKLMRKRLQSLARMIEAEVGPFGYRAFVDSAPVMERALARKAGLGWFGKNAMLLNPKAGSLFFLGELYTDLPLPVDEPFEHEHCGSCSACRSACPTGAIVDDRIVDARACISYLTIELHGAIPEHYREAMGNRVFGCDDCQLVCPFTRFTRVSNEVDFAPRHDLDRASLLSLFGWSEEEFLERTAGSPIRRIGYERWLRNLAIGLGNAPWSRAVEAALLLRLAYPSDLVREHVRWALDRQRDKRQATIAVA

SEQ ID NO: 77202 - protein, 369 aa, Halomonas hydrothermalis
  misc_feature (1)..(369): tr|A0A291JYF5|A0A291JYF5_9GAMM Epoxyqueuosine reductase OS=Halomonas hydrothermalis OX=115561 GN=queG PE=3 SV= 1
MPPSSDFSLSAEQLQQLAERIKRWGRELGFQQVGITDTDLAVHERHLERWLEQGYQGDMGFMAKHGTKRTRPAELEPGTQRVISVRMDYLPADVATTKVLGQPQRAYVSRYALGRDYHKLMRKRLAQLARQIEQEVGAFGFRAFVDSAPVMERALAQKAGLGWFGKNAMLLNPQAGSLFFLGELYTDLPLPVDPPFEREHCGSCSACRTACPTGAIVDDKVVDSRKCVSYLTIELHGAIPVEYRRAMGNRVYGCDDCQLVCPFTRFTRPTQEQDFAPRHDLDRASLVTLFGWSEAEFLDKTAGSPIRRIGYERWLRNLAVGLGNAPWSRDVEAALWARRAYPSALVREHVVWALAEQHQKRGARIATQG

SEQ ID NO: 77203 - protein, 384 aa, Halomonas ilicicola
  misc_feature (1)..(384): tr|A0A1M4SC76|A0A1M4SC76_9GAMM Epoxyqueuosine reductase OS=Halomonas ilicicola DSM 19980 OX=1121942 GN=queG PE =3 SV=1
MTTRQLSQDIDLQALADRIKAWGRELGFQQVGITDIDLESHERHLEHWLAAGHQGEMDFMAKHGTKRTRPDELVPGTVRVISVRMDYLPPEVETTRVLGEPRKAYVSRYALGRDYHKLMRKRLATLARTIEDEIGPHGYRAFVDSAPVMERALAQKAGLGWFGKNSMLLNPRAGSLFFLGELYTDLPLPVDAPFEEEHCGSCAQCRIACPTGAIVDDKVVDSRRCISYLTIELHGSIPEEYREAMGNRVYGCDDCQLVCPFTRFTRASHEEDFSPRHDLDRADLLRLFAWSEEEFLLKTEGSAIRRIGYERWLRNLAVGLGNAPWSLGVEAALRARLAFPSDLVREHVRWALRRQGEKRQTLIASSAQALSCEPEAIMRRNVSR
